United States Patent Application Publication US 2024/0066114 A1 - sequence listing, part 15

SEQ ID NO: 19775 - RNA, 6113 nt, Artificial Sequence
  SARS-CoV-2__MT806104.1__non-structural protein 3 (NSP3) mRNA gc
aggagagucccgcagucggcguccagcggcucugcuuguucgugugugugucguugcaggccuuauucaagcuuaccauggcccccaccaaggugaccuucggcgacgacacggucaucgaggugcagggguacaagagcgugaacaucaccuucgagcuggacgagcgcaucgacaagguccucaacgagaagugcuccgccuacaccguggagcugggcaccgaggugaacgaguucgcgugcgucguggccgacgccgugaucaagacgcugcagccggucagcgagcuccugaccccccuggggaucgaccucgacgagugguccauggccaccuacuaccuguucgacgagagcggcgaguucaagcuggccucccacauguacugcagcuucuacccccccgacgaggacgaggaggagggggacugcgaggaggaggaguucgagccguccacccaguacgaguacggcacggaggacgacuaccagggcaagccccucgaguucggggcgaccagcgccgcccugcagcccgaggaggagcaggaggaggacuggcuggacgacgacucccagcagaccgugggccagcaggacgggagcgaggacaaccagaccacgaccauccagaccaucguggagguccagccccagcucgagauggagcugaccccgguggugcagacgaucgaggucaacuccuucagcggcuaccugaagcucaccgacaacguguacaucaagaacgccgacaucguggaggaggcgaagaaggucaagcccaccgugguggucaacgccgccaacguguaccugaagcacgggggcggcguggccggggcccugaacaaggcgaccaacaacgccaugcaggucgaguccgacgacuacaucgccacgaacggcccccucaagguggggggcagcugcguccuguccggccacaaccuggccaagcacugccuccacgugguggggcccaacgucaacaagggcgaggacauccagcugcugaagagcgccuacgagaacuucaaccagcacgaggugcuccuggcgccgcugcucuccgccgggaucuucggcgccgaccccauccacagccugcgggugugcgucgacaccgugcgcaccaacguguaccuggccgucuucgacaagaaccucuacgacaagcugguguccagcuuccuggagaugaagagcgagaagcagguggagcagaagaucgccgagauccccaaggaggaggucaagcccuucaucaccgaguccaagccgagcguggagcagcggaagcaggacgacaagaagaucaaggcgugcguggaggaggucacgaccacccucgaggagaccaaguuccugacggagaaccugcuccuguacaucgacaucaacgggaaccugcaccccgacuccgccacccucgugagcgacaucgacaucaccuuccugaagaaggacgcccccuacaucgugggcgacgucgugcaggagggcgugcugaccgccgucgugauccccacgaagaaggccgggggcaccaccgagaugcucgcgaaggcccugcgcaaggugccgaccgacaacuacaucacgaccuaccccgggcagggccugaacggguacaccgucgaggaggccaagaccgugcucaagaagugcaaguccgccuucuacauccugcccagcaucaucuccaacgagaagcaggagauccugggcaccgugagcuggaaccuccgggagaugcuggcgcacgccgaggagacgcgcaagcugaugcccgucugcguggagaccaaggccaucguguccaccauccagcggaaguacaagggcaucaagauccaggagggggucguggacuacggcgcccgcuucuacuucuacaccagcaagacgaccguggccucccugaucaacacccucaacgaccugaacgagacccuggucacgaugccgcucggguacgugacccacggccugaaccuggaggaggcggcccgguacaugcgcagccucaaggugcccgccaccgucuccgugagcucccccgacgccgugaccgccuacaacggguaccugacgagcuccagcaagacccccgaggagcacuucaucgagaccaucucccuggcgggcagcuacaaggacuggagcuacuccggccagagcacccagcucgggaucgaguuccugaagcggggcgacaaguccgucuacuacacgagcaacccgaccaccuuccaccuggacggggaggugaucaccuucgacaaccucaagacgcugcugucccuccgcgaggugcggaccaucaaggucuucaccaccguggacaacaucaaccugcacacgcagguggucgacaugagcaugaccuacggccagcaguucggccccaccuaccuggacggggccgacgugaccaagaucaagccccacaacucccacgagggcaagacguucuacgugcucccgaacgacgacacccugcgcgucgaggccuucgaguacuaccacaccaccgaccccagcuuccuggggcgguacauguccgcccucaaccacacgaagaaguggaaguacccccaggugaacggccugaccagcaucaagugggccgacaacaacugcuaccuggcgaccgcccuccugacccugcagcagaucgagcucaaguucaaccccccggcccugcaggacgccuacuaccgcgcgcgggccggggaggccgccaacuucugcgcccugauccucgcguacugcaacaagacggugggcgagcugggcgacguccgcgagaccauguccuaccuguuccagcacgccaaccucgacagcugcaagcgggugcugaacgucgugugcaagaccugcgggcagcagcagaccacccugaagggcguggaggccgucauguacauggggacgcucuccuacgagcaguucaagaagggcgugcagauccccugcaccugcgggaagcaggccaccaaguaccuggugcagcaggagagccccuucgucaugauguccgcccccccggcgcaguacgagcugaagcacggcaccuucacgugcgccagcgaguacaccggcaacuaccagugcgggcacuacaagcacaucaccuccaaggagacccucuacugcaucgacggcgcccugcugacgaagagcagcgaguacaaggggcccaucaccgacguguucuacaaggagaacuccuacaccaccacgaucaagcccgugaccuacaagcucgacggcgucgugugcaccgagaucgaccccaagcuggacaacuacuacaagaaggacaacagcuacuucaccgagcagccgaucgaccuggugcccaaccagcccuaccccaacgccuccuucgacaacuucaaguucgucugcgacaacaucaaguucgccgacgaccucaaccagcugacgggguacaagaagccggcgagccgcgagcugaaggugaccuucuuccccgaccucaacggcgacguggucgccaucgacuacaagcacuacacccccuccuucaagaagggcgccaagcugcugcacaagcccaucguguggcacgugaacaacgccaccaacaaggcgacguacaagccgaacaccuggugcauccggugccucuggagcaccaagcccgucgagaccuccaacagcuucgacgugcugaacuccgaggacgcccaggggauggacaaccuggccugcgaggaccucaagcccgugagcgaggaggucguggagaaccccacgauccagaaggacgugcuggagugcaacgucaagaccaccgagguggugggcgacaucauccugaagccggccaacaacucccucaagaucaccgaggaggucgggcacacggaccugauggccgcguacguggacaacagcucccugaccaucaagaagcccaacgagcucagccgcgugcugggccugaagacccucgccacccacgggcuggccgccgucaacuccgugcccugggacacgaucgccaacuacgcgaagccguuccugaacaagguggucagcaccaccaccaacaucgugacgcgcugccucaaccgggugugcaccaacuacaugcccuacuucuucacccugcugcuccagcugugcaccuucacccgcuccacgaacagccggaucaaggccuccaugcccaccaccaucgccaagaacaccgucaagagcgugggcaaguucugccuggaggccagcuucaacuaccucaagucccccaacuucagcaagcugaucaacaucaucaucugguuccugcuccuguccgugugccugggcagccucaucuacuccacggccgcgcuggggguccugaugagcaaccucggcaugccguccuacugcaccggguaccgcgagggcuaccugaacagcaccaacgugaccaucgccacguacugcaccggcuccauccccugcagcgugugccuguccgggcucgacagccuggacaccuaccccucccuggagaccauccagaucacgaucagcuccuucaagugggaccucaccgccuucggccuggucgccgagugguuccuggccuacauccucuucacccgguucuucuacgugcuggggcuggcggccaucaugcagcucuucuucagcuacuucgccgugcacuucaucuccaacagcuggcugauguggcugaucaucaaccugguccagauggcccccaucuccgcgauggugcgcauguacaucuucuucgccagcuucuacuacguguggaagagcuacguccacgugguggacggcugcaacuccagcaccugcaugaugugcuacaagcggaaccgcgccacgcgggucgagugcaccaccaucgugaacgggguccgccgguccuucuacguguacgccaacggcggcaagggguucugcaagcuccacaacuggaacugcgugaacugcgacaccuucugcgccggcagcacguucaucuccgacgaggucgcgcgcgaccugagccugcaguucaagcggccgaucaaccccaccgaccaguccagcuacaucguggacuccgugaccgucaagaacgggagcauccaccucuacuucgacaaggccggccagaagaccuacgagcgccacucccugagccacuucgugaaccuggacaaccuccgggccaacaacacgaaggggucccugcccaucaacgugaucgucuucgacggcaagagcaagugcgaggaguccagcgccaaguccgccagcguguacuacucccagcugaugugccagcccauccuccugcuggaccaggcgcucgugagcgacgucggcgacagcgccgagguggccgugaagauguucgacgccuacgucaacaccuucuccagcaccuucaacgugccgauggagaagcugaagacccugguggccacggcggaggccgagcucgccaagaacgucucccuggacaacgugcugagcaccuucaucuccgccgcgcgccagggguucguggacagcgacgucgagaccaaggacgugguggagugccucaagcugucccaccagagcgacaucgaggucaccggcgacuccugcaacaacuacaugcugacguacaacaagguggagaacaugaccccccgggaccucggggccugcaucgacugcagcgcccgccacaucaacgcccagguggccaagucccacaacaucgcgcugaucuggaacgucaaggacuucaugagccuguccgagcagcuccggaagcagauccgcagcgccgccaagaagaacaaccugcccuucaagcugaccugcgccaccacgcgccagguggugaacgucgugaccaccaagaucgcccucaagggcgggugaggacuagucccuguucccagagcccacuuuuuuuucuuuuuuugaaauaaaauagccugucuuucagaucucaaaggcucuuuucagagccaccaaaaaaaaaaaaaaaaaaaaaaaaaaaaaaaaaaaaaaaaaaaaaaaaaaaaaaaaaaaaaaaaaaaaaaaaaaaaaaaaaaaaaaaaaaaaaaaaaaaaa

SEQ ID NO: 19776 - RNA, 6113 nt, Artificial Sequence
  SARS-CoV-2__MT806765.1__non-structural protein 3 (NSP3) mRNA gc
aggagagucccgcagucggcguccagcggcucugcuuguucgugugugugucguugcaggccuuauucaagcuuaccauggcccccaccaaggugaccuucggcgacgacacggucaucgaggugcagggguacaagagcgugaacaucaccuucgagcuggacgagcgcaucgacaagguccucaacgagaagugcuccgccuacaccguggagcugggcaccgaggugaacgaguucgcgugcgucguggccgacgccgugaucaagacgcugcagccggucagcgagcuccugaccccccuggggaucgaccucgacgagugguccauggccaccuacuaccuguucgacgagagcggcgaguucaagcuggccucccacauguacugcagcuucuacccccccgacgaggacgaggaggagggggacugcgaggaggaggaguucgagccguccacccaguacgaguacggcacggaggacgacuaccagggcaagccccucgaguucggggcgaccagcgccgcccugcagcccgaggaggagcaggaggaggacuggcuggacgacgacucccagcagaccgugggccagcaggacgggagcgaggacaaccagaccacgaccauccagaccaucguggagguccagccccagcucgagauggagcugaccccgguggugcagacgaucgaggucaacuccuucagcggcuaccugaagcucaccgacaacguguacaucaagaacgccgacaucguggaggaggcgaagaaggucaagcccaccgugguggucaacgccgccaacguguaccugaagcacgggggcggcguggccggggcccugaacaaggcgaccaacaacgccaugcaggucgaguccgacgacuacaucgccacgaacggcccccucaagguggggggcagcugcguccuguccggccacaaccuggccaagcacugccuccacgugguggggcccaacgucaacaagggcgaggacauccagcugcugaagagcgccuacgagaacuucaaccagcacgaggugcuccuggcgccgcugcucuccgccgggaucuucggcgccgaccccauccacagccugcgggugugcgucgacaccgugcgcaccaacguguaccuggccgucuucgacaagaaccucuacgacaagcugguguccagcuuccuggagaugaagagcgagaagcagguggagcagaagaucgccgagauccccaaggaggaggucaagcccuucaucaccgaguccaagccgagcguggagcagcggaagcaggacgacaagaagaucaaggcgugcguggaggaggucacgaccacccucgaggagaccaaguuccugacggagaaccugcuccuguacaucgacaucaacgggaaccugcaccccgacuccgccacccucgugagcgacaucgacaucaccuuccugaagaaggacgcccccuacaucgugggcgacgucgugcaggagggcgugcugaccgccgucgugauccccacgaagaaggccgggggcaccaccgagaugcucgcgaaggcccugcgcaaggugccgaccgacaacuacaucacgaccuaccccgggcagggccugaacggguacaccgucgaggaggccaagaccgugcucaagaagugcaaguccgccuucuacauccugcccagcaucaucuccaacgagaagcaggagauccugggcaccgugagcuggaaccuccgggagaugcuggcgcacgccgaggagacgcgcaagcugaugcccgucugcguggagaccaaggccaucguguccaccauccagcggaaguacaagggcaucaagauccaggagggggucguggacuacggcgcccgcuucuacuucuacaccagcaagacgaccguggccucccugaucaacacccucaacgaccugaacgagacccuggucacgaugccgcucggguacgugacccacggccugaaccuggaggaggcggcccgguacaugcgcagccucaaggugcccgccaccgucuccgugagcucccccgacgccgugaccgccuacaacggguaccugacgagcuccagcaagacccccgaggagcacuucaucgagaccaucucccuggcgggcagcuacaaggacuggagcuacuccggccagagcacccagcucgggaucgaguuccugaagcggggcgacaaguccgucuacuacacgagcaacccgaccaccuuccaccuggacggggaggugaucaccuucgacaaccucaagacgcugcugucccuccgcgaggugcggaccaucaaggucuucaccaccguggacaacaucaaccugcacacgcagguggucgacaugagcaugaccuacggccagcaguucggccccaccuaccuggacggggccgacgugaccaagaucaagccccacaacucccacgagggcaagacguucuacgugcucccgaacgacgacacccugcgcgucgaggccuucgaguacuaccacaccaccgaccccagcuuccuggggcgguacauguccgcccucaaccacacgaagaaguggaaguacccccaggugaacggccugaccagcaucaagugggccgacaacaacugcuaccuggcgaccgcccuccugacccugcagcagaucgagcucaaguucaaccccccggcccugcaggacgccuacuaccgcgcgcgggccggggaggccgccaacuucugcgcccugauccucgcguacugcaacaagacggugggcgagcugggcgacguccgcgagaccauguccuaccuguuccagcacgccaaccucgacagcugcaagcgggugcugaacgucgugugcaagaccugcgggcagcagcagaccacccugaagggcguggaggccgucauguacauggggacgcucuccuacgagcaguucaagaagggcgugcagauccccugcaccugcgggaagcaggccaccaaguaccuggugcagcaggagagccccuucgucaugauguccgcccccccggcgcaguacgagcugaagcacggcaccuucacgugcgccagcgaguacaccggcaacuaccagugcgggcacuacaagcacaucaccuccaaggagacccucuacugcaucgacggcgcccugcugacgaagagcagcgaguacaaggggcccaucaccgacguguucuacaaggagaacuccuacaccaccacgaucaagcccgugaccuacaagcucgacggcgucgugugcaccgagaucgaccccaagcuggacaacuacuacaagaaggacaacagcuacuucaccgagcagccgaucgaccuggugcccaaccagcccuaccccaacgccuccuucgacaacuucaaguucgucugcgacaacaucaaguucgccgacgaccucaaccagcugacgggguacaagaagccggcgagccgcgagcugaaggugaccuucuuccccgaccucaacggcgacguggucgccaucgacuacaagcacuacacccccuccuucaagaagggcgccaagcugcugcacaagcccaucguguggcacgugaacaacgccaccaacaaggcgacguacaagccgaacaccuggugcauccggugccucuggagcaccaagcccgucgagaccuccaacagccuggacgugcugaaguccgaggacgcccaggggauggacaaccucgccugcgaggaccugaagcccgugagcgaggaggucguggagaaccccacgauccagaaggacgugcuggagugcaacgucaagaccaccgagguggugggcgacaucauccucaagccggccaacaacucccugaagaucaccgaggaggucgggcacacggaccugauggccgcguacguggacaacagcucccucaccaucaagaagcccaacgagcugagccgcgugcugggccucaagacccuggccacccacgggcuggccgccgucaacuccgugcccugggacacgaucgccaacuacgcgaagccguuccucaacaagguggucagcaccaccaccaacaucgugacgcgcugccugaaccgggugugcaccaacuacaugcccuacuucuucacccugcuccugcagcugugcaccuucacccgcuccacgaacagccggaucaaggccuccaugcccaccaccaucgccaagaacaccgucaagagcgugggcaaguucugccucgaggccagcuucaacuaccugaagucccccaacuucagcaagcugaucaacaucaucaucugguuccuccugcuguccgugugccucggcagccugaucuacuccacggccgcgcuggggguccucaugagcaaccugggcaugccguccuacugcaccggguaccgcgagggcuaccugaacagcaccaacgugaccaucgccacguacugcaccggcuccauccccugcagcgugugccucuccgggcuggacagccuggacaccuaccccucccucgagaccauccagaucacgaucagcuccuucaagugggaccugaccgccuucggccuggucgccgagugguuccucgccuacauccuguucacccgguucuucuacgugcuggggcucgcggccaucaugcagcuguucuucagcuacuucgccgugcacuucaucuccaacagcuggcugauguggcugaucaucaaccucguccagauggcccccaucuccgcgauggugcgcauguacaucuucuucgccagcuucuacuacguguggaagagcuacguccacgugguggacggcugcaacuccagcaccugcaugaugugcuacaagcggaaccgcgccacgcgggucgagugcaccaccaucgugaacgggguccgccgguccuucuacguguacgccaacggcggcaagggguucugcaagcugcacaacuggaacugcgugaacugcgacaccuucugcgccggcagcacguucaucuccgacgaggucgcgcgcgaccugagccuccaguucaagcggccgaucaaccccaccgaccaguccagcuacaucguggacuccgugaccgucaagaacgggagcauccaccuguacuucgacaaggccggccagaagaccuacgagcgccacucccugagccacuucgugaaccucgacaaccugcgggccaacaacacgaaggggucccugcccaucaacgugaucgucuucgacggcaagagcaagugcgaggaguccagcgccaaguccgccagcguguacuacucccagcucaugugccagcccauccugcugcucgaccaggcgcuggugagcgacgucggcgacagcgccgagguggccgugaagauguucgacgccuacgucaacaccuucuccagcaccuucaacgugccgauggagaagcugaagacccucguggccacggcggaggccgagcuggccaagaacgucucccuggacaacgugcucagcaccuucaucuccgccgcgcgccagggguucguggacagcgacgucgagaccaaggacgugguggagugccugaagcugucccaccagagcgacaucgaggucaccggcgacuccugcaacaacuacaugcucacguacaacaagguggagaacaugaccccccgggaccugggggccugcaucgacugcagcgcccgccacaucaacgcccagguggccaagucccacaacaucgcgcugaucuggaacgucaaggacuucaugagccucuccgagcagcugcggaagcagauccgcagcgccgccaagaagaacaaccugcccuucaagcucaccugcgccaccacgcgccagguggugaacgucgugaccaccaagaucgcccugaagggcgggugaggacuagucccuguucccagagcccacuuuuuuuucuuuuuuugaaauaaaauagccugucuuucagaucucaaaggcucuuuucagagccaccaaaaaaaaaaaaaaaaaaaaaaaaaaaaaaaaaaaaaaaaaaaaaaaaaaaaaaaaaaaaaaaaaaaaaaaaaaaaaaaaaaaaaaaaaaaaaaaaaaaaa

SEQ ID NO: 19777 - RNA, 6113 nt, Artificial Sequence
  SARS-CoV-2__MT806772.1__non-structural protein 3 (NSP3) mRNA gc
aggagagucccgcagucggcguccagcggcucugcuuguucgugugugugucguugcaggccuuauucaagcuuaccauggcccccaccaaggugaccuucggcgacgacacggucaucgaggugcagggguacaagagcgugaacaucaccuucgagcuggacgagcgcaucgacaagguccucaacgagaagugcuccgccuacaccguggagcugggcaccgaggugaacgaguucgcgugcgucguggccgacgccgugaucaagacgcugcagccggucagcgagcuccugaccccccuggggaucgaccucgacgagugguccauggccaccuacuaccuguucgacgagagcggcgaguucaagcuggccucccacauguacugcagcuucuacccccccgacgaggacgaggaggagggggacugcgaggaggaggaguucgagccguccacccaguacgaguacggcacggaggacgacuaccagggcaagccccucgaguucggggcgaccagcgccgcccugcagcccgaggaggagcaggaggaggacuggcuggacgacgacucccagcagaccgugggccagcaggacgggagcgaggacaaccagaccacgaccauccagaccaucguggagguccagccccagcucgagauggagcugaccccgguggugcagacgaucgaggucaacuccuucagcggcuaccugaagcucaccgacaacguguacaucaagaacgccgacaucguggaggaggcgaagaaggucaagcccaccgugguggucaacgccgccaacguguaccugaagcacgggggcggcguggccggggcccugaacaaggcgaccaacaacgccaugcaggucgaguccgacgacuacaucgccacgaacggcccccucaagguggggggcagcugcguccuguccggccacaaccuggccaagcacugccuccacgugguggggcccaacgucaacaagggcgaggacauccagcugcugaagagcgccuacgagaacuucaaccagcacgaggugcuccuggcgccgcugcucuccgccgggaucuucggcgccgaccccauccacagccugcgggugugcgucgacaccgugcgcaccaacguguaccuggccgucuucgacaagaaccucuacgacaagcugguguccagcuuccuggagaugaagagcgagaagcagguggagcagaagaucgccgagauccccaaggaggaggucaagcccuucaucaccgaguccaagccgagcguggagcagcggaagcaggacgacaagaagaucaaggcgugcguggaggaggucacgaccacccucgaggagaccaaguuccugacggagaaccugcuccuguacaucgacaucaacgggaaccugcaccccgacuccgccacccucgugagcgacaucgacaucaccuuccugaagaaggacgcccccuacaucgugggcgacgucgugcaggagggcgugcugaccgccgucgugauccccacgaagaaggccgggggcaccaccgagaugcucgcgaaggcccugcgcaaggugccgaccgacaacuacaucacgaccuaccccgggcagggccugaacggguacaccgucgaggaggccaagaccgugcucaagaagugcaaguccgccuucuacauccugcccagcaucaucuccaacgagaagcaggagauccugggcaccgugagcuggaaccuccgggagaugcuggcgcacgccgaggagacgcgcaagcugaugcccgucugcguggagaccaaggccaucguguccaccauccagcggaaguacaagggcaucaagauccaggagggggucguggacuacggcgcccgcuucuacuucuacaccagcaagacgaccguggccucccugaucaacacccucaacgaccugaacgagacccuggucacgaugccgcucggguacgugacccacggccugaaccuggaggaggcggcccgguacaugcgcagccucaaggugcccgccaccgucuccgugagcucccccgacgccgugaccgccuacaacggguaccugacgagcuccagcaagacccccgaggagcacuucaucgagaccaucucccuggcgggcagcuacaaggacuggagcuacuccggccagagcacccagcucgggaucgaguuccugaagcggggcgacaaguccgucuacuacacgagcaacccgaccaccuuccaccuggacggggaggugaucaccuucgacaaccucaagacgcugcugucccuccgcgaggugcggaccaucaaggucuucaccaccguggacaacaucaaccugcacacgcagguggucgacaugagcaugaccuacggccagcaguucggccccaccuaccuggacggggccgacgugaccaagaucaagccccacaacucccacgagggcaagacguucuacgugcucccgaacgacgacacccugcgcgucgaggccuucgaguacuaccacaccaccgaccccagcuuccuggggcgguacauguccgcccucaaccacacgaagaaguggaaguacccccaggugaacggccugaccagcaucaagugggccgacaacaacugcuaccuggcgaccgcccuccugacccugcagcagaucgagcucaaguucaaccccccggcccugcaggacgccuacuaccgcgcgcgggccggggaggccgccaacuucugcgcccugauccucgcguacugcaacaagacggugggcgagcugggcgacguccgcgagaccauguccuaccuguuccagcacgccaaccucgacagcugcaagcgggugcugaacgucgugugcaagaccugcgggcagcagcagaccacccugaagggcguggaggccgucauguacauggggacgcucuccuacgagcaguucaagaagggcgugcagauccccugcaccugcgggaagcaggccaccaaguaccuggugcagcaggagagccccuucgucaugauguccgcccccccggcgcaguacgagcugaagcacggcaccuucacgugcgccagcgaguacaccggcaacuaccagugcgggcacuacaagcacaucaccuccaaggagacccucuacugcaucgacggcgcccugcugacgaagagcagcgaguacaaggggcccaucaccgacguguucuacaaggagaacuccuacaccaccacgaucaagcccgugaccuacaagcucgacggcgucgugugcaccgagaucgaccccaagcuggacaacuacuacaagaaggacaacagcuacuucaccgagcagccgaucgaccuggugcccaaccagcccuaccccaacgccuccuucgacaacuucaaguucgucugcgacaacaucaaguucgccgacgaccucaaccagcugacgggguacaagaagccggcgagccgcgagcugaaggugaccuucuuccccgaccucaacggcgacguggucgccaucgacuacaagcacuacacccccuccuucaagaagggcgccaagcugcugcacaagcccaucguguggcacgugaacaacgccaccaacaaggcgacguacaagccgaacaccuggugcauccggugccucuggagcaccaagcccgucgagaccuccaacagcuucgacgugcugaaguccgaggacgcccaggggauggacaaccuggccugcgaggaccucaagcccgugagcgaggaggucguggagaaccccacgauccagaaggacgugcuggagugcaacgucaagaccaccgagguggugggcgacaucauccugaagccggccaacaacucccucaagaucaccgaggaggucgggcacacggaccugauggccgcguacguggacaacagcucccugaccaucaagaagcccaacgagcucagccgcgugcugggccugaagauccucgccacccacgggcuggccgccgucaacuccgugcccugggacaccaucgccaacuacgcgaagccguuccugaacaagguggucagcacgaccaccaacaucgugacccgcugccucaaccgggugugcacgaacuacaugcccuacuucuucacccugcugcuccagcugugcaccuucacccgcuccaccaacagccggaucaaggccuccaugcccacgaccaucgccaagaacaccgucaagagcgugggcaaguucugccuggaggccagcuucaacuaccucaagucccccaacuucagcaagcugaucaacaucaucaucugguuccugcuccuguccgugugccugggcagccucaucuacuccaccgccgcgcuggggguccugaugagcaaccucggcaugccguccuacugcacgggguaccgcgagggcuaccugaacagcaccaacgugaccaucgccaccuacugcacgggcuccauccccugcagcgugugccuguccgggcucgacagccuggacaccuaccccucccuggagaccauccagaucaccaucagcuccuucaagugggaccucacggccuucggccuggucgccgagugguuccuggccuacauccucuucacccgguucuucuacgugcuggggcuggcggccaucaugcagcucuucuucagcuacuucgccgugcacuucaucuccaacagcuggcugauguggcugaucaucaaccugguccagauggcccccaucuccgcgauggugcgcauguacaucuucuucgccagcuucuacuacguguggaagagcuacguccacgugguggacggcugcaacuccagcaccugcaugaugugcuacaagcggaaccgcgccacccgggucgagugcacgaccaucgugaacgggguccgccgguccuucuacguguacgccaacggcggcaagggguucugcaagcuccacaacuggaacugcgugaacugcgacaccuucugcgccggcagcaccuucaucuccgacgaggucgcgcgcgaccugagccugcaguucaagcggccgaucaaccccacggaccaguccagcuacaucguggacuccgugaccgucaagaacgggagcauccaccucuacuucgacaaggccggccagaagaccuacgagcgccacucccugagccacuucgugaaccuggacaaccuccgggccaacaacaccaaggggucccugcccaucaacgugaucgucuucgacggcaagagcaagugcgaggaguccagcgccaaguccgccagcguguacuacucccagcugaugugccagcccauccuccugcuggaccaggcgcucgugagcgacgucggcgacagcgccgagguggccgugaagauguucgacgccuacgucaacacguucuccagcaccuucaacgugccgauggagaagcugaagacccugguggccaccgcggaggccgagcucgccaagaacgucucccuggacaacgugcugagcacguucaucuccgccgcgcgccagggguucguggacagcgacgucgagaccaaggacgugguggagugccucaagcugucccaccagagcgacaucgaggucaccggcgacuccugcaacaacuacaugcugaccuacaacaagguggagaacaugacgccccgggaccucggggccugcaucgacugcagcgcccgccacaucaacgcccagguggccaagucccacaacaucgcgcugaucuggaacgucaaggacuucaugagccuguccgagcagcuccggaagcagauccgcagcgccgccaagaagaacaaccugcccuucaagcugaccugcgccaccacccgccagguggugaacgucgugacgaccaagaucgcccucaagggcgggugaggacuagucccuguucccagagcccacuuuuuuuucuuuuuuugaaauaaaauagccugucuuucagaucucaaaggcucuuuucagagccaccaaaaaaaaaaaaaaaaaaaaaaaaaaaaaaaaaaaaaaaaaaaaaaaaaaaaaaaaaaaaaaaaaaaaaaaaaaaaaaaaaaaaaaaaaaaaaaaaaaaaa

SEQ ID NO: 19778 - RNA, 6113 nt, Artificial Sequence
  SARS-CoV-2__MT806773.1__non-structural protein 3 (NSP3) mRNA gc
aggagagucccgcagucggcguccagcggcucugcuuguucgugugugugucguugcaggccuuauucaagcuuaccauggcccccaccaaggugaccuucggcgacgacacggucaucgaggugcagggguacaagagcgugaacaucaccuucgagcuggacgagcgcaucgacaagguccucaacgagaagugcuccgccuacaccguggagcugggcaccgaggugaacgaguucgcgugcgucguggccgacgccgugaucaagacgcugcagccggucagcgagcuccugaccccccuggggaucgaccucgacgagugguccauggccaccuacuaccuguucgacgagagcggcgaguucaagcuggccucccacauguacugcagcuucuacccccccgacgaggacgaggaggagggggacugcgaggaggaggaguucgagccguccacccaguacgaguacggcacggaggacgacuaccagggcaagccccucgaguucggggcgaccagcgccgcccugcagcccgaggaggagcaggaggaggacuggcuggacgacgacucccagcagaccgugggccagcaggacgggagcgaggacaaccagaccacgaccauccagaccaucguggagguccagccccagcucgagauggagcugaccccgguggugcagacgaucgaggucaacuccuucagcggcuaccugaagcucaccgacaacguguacaucaagaacgccgacaucguggaggaggcgaagaaggucaagcccaccgugguggucaacgccgccaacguguaccugaagcacgggggcggcguggccggggcccugaacaaggcgaccaacaacgccaugcaggucgaguccgacgacuacaucgccacgaacggcccccucaagguggggggcagcugcguccuguccggccacaaccuggccaagcacugccuccacgugguggggcccaacgucaacaagggcgaggacauccagcugcugaagagcgccuacgagaacuucaaccagcacgaggugcuccuggcgccgcugcucuccgccgggaucuucggcgccgaccccauccacagccugcgggugugcgucgacaccgugcgcaccaacguguaccuggccgucuucgacaagaaccucuacgacaagcugguguccagcuuccuggagaugaagagcgagaagcagguggagcagaagaucgccgagauccccaaggaggaggucaagcccuucaucaccgaguccaagccgagcguggagcagcggaagcaggacgacaagaagaucaaggcgugcguggaggaggucacgaccacccucgaggagaccaaguuccugacggagaaccugcuccuguacaucgacaucaacgggaaccugcaccccgacuccgccacccucgugagcgacaucgacaucaccuuccugaagaaggacgcccccuacaucgugggcgacgucgugcaggagggcgugcugaccgccgucgugauccccacgaagaaggccgggggcaccaccgagaugcucgcgaaggcccugcgcaaggugccgaccgacaacuacaucacgaccuaccccgggcagggccugaacggguacaccgucgaggaggccaagaccgugcucaagaagugcaaguccgccuucuacauccugcccagcaucaucuccaacgagaagcaggagauccugggcaccgugagcuggaaccuccgggagaugcuggcgcacgccgaggagacgcgcaagcugaugcccgucugcguggagaccaaggccaucguguccaccauccagcggaaguacaagggcaucaagauccaggagggggucguggacuacggcgcccgcuucuacuucuacaccagcaagacgaccguggccucccugaucaacacccucaacgaccugaacgagacccuggucacgaugccgcucggguacgugacccacggccugaaccuggaggaggcggcccgguacaugcgcagccucaaggugcccgccaccgucuccgugagcucccccgacgccgugaccgccuacaacggguaccugacgagcuccagcaagacccccgaggagcacuucaucgagaccaucucccuggcgggcagcuacaaggacuggagcuacuccggccagagcacccagcucgggaucgaguuccugaagcggggcgacaaguccgucuacuacacgagcaacccgaccaccuuccaccuggacggggaggugaucaccuucgacaaccucaagacgcugcugucccuccgcgaggugcggaccaucaaggucuucaccaccguggacaacaucaaccugcacacgcagguggucgacaugagcaugaccuacggccagcaguucggccccaccuaccuggacggggccgacgugaccaagaucaagccccacaacucccacgagggcaagacguucuacgugcucccgaacgacgacacccugcgcgucgaggccuucgaguacuaccacaccaccgaccccagcuuccuggggcgguacauguccgcccucaaccacacgaagaaguggaaguacccccaggugaacggccugaccagcaucaagugggccgacaacaacugcuaccuggcgaccgcccuccugacccugcagcagaucgagcucaaguucaaccccccggcccugcaggacgccuacuaccgcgcgcgggccggggaggccgccaacuucugcgcccugauccucgcguacugcaacaagacggugggcgagcugggcgacguccgcgagaccauguccuaccuguuccagcacgccaaccucgacagcugcaagcgggugcugaacgucgugugcaagaccugcgggcagcagcagaccacccugaagggcguggaggccgucauguacauggggacgcucuccuacgagcaguucaagaagggcgugcagauccccugcaccugcgggaagcaggccaccaaguaccuggugcagcaggagagccccuucgucaugauguccgcccccccggcgcaguacgagcugaagcacggcaccuucacgugcgccagcgaguacaccggcaacuaccagugcgggcacuacaagcacaucaccuccaaggagacccucuacugcaucgacggcgcccugcugacgaagagcagcgaguacaaggggcccaucaccgacguguucuacaaggagaacuccuacaccaccacgaucaagcccgugaccuacaagcucgacggcgucgugugcaccgagaucgaccccaagcuggacaacuacuacaagaaggacaacagcuacuucaccgagcagccgaucgaccuggugcccaaccagcccuaccccaacgccuccuucgacaacuucaaguucgucugcgacaacaucaaguucgccgacgaccucaaccagcugacgggguacaagaagccggcgagccgcgagcugaaggugaccuucuuccccgaccucaacggcgacguggucgccaucgacuacaagcacuacacccccuccuucaagaagggcgccaagcugcugcacaagcccaucguguggcacgugaacaacgccaccaacaaggcgacguacaagccgaacaccuggugcauccggugccucuggagcaucaagcccgucgagaccuccaacagcuucgacgugcugaaguccgaggacgcccaggggauggacaaccuggccugcgaggaccucaagcccgugagcgaggaggucguggagaaccccaccauccagaaggacgugcuggagugcaacgucaagacgaccgagguggugggcgacaucauccugaagccggccaacaacucccucaagaucaccgaggaggucgggcacaccgaccugauggccgcguacguggacaacagcucccugacgaucaagaagcccaacgagcucagccgcgugcugggccugaagacccucgccacccacgggcuggccgccgucaacuccgugcccugggacaccaucgccaacuacgcgaagccguuccugaacaagguggucagcacgaccaccaacaucgugacccgcugccucaaccgggugugcacgaacuacaugcccuacuucuucacccugcugcuccagcugugcaccuucacccgcuccaccaacagccggaucaaggccuccaugcccacgaccaucgccaagaacaccgucaagagcgugggcaaguucugccuggaggccagcuucaacuaccucaagucccccaacuucagcaagcugaucaacaucaucaucugguuccugcuccuguccgugugccugggcagccucaucuacuccaccgccgcgcuggggguccugaugagcaaccucggcaugccguccuacugcacgggguaccgcgagggcuaccugaacagcaccaacgugaccaucgccaccuacugcacgggcuccauccccugcagcgugugccuguccgggcucgacagccuggacaccuaccccucccuggagaccauccagaucaccaucagcuccuucaagugggaccucacggccuucggccuggucgccgagugguuccuggccuacauccucuucacccgguucuucuacgugcuggggcuggcggccaucaugcagcucuucuucagcuacuucgccgugcacuucaucuccaacagcuggcugauguggcugaucaucaaccugguccagauggcccccaucuccgcgauggugcgcauguacaucuucuucgccagcuucuacuacguguggaagagcuacguccacgugguggacggcugcaacuccagcaccugcaugaugugcuacaagcggaaccgcgccacccgggucgagugcacgaccaucgugaacgggguccgccgguccuucuacguguacgccaacggcggcaagggguucugcaagcuccacaacuggaacugcgugaacugcgacaccuucugcgccggcagcaccuucaucuccgacgaggucgcgcgcgaccugagccugcaguucaagcggccgaucaaccccacggaccaguccagcuacaucguggacuccgugaccgucaagaacgggagcauccaccucuacuucgacaaggccggccagaagaccuacgagcgccacucccugagccacuucgugaaccuggacaaccuccgggccaacaacaccaaggggucccugcccaucaacgugaucgucuucgacggcaagagcaagugcgaggaguccagcgccaaguccgccagcguguacuacucccagcugaugugccagcccauccuccugcuggaccaggcgcucgugagcgacgucggcgacagcgccgagguggccgugaagauguucgacgccuacgucaacacguucuccagcaccuucaacgugccgauggagaagcugaagacccugguggccaccgcggaggccgagcucgccaagaacgucucccuggacaacgugcugagcacguucaucuccgccgcgcgccagggguucguggacagcgacgucgagaccaaggacgugguggagugccucaagcugucccaccagagcgacaucgaggucaccggcgacuccugcaacaacuacaugcugaccuacaacaagguggagaacaugacgccccgggaccucggggccugcaucgacugcagcgcccgccacaucaacgcccagguggccaagucccacaacaucgcgcugaucuggaacgucaaggacuucaugagccuguccgagcagcuccggaagcagauccgcagcgccgccaagaagaacaaccugcccuucaagcugaccugcgccaccacccgccagguggugaacgucgugacgaccaagaucgcccucaagggcgggugaggacuagucccuguucccagagcccacuuuuuuuucuuuuuuugaaauaaaauagccugucuuucagaucucaaaggcucuuuucagagccaccaaaaaaaaaaaaaaaaaaaaaaaaaaaaaaaaaaaaaaaaaaaaaaaaaaaaaaaaaaaaaaaaaaaaaaaaaaaaaaaaaaaaaaaaaaaaaaaaaaaaa

SEQ ID NO: 19779 - RNA, 6113 nt, Artificial Sequence
  SARS-CoV-2__MT806774.1__non-structural protein 3 (NSP3) mRNA gc
aggagagucccgcagucggcguccagcggcucugcuuguucgugugugugucguugcaggccuuauucaagcuuaccauggcccccaccaaggugaccuucggcgacgacacggucaucgaggugcagggguacaagagcgugaacaucaccuucgagcuggacgagcgcaucgacaagguccucaacgagaagugcuccgccuacaccguggagcugggcaccgaggugaacgaguucgcgugcgucguggccgacgccgugaucaagacgcugcagccggucagcgagcuccugaccccccuggggaucgaccucgacgagugguccauggccaccuacuaccuguucgacgagagcggcgaguucaagcuggccucccacauguacugcagcuucuacccccccgacgaggacgaggaggagggggacugcgaggaggaggaguucgagccguccacccaguacgaguacggcacggaggacgacuaccagggcaagccccucgaguucggggcgaccagcgccgcccugcagcccgaggaggagcaggaggaggacuggcuggacgacgacucccagcagaccgugggccagcaggacgggagcgaggacaaccagaccacgaccauccagaccaucguggagguccagccccagcucgagauggagcugaccccgguggugcagacgaucgaggucaacuccuucagcggcuaccugaagcucaccgacaacguguacaucaagaacgccgacaucguggaggaggcgaagaaggucaagcccaccgugguggucaacgccgccaacguguaccugaagcacgggggcggcguggccggggcccugaacaaggcgaccaacaacgccaugcaggucgaguccgacgacuacaucgccacgaacggcccccucaagguggggggcagcugcguccuguccggccacaaccuggccaagcacugcuuccacgugguggggcccaacgucaacaagggcgaggacauccagcuccugaagagcgccuacgagaacuucaaccagcacgaggugcugcucgcgccgcugcuguccgccgggaucuucggcgccgaccccauccacagccuccgggugugcgucgacaccgugcgcaccaacguguaccuggccgucuucgacaagaaccuguacgacaagcucguguccagcuuccuggagaugaagagcgagaagcagguggagcagaagaucgccgagauccccaaggaggaggucaagcccuucaucaccgaguccaagccgagcguggagcagcggaagcaggacgacaagaagaucaaggcgugcguggaggaggucacgaccacccuggaggagaccaaguuccucacggagaaccugcugcucuacaucgacaucaacgggaaccugcaccccgacuccgccacccuggugagcgacaucgacaucaccuuccucaagaaggacgcccccuacaucgugggcgacgucgugcaggagggcgugcugaccgccgucgugauccccacgaagaaggccgggggcaccaccgagaugcuggcgaaggcccuccgcaaggugccgaccgacaacuacaucacgaccuaccccgggcagggccugaacggguacaccgucgaggaggccaagaccgugcugaagaagugcaaguccgccuucuacauccuccccagcaucaucuccaacgagaagcaggagauccugggcaccgugagcuggaaccugcgggagaugcucgcgcacgccgaggagacgcgcaagcugaugcccgucugcguggagaccaaggccaucguguccaccauccagcggaaguacaagggcaucaagauccaggagggggucguggacuacggcgcccgcuucuacuucuacaccagcaagacgaccguggccucccugaucaacacccugaacgaccucaacgagacccuggucacgaugccgcugggguacgugacccacggccucaaccuggaggaggcggcccgguacaugcgcagccugaaggugcccgccaccgucuccgugagcucccccgacgccgugaccgccuacaacggguaccucacgagcuccagcaagacccccgaggagcacuucaucgagaccaucucccuggcgggcagcuacaaggacuggagcuacuccggccagagcacccagcuggggaucgaguuccucaagcggggcgacaaguccgucuacuacacgagcaacccgaccaccuuccaccuggacggggaggugaucaccuucgacaaccugaagacgcuccugucccugcgcgaggugcggaccaucaaggucuucaccaccguggacaacaucaaccuccacacgcagguggucgacaugagcaugaccuacggccagcaguucggccccaccuaccuggacggggccgacgugaccaagaucaagccccacaacucccacgagggcaagacguucuacgugcugccgaacgacgacacccuccgcgucgaggccuucgaguacuaccacaccaccgaccccagcuuccuggggcgguacauguccgcccugaaccacacgaagaaguggaaguacccccaggugaacggccucaccagcaucaagugggccgacaacaacugcuaccuggcgaccgcccugcucacccugcagcagaucgagcugaaguucaaccccccggcccuccaggacgccuacuaccgcgcgcgggccggggaggccgccaacuucugcgcccugauccuggcguacugcaacaagacggugggcgagcucggcgacguccgcgagaccauguccuaccuguuccagcacgccaaccuggacagcugcaagcgggugcucaacgucgugugcaagaccugcgggcagcagcagaccacccugaagggcguggaggccgucauguacauggggacgcuguccuacgagcaguucaagaagggcgugcagauccccugcaccugcgggaagcaggccaccaaguaccucgugcagcaggagagccccuucgucaugauguccgcccccccggcgcaguacgagcugaagcacggcaccuucacgugcgccagcgaguacaccggcaacuaccagugcgggcacuacaagcacaucaccuccaaggagacccuguacugcaucgacggcgcccuccugacgaagagcagcgaguacaaggggcccaucaccgacguguucuacaaggagaacuccuacaccaccacgaucaagcccgugaccuacaagcuggacggcgucgugugcaccgagaucgaccccaagcucgacaacuacuacaagaaggacaacagcuacuucaccgagcagccgaucgaccuggugcccaaccagcccuaccccaacgccuccuucgacaacuucaaguucgucugcgacaacaucaaguucgccgacgaccugaaccagcucacgggguacaagaagccggcgagccgcgagcugaaggugaccuucuuccccgaccugaacggcgacguggucgccaucgacuacaagcacuacacccccuccuucaagaagggcgccaagcuccugcacaagcccaucguguggcacgugaacaacgccaccaacaaggcgacguacaagccgaacaccuggugcauccggugccuguggagcaccaagcccgucgagaccuccaacagcuucgacgugcucaaguccgaggacgcccaggggauggacaaccuggccugcgaggaccugaagcccgugagcgaggaggucguggagaaccccacgauccagaaggacgugcucgagugcaacgucaagaccaccgagguggugggcgacaucauccugaagccggccaacaacucccugaagaucaccgaggaggucgggcacacggaccucauggccgcguacguggacaacagcucccugaccaucaagaagcccaacgagcugagccgcgugcucggccugaagacccuggccacccacgggcucgccgccgucaacuccgugcccugggacacgaucgccaacuacgcgaagccguuccugaacaagguggucagcaccaccaccaacaucgugacgcgcugccugaaccgggugugcaccaacuacaugcccuacuucuucacccuccugcugcagcucugcaccuucacccgcuccacgaacagccggaucaaggccuccaugcccaccaccaucgccaagaacaccgucaagagcgugggcaaguucugccuggaggccagcuucaacuaccugaagucccccaacuucagcaagcucaucaacaucaucaucugguuccugcugcucuccgugugccugggcagccugaucuacuccacggccgcgcucgggguccugaugagcaaccugggcaugccguccuacugcaccggguaccgcgagggcuaccucaacagcaccaacgugaccaucgccacguacugcaccggcuccauccccugcagcgugugccuguccgggcuggacagccucgacaccuaccccucccuggagaccauccagaucacgaucagcuccuucaagugggaccugaccgccuucggccucgucgccgagugguuccuggccuacauccuguucacccgguucuucuacgugcucgggcuggcggccaucaugcagcuguucuucagcuacuucgccgugcacuucaucuccaacagcuggcucauguggcugaucaucaaccugguccagauggcccccaucuccgcgauggugcgcauguacaucuucuucgccagcuucuacuacguguggaagagcuacguccacgugguggacggcugcaacuccagcaccugcaugaugugcuacaagcggaaccgcgccacgcgggucgagugcaccaccaucgugaacgggguccgccgguccuucuacguguacgccaacggcggcaagggguucugcaagcugcacaacuggaacugcgugaacugcgacaccuucugcgccggcagcacguucaucuccgacgaggucgcgcgcgaccucagccugcaguucaagcggccgaucaaccccaccgaccaguccagcuacaucguggacuccgugaccgucaagaacgggagcauccaccuguacuucgacaaggccggccagaagaccuacgagcgccacucccucagccacuucgugaaccuggacaaccugcgggccaacaacacgaaggggucccuccccaucaacgugaucgucuucgacggcaagagcaagugcgaggaguccagcgccaaguccgccagcguguacuacucccagcugaugugccagcccauccugcuccuggaccaggcgcuggugagcgacgucggcgacagcgccgagguggccgugaagauguucgacgccuacgucaacaccuucuccagcaccuucaacgugccgauggagaagcucaagacccugguggccacggcggaggccgagcuggccaagaacgucucccucgacaacgugcugagcaccuucaucuccgccgcgcgccagggguucguggacagcgacgucgagaccaaggacgugguggagugccugaagcucucccaccagagcgacaucgaggucaccggcgacuccugcaacaacuacaugcugacguacaacaagguggagaacaugaccccccgggaccugggggccugcaucgacugcagcgcccgccacaucaacgcccagguggccaagucccacaacaucgcgcucaucuggaacgucaaggacuucaugagccuguccgagcagcugcggaagcagauccgcagcgccgccaagaagaacaaccuccccuucaagcugaccugcgccaccacgcgccagguggugaacgucgugaccaccaagaucgcccugaagggcgggugaggacuagucccuguucccagagcccacuuuuuuuucuuuuuuugaaauaaaauagccugucuuucagaucucaaaggcucuuuucagagccaccaaaaaaaaaaaaaaaaaaaaaaaaaaaaaaaaaaaaaaaaaaaaaaaaaaaaaaaaaaaaaaaaaaaaaaaaaaaaaaaaaaaaaaaaaaaaaaaaaaaaa

SEQ ID NO: 19780 - RNA, 6113 nt, Artificial Sequence
  SARS-CoV-2__MT806787.1__non-structural protein 3 (NSP3) mRNA gc
aggagagucccgcagucggcguccagcggcucugcuuguucgugugugugucguugcaggccuuauucaagcuuaccauggcccccaccaaggugaccuucggcgacgacacggucaucgaggugcagggguacaagagcgugaacaucaccuucgagcuggacgagcgcaucgacaagguccucaacgagaagugcuccgccuacaccguggagcugggcaccgaggugaacgaguucgcgugcgucguggccgacgccgugaucaagacgcugcagccggucagcgagcuccugaccccccuggggaucgaccucgacgagugguccauggccaccuacuaccuguucgacgagagcggcgaguucaagcuggccucccacauguacugcagcuucuacccccccgacgaggacgaggaggagggggacugcgaggaggaggaguucgagccguccacccaguacgaguacggcacggaggacgacuaccagggcaagccccucgaguucggggcgaccagcgccgcccugcagcccgaggaggagcaggaggaggacuggcuggacgacgacucccagcagaccgugggccagcaggacgggagcgaggacaaccagaccacgaccauccagaccaucguggagguccagccccagcucgagauggagcugaccccgguggugcagacgaucgaggucaacuccuucagcggcuaccugaagcucaccgacaacguguacaucaagaacgccgacaucguggaggaggcgaagaaggucaagcccaccgugguggucaacgccgccaacguguaccugaagcacgggggcggcguggccggggcccugaacaaggcgaccaacaacgccaugcaggucgaguccgacgacuacaucgccacgaacggcccccucaagguggggggcagcugcguccuguccggccacaaccuggccaagcacugccuccacgugguggggcccaacgucaacaagggcgaggacauccagcugcugaagagcgccuacgagaacuucaaccagcacgaggugcuccuggcgccgcugcucuccgccgggaucuucggcgccgaccccauccacagccugcgggugugcgucgacaccgugcgcaccaacguguaccuggccgucuucgacaagaaccucuacgacaagcugguguccagcuuccuggagaugaagagcgagaagcagguggagcagaagaucgccgagauccccaaggaggaggucaagcccuucaucaccgaguccaagccgagcguggagcagcggaagcaggacgacaagaagaucaaggcgugcguggaggaggucacgaccacccucgaggagaccaaguuccugacggagaaccugcuccuguacaucgacaucaacgggaaccugcaccccgacuccgccacccucgugagcgacaucgacaucaccuuccugaagaaggacgcccccuacaucgugggcgacgucgugcaggagggcgugcugaccgccgucgugauccccacgaagaaggccgggggcaccaccgagaugcucgcgaaggcccugcgcaaggugccgaccgacaacuacaucacgaccuaccccgggcagggccugaacggguacaccgucgaggaggccaagaccgugcucaagaagugcaaguccgccuucuacauccugcccagcaucaucuccaacgagaagcaggagauccugggcaccgugagcuggaaccuccgggagaugcuggcgcacgccgaggagacgcgcaagcugaugcccgucugcguggagaccaaggccaucguguccaccauccagcggaaguacaagggcaucaagauccaggagggggucguggacuacggcgcccgcuucuacuucuacaccagcaagacgaccguggccucccugaucaacacccucaacgaccugaacgagacccuggucacgaugccgcucggguacgugacccacggccugaaccuggaggaggcggcccgguacaugcgcagccucaaggugcccgccaccgucuccgugagcucccccgacgccgugaccgccuacaacggguaccugacgagcuccagcaagacccccgaggagcacuucaucgagaccaucucccuggcgggcagcuacaaggacuggagcuacuccggccagagcacccagcucgggaucgaguuccugaagcggggcgacaaguccgucuacuacacgagcaacccgaccaccuuccaccuggacggggaggugaucaccuucgacaaccucaagacgcugcugucccuccgcgaggugcggaccaucaaggucuucaccaccguggacaacaucaaccugcacacgcagguggucgacaugagcaugaccuacggccagcaguucggccccaccuaccuggacggggccgacgugaccaagaucaagccccacaacucccacgagggcaagacguucuacgugcucccgaacgacgacacccugcgcgucgaggccuucgaguacuaccacaccaccgaccccagcuuccuggggcgguacauguccgcccucaaccacacgaagaaguggaaguacccccaggugaacggccugaccagcaucaagugggccgacaacaacugcuaccuggcgaccgcccuccugacccugcagcagaucgagcucaaguucaaccccccggcccugcaggacgccuacuaccgcgcgcgggccggggaggccgccaacuucugcgcccugauccucgcguacugcaacaagacggugggcgagcugggcgacguccgcgagaccauguccuaccuguuccagcacgccaaccucgacagcugcaagcgggugcugaacgucgugugcaagaccugcgggcagcagcagaccacccugaagggcguggaggccgucauguacauggggacgcucuccuacgagcaguucaagaagggcgugcagauccccugcaccugcgggaagcaggccaccaaguaccuggugcagcaggagagccccuucgucaugauguccgcccccccggcgcaguacgagcugaagcacggcaccuucacgugcgccagcgaguacaccggcaacuaccagugcgggcacuacaagcacaucaccuccaaggagacccucuacugcaucgacggcgcccugcugacgaagagcagcgaguacaaggggcccaucaccgacguguucuacaaggagaacuccuacaccaccacgaucaagcccgugaccuacaagcucgacggcgucgugugcaccgagaucgaccccaagcuggacaacuacuacaagaaggacaacagcuacuucaccgagcagccgaucgaccuggugcccaaccagcccuaccccaacgccuccuucgacaacuucaaguucgucugcgacaacaucaaguucgccgacgaccucaaccagcugacgggguacaagaagccggcgagccgcgagcugaaggugaccuucuuccccgaccucaacggcgacguggucgccaucgacuacaagcacuacacccccuccuucaagaagggcgccaagcugcugcacaagcccaucguguggcacgugaacaacgccaccaacaaggcgacguacaagccgaacaccuggugcauccggugccucuggagcaccaagcccgucgagaccuccaacagcuucgacgugcugaaguccgaggacgcccaggggauggacaaccuggccugcgaggaccucaagcccgugagcgaggaggucguggagaaccccacgauccagaaggacgugcuggagugcaacgucaagaccaccgagguggugggcgacaucauccugaagccggccaacaacucccucaagaucaccgaggaggucgggcacacggaccugauggccgcguacguggacaacagcucccugaccaucaagaagcccaacgagcucagccgcgugcugggccugaagacccucgccacccacgggcuggccgccgucaacuccgugcccugggacacgaucgccaacuacgcgaagccguuccugaacaagguggucagcaccaccaccaacaucgugacgcgcugccucaaccgggugugcaccaacuacaugcccuacuucuucacccugcugcuccagcugugcaccuucacccgcuccacgaacagccggaucaaggccuccaugcccaccaccaucgccaagaacaccgucaagagcgugggcaaguucugccuggaggccagcuucaacuaccucaagucccccaacuucagcaagcugaucaacaucaucaucugguuccugcuccuguccgugugccugggcagccucaucuacuccacggccgcgcuggggguccugaugagcaaccucggcaugccguccuacugcaccggguaccgcgagggcuaccugaacagcaccaacgugaccaucgccacguacugcaccggcuccauccccugcagcgugugccuguccgggcucgacagccuggacaccuaccccucccuggagaccauccagaucacgaucagcuccuucaagugggaccucaccgccuucggccuggucgccgagugguuccuggccuacauccucuucacccgguucuucuacgugcuggggcuggcggccaucaugcagcucuucuucagcuacuucgccgugcacuucaucuccaacagcuggcugauguggcugaucaucaaccugguccagauggcccccaucuccgcgauggugcgcauguacaucuucuucgccagcuucuacuacguguggaagagcuacguccacgugguggacggcugcaacuccagcaccugcaugaugugcuacaagcggaaccgcgccacgcgggucgagugcaccaccaucgugaacgggguccgccgguccuucuacguguacgccaacggcggcaagggguucugcaagcuccacaacuggaacugcgugaacugcgacaccuucugcgccggcagcacguucaucuccgacgaggucgcgcgcgaccugagccugcaguucaagcggccgaucaaccccaccgaccaguccagcuacaucguggacuccgugaccgucaagaacgggagcauccaccucuacuucgacaaggccggccagaagaccuacgagcgccacucccugagccacuucgugaaccuggacaaccuccgggccaacaacacgaaggggucccugcccaucaacgugaucguccuggacggcaagagcaagugcgaggaguccagcgccaaguccgccagcguguacuacucccagcucaugugccagcccauccugcugcucgaccaggcgcuggugagcgacgucggcgacagcgccgagguggccgugaagauguucgacgccuacgucaacaccuucuccagcaccuucaacgugccgauggagaagcugaagacccucguggccacggcggaggccgagcuggccaagaacgucucccuggacaacgugcucagcaccuucaucuccgccgcgcgccagggguucguggacagcgacgucgagaccaaggacgugguggagugccugaagcugucccaccagagcgacaucgaggucaccggcgacuccugcaacaacuacaugcucacguacaacaagguggagaacaugaccccccgggaccugggggccugcaucgacugcagcgcccgccacaucaacgcccagguggccaagucccacaacaucgcgcugaucuggaacgucaaggacuucaugagccucuccgagcagcugcggaagcagauccgcagcgccgccaagaagaacaaccugcccuucaagcucaccugcgccaccacgcgccagguggugaacgucgugaccaccaagaucgcccugaagggcgggugaggacuagucccuguucccagagcccacuuuuuuuucuuuuuuugaaauaaaauagccugucuuucagaucucaaaggcucuuuucagagccaccaaaaaaaaaaaaaaaaaaaaaaaaaaaaaaaaaaaaaaaaaaaaaaaaaaaaaaaaaaaaaaaaaaaaaaaaaaaaaaaaaaaaaaaaaaaaaaaaaaaaa

SEQ ID NO: 19781 - RNA, 6113 nt, Artificial Sequence
  SARS-CoV-2__MT806789.1__non-structural protein 3 (NSP3) mRNA gc
aggagagucccgcagucggcguccagcggcucugcuuguucgugugugugucguugcaggccuuauucaagcuuaccauggcccccaccaaggugaccuucggcgacgacacggucaucgaggugcagggguacaagagcgugaacaucaccuucgagcuggacgagcgcaucgacaagguccucaacgagaagugcuccgccuacaccguggagcugggcaccgaggugaacgaguucgcgugcgucguggccgacgccgugaucaagacgcugcagccggucagcgagcuccugaccccccuggggaucgaccucgacgagugguccauggccaccuacuaccuguucgacgagagcggcgaguucaagcuggccucccacauguacugcagcuucuacccccccgacgaggacgaggaggagggggacugcgaggaggaggaguucgagccguccacccaguacgaguacggcacggaggacgacuaccagggcaagccccucgaguucggggcgaccagcgccgcccugcagcccgaggaggagcaggaggaggacuggcuggacgacgacucccagcagaccgugggccagcaggacgggagcgaggacaaccagaccacgaccauccagaccaucguggagguccagccccagcucgagauggagcugaccccgguggugcagacgaucgaggucaacuccuucagcggcuaccugaagcucaccgacaacguguacaucaagaacgccgacaucguggaggaggcgaagaaggucaagcccaccgugguggucaacgccgccaacguguaccugaagcacgggggcggcguggccggggcccugaacaaggcgaccaacaacgccaugcaggucgaguccgacgacuacaucgccacgaacggcccccucaagguggggggcagcugcguccuguccggccacaaccuggccaagcacugccuccacgugguggggcccaacgucaacaagggcgaggacauccagcugcugaagagcgccuacgagaacuucaaccagcacgaggugcuccuggcgccgcugcucuccgccgggaucuucggcgccgaccccauccacagccugcgggugugcgucgacaccgugcgcaccaacguguaccuggccgucuucgacaagaaccucuacgacaagcugguguccagcuuccuggagaugaagagcgagaagcagguggagcagaagaucgccgagauccccaaggaggaggucaagcccuucaucaccgaguccaagccgagcguggagcagcggaagcaggacgacaagaagaucaaggcgugcguggaggaggucacgaccacccucgaggagaccaaguuccugacggagaaccugcuccuguacaucgacaucaacgggaaccugcaccccgacuccgccacccucgugagcgacaucgacaucaccuuccugaagaaggacgcccccuacaucgugggcgacgucgugcaggagggcgugcugaccgccgucgugauccccacgaagaaggccgggggcaccaccgagaugcucgcgaaggcccugcgcaaggugccgaccgacaacuacaucacgaccuaccccgggcagggccugaacggguacaccgucgaggaggccaagaccgugcucaagaagugcaaguccgccuucuacauccugcccagcaucaucuccaacgagaagcaggagauccugggcaccgugagcuggaaccuccgggagaugcuggcgcacgccgaggagacgcgcaagcugaugcccgucugcguggagaccaaggccaucguguccaccauccagcggaaguacaagggcaucaagauccaggagggggucguggacuacggcgcccgcuucuacuucuacaccagcaagacgaccguggccucccugaucaacacccucaacgaccugaacgagacccuggucacgaugccgcucggguacgugacccacggccugaaccuggaggaggcggcccgguacaugcgcagccucaaggugcccgccaccgucuccgugagcucccccgacgccgugaccgccuacaacggguaccugacgagcuccagcaagacccccgaggagcacuucaucgagaccaucucccuggcgggcagcuacaaggacuggagcuacuccggccagagcacccagcucgggaucgaguuccugaagcggggcgacaaguccgucuacuacacgagcaacccgaccaccuuccaccuggacggggaggugaucaccuucgacaaccucaagacgcugcugucccuccgcgaggugcggaccaucaaggucuucaccaccguggacaacaucaaccugcacacgcacguggucgacaugagcaugaccuacggccagcaguucggccccaccuaccuggacggggccgacgugaccaagaucaagccccacaacucccacgagggcaagacguucuacgugcucccgaacgacgacacccugcgcgucgaggccuucgaguacuaccacaccaccgaccccagcuuccuggggcgguacauguccgcccucaaccacacgaagaaguggaaguacccccaggugaacggccugaccagcaucaagugggccgacaacaacugcuaccuggcgaccgcccuccugacccugcagcagaucgagcucaaguucaaccccccggcccugcaggacgccuacuaccgcgcgcgggccggggaggccgccaacuucugcgcccugauccucgcguacugcaacaagacggugggcgagcugggcgacguccgcgagaccauguccuaccuguuccagcacgccaaccucgacagcugcaagcgggugcugaacgucgugugcaagaccugcgggcagcagcagaccacccugaagggcguggaggccgucauguacauggggacgcucuccuacgagcaguucaagaagggcgugcagauccccugcaccugcgggaagcaggccaccaaguaccuggugcagcaggagagccccuucgucaugauguccgcccccccggcgcaguacgagcugaagcacggcaccuucacgugcgccagcgaguacaccggcaacuaccagugcgggcacuacaagcacaucaccuccaaggagacccucuacugcaucgacggcgcccugcugacgaagagcagcgaguacaaggggcccaucaccgacguguucuacaaggagaacuccuacaccaccacgaucaagcccgugaccuacaagcucgacggcgucgugugcaccgagaucgaccccaagcuggacaacuacuacaagaaggacaacagcuacuucaccgagcagccgaucgaccuggugcccaaccagcccuaccccaacgccuccuucgacaacuucaaguucgucugcgacaacaucaaguucgccgacgaccucaaccagcugacgggguacaagaagccggcgagccgcgagcugaaggugaccuucuuccccgaccucaacggcgacguggucgccaucgacuacaagcacuacacccccuccuucaagaagggcgccaagcugcugcacaagcccaucguguggcacgugaacaacgccaccaacaaggcgacguacaagccgaacaccuggugcauccggugccucuggagcaccaagcccgucgagaccuccaacagcuucgacgugcugaaguccgaggacgcccaggggauggacaaccuggccugcgaggaccucaagcccgugagcgaggaggucguggagaaccccacgauccagaaggacgugcuggagugcaacgucaagaccaccgagguggugggcgacaucauccugaagccggccaacaacucccucaagaucaccgaggaggucgggcacacggaccugauggccgcguacguggacaacagcucccugaccaucaagaagcccaacgagcucagccgcgugcugggccugaagacccucgccacccacgggcuggccgccgucaacuccgugcccugggacacgaucgccaacuacgcgaagccguuccugaacaagguggucagcaccaccaccaacaucgugacgcgcugccucaaccgggugugcaccaacuacaugcccuacuucuucacccugcugcuccagcugugcaccuucacccgcuccacgaacagccggaucaaggccuccaugcccaccaccaucgccaagaacaccgucaagagcgugggcaaguucugccuggaggccagcuucaacuaccucaagucccccaacuucagcaagcugaucaacaucaucaucugguuccugcuccuguccgugugccugggcagccucaucuacuccacggccgcgcuggggguccugaugagcaaccucggcaugccguccuacugcaccggguaccgcgagggcuaccugaacagcaccaacgugaccaucgccacguacugcaccggcuccauccccugcagcgugugccuguccgggcucgacagccuggacaccuaccccucccuggagaccauccagaucacgaucagcuccuucaagugggaccucaccgccuucggccuggucgccgagugguuccuggccuacauccucuucacccgguucuucuacgugcuggggcuggcggccaucaugcagcucuucuucagcuacuucgccgugcacuucaucuccaacagcuggcugauguggcugaucaucaaccugguccagauggcccccaucuccgcgauggugcgcauguacaucuucuucgccagcuucuacuacguguggaagagcuacguccacgugguggacggcugcaacuccagcaccugcaugaugugcuacaagcggaaccgcgccacgcgggucgagugcaccaccaucgugaacgggguccgccgguccuucuacguguacgccaacggcggcaagggguucugcaagcuccacaacuggaacugcgugaacugcgacaccuucugcgccggcagcacguucaucuccgacgaggucgcgcgcgaccugagccugcaguucaagcggccgaucaaccccaccgaccaguccagcuacaucguggacuccgugaccgucaagaacgggagcauccaccucuacuucgacaaggccggccagaagaccuacgagcgccacucccugagccacuucgugaaccuggacaaccuccgggccaacaacacgaaggggucccugcccaucaacgugaucgucuucgacggcaagagcaagugcgaggaguccagcgccaaguccgccagcguguacuacucccagcugaugugccagcccauccuccugcuggaccaggcgcucgugagcgacgucggcgacagcgccgagguggccgugaagauguucgacgccuacgucaacaccuucuccagcaccuucaacgugccgauggagaagcugaagacccugguggccacggcggaggccgagcucgccaagaacgucucccuggacaacgugcugagcaccuucaucuccgccgcgcgccagggguucguggacagcgacgucgagaccaaggacgugguggagugccucaagcugucccaccagagcgacaucgaggucaccggcgacuccugcaacaacuacaugcugacguacaacaagguggagaacaugaccccccgggaccucggggccugcaucgacugcagcgcccgccacaucaacgcccagguggccaagucccacaacaucgcgcugaucuggaacgucaaggacuucaugagccuguccgagcagcuccggaagcagauccgcagcgccgccaagaagaacaaccugcccuucaagcugaccugcgccaccacgcgccagguggugaacgucgugaccaccaagaucgcccucaagggcgggugaggacuagucccuguucccagagcccacuuuuuuuucuuuuuuugaaauaaaauagccugucuuucagaucucaaaggcucuuuucagagccaccaaaaaaaaaaaaaaaaaaaaaaaaaaaaaaaaaaaaaaaaaaaaaaaaaaaaaaaaaaaaaaaaaaaaaaaaaaaaaaaaaaaaaaaaaaaaaaaaaaaaa

SEQ ID NO: 19782 - RNA, 6113 nt, Artificial Sequence
  SARS-CoV-2__MT806792.1__non-structural protein 3 (NSP3) mRNA gc
aggagagucccgcagucggcguccagcggcucugcuuguucgugugugugucguugcaggccuuauucaagcuuaccauggcccccaccaaggugaccuucggcgacgacacggucaucgaggugcagggguacaagagcgugaacaucaccuucgagcuggacgagcgcaucgacaagguccucaacgagaagugcuccgccuacaccguggagcugggcaccgaggugaacgaguucgcgugcgucguggccgacgccgugaucaagacgcugcagccggucagcgagcuccugaccccccuggggaucgaccucgacgagugguccauggccaccuacuaccuguucgacgagagcggcgaguucaagcuggccucccacauguacugcagcuucuacccccccgacgaggacgaggaggagggggacugcgaggaggaggaguucgagccguccacccaguacgaguacggcacggaggacgacuaccagggcaagccccucgaguucggggcgaccagcgccgcccugcagcccgaggaggagcaggaggaggacuggcuggacgacgacucccagcagaccgugggccagcaggacgggagcgaggacaaccagaccacgaccauccagaccaucguggagguccagccccagcucgagauggagcugaccccgguggugcagacgaucgaggucaacuccuucagcggcuaccugaagcucaccgacaacguguacaucaagaacgccgacaucguggaggaggcgaagaaggucaagcccaccgugguggucaacgccgccaacguguaccugaagcacgggggcggcguggccggggcccugaacaaggcgaccaacaacgccaugcaggucgaguccgacgacuacaucgccacgaacggcccccucaagguggggggcagcugcguccuguccggccacaaccuggccaagcacugccuccacgugguggggcccaacgucaacaagggcgaggacauccagcugcugaagagcgccuacgagaacuucaaccagcacgaggugcuccuggcgccgcugcucuccgccgggaucuucggcgccgaccccauccacagccugcgggugugcgucgacaccgugcgcaccaacguguaccuggccgucuucgacaagaaccucuacgacaagcugguguccagcuuccuggagaugaagagcgagaagcagguggagcagaagaucgccgagauccccaaggaggaggucaagcccuucaucaccgaguccaagccgagcguggagcagcggaagcaggacgacaagaagaucaaggcgugcguggaggaggucacgaccacccucgaggagaccaaguuccugacggagaaccugcuccuguacaucgacaucaacgggaaccugcaccccgacuccgccacccucgugagcgacaucgacaucaccuuccugaagaaggacgcccccuacaucgugggcgacgucgugcaggagggcgugcugaccgccgucgugauccccacgaagaaggccgggggcaccaccgagaugcucgcgaaggcccugcgcaaggugccgaccgacaacuacaucacgaccuaccccgggcagggccugaacggguacaccgucgaggaggccaagaccgugcucaagaagugcaaguccgccuucuacauccugcccagcaucaucuccaacgagaagcaggagauccugggcaccgugagcuggaaccuccgggagaugcuggcgcacgccgaggagacgcgcaagcugaugcccgucugcguggagaccaaggccaucguguccaccauccagcggaaguacaagggcaucaagauccaggagggggucguggacuacggcgcccgcuucuacuucuacaccagcaagacgaccguggccucccugaucaacacccucaacgaccugaacgagacccuggucacgaugccgcucggguacgugacccacggccugaaccuggaggaggcggcccgguacaugcgcagccucaaggugcccgccaccgucuccgugagcucccccgacgccgugaccgccuacaacggguaccugacgagcuccagcaagacccccgaggagcacuucaucgagaccaucucccuggcgggcagcuacaaggacuggagcuacuccggccagagcacccagcucgggaucgaguuccugaagcggggcgacaaguccgucuacuacacgagcaacccgaccaccuuccaccuggacggggaggugaucaccuucgacaaccucaagacgcugcugucccuccgcgaggugcggaccaucaaggucuucaccaccguggacaacaucaaccugcacacgcagguggucgacaugagcaugaccuacggccagcaguucggccccaccuaccuggacggggccgacgugaccaagaucaagccccacaacucccacgagggcaagacguucuacgugcucccgaacgacgacacccugcgcgucgaggccuucgaguacuaccacaccaccgaccccagcuuccuggggcgguacauguccgcccucaaccacacgaagaaguggaaguacccccaggugaacggccugaccagcaucaagugggccgacaacaacugcuaccuggcgaccgcccuccugacccugcagcagaucgagcucaaguucaaccccccggcccugcaggacgccuacuaccgcgcgcgggccggggaggccgccaacuucugcgcccugauccucgcguacugcaacaagacggugggcgagcugggcgacguccgcgagaccauguccuaccuguuccagcacgccaaccucgacagcugcaagcgggugcugaacgucgugugcaagaccugcgggcagcagcagaccacccugaagggcguggaggccgucauguacauggggacgcucuccuacgagcaguucaagaagggcgugcagauccccugcaccugcgggaagcaggccaccaaguaccuggugcagcaggagagccccuucgucaugauguccgcccccccggcgcaguacgagcugaagcacggcaccuucacgugcgccagcgaguacaccggcaacuaccagugcgggcacuacaagcacaucaccuccaaggagacccucuacugcaucgacggcgcccugcugacgaagagcagcgaguacaaggggcccaucaccgacguguucuacaaggagaacuccuacaccaccacgaucaagcccgugaccuacaagcucgacggcgucgugugcaccgagaucgaccccaagcuggacaacuacuacaagaaggacaacagcuacuucaccgagcagccgaucgaccuggugcccaaccagcccuaccccaacgccuccuucgacaacuucaaguucgucugcgacaacaucaaguucgccgacgaccucaaccagcugacgggguacaagaagccggcgagccgcgagcugaaggugaccuucuuccccgaccucaacggcgacguggucgccaucgacuacaagcacuacacccccuccuucaagaagggcgccaagcugcugcacaagcccaucguguggcacgugaacaacgccaucaacaaggcgaccuacaagccgaacacguggugcauccggugccucuggagcaccaagcccgucgagaccuccaacagcuucgacgugcugaaguccgaggacgcccaggggauggacaaccuggccugcgaggaccucaagcccgugagcgaggaggucguggagaaccccaccauccagaaggacgugcuggagugcaacgucaagacgaccgagguggugggcgacaucauccugaagccggccaacaacucccucaagaucaccgaggaggucgggcacaccgaccugauggccgcguacguggacaacagcucccugacgaucaagaagcccaacgagcucagccgcgugcugggccugaagacccucgccacccacgggcuggccgccgucaacuccgugcccugggacaccaucgccaacuacgcgaagccguuccugaacaagguggucagcacgaccaccaacaucgugacccgcugccucaaccgggugugcacgaacuacaugcccuacuucuucacccugcugcuccagcugugcaccuucacccgcuccaccaacagccggaucaaggccuccaugcccacgaccaucgccaagaacaccgucaagagcgugggcaaguucugccuggaggccagcuucaacuaccucaagucccccaacuucagcaagcugaucaacaucaucaucugguuccugcuccuguccgugugccugggcagccucaucuacuccaccgccgcgcuggggguccugaugagcaaccucggcaugccguccuacugcacgggguaccgcgagggcuaccugaacagcaccaacgugaccaucgccaccuacugcacgggcuccauccccugcagcgugugccuguccgggcucgacagccuggacaccuaccccucccuggagaccauccagaucaccaucagcuccuucaagugggaccucacggccuucggccuggucgccgagugguuccuggccuacauccucuucacccgguucuucuacgugcuggggcuggcggccaucaugcagcucuucuucagcuacuucgccgugcacuucaucuccaacagcuggcugauguggcugaucaucaaccugguccagauggcccccaucuccgcgauggugcgcauguacaucuucuucgccagcuucuacuacguguggaagagcuacguccacgugguggacggcugcaacuccagcaccugcaugaugugcuacaagcggaaccgcgccacccgggucgagugcacgaccaucgugaacgggguccgccgguccuucuacguguacgccaacggcggcaagggguucugcaagcuccacaacuggaacugcgugaacugcgacaccuucugcgccggcagcaccuucaucuccgacgaggucgcgcgcgaccugagccugcaguucaagcggccgaucaaccccacggaccaguccagcuacaucguggacuccgugaccgucaagaacgggagcauccaccucuacuucgacaaggccggccagaagaccuacgagcgccacucccugagccacuucgugaaccuggacaaccuccgggccaacaacaccaaggggucccugcccaucaacgugaucgucuucgacggcaagagcaagugcgaggaguccagcgccaaguccgccagcguguacuacucccagcugaugugccagcccauccuccugcuggaccaggcgcucgugagcgacgucggcgacagcgccgagguggccgugaagauguucgacgccuacgucaacacguucuccagcaccuucaacgugccgauggagaagcugaagacccugguggccaccgcggaggccgagcucgccaagaacgucucccuggacaacgugcugagcacguucaucuccgccgcgcgccagggguucguggacagcgacgucgagaccaaggacgugguggagugccucaagcugucccaccagagcgacaucgaggucaccggcgacuccugcaacaacuacaugcugaccuacaacaagguggagaacaugacgccccgggaccucggggccugcaucgacugcagcgcccgccacaucaacgcccagguggccaagucccacaacaucgcgcugaucuggaacgucaaggacuucaugagccuguccgagcagcuccggaagcagauccgcagcgccgccaagaagaacaaccugcccuucaagcugaccugcgccaccacccgccagguggugaacgucgugacgaccaagaucgcccucaagggcgggugaggacuagucccuguucccagagcccacuuuuuuuucuuuuuuugaaauaaaauagccugucuuucagaucucaaaggcucuuuucagagccaccaaaaaaaaaaaaaaaaaaaaaaaaaaaaaaaaaaaaaaaaaaaaaaaaaaaaaaaaaaaaaaaaaaaaaaaaaaaaaaaaaaaaaaaaaaaaaaaaaaaaa

SEQ ID NO: 19783 - RNA, 6113 nt, Artificial Sequence
  SARS-CoV-2__MT806798.1__non-structural protein 3 (NSP3) mRNA gc
aggagagucccgcagucggcguccagcggcucugcuuguucgugugugugucguugcaggccuuauucaagcuuaccauggcccccaccaaggugaccuucggcgacgacacggucaucgaggugcagggguacaagagcgugaacaucaccuucgagcuggacgagcgcaucgacaagguccucaacgagaagugcuccgccuacaccguggagcugggcaccgaggugaacgaguucgcgugcgucguggccgacgccgugaucaagacgcugcagccggucagcgagcuccugaccccccuggggaucgaccucgacgagugguccauggccaccuacuaccuguucgacgagagcggcgaguucaagcuggccucccacauguacugcagcuucuacccccccgacgaggacgaggaggagggggacugcgaggaggaggaguucgagccguccacccaguacgaguacggcacggaggacgacuaccagggcaagccccucgaguucggggcgaccagcgccgcccugcagcccgaggaggagcaggaggaggacuggcuggacgacgacucccagcagaccgugggccagcaggacgggagcgaggacaaccagaccacgaccauccagaccaucguggagguccagccccagcucgagauggagcugaccccgguggugcagacgaucgaggucaacuccuucagcggcuaccugaagcucaccgacaacguguacaucaagaacgccgacaucguggaggaggcgaagaaggucaagcccaccgugguggucaacgccgccaacguguaccugaagcacgggggcggcguggccggggcccugaacaaggcgaccaacaacgccaugcaggucgaguccgacgacuacaucgccacgaacggcccccucaagguggggggcagcugcguccuguccggccacaaccuggccaagcacugccuccacgugguggggcccaacgucaacaagggcgaggacauccagcugcugaagagcgccuacgagaacuucaaccagcacgaggugcuccuggcgccgcugcucuccgccgggaucuucggcgccgaccccauccacagccugcgggugugcgucgacaccgugcgcaccaacguguaccuggccgucuucgacaagaaccucuacgacaagcugguguccagcuuccuggagaugaagagcgagaagcagguggagcagaagaucgccgagauccccaaggaggaggucaagcccuucaucaccgaguccaagccgagcguggagcagcggaagcaggacgacaagaagaucaaggcgugcguggaggaggucacgaccacccucgaggagaccaaguuccugacggagaaccugcuccuguacaucgacaucaacgggaaccugcaccccgacuccgccacccucgugagcgacaucgacaucaccuuccugaagaaggacgcccccuacaucgagggcgacgugguccaggagggcgugcugaccgccguggucauccccacgaagaaggccgggggcaccaccgagaugcucgcgaaggcccugcgcaaggugccgaccgacaacuacaucacgaccuaccccgggcagggccugaacggguacaccguggaggaggccaagaccguccucaagaagugcaaguccgccuucuacauccugcccagcaucaucuccaacgagaagcaggagauccugggcaccgugagcuggaaccuccgggagaugcuggcgcacgccgaggagacgcgcaagcugaugcccgugugcgucgagaccaaggccaucguguccaccauccagcggaaguacaagggcaucaagauccaggaggggguggucgacuacggcgcccgcuucuacuucuacaccagcaagacgaccguggccucccugaucaacacccucaacgaccugaacgagacccuggugacgaugccgcucggguacgucacccacggccugaaccuggaggaggcggcccgguacaugcgcagccucaaggugcccgccaccguguccgucagcucccccgacgccgugaccgccuacaacggguaccugacgagcuccagcaagacccccgaggagcacuucaucgagaccaucucccuggcgggcagcuacaaggacuggagcuacuccggccagagcacccagcucgggaucgaguuccugaagcggggcgacaaguccguguacuacacgagcaacccgaccaccuuccaccuggacggggaggucaucaccuucgacaaccucaagacgcugcugucccuccgcgaggugcggaccaucaagguguucaccaccgucgacaacaucaaccugcacacgcaggugguggacaugagcaugaccuacggccagcaguucggccccaccuaccuggacggggccgacgucaccaagaucaagccccacaacucccacgagggcaagacguucuacgugcucccgaacgacgacacccugcgcguggaggccuucgaguacuaccacaccaccgaccccagcuuccuggggcgguacauguccgcccucaaccacacgaagaaguggaaguacccccaggucaacggccugaccagcaucaagugggccgacaacaacugcuaccuggcgaccgcccuccugacccugcagcagaucgagcucaaguucaaccccccggcccugcaggacgccuacuaccgcgcgcgggccggggaggccgccaacuucugcgcccugauccucgcguacugcaacaagacggugggcgagcugggcgacgugcgcgagaccauguccuaccuguuccagcacgccaaccucgacagcugcaagcggguccugaacguggucugcaagaccugcgggcagcagcagaccacccugaagggcguggaggccgugauguacauggggacgcucuccuacgagcaguucaagaagggcguccagauccccugcaccugcgggaagcaggccaccaaguaccuggugcagcaggagagccccuucgugaugauguccgcccccccggcgcaguacgagcugaagcacggcaccuucacgugcgccagcgaguacaccggcaacuaccagugcgggcacuacaagcacaucaccuccaaggagacccucuacugcaucgacggcgcccugcugacgaagagcagcgaguacaaggggcccaucaccgacgucuucuacaaggagaacuccuacaccaccacgaucaagcccgugaccuacaagcucgacggcguggucugcaccgagaucgaccccaagcuggacaacuacuacaagaaggacaacagcuacuucaccgagcagccgaucgaccuggugcccaaccagcccuaccccaacgccuccuucgacaacuucaaguucgugugcgacaacaucaaguucgccgacgaccucaaccagcugacgggguacaagaagccggcgagccgcgagcugaaggucaccuucuuccccgaccucaacggcgacgugguggccaucgacuacaagcacuacacccccuccuucaagaagggcgccaagcugcugcacaagcccaucgucuggcacgugaacaacgccaccaacaaggcgacguacaagccgaacaccuggugcauccggugccucuggagcaccaagcccguggagaccuccaacagcuucgacguccugaaguccgaggacgcccaggggauggacaaccuggccugcgaggaccucaagcccgugagcgaggagguggucgagaaccccacgauccagaaggacgugcuggagugcaacgugaagaccaccgaggucgugggcgacaucauccugaagccggccaacaacucccucaagaucaccgaggagguggggcacacggaccugauggccgcguacgucgacaacagcucccugaccaucaagaagcccaacgagcucagccgcgugcugggccugaagacccucgccacccacgggcuggccgccgugaacuccguccccugggacacgaucgccaacuacgcgaagccguuccugaacaagguggugagcaccaccaccaacaucgucacgcgcugccucaaccgggugugcaccaacuacaugcccuacuucuucacccugcugcuccagcugugcaccuucacccgcuccacgaacagccggaucaaggccuccaugcccaccaccaucgccaagaacaccgugaagagcgucggcaaguucugccuggaggccagcuucaacuaccucaagucccccaacuucagcaagcugaucaacaucaucaucugguuccugcuccuguccgugugccugggcagccucaucuacuccacggccgcgcugggggugcugaugagcaaccucggcaugccguccuacugcaccggguaccgcgagggcuaccugaacagcaccaacgucaccaucgccacguacugcaccggcuccauccccugcagcgugugccuguccgggcucgacagccuggacaccuaccccucccuggagaccauccagaucacgaucagcuccuucaagugggaccucaccgccuucggccugguggccgagugguuccuggccuacauccucuucacccgguucuucuacguccuggggcuggcggccaucaugcagcucuucuucagcuacuucgccgugcacuucaucuccaacagcuggcugauguggcugaucaucaaccuggugcagauggcccccaucuccgcgaugguccgcauguacaucuucuucgccagcuucuacuacguguggaagagcuacgugcacgucguggacggcugcaacuccagcaccugcaugaugugcuacaagcggaaccgcgccacgcggguggagugcaccaccaucgucaacggggugcgccgguccuucuacgucuacgccaacggcggcaagggguucugcaagcuccacaacuggaacugcgugaacugcgacaccuucugcgccggcagcacguucaucuccgacgagguggcgcgcgaccugagccugcaguucaagcggccgaucaaccccaccgaccaguccagcuacaucgucgacuccgugaccgugaagaacgggagcauccaccucuacuucgacaaggccggccagaagaccuacgagcgccacucccugagccacuucgucaaccuggacaaccuccgggccaacaacacgaaggggucccugcccaucaacgugaucguguucgacggcaagagcaagugcgaggaguccagcgccaaguccgccagcgucuacuacucccagcugaugugccagcccauccuccugcuggaccaggcgcucgugagcgacgugggcgacagcgccgaggucgccgugaagauguucgacgccuacgugaacaccuucuccagcaccuucaacgucccgauggagaagcugaagacccugguggccacggcggaggccgagcucgccaagaacgugucccuggacaacguccugagcaccuucaucuccgccgcgcgccagggguucguggacagcgacguggagaccaaggacgucguggagugccucaagcugucccaccagagcgacaucgaggugaccggcgacuccugcaacaacuacaugcugacguacaacaaggucgagaacaugaccccccgggaccucggggccugcaucgacugcagcgcccgccacaucaacgcccagguggccaagucccacaacaucgcgcugaucuggaacgugaaggacuucaugagccuguccgagcagcuccggaagcagauccgcagcgccgccaagaagaacaaccugcccuucaagcugaccugcgccaccacgcgccaggucgugaacguggucaccaccaagaucgcccucaagggcgggugaggacuagucccuguucccagagcccacuuuuuuuucuuuuuuugaaauaaaauagccugucuuucagaucucaaaggcucuuuucagagccaccaaaaaaaaaaaaaaaaaaaaaaaaaaaaaaaaaaaaaaaaaaaaaaaaaaaaaaaaaaaaaaaaaaaaaaaaaaaaaaaaaaaaaaaaaaaaaaaaaaaaa

SEQ ID NO: 19784 - RNA, 6113 nt, Artificial Sequence
  SARS-CoV-2__MT799969.1__non-structural protein 3 (NSP3) mRNA gc
aggagagucccgcagucggcguccagcggcucugcuuguucgugugugugucguugcaggccuuauucaagcuuaccauggcccccaccaaggugaccuucggcgacgacacggucaucgaggugcagggguacaagagcgugaacaucaccuucgagcuggacgagcgcaucgacaagguccucaacgagaagugcuccgccuacaccguggagcugggcaccgaggugaacgaguucgcgugcgucguggccgacgccgugaucaagacgcugcagccggucagcgagcuccugaccccccuggggaucgaccucgacgagugguccauggccaccuacuaccuguucgacgagagcggcgaguucaagcuggccucccacauguacugcagcuucuacccccccgacgaggacgaggaggagggggacugcgaggaggaggaguucgagccguccacccaguacgaguacggcacggaggacgacuaccagggcaagccccucgaguucggggcgaccagcgccgcccugcagcccgaggaggagcaggaggaggacuggcuggacgacgacucccagcagaccgugggccagcaggacgggagcgaggacaaccagaccacgaccauccagaccaucguggagguccagccccagcucgagauggagcugaccccgguggugcagacgaucgaggucaacuccuucagcggcuaccugaagcucaccgacaacguguacaucaagaacgccgacaucguggaggaggcgaagaaggucaagcccaccgugguggucaacgccgccaacguguaccugaagcacgggggcggcguggccggggcccugaacaaggcgaccaacaacgccaugcaggucgaguccgacgacuacaucgccacgaacggcccccucaagguggggggcagcugcguccuguccggccacaaccuggccaagcacugccuccacgugguggggcccaacgucaacaagggcgaggacauccagcugcugaagagcgccuacgagaacuucaaccagcacgaggugcuccuggcgccgcugcucuccgccgggaucuucggcgccgacagcauccacucccugcgggugugcgucgacaccgugcgcaccaacguguaccuggccgucuucgacaagaaccucuacgacaagcuggugagcagcuuccuggagaugaaguccgagaagcagguggagcagaagaucgccgagauccccaaggaggaguucaagcccuucaucaccgagagcaagcccuccgucgagcagcggaagcaggacgacaagaagaucaaggcgugcguggaggaggugacgaccacccucgaggagaccaaguuccugacggagaaccugcuccuguacaucgacaucaacgggaaccugcacccggacagcgccacccucgucuccgacaucgacaucaccuuccugaagaaggacgcccccuacaucgugggcgacgugguccaggagggcgugcugaccgccguggucauccccacgaagaaggccgggggcaccaccgagaugcucgcgaaggcccugcgcaaggugcccaccgacaacuacaucacgaccuacccggggcagggccugaacggguacaccguggaggaggccaagaccguccucaagaagugcaagagcgccuucuacauccugcccuccaucaucagcaacgagaagcaggagauccugggcaccguguccuggaaccuccgggagaugcuggcgcacgccgaggagacgcgcaagcugaugcccgugugcgucgagaccaaggccaucgugagcaccauccagcggaaguacaagggcaucaagauccaggaggggguggucgacuacggcgcccgcuucuacuucuacaccuccaagacgaccguggccagccugaucaacacccucaacgaccugaacgagacccuggugacgaugccccucggguacgucacccacggccugaaccuggaggaggcggcccgguacaugcgcucccucaaggugccggccaccgugagcgucuccagccccgacgccgugaccgccuacaacggguaccugacguccagcuccaagacccccgaggagcacuucaucgagaccaucagccuggcgggcagcuacaaggacugguccuacagcggccaguccacccagcucgggaucgaguuccugaagcggggcgacaagaucguguacuacacgagcaaccccaccaccuuccaccuggacggggaggucaucaccuucgacaaccucaagacgcugcugucccuccgcgaggugcggaccaucaagguguucaccaccgucgacaacaucaaccugcacacgcaggugguggacaugagcaugaccuacggccagcaguucggcccgaccuaccuggacggggccgacgucaccaagaucaagccccacaacucccacgagggcaagacguucuacgugcuccccaacgacuacacccugcgcguggaggccuucgaguacuaccacaccaccgacccgagcuuccuggggcgguacauguccgcccucaaccacacgaagaaguggaaguacccccaggucaacggccugaccagcaucaagugggccgacaacaacugcuaccuggcgaccgcccuccugacccugcagcagaucgagcucaaguucaacccccccgcccugcaggacgccuacuaccgcgcgcgggccggggaggccgccaacuucugcgcccugauccucgcguacugcaacaagacggugggcgagcugggcgacgugcgcgagaccauguccuaccuguuccagcacgccaaccucgacagcugcaagcggguccugaacguggucugcaagaccugcgggcagcagcagaccacccugaagggcguggaggccgugauguacauggggacgcucuccuacgagcaguucaagaagggcguccagaucccgugcaccugcgggaagcaggccaccaaguaccuggugcagcaggagagccccuucgugaugauguccgccccccccgcgcaguacgagcugaagcacggcaccuucacgugcgccagcgaguacaccggcaacuaccagugcgggcacuacaagcacaucaccuccaaggagacccucuacugcaucgacggcgcccugcugacgaagagcagcgaguacaaggggccgaucaccgacgucuucuacaaggagaacuccuacaccaccacgaucaagcccgugaccuacaagcucgacggcguggucugcaccgagaucgaccccaagcuggacaacuacuacaagaaggacaacagcuacuucaccgagcagcccaucgaccuggugccgaaccagcccuaccccaacgccuccuucgacaacuucaaguucgugugcgacaacaucaaguucgccgacgaccucaaccagcugacgggguacaagaagcccgcgagccgcgagcugaaggucaccuucuucccggaccucaacggcgacgugguggccaucgacuacaagcacuacacccccuccuucaagaagggcgccaagcugcugcacaagcccaucgucuggcacgugaacaacgccaccaacaaggcgacguacaagcccaacaccuggugcauccggugccucuggagcaccaagccgguggagaccuccaacagcuucgacguccugaaguccgaggacgcccaggggauggacaaccuggccugcgaggaccucaagcccgugagcgaggagguggucgagaaccccacgauccagaaggacgugcuggagugcaacgugaagaccaccgaggucgugggcgacaucauccugaagcccgccaacaacucccucaagaucaccgaggagguggggcacacggaccugauggccgcguacgucgacaacagcucccugaccaucaagaagccgaacgagcucagccgcgugcugggccugaagacccucgccacccacgggcuggccgccgugaacuccguccccugggacacgaucgccaacuacgcgaagcccuuccugaacaagguggugagcaccaccaccaacaucgucacgcgcugccucaaccgggugugcaccaacuacaugccguacuucuucacccugcugcuccagcugugcaccuucacccgcuccacgaacagccggaucaaggccuccaugcccaccaccaucgccaagaacaccgugaagagcgucggcaaguucugccuggaggccagcuucaacuaccucaagucccccaacuucagcaagcugaucaacaucaucaucugguuccugcuccuguccgugugccugggcagccucaucuacuccacggccgcgcugggggugcugaugagcaaccucggcaugcccuccuacugcaccggguaccgcgagggcuaccugaacagcaccaacgucaccaucgccacguacugcaccggcuccaucccgugcagcgugugccuguccgggcucgacagccuggacaccuaccccucccuggagaccauccagaucacgaucagcuccuucaagugggaccucaccgccuucggccugguggccgagugguuccuggccuacauccucuucacccgguucuucuacguccuggggcuggcggccaucaugcagcucuucuucagcuacuucgccgugcacuucaucuccaacagcuggcugauguggcugaucaucaaccuggugcagauggcccccaucuccgcgaugguccgcauguacaucuucuucgccagcuucuacuacguguggaagagcuacgugcacgucguggacggcugcaacuccagcaccugcaugaugugcuacaagcggaaccgcgccacgcggguggagugcaccaccaucgucaacggggugcgccgguccuucuacgucuacgccaacggcggcaagggguucugcaagcuccacaacuggaacugcgugaacugcgacaccuucugcgccggcagcacguucaucuccgacgagguggcgcgcgaccugagccugcaguucaagcggcccaucaacccgaccgaccaguccagcuacaucgucgacuccgugaccgugaagaacgggagcauccaccucuacuucgacaaggccggccagaagaccuacgagcgccacucccugagccacuucgucaaccuggacaaccuccgggccaacaacacgaaggggucccugcccaucaacgugaucguguucgacggcaagagcaagugcgaggaguccagcgccaaguccgccagcgucuacuacucccagcugaugugccagcccauccuccugcuggaccaggcgcucgugagcgacgugggcgacagcgccgaggucgccgugaagauguucgacgccuacgugaacaccuucuccagcaccuucaacguccccauggagaagcugaagacccugguggccacggcggaggccgagcucgccaagaacgugucccuggacaacguccugagcaccuucaucuccgccgcgcgccagggguucguggacagcgacguggagaccaaggacgucguggagugccucaagcugucccaccagagcgacaucgaggugaccggcgacuccugcaacaacuacaugcugacguacaacaaggucgagaacaugaccccgcgggaccucggggccugcaucgacugcagcgcccgccacaucaacgcccagguggccaagucccacaacaucgcgcugaucuggaacgugaaggacuucaugagccuguccgagcagcuccggaagcagauccgcagcgccgccaagaagaacaaccugcccuucaagcugaccugcgccaccacgcgccaggucgugaacguggucaccaccaagaucgcccucaagggcgggugaggacuagucccuguucccagagcccacuuuuuuuucuuuuuuugaaauaaaauagccugucuuucagaucucaaaggcucuuuucagagccaccaaaaaaaaaaaaaaaaaaaaaaaaaaaaaaaaaaaaaaaaaaaaaaaaaaaaaaaaaaaaaaaaaaaaaaaaaaaaaaaaaaaaaaaaaaaaaaaaaaaaa

SEQ ID NO: 19785 - RNA, 6113 nt, Artificial Sequence
  SARS-CoV-2__MT799998.1__non-structural protein 3 (NSP3) mRNA gc
aggagagucccgcagucggcguccagcggcucugcuuguucgugugugugucguugcaggccuuauucaagcuuaccauggcccccaccaaggugaccuucggcgacgacacggucaucgaggugcagggguacaagagcgugaacaucaccuucgagcuggacgagcgcaucgacaagguccucaacgagaagugcuccgccuacaccguggagcugggcaccgaggugaacgaguucgcgugcgucguggccgacgccgugaucaagacgcugcagccggucagcgagcuccugaccccccuggggaucgaccucgacgagugguccauggccaccuacuaccuguucgacgagagcggcgaguucaagcuggccucccacauguacugcagcuucuacccccccgacgaggacgaggaggagggggacugcgaggaggaggaguucgagccguccacccaguacgaguacggcacggaggacgacuaccagggcaagccccucgaguucggggcgaccagcgccgcccugcagcccgaggaggagcaggaggaggacuggcuggacgacgacucccagcagaccgugggccagcaggacgggagcgaggacaaccagaccacgaccauccagaccaucguggagguccagccccagcucgagauggagcugaccccgguggugcagacgaucgaggucaacuccuucagcggcuaccugaagcucaccgacaacguguacaucaagaacgccgacaucguggaggaggcgaagaaggucaagcccaccgugguggucaacgccgccaacguguaccugaagcacgggggcggcguggccggggcccugaacaaggcgaccaacaacgccaugcaggucgaguccgacgacuacaucgccacgaacggcccccucaagguggggggcagcugcguccuguccggccacaaccuggccaagcacugccuccacgugguggggcccaacgucaacaagggcgaggacauccagcugcugaagagcgccuacgagaacuucaaccagcacgaggugcuccuggcgccgcugcucuccgccgggaucuucggcgccgaccccauccacagccugcgggugugcgucgacaccgugcgcaccaacguguaccuggccgucuucgacaagaaccucuacgacaagcugguguccagcuuccuggagaugaagagcgagaagcagguggagcagaagaucgccgagauccccaaggaggaggucaagcccuucaucaccgaguccaagccgagcguggagcagcggaagcaggacgacaagaagaucaaggcgugcguggaggaggucacgaccacccucgaggagaccaaguuccugacggagaaccugcuccuguacaucgacaucaacgggaaccugcaccccgacuccgccacccucgugagcgacaucgacaucaccuuccugaagaaggacgcccccuacaucgugggcgacgucgugcaggagggcgugcugaccgccgucgugauccccacgaagaaggccgggggcaccaccgagaugcucgcgaaggcccugcgcaaggugccgaccgacaacuacaucacgaccuaccccgggcagggccugaacggguacaccgucgaggaggccaagaccgugcucaagaagugcaaguccgccuucuacauccugcccagcaucaucuccaacgagaagcaggagauccugggcaccgugagcuggaaccuccgggagaugcuggcgcacgccgaggagacgcgcaagcugaugcccgucugcguggagaccaaggccaucguguccaccauccagcggaaguacaagggcaucaagauccaggagggggucguggacuacggcgcccgcuucuacuucuacaccagcaagacgaccguggccucccugaucaacacccucaacgaccugaacgagacccuggucacgaugccgcucggguacgugacccacggccugaaccuggaggaggcggcccgguacaugcgcagccucaaggugcccgccaccgucuccgugagcucccccgacgccgugaccgccuacaacggguaccugacgagcuccagcaagacccccgaggagcacuucaucgagaccaucucccuggcgggcagcuacaaggacuggagcuacuccggccagagcacccagcucgggaucgaguuccugaagcggggcgacaaguccgucuacuacacgagcaacccgaccaccuuccaccuggacggggaggugaucaccuucgacaaccucaagacgcugcugucccuccgcgaggugcggaccaucaaggucuucaccaccguggacaacaucaaccugcacacgcagguggucgacaugagcaugaccuacggccagcaguucggccccaccuaccuggacggggccgacgugaccaagaucaagccccacaacucccacgagggcaagacguucuacgugcucccgaacgacgacacccugcgcgucgaggccuucgaguacuaccacaccaccgaccccagcuuccuggggcgguacauguccgcccucaaccacacgaagaaguggaaguacccccaggugaacggccugaccagcaucaagugggccgacaacaacugcuaccuggcgaccgcccuccugacccugcagcagaucgagcucaaguucaaccccccggcccugcaggacgccuacuaccgcgcgcgggccggggaggccgccaacuucugcgcccugauccucgcguacugcaacaagacggugggcgagcugggcgacguccgcgagaccauguccuaccuguuccagcacgccaaccucgacagcugcaagcgggugcugaacgucgugugcaagaccugcgggcagcagcagaccacccugaagggcguggaggccgucauguacauggggacgcucuccuacgagcaguucaagaagggcgugcagauccccugcaccugcgggaagcaggccaccaaguaccuggugcagcaggagagccccuucgucaugauguccgcccccccggaccaguacgagcugaagcacggcaccuucacgugcgcgagcgaguacaccggcaacuaccagugcgggcacuacaagcacaucaccuccaaggagacccucuacugcaucgacggcgcccugcugacgaagagcagcgaguacaaggggcccaucaccgacguguucuacaaggagaacuccuacaccaccacgaucaagcccgugaccuacaagcucgacggcgucgugugcaccgagaucgaccccaagcuggacaacuacuacaagaaggacaacagcuacuucaccgagcagccgaucgaccuggugcccaaccagcccuaccccaacgccuccuucgacaacuucaaguucgucugcgacaacaucaaguucgccgacgaccucaaccagcugacgggguacaagaagccggccagccgcgagcugaaggugaccuucuuccccgaccucaacggcgacguggucgcgaucgacuacaagcacuacacccccuccuucaagaagggcgccaagcugcugcacaagcccaucguguggcacgugaacaacgccaccaacaaggccacguacaagccgaacaccuggugcauccggugccucuggagcaccaagcccgucgagaccuccaacagcuucgacgugcugaaguccgaggacgcgcaggggauggacaaccuggccugcgaggaccucaagcccgugagcgaggaggucguggagaaccccacgauccagaaggacgugcuggagugcaacgucaagaccaccgagguggugggcgacaucauccugaagccggccaacaacucccucaagaucaccgaggaggucgggcacacggaccugauggccgccuacguggacaacagcucccugaccaucaagaagcccaacgagcucagccgcgugcugggccugaagacccucgcgacccacgggcuggccgccgucaacuccgugcccugggacacgaucgccaacuacgccaagccguuccugaacaagguggucagcaccaccaccaacaucgugacgcgcugccucaaccgggugugcaccaacuacaugcccuacuucuucacccugcugcuccagcugugcaccuucacccgcuccacgaacagccggaucaaggcguccaugcccaccaccaucgccaagaacaccgucaagagcgugggcaaguucugccuggaggccagcuucaacuaccucaagucccccaacuucagcaagcugaucaacaucaucaucugguuccugcuccuguccgugugccugggcagccucaucuacuccacggccgcccuggggguccugaugagcaaccucggcaugccguccuacugcaccggguaccgcgagggcuaccugaacagcaccaacgugaccaucgcgacguacugcaccggcuccauccccugcagcgugugccuguccgggcucgacagccuggacaccuaccccucccuggagaccauccagaucacgaucagcuccuucaagugggaccucaccgccuucggccuggucgccgagugguuccuggccuacauccucuucacccgguucuucuacgugcuggggcuggccgcgaucaugcagcucuucuucagcuacuucgccgugcacuucaucuccaacagcuggcugauguggcugaucaucaaccugguccagauggcccccaucuccgccauggugcgcauguacaucuucuucgcgagcuucuacuacguguggaagagcuacguccacgugguggacggcugcaacuccagcaccugcaugaugugcuacaagcggaaccgcgccacgcgggucgagugcaccaccaucgugaacgggguccgccgguccuucuacguguacgccaacggcggcaagggguucugcaagcuccacaacuggaacugcgugaacugcgacaccuucugcgccggcagcacguucaucuccgacgaggucgcccgcgaccugagccugcaguucaagcggccgaucaaccccaccgaccaguccagcuacaucguggacuccgugaccgucaagaacgggagcauccaccucuacuucgacaaggcgggccagaagaccuacgagcgccacucccugagccacuucgugaaccuggacaaccuccgggccaacaacacgaaggggucccugcccaucaacgugaucgucuucgacggcaagagcaagugcgaggaguccagcgccaaguccgccagcguguacuacucccagcugaugugccagcccauccuccugcuggaccaggcccucgugagcgacgucggcgacagcgcggagguggccgugaagauguucgacgccuacgucaacaccuucuccagcaccuucaacgugccgauggagaagcugaagacccugguggccacggccgaggcggagcucgccaagaacgucucccuggacaacgugcugagcaccuucaucuccgccgcccgccagggguucguggacagcgacgucgagaccaaggacgugguggagugccucaagcugucccaccagagcgacaucgaggucaccggcgacuccugcaacaacuacaugcugacguacaacaagguggagaacaugaccccccgggaccucggggcgugcaucgacugcagcgcccgccacaucaacgcccagguggccaagucccacaacaucgcccugaucuggaacgucaaggacuucaugagccuguccgagcagcuccggaagcagauccgcagcgcggccaagaagaacaaccugcccuucaagcugaccugcgccaccacgcgccagguggugaacgucgugaccaccaagaucgcccucaagggcgggugaggacuagucccuguucccagagcccacuuuuuuuucuuuuuuugaaauaaaauagccugucuuucagaucucaaaggcucuuuucagagccaccaaaaaaaaaaaaaaaaaaaaaaaaaaaaaaaaaaaaaaaaaaaaaaaaaaaaaaaaaaaaaaaaaaaaaaaaaaaaaaaaaaaaaaaaaaaaaaaaaaaaa

SEQ ID NO: 19786 - RNA, 6113 nt, Artificial Sequence
  SARS-CoV-2__MT800024.1__non-structural protein 3 (NSP3) mRNA gc
aggagagucccgcagucggcguccagcggcucugcuuguucgugugugugucguugcaggccuuauucaagcuuaccauggcccccaccaaggugaccuucggcgacgacacggucaucgaggugcagggguacaagagcgugaacaucaccuucgagcuggacgagcgcaucgacaagguccucaacgagaagugcuccgccuacaccguggagcugggcaccgaggugaacgaguucgcgugcgucguggccgacgccgugaucaagacgcugcagccggucagcgagcuccugaccccccuggggaucgaccucgacgagugguccauggccaccuacuaccuguucgacgagagcggcgaguucaagcuggccucccacauguacugcagcuucuacccccccgacgaggacgaggaggagggggacugcgaggaggaggaguucgagccguccacccaguacgaguacggcacggaggacgacuaccagggcaagccccucgaguucggggcgaccagcgccgcccugcagcccgaggaggagcaggaggaggacuggcuggacgacgacucccagcagaccgugggccagcaggacgggagcgaggacaaccagaccacgaccauccagaccaucguggagguccagccccagcucgagauggagcugaccccgguggugcagacgaucgaggucaacuccuucagcggcuaccugaagcucaccgacaacguguacaucaagaacgccgacaucguggaggaggcgaagaaggucaagcccaccgugguggucaacgccgccaacguguaccugaagcacgggggcggcguggccggggcccugaacaaggcgaccaacaacgccaugcaggucgaguccgacgacuacaucgccacgaacggcccccucaagguggggggcagcugcguccuguccggccacaaccuggccaagcacugccuccacgugguggggcccaacgucaacaagggcgaggacauccagcugcugaagagcgccuacgagaacuucaaccagcacgaggugcuccuggcgccgcugcucuccgccgggaucuucggcgccgaccccauccacagccugcgggugugcgucgacaccgugcgcaccaacguguaccuggccgucuucgacaagaaccucuacgacaagcugguguccagcuuccuggagaugaagagcgagaagcagguggagcagaagaucgccgagauccccaaggaggaggucaagcccuucaucaccgaguccaagccgagcguggagcagcggaagcaggacgacaagaagaucaaggcgugcguggaggaggucacgaccacccucgaggagaccaaguuccugacgaagaaccugcuccuguacaucgacaucaacgggaaccugcaccccgacuccgccacccucgugagcgacaucgacaucaccuuccugaagaaggacgcccccuacaucgugggcgacgucgugcaggagggcgugcugaccgccgucgugauccccacgaagaaggccgggggcaccaccgagaugcucgcgaaggcccugcgcaaggugccgaccgacaacuacaucacgaccuaccccgggcagggccugaacggguacaccgucgaggaggccaagaccgugcucaagaagugcaaguccgccuucuacauccugcccagcaucaucuccaacgagaagcaggagauccugggcaccgugagcuggaaccuccgggagaugcuggcgcacgccgaggagacgcgcaagcugaugcccgucugcguggagaccaaggccaucguguccaccauccagcggaaguacaagggcaucaagauccaggagggggucguggacuacggcgcccgcuucuacuucuacaccagcaagacgaccguggccucccugaucaacacccucaacgaccugaacgagacccuggucacgaugccgcucggguacgugacccacggccugaaccuggaggaggcggcccgguacaugcgcagccucaaggugcccgccaccgucuccgugagcucccccgacgccgugaccgccuacaacggguaccugacgagcuccagcaagacccccgaggagcacuucaucgagaccaucucccuggcgggcagcuacaaggacuggagcuacuccggccagagcacccagcucgggaucgaguuccugaagcggggcgacaaguccgucuacuacacgagcaacccgaccaccuuccaccuggacggggaggugaucaccuucgacaaccucaagacgcugcugucccuccgcgaggugcggaccaucaaggucuucaccaccguggacaacaucaaccugcacacgcagguggucgacaugagcaugaccuacggccagcaguucggccccaccuaccuggacggggccgacgugaccaagaucaagccccacaacucccacgagggcaagacguucuacgugcucccgaacgacgacacccugcgcgucgaggccuucgaguacuaccacaccaccgaccccagcuuccuggggcgguacauguccgcccucaaccacacgaagaaguggaaguacccccaggugaacggccugaccagcaucaagugggccgacaacaacugcuaccuggcgaccgcccuccugacccugcagcagaucgagcucaaguucaaccccccggcccugcaggacgccuacuaccgcgcgcgggccggggaggccgccaacuucugcgcccugauccucgcguacugcaacaagacggugggcgagcugggcgacguccgcgagaccauguccuaccuguuccagcacgccaaccucgacagcugcaagcgggugcugaacgucgugugcaagaccugcgggcagcagcagaccacccugaagggcguggaggccgucauguacauggggacgcucuccuacgagcaguucaagaagggcgugcagauccccugcaccugcgggaagcaggccaccaaguaccuggugcagcaggagagccccuucgucaugauguccgcccccccggcgcaguacgagcugaagcacggcaccuucacgugcgccagcgaguacaccggcaacuaccagugcgggcacuacaagcacaucaccuccaaggagacccucuacugcaucgacggcgcccugcugacgaagagcagcgaguacaaggggcccaucaccgacguguucuacaaggagaacuccuacaccaccacgaucaagcccgugaccuacaagcucgacggcgucgugugcaccgagaucgaccccaagcuggacaacuacuacaagaaggacaacagcuacuucaccgagcagccgaucgaccuggugcccaaccagcccuaccccaacgccuccuucgacaacuucaaguucgucugcgacaacaucaaguucgccgacgaccucaaccagcugacgggguacaagaagccggcgagccgcgagcugaaggugaccuucuuccccgaccucaacggcgacguggucgccaucgacuacaagcacuacacccccuccuucaagaagggcgccaagcugcugcacaagcccaucguguggcacgugaacaacgccaccaacaaggcgacguacaagccgaacaccuggugcauccggugccucuggagcaccaagcccgucgagaccuccaacagcuucgacgugcugaaguccgaggacgcccaggggauggacaaccuggccugcgaggaccucaagcccgugagcgaggaggucguggagaaccccacgauccagaaggacgugcuggagugcaacgucaagaccaccgagguggugggcgacaucauccugaagccggccaacaacucccucaagaucaccgaggaggucgggcacacggaccugauggccgcguacguggacaacagcucccugaccaucaagaagcccaacgagcucagccgcgugcugggccugaagacccucgccacccacgggcuggccgccgucaacuccgugcccugggacacgaucgccaacuacgcgaagccguuccugaacaagguggucagcaccaccaccaacaucgugacgcgcugccucaaccgggugugcaccaacuacaugcccuacuucuucacccugcugcuccagcugugcaccuucacccgcuccacgaacagccggaucaaggccuccaugcccaccaccaucgccaagaacaccgucaagagcgugggcaaguucugccuggaggccagcuucaacuaccucaagucccccaacuucagcaagcugaucaacaucaucaucugguuccugcuccuguccgugugccugggcagccucaucuacuccacggccgcgcuggggguccugaugagcaaccucggcaugccguccuacugcaccggguaccgcgagggcuaccugaacagcaccaacgugaccaucgccacguacugcaccggcuccauccccugcagcgugugccuguccgggcucgacagccuggacaccuaccccucccuggagaccauccagaucacgaucagcuccuucaagugggaccucaccgccuucggccuggucgccgagugguuccuggccuacauccucuucacccgguucuucuacgugcuggggcuggcggccaucaugcagcucuucuucagcuacuucgccgugcacuucaucuccaacagcuggcugauguggcugaucaucaaccugguccagauggcccccaucuccgcgauggugcgcauguacaucuucuucgccagcuucuacuacguguggaagagcuacguccacgugguggacggcugcaacuccagcaccugcaugaugugcuacaagcggaaccgcgccacgcgggucgagugcaccaccaucgugaacgggguccgccgguccuucuacguguacgccaacggcggcaagggguucugcaagcuccacaacuggaacugcgugaacugcgacaccuucugcgccggcagcacguucaucuccgacgaggucgcgcgcgaccugagccugcaguucaagcggccgaucaaccccaccgaccaguccagcuacaucguggacuccgugaccgucaagaacgggagcauccaccucuacuucgacaaggccggccagaagaccuacgagcgccacucccugagccacuucgugaaccuggacaaccuccgggccaacaacacgaaggggucccugcccaucaacgugaucgucuucgacggcaagagcaagugcgaggaguccagcgccaaguccgccagcguguacuacucccagcugaugugccagcccauccuccugcuggaccaggcgcucgugagcgacgucggcgacagcgccgagguggccgugaagauguucgacgccuacgucaacaccuucuccagcaccuucaacgugccgauggagaagcugaagacccugguggccacggcggaggccgagcucgccaagaacgucucccuggacaacgugcugagcaccuucaucuccgccgcgcgccagggguucguggacagcgacgucgagaccaaggacgugguggagugccucaagcugucccaccagagcgacaucgaggucaccggcgacuccugcaacaacuacaugcugacguacaacaagguggagaacaugaccccccgggaccucggggccugcaucgacugcagcgcccgccacaucaacgcccagguggccaagucccacaacaucgcgcugaucuggaacgucaaggacuucaugagccuguccgagcagcuccggaagcagauccgcagcgccgccaagaagaacaaccugcccuucaagcugaccugcgccaccacgcgccagguggugaacgucgugaccaccaagaucgcccucaagggcgggugaggacuagucccuguucccagagcccacuuuuuuuucuuuuuuugaaauaaaauagccugucuuucagaucucaaaggcucuuuucagagccaccaaaaaaaaaaaaaaaaaaaaaaaaaaaaaaaaaaaaaaaaaaaaaaaaaaaaaaaaaaaaaaaaaaaaaaaaaaaaaaaaaaaaaaaaaaaaaaaaaaaaa

SEQ ID NO: 19787 - RNA, 6113 nt, Artificial Sequence
  SARS-CoV-2__MT800030.1__non-structural protein 3 (NSP3) mRNA gc
aggagagucccgcagucggcguccagcggcucugcuuguucgugugugugucguugcaggccuuauucaagcuuaccauggcccccaccaaggugaccuucggcgacgacacggucaucgaggugcagggguacaagagcgugaacaucaccuucgagcuggacgagcgcaucgacaagguccucaacgagaagugcuccgccuacaccguggagcugggcaccgaggugaacgaguucgcgugcgucguggccgacgccgugaucaagacgcugcagccggucagcgagcuccugaccccccuggggaucgaccucgacgagugguccauggccaccuacuaccuguucgacgagagcggcgaguucaagcuggccucccacauguacugcagcuucuacccccccgacgaggacgaggaggagggggacugcgaggaggaggaguucgagccguccacccaguacgaguacggcacggaggacgacuaccagggcaagccccucgaguucggggcgaccagcgccgcccugcagcccgaggaggagcaggaggaggacuggcuggacgacgacucccagcagaccgugggccagcaggacgggagcgaggacaaccagaccacgaccauccagaccaucguggagguccagccccagcucgagauggagcugaccccgguggugcagacgaucgaggucaacuccuucagcggcuaccugaagcucaccgacaacguguacaucaagaacgccgacaucguggaggaggcgaagaaggucaagcccaccgugguggucaacgccgccaacguguaccugaagcacgggggcggcguggccggggcccugaacaaggcgaccaacaacgccaugcaggucgaguccgacgacuacaucgccacgaacggcccccucaagguggggggcagcugcguccuguccggccacaaccuggccaagcacugccuccacgugguggggcccaacgucaacaagggcgaggacauccagcugcugaagagcgccuacgagaacuucaaccagcacgaggugcuccuggcgccgcugcucuccgccgggaucuucggcgccgaccccaucuacagccugcgggugugcgucgacaccgugcgcaccaacguguaccuggccgucuucgacaagaaccucuacgacaagcugguguccagcuuccuggagaugaagagcgagaagcagguggagcagaagaucgccgagauccccaaggaggaggucaagcccuucaucaccgaguccaagccgagcguggagcagcggaagcaggacgacaagaagaucaaggcgugcguggaggaggucacgaccacccucgaggagaccaaguuccugacggagaaccugcuccuguacaucgacaucaacgggaaccugcaccccgacuccgccacccucgugagcgacaucgacaucaccuuccugaagaaggacgcccccuacaucgugggcgacgucgugcaggagggcgugcugaccgccgucgugauccccacgaagaaggccgggggcaccaccgagaugcucgcgaaggcccugcgcaaggugccgaccgacaacuacaucacgaccuaccccgggcagggccugaacggguacaccgucgaggaggccaagaccgugcucaagaagugcaaguccgccuucuacauccugcccagcaucaucuccaacgagaagcaggagauccugggcaccgugagcuggaaccuccgggagaugcuggcgcacgccgaggagacgcgcaagcugaugcccgucugcguggagaccaaggccaucguguccaccauccagcggaaguacaagggcaucaagauccaggagggggucguggacuacggcgcccgcuucuacuucuacaccagcaagacgaccguggccucccugaucaacacccucaacgaccugaacgagacccuggucacgaugccgcucggguacgugacccacggccugaaccuggaggaggcggcccgguacaugcgcagccucaaggugcccgccaccgucuccgugagcucccccgacgccgugaccgccuacaacggguaccugacgagcuccagcaagacccccgaggagcacuucaucgagaccaucucccuggcgggcagcuacaaggacuggagcuacuccggccagagcacccagcucgggaucgaguuccugaagcggggcgacaaguccgucuacuacacgagcaacccgaccaccuuccaccuggacggggaggugaucaccuucgacaaccucaagacgcugcugucccuccgcgaggugcggaccaucaaggucuucaccaccguggacaacaucaaccugcacacgcagguggucgacaugagcaugaccuacggccagcaguucggccccaccuaccuggacggggccgacgugaccaagaucaagccccacaacucccacgagggcaagacguucuacgugcucccgaacgacgacacccugcgcgucgaggccuucgaguacuaccacaccaccgaccccagcuuccuggggcgguacauguccgcccucaaccacacgaagaaguggaaguacccccaggugaacggccugaccagcaucaagugggccgacaacaacugcuaccuggcgaccgcccuccugacccugcagcagaucgagcucaaguucaaccccccggcccugcaggacgccuacuaccgcgcgcgggccggggaggccgccaacuucugcgcccugauccucgcguacugcaacaagacggugggcgagcugggcgacguccgcgagaccauguccuaccuguuccagcacgccaaccucgacagcugcaagcgggugcugaacgucgugugcaagaccugcgggcagcagcagaccacccugaagggcguggaggccgucauguacauggggacgcucuccuacgagcaguucaagaagggcgugcagauccccugcaccugcgggaagcaggccaccaaguaccuggugcagcaggagagccccuucgucaugauguccgcccccccggcgcaguacgagcugaagcacggcaccuucacgugcgccagcgaguacaccggcaacuaccagugcgggcacuacaagcacaucaccuccaaggagacccucuacugcaucgacggcgcccuguucacgaagagcagcgaguacaaggggcccaucaccgacguguucuacaaggagaacuccuacaccaccacgaucaagcccgugaccuacaagcuggacggcgucgugugcaccgagaucgaccccaagcucgacaacuacuacaagaaggacaacagcuacuucaccgagcagccgaucgaccuggugcccaaccagcccuaccccaacgccuccuucgacaacuucaaguucgucugcgacaacaucaaguucgccgacgaccugaaccagcucacgggguacaagaagccggcgagccgcgagcugaaggugaccuucuuccccgaccugaacggcgacguggucgccaucgacuacaagcacuacacccccuccuucaagaagggcgccaagcuccugcacaagcccaucguguggcacgugaacaacgccaccaacaaggcgacguacaagccgaacaccuggugcauccggugccuguggagcaccaagcccgucgagaccuccaacagcuucgacgugcucaaguccgaggacgcccaggggauggacaaccuggccugcgaggaccugaagcccgugagcgaggaggucguggagaaccccacgauccagaaggacgugcucgagugcaacgucaagaccaccgagguggugggcgacaucauccugaagccggccaacaacucccugaagaucaccgaggaggucgggcacacggaccucauggccgcguacguggacaacagcucccugaccaucaagaagcccaacgagcugagccgcgugcucggccugaagacccuggccacccacgggcucgccgccgucaacuccgugcccugggacacgaucgccaacuacgcgaagccguuccugaacaagguggucagcaccaccaccaacaucgugacgcgcugccugaaccgggugugcaccaacuacaugcccuacuucuucacccuccugcugcagcucugcaccuucacccgcuccacgaacagccggaucaaggccuccaugcccaccaccaucgccaagaacaccgucaagagcgugggcaaguucugccuggaggccagcuucaacuaccugaagucccccaacuucagcaagcucaucaacaucaucaucugguuccugcugcucuccgugugccugggcagccugaucuacuccacggccgcgcucgggguccugaugagcaaccugggcaugccguccuacugcaccggguaccgcgagggcuaccucaacagcaccaacgugaccaucgccacguacugcaccggcuccauccccugcagcgugugccuguccgggcuggacagccucgacaccuaccccucccuggagaccauccagaucacgaucagcuccuucaagugggaccugaccgccuucggccucgucgccgagugguuccuggccuacauccuguucacccgguucuucuacgugcucgggcuggcggccaucaugcagcuguucuucagcuacuucgccgugcacuucaucuccaacagcuggcucauguggcugaucaucaaccugguccagauggcccccaucuccgcgauggugcgcauguacaucuucuucgccagcuucuacuacguguggaagagcuacguccacgugguggacggcugcaacuccagcaccugcaugaugugcuacaagcggaaccgcgccacgcgggucgagugcaccaccaucgugaacgggguccgccgguccuucuacguguacgccaacggcggcaagggguucugcaagcugcacaacuggaacugcgugaacugcgacaccuucugcgccggcagcacguucaucuccgacgaggucgcgcgcgaccucagccugcaguucaagcggccgaucaaccccaccgaccaguccagcuacaucguggacuccgugaccgucaagaacgggagcauccaccuguacuucgacaaggccggccagaagaccuacgagcgccacucccucagccacuucgugaaccuggacaaccugcgggccaacaacacgaaggggucccuccccaucaacgugaucgucuucgacggcaagagcaagugcgaggaguccagcgccaaguccgccagcguguacuacucccagcugaugugccagcccauccugcuccuggaccaggcgcuggugagcgacgucggcgacagcgccgagguggccgugaagauguucgacgccuacgucaacaccuucuccagcaccuucaacgugccgauggagaagcucaagacccugguggccacggcggaggccgagcuggccaagaacgucucccucgacaacgugcugagcaccuucaucuccgccgcgcgccagggguucguggacagcgacgucgagaccaaggacgugguggagugccugaagcucucccaccagagcgacaucgaggucaccggcgacuccugcaacaacuacaugcugacguacaacaagguggagaacaugaccccccgggaccugggggccugcaucgacugcagcgcccgccacaucaacgcccagguggccaagucccacaacaucgcgcucaucuggaacgucaaggacuucaugagccuguccgagcagcugcggaagcagauccgcagcgccgccaagaagaacaaccuccccuucaagcugaccugcgccaccacgcgccagguggugaacgucgugaccaccaagaucgcccugaagggcgggugaggacuagucccuguucccagagcccacuuuuuuuucuuuuuuugaaauaaaauagccugucuuucagaucucaaaggcucuuuucagagccaccaaaaaaaaaaaaaaaaaaaaaaaaaaaaaaaaaaaaaaaaaaaaaaaaaaaaaaaaaaaaaaaaaaaaaaaaaaaaaaaaaaaaaaaaaaaaaaaaaaaaa

SEQ ID NO: 19788 - RNA, 6113 nt, Artificial Sequence
  SARS-CoV-2__MT800047.1__non-structural protein 3 (NSP3) mRNA gc
aggagagucccgcagucggcguccagcggcucugcuuguucgugugugugucguugcaggccuuauucaagcuuaccauggcccccaccaaggugaccuucggcgacgacacggucaucgaggugcagggguacaagagcgugaacaucaccuucgagcuggacgagcgcaucgacaagguccucaacgagaagugcuccgccuacaccguggagcugggcaccgaggugaacgaguucgcgugcgucguggccgacgccgugaucaagacgcugcagccggucagcgagcuccugaccccccuggggaucgaccucgacgagugguccauggccaccuacuaccuguucgacgagagcggcgaguucaagcuggccucccacauguacugcagcuucuacccccccgacgaggacgaggaggagggggacugcgaggaggaggaguucgagccguccacccaguacgaguacggcacggaggacgacuaccagggcaagccccucgaguucggggcgaccagcgccgcccugcagcccgaggaggagcaggaggaggacuggcuggacgacgacucccagcagaccgugggccagcaggacgggagcgaggacaaccagaccacgaccauccagaccaucguggagguccagccccagcucgagauggagcugaccccgguggugcagacgaucgaggucaacuccuucagcggcuaccugaagcucaccgacaacguguacaucaagaacgccgacaucguggaggaggcgaagaaggucaagcccaccgugguggucaacgccgccaacguguaccugaagcacgggggcggcguggccggggcccugaacaaggcgaccaacaacgccaugcaggucgaguccgacgacuacaucgccacgaacggcccccucaagguggggggcagcugcguccuguccggccacaaccuggccaagcacugccuccacgugguggggcccaacgucaacaagggcgaggacauccagcugcugaagagcgccuacgagaacuucaaccagcacgaggugcuccuggcgccgcugcucuccgccgggaucuucggcgccgaccccauccacagccugcgggugugcgucgacaccgugcgcaccaacguguaccuggccgucuucgacaagaaccucuacgacaagcugguguccagcuuccuggagaugaagagcgagaagcagguggagcagaagaucgccgagauccccaaggaggaggucaagcccuucaucaccgaguccaagccgagcguggagcagcggaagcaggacgacaagaagaucaaggcgugcguggaggaggucacgaccacccucgaggagaccaaguuccugacggagaaccugcuccuguacaucgacaucaacgggaaccugcaccccgacuccgccacccucgugagcgacaucgacaucaccuuccugaagaaggacgcccccuacaucgugggcgacgucgugcaggagggcgugcugaccgccgucgugauccccacgaagaaggccgggggcaccaccgagaugcucgcgaaggcccugcgcaaggugccgaccgacaacuacaucacgaccuaccccgggcagggccugaacggguacaccgucgaggaggccaagaccgugcucaagaagugcaaguccgccuucuacauccugcccagcaucaucuccaacgagaagcaggagauccugggcaccgugagcuggaaccuccgggagaugcuggcgcacgccgaggagacgcgcaagcugaugcccgucugcguggagaccaaggccaucguguccaccauccagcggaaguacaagggcaucaagauccaggagggggucguggacuacggcgcccgcuucuacuucuacaccagcaagacgaccguggccucccugaucaacacccucaacgaccugaacgagacccuggucacgaugccgcucggguacgugacccacggccugaaccuggaggaggcggcccgguacaugcgcagccucaaggugcccgccaccgucuccgugagcucccccgacgccgugaccgccuacaacggguaccugacgagcuccagcaagacccccgaggagcacuucaucgagaccaucucccuggcgggcagcuacaaggacuggagcuacuccggccagagcacccagcucgggaucgaguuccugaagcggggcgacaaguccgucuacuacacgagcaacccgaccaccuuccaccuggacggggaggugaucaccuucgacaaccucaagacgcugcugucccuccgcgaggugcggaccaucaaggucuucaccaccguggacaacaucaaccugcacacgcagguggucgacaugagcaugaccuacggccagcaguucggccccaccuaccuggacggggccgacgugaccaagaucaagccccacaacucccacgagggcaagacguucuacgugcucccgaacgacgacacccugcgcgucgaggccuucgaguacuaccacaccaccgaccccagcuuccuggggcgguacauguccgcccucaaccacacgaagaaguggaaguacccccaggugaacggccugaccagcaucaagugggccgacaacaacugcuaccuggcgaccgcccuccugacccugcagcagaucgagcucaaguucaaccccccggcccugcaggacgccuacuaccgcgcgcgggccggggaggccgccaacuucugcgcccugauccucgcguacugcaacaagacggugggcgagcugggcgacguccgcgagaccauguccuaccuguuccagcacgccaaccucgacagcugcaagcgggugcugaacgucgugugcaagaccugcgggcagcagcagaccacccugaagggcguggaggccgucauguacauggggacgcucuccuacgagcaguucaagaagggcgugcagauccccugcaccugcgggaagcaggccaccaaguaccuggugcagcaggagagccccuucgucaugauguccgcccccccggcgcaguacgagcugaagcacggcaccuucacgugcgccagcgaguacaccggcaacuaccagugcgggcacuacaagcacaucaccuccaaggagacccucuacugcaucgacggcgcccugcugacgaagagcagcgaguacaaggggcccaucaccgacguguucuacaaggagaacuccuacaccaccacgaucaagcccgugaccuacaagcucgacggcgucgugugcaccgagaucgaccccaagcuggacaacuacuacaagaaggacaacagcuacuucaccgagcagccgaucgaccuggugcccaaccagcccuaccccaacgccuccuucgacaacuucaaguucgucugcgacaacaucaaguucgccgacgaccucaaccagcugacgggguacaagaagccggcgagccgcgagcugaaggugaccuucuuccccgaccucaacggcgacguggucgccaucgacuacaagcacuacacccccuccuucaagaagggcgccaagcugcugcacaagcccaucguguggcacgugaacaacgccaccaacaaggcgacguacaagccgaacaccuggugcauccggugccucuggagcaccaagcccgucgagaccuccaacagcuucgacgugcugaaguccgaggacgcccaggggauggacaaccuggccugcgaggaccucaagcccgugagcgaggaggucguggagaaccccacgauccagaaggacgugcuggagugcaacgucaagaccaccgagguggugggcgacaucauccugaagccggccaacaacucccucaagaucaccgaggaggucgggcacacggaccugauggccgcguacguggacaacagcucccugaccaucaagaagcccaacgagcucagccgcgugcugggccugaagacccucgccacccacgggcuggccgccgucaacuccgugcccugggacacgaucgccaacuacgcgaagccguuccugaacaagguggucagcaccaccaccaacaucgugacgcgcugccucaaccgggugugcaccaacuacaugcccuacuucuucacccugcugcuccagcugugcaccuucacccgcuccacgaacagccggaucaaggccuccaugcccaccaccaucgccaagaacaccgucaagagcgugggcaaguucugccuggaggccagcuucaacuaccucaagucccccaacuucagcaagcugaucaacaucaucaucugguuccugcuccuguccgugugccugggcagccucaucuacuccacggccgcgcuggggguccugaugagcaaccucggcaugccguccuacugcaccggguaccgcgagggcuaccugaacagcaccaacgugaccaucgccacguacugcaccggcuccauccccugcagcgugugccuguccgggcucgacagccuggacaccuaccccucccuggagaccacgcagaucaccaucagcuccuucaagugggaccucaccgccuucggccuggucgccgagugguuccuggccuacauccucuucacccgguucuucuacgugcuggggcuggcggccaucaugcagcucuucuucagcuacuucgccgugcacuucaucuccaacagcuggcugauguggcugaucaucaaccugguccagauggcccccaucuccgcgauggugcgcauguacaucuucuucgccagcuucuacuacguguggaagagcuacguccacgugguggacggcugcaacuccagcacgugcaugaugugcuacaagcggaaccgcgccacccgggucgagugcaccaccaucgugaacgggguccgccgguccuucuacguguacgccaacggcggcaagggguucugcaagcuccacaacuggaacugcgugaacugcgacacguucugcgccggcagcaccuucaucuccgacgaggucgcgcgcgaccugagccugcaguucaagcggccgaucaaccccaccgaccaguccagcuacaucguggacuccgugaccgucaagaacgggagcauccaccucuacuucgacaaggccggccagaagacguacgagcgccacucccugagccacuucgugaaccuggacaaccuccgggccaacaacaccaaggggucccugcccaucaacgugaucgucuucgacggcaagagcaagugcgaggaguccagcgccaaguccgccagcguguacuacucccagcugaugugccagcccauccuccugcuggaccaggcgcucgugagcgacgucggcgacagcgccgagguggccgugaagauguucgacgccuacgucaacaccuucuccagcaccuucaacgugccgauggagaagcugaagacgcugguggccaccgcggaggccgagcucgccaagaacgucucccuggacaacgugcugagcaccuucaucuccgccgcgcgccagggguucguggacagcgacgucgagaccaaggacgugguggagugccucaagcugucccaccagagcgacaucgaggucacgggcgacuccugcaacaacuacaugcugaccuacaacaagguggagaacaugaccccccgggaccucggggccugcaucgacugcagcgcccgccacaucaacgcccagguggccaagucccacaacaucgcgcugaucuggaacgucaaggacuucaugagccuguccgagcagcuccggaagcagauccgcagcgccgccaagaagaacaaccugcccuucaagcugaccugcgccacgacccgccagguggugaacgucgugaccaccaagaucgcccucaagggcgggugaggacuagucccuguucccagagcccacuuuuuuuucuuuuuuugaaauaaaauagccugucuuucagaucucaaaggcucuuuucagagccaccaaaaaaaaaaaaaaaaaaaaaaaaaaaaaaaaaaaaaaaaaaaaaaaaaaaaaaaaaaaaaaaaaaaaaaaaaaaaaaaaaaaaaaaaaaaaaaaaaaaaa

SEQ ID NO: 19789 - RNA, 6113 nt, Artificial Sequence
  SARS-CoV-2__MT800923.1__non-structural protein 3 (NSP3) mRNA gc
aggagagucccgcagucggcguccagcggcucugcuuguucgugugugugucguugcaggccuuauucaagcuuaccauggcccccaccaaggugaccuucggcgacgacacggucaucgaggugcagggguacaagagcgugaacaucaccuucgagcuggacgagcgcaucgacaagguccucaacgagaagugcuccgccuacaccguggagcugggcaccgaggugaacgaguucgcgugcgucguggccgacgccgugaucaagacgcugcagccggucagcgagcuccugaccccccuggggaucgaccucgacgagugguccauggccaccuacuaccuguucgacgagagcggcgaguucaagcuggccucccacauguacugcagcuucuacccccccgacgaggacgaggaggagggggacugcgaggaggaggaguucgagccguccacccaguacgaguacggcacggaggacgacuaccagggcaagccccucgaguucggggcgaccagcgccgcccugcagcccgaggaggagcaggaggaggacuggcuggacgacgacucccagcagaccgugggccagcaggacgggagcgaggacaaccagaccacgaccauccagaccaucguggagguccagccccagcucgagauggagcugaccccgguggugcagacgaucgaggucaacuccuucagcggcuaccugaagcucaccgacaacguguacaucaagaacgccgacaucguggaggaggcgaagaaggucaagcccaccgugguggucaacgccgccaacguguaccugaagcacgggggcggcguggccggggcccugaacaaggcgaccaacaacgccaugcaggucgaguccgacgacuacaucgccacgaacggcccccucaagguggggggcagcugcguccuguccggccacaaccuggccaagcacugccuccacgugguggggcccaacgucaacaagggcgaggacauccagcugcugaagagcgccuacgagaacuucaaccagcacgaggugcuccuggcgccgcugcucuccgccgggaucuucggcgccgaccccauccacagccugcgggugugcgucgacaccgugcgcaccaacguguaccuggccgucuucgacaagaaccucuacgacaagcugguguccagcuuccuggagaugaagagcgagaagcagguggagcagaagaucgccgagauccccaaggaggaggucaagcccuucaucaccgaguccaagccgagcguggagcagcggaagcaggacgacaagaagaucaaggcgugcguggaggaggucacgaccacccucgaggagaccaaguuccugacggagaaccugcuccuguacaucgacaucaacgggaaccugcaccccgacuccgccacccucgugagcgacaucgacaucaccuuccugaagaaggacgcccccuacaucgugggcgacgucgugcaggagggcgugcugaccgccgucgugauccccacgaagaaggccgggggcaccaccgagaugcucgcgaaggcccugcgcaaggugccgaccgacaacuacaucacgaccuaccccgggcagggccugaacggguacaccgucgaggaggccaagaccgugcucaagaagugcaaguccgccuucuacauccugcccagcaucaucuccaacgagaagcaggagauccugggcaccgugagcuggaaccuccgggagaugcuggcgcacgccgaggagacgcgcaagcugaugcccgucugcguggagaccaaggccaucguguccaccauccagcggaaguacaagggcaucaagauccaggagggggucguggacuacggcgcccgcuucuacuucuacaccagcaagacgaccguggccucccugaucaacacccucaacgaccugaacgagacccuggucacgaugccgcucggguacgugacccacggccugaaccuggaggaggcggcccgguacaugcgcagccucaaggugcccgccaccgucuccgugagcucccccgacgccgugaccgccuacaacggguaccugacgagcuccagcaagacccccgaggagcacuucaucgagaccaucucccuggcgggcagcuacaaggacuggagcuacuccggccagagcacccagcucgggaucgaguuccugaagcggggcgacaaguccgucuacuacacgagcaacccgaccaccuuccaccuggacggggaggugaucaccuucgacaaccucaagacgcugcugucccuccgcgaggugcggaccaucaaggucuucaccaccguggacaacaucaaccugcacacgcagguggucgacaugagcaugaccuacggccagcaguucggccccaccuaccuggacggggccgacgugaccaagaucaagccccacaacucccacgagggcaagacguucuacgugcucccgaacgacgacacccugcgcgucgaggccuucgaguacuaccacaccaccgaccccagcuuccuggggcgguacauguccgcccucaaccacacgaagaaguggaaguacccccaggugaacggccugaccagcaucaagugggccgacaacaacugcuaccuggcgaccgcccuccugacccugcagcagaucgagcucaaguucaaccccccggcccugcaggacgccuacuaccgcgcgcgggccggggaggccgccaacuucugcgcccugauccucgcguacugcaacaagacggugggcgagcugggcgacguccgcgagaccauguccuaccuguuccagcacgccaaccucgacagcugcaagcgggugcugaacgucgugugcaagaccugcgggcagcagcagaccacccugaagggcguggaggccgucauguacauggggacgcucuccuacgagcaguucaagaagggcgugcagauccccugcaccugcgggaagcaggccaccaaguaccuggugcagcaggagagccccuucgucaugauguccgcccccccggcgcaguacgagcugaagcacggcaccuucacgugcgccagcgaguacaccggcaacuaccagugcgggcacuacaagcacaucaccuccaaggagacccucuacugcaucgacggcgcccugcugacgaagagcagcgaguacaaggggcccaucaccgacguguucuacaaggagaacuccuacaccaccacgaucaagcccgugaccuacaagcucgacggcgucgugugcaccgagaucgaccccaagcuggacaacuacuacaagaaggacaacagcuacuucaccgagcagccgaucgaccuggugcccaaccagcccuaccccaacgccuccuucgacaacuucaaguucgucugcgacaacaucaaguucgccgacgaccucaaccagcugacgggguacaagaagccggcgagccgcgagcugaaggugaccuucuuccccgaccucaacggcgacguggucgccaucgacuacaagcacuacacccccuccuucaagaagggcgccaagcugcugcacaagcccaucguguggcacgugaacaacgccaccaacaaggcgacguacaagccgaacaccuggugcauccggugccucuggagcaccaagcccgucgagaccuccaacagcuucgacgugcugaaguccgaggacgcccaggggauggacaaccuggccugcgaggaccucaagcccgugagcgaggaggucguggagaaccccacgauccagaaggacgugcuggagugcaacgucaagaccaccgagguggugggcgacaucauccugaagccggccaacaacaucaagaucaccgaggaggucgggcacacggaccucauggccgcguacguggacaacuccagccugaccaucaagaagcccaacgagcugucccgcgugcucggccugaagacccuggccacccacgggcucgccgccgucaacagcgugcccugggacacgaucgccaacuacgcgaagccguuccugaacaagguggucuccaccaccaccaacaucgugacgcgcugccugaaccgggugugcaccaacuacaugcccuacuucuucacccuccugcugcagcucugcaccuucacccgcagcacgaacucccggaucaaggccagcaugcccaccaccaucgccaagaacaccgucaaguccgugggcaaguucugccuggaggccagcuucaacuaccugaagagccccaacuucuccaagcucaucaacaucaucaucugguuccugcugcucagcgugugccugggcucccugaucuacagcacggccgcgcucgggguccugauguccaaccugggcaugccgagcuacugcaccggguaccgcgagggcuaccucaacuccaccaacgugaccaucgccacguacugcaccggcagcauccccugcuccgugugccugagcgggcuggacucccucgacaccuaccccagccuggagaccauccagaucacgaucuccagcuucaagugggaccugaccgccuucggccucgucgccgagugguuccuggccuacauccuguucacccgguucuucuacgugcucgggcuggcggccaucaugcagcuguucuucuccuacuucgccgugcacuucaucagcaacuccuggcucauguggcugaucaucaaccugguccagauggcccccaucagcgcgauggugcgcauguacaucuucuucgccuccuucuacuacguguggaagagcuacguccacgugguggacggcugcaacagcuccaccugcaugaugugcuacaagcggaaccgcgccacgcgggucgagugcaccaccaucgugaacgggguccgccggagcuucuacguguacgccaacggcggcaagggguucugcaagcugcacaacuggaacugcgugaacugcgacaccuucugcgccggcuccacguucaucagcgacgaggucgcgcgcgaccucucccugcaguucaagcggccgaucaaccccaccgaccagagcuccuacaucguggacagcgugaccgucaagaacggguccauccaccuguacuucgacaaggccggccagaagaccuacgagcgccacagccucucccacuucgugaaccuggacaaccugcgggccaacaacacgaaggggagccuccccaucaacgugaucgucuucgacggcaaguccaagugcgaggagagcuccgccaagagcgccuccguguacuacagccagcugaugugccagcccauccugcuccuggaccaggcgcugguguccgacgucggcgacagcgccgagguggccgugaagauguucgacgccuacgucaacaccuucagcuccaccuucaacgugccgauggagaagcucaagacccugguggccacggcggaggccgagcuggccaagaacgucagccucgacaacgugcuguccaccuucaucagcgccgcgcgccagggguucguggacuccgacgucgagaccaaggacgugguggagugccugaagcucagccaccaguccgacaucgaggucaccggcgacagcugcaacaacuacaugcugacguacaacaagguggagaacaugaccccccgggaccugggggccugcaucgacugcuccgcccgccacaucaacgcccagguggccaagagccacaacaucgcgcucaucuggaacgucaaggacuucaugucccugagcgagcagcugcggaagcagauccgcuccgccgccaagaagaacaaccuccccuucaagcugaccugcgccaccacgcgccagguggugaacgucgugaccaccaagaucgcccugaagggcgggaagugaggacuagucccuguucccagagcccacuuuuuuuucuuuuuuugaaauaaaauagccugucuuucagaucucaaaggcucuuuucagagccaccaaaaaaaaaaaaaaaaaaaaaaaaaaaaaaaaaaaaaaaaaaaaaaaaaaaaaaaaaaaaaaaaaaaaaaaaaaaaaaaaaaaaaaaaaaaaaaaaaaaaa

SEQ ID NO: 19790 - RNA, 6113 nt, Artificial Sequence
  SARS-CoV-2__MT797764.1__non-structural protein 3 (NSP3) mRNA gc
aggagagucccgcagucggcguccagcggcucugcuuguucgugugugugucguugcaggccuuauucaagcuuaccauggcccccaccaaggugaccuucggcgacgacacggucaucgaggugcagggguacaagagcgugaacaucaccuucgagcuggacgagcgcaucgacaagguccucaacgagaagugcuccgccuacaccguggagcugggcaccgaggugaacgaguucgcgugcgucguggccgacgccgugaucaagacgcugcagccggucagcgagcuccugaccccccuggggaucgaccucgacgagugguccauggccaccuacuaccuguucgacgagagcggcgaguucaagcuggccucccacauguacugcagcuucuacccccccgacgaggacgaggaggagggggacugcgaggaggaggaguucgagccguccacccaguacgaguacggcacggaggacgacuaccagggcaagccccucgaguucggggcgaccagcgccgcccugcagcccgaggaggagcaggaggaggacuggcuggacgacgacucccagcagaccgugggccagcaggacgggagcgaggacaaccagaccacgaccauccagaccaucguggagguccagccccagcucgagauggagcugaccccgguggugcagacgaucgaggucaacuccuucagcggcuaccugaagcucaccgacaacguguacaucaagaacgccgacaucguggaggaggcgaagaaggucaagcccaccgugguggucaacgccgccaacguguaccugaagcacgggggcggcguggccggggcccugaacaaggcgaccaacaacgccaugcaggucgaguccgacgacuacaucgccacgaacggcccccucaagguggggggcagcugcguccuguccggccacaaccuggccaagcacugccuccacgugguggggcccaacgucaacaagggcgaggacauccagcugcugaagagcgccuacgagaacuucaaccagcacgaggugcuccuggcgccgcugcucuccgccgggaucuucggcgccgaccccauccacagccugcgggugugcgucgacaccgugcgcaccaacguguaccuggccgucuucgacaagaaccucuacgacaagcugguguccagcuuccuggagaugaagagcgagaagcagguggagcagaagaucgccgagauccccaaggaggaggucaagcccuucaucaccgaguccaagccgagcguggagcagcggaagcaggacgacaagaagaucaaggcgugcguggaggaggucacgaccacccucgaggagaccaaguuccugacggagaaccugcuccuguacaucgacaucaacgggaaccugcaccccgacuccgccacccucgugagcgacaucgacaucaccuuccugaagaaggacgcccccuacaucgugggcgacgucgugcaggagggcgugcugaccgccgucgugauccccacgaagaaggccgggggcaccaccgagaugcucgcgaaggcccugcgcaaggugccgaccgacaacuacaucacgaccuaccccgggcagggccugaacggguacaccgucgaggaggccaagaccgugcucaagaagugcaaguccgccuucuacauccugcccagcaucaucuccaacgagaagcaggagauccugggcaccgugagcuggaaccuccgggagaugcuggcgcacgccgaggagacgcgcaagcugaugcccgucugcguggagaccaaggccaucguguccaccauccagcggaaguacaagggcaucaagauccaggagggggucguggacuacggcgcccgcuucuacuucuacaccagcaagacgaccguggccucccugaucaacacccucaacgaccugaacgagacccuggucacgaugccgcucggguacgugacccacggccugaaccuggaggaggcggcccgguacaugcgcagccucaaggugcccgccaccgucuccgugagcucccccgacgccgugaccgccuacaacggguaccugacgagcuccagcaagacccccgaggagcacuucaucgagaccaucucccuggcgggcagcuacaaggacuggagcuacuccggccagagcacccagcucgggaucgaguuccugaagcggggcgacaaguccgucuacuacacgagcaacccgaccaccuuccaccuggacggggaggugaucaccuucgacaaccucaagacgcugcugucccuccgcgaggugcggaccaucaaggucuucaccaccguggacaacaucaaccugcacacgcagguggucgacaugagcaugaccuacggccagcaguucggccccaccuaccuggacggggccgacgugaccaagaucaagccccacaacucccacgagggcaagacguucuacgugcucccgaacgacgacacccugcgcgucgaggccuucgaguacuaccacaccaccgaccccagcuuccuggggcgguacauguccgcccucaaccacacgaagaaguggaaguacccccaggugaacggccugaccagcaucaagugggccgacaacaacugcuaccuggcgaccgcccuccugacccugcagcagaucgagcucaaguucaaccccccggcccugcaggacgccuacuaccgcgcgcgggccggggaggccgccaacuucugcgcccugauccucgcguacugcaacaagacggugggcgagcugggcgacguccgcgagaccauguccuaccuguuccagcacgccaaccucgacagcugcaagcgggugcugaacgucgugugcaagaccugcgggcagcagcagaccacccugaagggcguggaggccgucauguacauggggacgcucuccuacgagcaguucaagaagggcgugcagauccccugcaccugcgggaagcaggccaccaaguaccuggugcagcaggagagccccuucgucaugauguccgcccccccggcgcaguacgagcugaagcacggcaccuucacgugcgccagcgaguacaccggcaacuaccagugcgggcacuacaagcacaucaccuccaaggagacccucuacugcaucgacggcgcccugcugacgaagagcagcgaguacaaggggcccaucaccgacguguucuacaaggagaacuccuacaccaccacgaucaagcccgugaccuacaagcucgacggcgucgugugcaccgagaucgaccccaagcuggacgacuacuacaagaaggacaacagcuacuucaccgagcagccgaucgaccuggugcccaaccagcccuaccccaacgccuccuucgacaacuucaaguucgucugcgacaacaucaaguucgccgacgaccucaaccagcugacgggguacaagaagccggcgagccgcgagcugaaggugaccuucuuccccgaccucaacggcgacguggucgccaucgacuacaagcacuacacccccuccuucaagaagggcgccaagcugcugcacaagcccaucguguggcacgugaacaacgccaccaacaaggcgacguacaagccgaacaccuggugcauccggugccucuggagcaccaagcccgucgagaccuccaacagcuucgacgugcugaaguccgaggacgcccaggggauggacaaccuggccugcgaggaccucaagcccgugagcgaggaggucguggagaaccccacgauccagaaggacgugcuggagugcaacgucaagaccaccgagguggugggcgacaucauccugaagccggccaacaacucccucaagaucaccgaggaggucgggcacacggaccugauggccgcguacguggacaacagcucccugaccaucaagaagcccaacgagcucagccgcgugcugggccugaagacccucgccacccacgggcuggccgccgucaacuccgugcccugggacacgaucgccaacuacgcgaagccguuccugaacaagguggucagcaccaccaccaacaucgugacgcgcugccucaaccgggugugcaccaacuacaugcccuacuucuucacccugcugcuccagcugugcaccuucacccgcuccacgaacagccggaucaaggccuccaugcccaccaccaucgccaagaacaccgucaagagcgugggcaaguucugccuggaggccagcuucaacuaccucaagucccccaacuucagcaagcugaucaacaucaucaucugguuccugcuccuguccgugugccugggcagccucaucuacuccacggccgcgcuggggguccugaugagcaaccucggcaugccguccuacugcaccggguaccgcgagggcuaccugaacagcaccaacgugaccaucgccacguacugcaccggcuccauccccugcagcgugugccuguccgggcucgacagccuggacaccuaccccucccuggagaccauccagaucacgaucagcuccuucaagugggaccucaccgccuucggccuggucgccgagugguuccuggccuacauccucuucacccgguucuucuacgugcuggggcuggcggccaucaugcagcucuucuucagcuacuucgccgugcacuucaucuccaacagcuggcugauguggcugaucaucaaccugguccagauggcccccaucuccgcgauggugcgcauguacaucuucuucgccagcuucuacuacguguggaagagcuacguccacgugguggacggcugcaacuccagcaccugcaugaugugcuacaagcggaaccgcgccacgcgggucgagugcaccaccaucgugaacgggguccgccgguccuucuacguguacgccaacggcggcaagggguucugcaagcuccacaacuggaacugcgugaacugcgacaccuucugcgccggcagcacguucaucuccgacgaggucgcgcgcgaccugagccugcaguucaagcggccgaucaaccccaccgaccaguccagcuacaucguggacuccgugaccgucaagaacgggagcauccaccucuacuucgacaaggccggccagaagaccuacgagcgccacucccugagccacuucgugaaccuggacaaccuccgggccaacaacacgaaggggucccugcccaucaacgugaucgucuucgacggcaagagcaagugcgaggaguccagcgccaaguccgccagcguguacuacucccagcugaugugccagcccauccuccugcuggaccaggcgcucgugagcgacgucggcgacagcgccgagguggccgugaagauguucgacgccuacgucaacaccuucuccagcaccuucaacgugccgauggagaagcugaagacccugguggccacggcggaggccgagcucgccaagaacgucucccuggacaacgugcugagcaccuucaucuccgccgcgcgccagggguucguggacagcgacgucgagaccaaggacgugguggagugccucaagcugucccaccagagcgacaucgaggucaccggcgacuccugcaacaacuacaugcugacguacaacaagguggagaacaugaccccccgggaccucggggccugcaucgacugcagcgcccgccacaucaacgcccagguggccaagucccacaacaucgcgcugaucuggaacgucaaggacuucaugagccuguccgagcagcuccggaagcagauccgcagcgccgccaagaagaacaaccugcccuucaagcugaccugcgccaccacgcgccagguggugaacgucgugaccaccaagaucgcccucaagggcgggugaggacuagucccuguucccagagcccacuuuuuuuucuuuuuuugaaauaaaauagccugucuuucagaucucaaaggcucuuuucagagccaccaaaaaaaaaaaaaaaaaaaaaaaaaaaaaaaaaaaaaaaaaaaaaaaaaaaaaaaaaaaaaaaaaaaaaaaaaaaaaaaaaaaaaaaaaaaaaaaaaaaaa

SEQ ID NO: 19791 - RNA, 6113 nt, Artificial Sequence
  SARS-CoV-2__MT797765.1__non-structural protein 3 (NSP3) mRNA gc
aggagagucccgcagucggcguccagcggcucugcuuguucgugugugugucguugcaggccuuauucaagcuuaccauggcccccaccaaggugaccuucggcgacgacacggucaucgaggugcagggguacaagagcgugaacaucaccuucgagcuggacgagcgcaucgacaagguccucaacgagaagugcuccgccuacaccguggagcugggcaccgaggugaacgaguucgcgugcgucguggccgacgccgugaucaagacgcugcagccggucagcgagcuccugaccccccuggggaucgaccucgacgagugguccauggccaccuacuaccuguucgacgagagcggcgaguucaagcuggccucccacauguacugcagcuucuacccccccgacgaggacgaggaggagggggacugcgaggaggaggaguucgagccguccacccaguacgaguacggcacggaggacgacuaccagggcaagccccucgaguucggggcgaccagcgccgcccugcagcuggaggaggagcaggaggaggacuggcucgacgacgacucccagcagaccgugggccagcaggacgggagcgaggacaaccagaccacgaccauccagaccaucguggagguccagccccagcuggagauggagcugacccccguggugcagacgaucgaggucaacuccuucagcggcuaccucaagcugaccgacaacguguacaucaagaacgccgacaucguggaggaggcgaagaaggucaagccgaccgugguggucaacgccgccaacguguaccugaagcacgggggcggcguggccggggcccucaacaaggcgaccaacaacgccaugcaggucgaguccgacgacuacaucgccacgaacggcccccugaagguggggggcagcugcguccuguccggccacaaccucgccaagcacugccugcacgugguggggcccaacgucaacaagggcgaggacauccagcugcucaagagcgccuacgagaacuucaaccagcacgaggugcugcuggcgccccuccuguccgccgggaucuucggcgccgacccgauccacagccugcgggugugcgucgacaccgugcgcaccaacguguaccucgccgucuucgacaagaaccuguacgacaagcugguguccagcuuccucgagaugaagagcgagaagcagguggagcagaagaucgccgagauccccaaggaggaggucaagcccuucaucaccgaguccaagcccagcguggagcagcggaagcaggacgacaagaagaucaaggcgugcguggaggaggucacgaccacccuggaggagaccaaguuccugacggagaaccuccugcuguacaucgacaucaacgggaaccuccacccggacuccgccacccuggugagcgacaucgacaucaccuuccugaagaaggacgcccccuacaucgugggcgacgucgugcaggagggcgugcucaccgccgucgugauccccacgaagaaggccgggggcaccaccgagaugcuggcgaaggcccugcgcaaggugcccaccgacaacuacaucacgaccuacccggggcagggccucaacggguacaccgucgaggaggccaagaccgugcugaagaagugcaaguccgccuucuacauccugcccagcaucaucuccaacgagaagcaggagauccucggcaccgugagcuggaaccugcgggagaugcuggcgcacgccgaggagacgcgcaagcugaugcccgucugcguggagaccaaggccaucguguccaccauccagcggaaguacaagggcaucaagauccaggagggggucguggacuacggcgcccgcuucuacuucuacaccagcaagacgaccguggccucccucaucaacacccugaacgaccugaacgagacccucgucacgaugccccugggguacgugacccacggccugaaccucgaggaggcggcccgguacaugcgcagccugaaggugccggccaccgucuccgugagcucccccgacgccgugaccgccuacaacggguaccugacgagcuccagcaagacccccgaggagcacuucaucgagaccaucucccucgcgggcagcuacaaggacuggagcuacuccggccagagcacccagcuggggaucgaguuccugaagcggggcgacaaguccgucuacuacacgagcaaccccaccaccuuccaccucgacggggaggugaucaccuucgacaaccugaagacgcugcucucccugcgcgaggugcggaccaucaaggucuucaccaccguggacaacaucaaccugcacacgcagguggucgacaugagcaugaccuacggccagcaguucggcccgaccuaccucgacggggccgacgugaccaagaucaagccccacaacucccacgagggcaagacguucuacgugcugcccaacgacgacacccugcgcgucgaggccuucgaguacuaccacaccaccgacccgagcuuccucgggcgguacauguccgcccugaaccacacgaagaaguggaaguacccccaggugaacggccugaccagcaucaagugggccgacaacaacugcuaccucgcgaccgcccugcugacccuccagcagaucgagcugaaguucaacccccccgcccugcaggacgccuacuaccgcgcgcgggccggggaggccgccaacuucugcgcccucauccuggcguacugcaacaagacggugggcgagcugggcgacguccgcgagaccauguccuaccucuuccagcacgccaaccuggacagcugcaagcgggugcugaacgucgugugcaagaccugcgggcagcagcagaccacccucaagggcguggaggccgucauguacauggggacgcuguccuacgagcaguucaagaagggcgugcagaucccgugcaccugcgggaagcaggccaccaaguaccuggugcagcaggagagccccuucgucaugauguccgccccccccgcgcaguacgagcucaagcacggcaccuucacgugcgccagcgaguacaccggcaacuaccagugcgggcacuacaagcacaucaccuccaaggagacccuguacugcaucgacggcgcccugcucacgaagagcagcgaguacaaggggccgaucaccgacguguucuacaaggagaacuccuacaccaccacgaucaagcccgugaccuacaagcuggacggcgucgugugcaccgagaucgaccccaagcuggacaacuacuacaagaaggacaacagcuacuucaccgagcagcccaucgaccucgugccgaaccagcccuaccccaacgccuccuucgacaacuucaaguucgucugcgacaacaucaaguucgccgacgaccugaaccagcugacgggguacaagaagcccgcgagccgcgagcucaaggugaccuucuucccggaccugaacggcgacguggucgccaucgacuacaagcacuacacccccuccuucaagaagggcgccaagcugcuccacaagcccaucguguggcacgugaacaacgccaccaacaaggcgacguacaagcccaacaccuggugcauccggugccuguggagcaccaagccggucgagaccuccaacagcuucgacgugcugaaguccgaggacgcccaggggauggacaaccucgccugcgaggaccugaagcccgugagcgaggaggucguggagaaccccacgauccagaaggacgugcuggagugcaacgucaagaccaccgagguggugggcgacaucauccucaagcccgccaacaacucccugaagaucaucgaggaggucgggcacaccgaccugauggccgcguacguggacaacagcucccucacgaucaagaagccgaacgagcugagccgcgugcugggccucaagacccuggccacccacgggcuggccgccgucaacuccgugcccugggacaccaucgccaacuacgcgaagcccuuccucaacaagguggucagcacgaccaccaacaucgugacccgcugccugaaccgggugugcacgaacuacaugccguacuucuucacccugcuccugcagcugugcaccuucacccgcuccaccaacagccggaucaaggccuccaugcccacgaccaucgccaagaacaccgucaagagcgugggcaaguucugccucgaggccagcuucaacuaccugaagucccccaacuucagcaagcugaucaacaucaucaucugguuccuccugcuguccgugugccucggcagccugaucuacuccaccgccgcgcuggggguccucaugagcaaccugggcaugcccuccuacugcacgggguaccgcgagggcuaccugaacagcaccaacgugaccaucgccaccuacugcacgggcuccaucccgugcagcgugugccucuccgggcuggacagccuggacaccuaccccucccucgagaccauccagaucaccaucagcuccuucaagugggaccugacggccuucggccuggucgccgagugguuccucgccuacauccuguucacccgguucuucuacgugcuggggcucgcggccaucaugcagcuguucuucagcuacuucgccgugcacuucaucuccaacagcuggcugauguggcugaucaucaaccucguccagauggcccccaucuccgcgauggugcgcauguacaucuucuucgccagcuucuacuacguguggaagagcuacguccacgugguggacggcugcaacuccagcaccugcaugaugugcuacaagcggaaccgcgccacccgggucgagugcacgaccaucgugaacgggguccgccgguccuucuacguguacgccaacggcggcaagggguucugcaagcugcacaacuggaacugcgugaacugcgacaccuucugcgccggcagcaccuucaucuccgacgaggucgcgcgcgaccugagccuccaguucaagcggcccaucaacccgacggaccaguccagcuacaucguggacuccgugaccgucaagaacgggagcauccaccuguacuucgacaaggccggccagaagaccuacgagcgccacucccugagccacuucgugaaccucgacaaccugcgggccaacaacaccaaggggucccugcccaucaacgugaucgucuucgacggcaagagcaagugcgaggaguccagcgccaaguccgccagcguguacuacucccagcucaugugccagcccauccugcugcucgaccaggcgcuggugagcgacgucggcgacagcgccgagguggccgugaagauguucgacgccuacgucaacacguucuccagcaccuucaacgugcccauggagaagcugaagacccucguggccaccgcggaggccgagcuggccaagaacgucucccuggacaacgugcucagcacguucaucuccgccgcgcgccagggguucguggacagcgacgucgagaccaaggacgugguggagugccugaagcugucccaccagagcgacaucgaggucaccggcgacuccugcaacaacuacaugcucaccuacaacaagguggagaacaugacgccgcgggaccugggggccugcaucgacugcagcgcccgccacaucaacgcccagguggccaagucccacaacaucgcgcugaucuggaacgucaaggacuucaugagccucuccgagcagcugcggaagcagauccgcagcgccgccaagaagaacaaccugcccuucaagcucaccugcgccaccacccgccagguggugaacgucgugacgaccaagaucgcccugaagggcgggugaggacuagucccuguucccagagcccacuuuuuuuucuuuuuuugaaauaaaauagccugucuuucagaucucaaaggcucuuuucagagccaccaaaaaaaaaaaaaaaaaaaaaaaaaaaaaaaaaaaaaaaaaaaaaaaaaaaaaaaaaaaaaaaaaaaaaaaaaaaaaaaaaaaaaaaaaaaaaaaaaaaaa

SEQ ID NO: 19792 - RNA, 6113 nt, Artificial Sequence
  SARS-CoV-2__MT791880.1__non-structural protein 3 (NSP3) mRNA gc
aggagagucccgcagucggcguccagcggcucugcuuguucgugugugugucguugcaggccuuauucaagcuuaccauggcccccaccaaggugaccuucggcgacgacacggucaucgaggugcagggguacaagagcgugaacaucaccuucgagcuggacgagcgcaucgacaagguccucaacgagaagugcuccgccuacaccguggagcugggcaccgaggugaacgaguucgcgugcgucguggccgacgccgugaucaagacgcugcagccggucagcgagcuccugaccccccuggggaucgaccucgacgagugguccauggccaccuacuaccuguucgacgagagcggcgaguucaagcuggccucccacauguacugcagcuucuacccccccgacgaggacgaggaggagggggacugcgaggaggaggaguucgagccguccacccaguacgaguacggcacggaggacgacuaccagggcaagccccucgaguucggggcgaccagcgccgcccugcagcccgaggaggagcaggaggaggacuggcuggacgacgacucccagcagaccgugggccagcaggacgggagcgaggacaaccagaccacgaccauccagaccaucguggagguccagccccagcucgagauggagcugaccccgguggugcagacgaucgaggucaacuccuucagcggcuaccugaagcucaccgacaacguguacaucaagaacgccgacaucguggaggaggcgaagaaggucaagcccaccgugguggucaacgccgccaacguguaccugaagcacgggggcggcguggccggggcccugaacaaggcgaccaacaacgccaugcaggucgaguccgacgacuacaucgccacgaacggcccccucaagguggggggcagcugcguccuguccggccacaaccuggccaagcacugccuccacgugguggggcccaacgucaacaagggcgaggacauccagcugcugaagagcgccuacgagaacuucaaccagcacgaggugcuccuggcgccgcugcucuccgccgggaucuucggcgccgaccccauccacagccugcgggugugcgucgacaccgugcgcaccaacguguaccuggccgucuucgacaagaaccucuacgacaagcugguguccagcuuccuggagaugaagagcgagaagcagguggagcagaagaucgccgagauccccaaggaggaggucaagcccuucaucaccgaguccaagccgagcguggagcagcggaagcaggacgacaagaagaucaaggcgugcguggaggaggucacgaccacccucgaggagaccaaguuccugacggagaaccugcuccuguacaucgacaucaacgggaaccugcaccccgacuccgccacccucgugagcgacaucgacaucaccuuccugaagaaggacgcccccuacaucgugggcgacgucgugcaggagggcgugcugaccgccgucgugauccccacgaagaaggccgggggcaccaccgagaugcucgcgaaggcccugcgcaaggugccgaccgacaacuacaucacgaccuaccccgggcagggccugaacggguacaccgucgaggaggccaagaccgugcucaagaagugcaaguccgccuucuacauccugcccagcaucaucuccaacgagaagcaggagauccugggcaccgugagcuggaaccuccgggagaugcuggcgcacgccgaggagacgcgcaagcugaugcccgucugcguggagaccaaggccaucguguccaccauccagcggaaguacaagggcaucaagauccaggagggggucguggacuacggcgcccgcuucuacuucuacaccagcaagacgaccguggccucccugaucaacacccucaacgaccugaacgagacccuggucacgaugccgcucggguacgugacccacggccugaaccuggaggaggcggcccgguacaugcgcagccucaaggugcccgccaccgucuccgugagcucccccgacgccgugaccgccuacaacggguaccugacgagcuccagcaagacccccgaggagcacuucaucgagaccaucucccuggcgggcagcuacaaggacuggagcuacuccggccagagcacccagcucgggaucgaguuccugaagcggggcgacaaguccgucuacuacacgagcaacccgaccaccuuccaccuggacggggaggugaucaccuucgacaaccucaagacgcugcugucccuccgcgaggugcggaccaucaaggucuucaccaccguggacaacaucaaccugcacacgcagguggucgacaugagcaugaccuacggccagcaguucggccccaccuaccuggacggggccgacgugaccaagaucaagccccacaacucccacgagggcaagacguucuacgugcucccgaacgacgacacccugcgcgucgaggccuucgaguacuaccacaccaccgaccccagcuuccuggggcgguacauguccgcccucaaccacacgaagaaguggaaguacccccaggugaacggccugaccagcaucaagugggccgacaacaacugcuaccuggcgaccgcccuccugacccugcagcagaucgagcucaaguucaaccccccggcccugcaggacgccuacuaccgcgcgcgggccggggaggccgccaacuucugcgcccugauccucgcguacugcaacaagacggugggcgagcugggcgacguccgcgagaccauguccuaccuguuccagcacgccaaccucgacagcugcaagcgggugcugaacgucgugugcaagaccugcgggcagcagcagaccacccugaagggcguggaggccgucauguacauggggacgcucuccuacgagcaguucaagaagggcgugcagauccccugcaccugcgggaagcaggccaccaaguaccuggugcagcaggagagccccuucgucaugauguccgcccccccggcgcaguacgagcugaagcacggcaccuucacgugcgccagcgaguacaccggcaacuaccagugcgggcacuacaagcacaucaccuccaaggagacccucuacugcaucgacggcgcccugcugacgaagagcagcgaguacaaggggcccaucaccgacguguucuacaaggagaacuccuacaccaccacgaucaagcccgugaccuacaagcucgacggcgucgugugcaccgagaucgaccccaagcuggacaacuacuacaagaaggacaacagcuacuucaccgagcagccgaucgaccuggugcccaaccagcccuaccccaacgccuccuucgacaacuucaaguucgucugcgacaacaucaaguucgccgacgaccucaaccagcugacgggguacaagaagccggcgagccgcgagcugaaggugaccuucuuccccgaccucaacggcgacguggucgccaucgacuacaagcacuacacccccuccuucaagaagggcgccaagcugcugcacaagcccaucguguggcacgugaacaacgccaccaacaaggcgacguacaagccgaacaccuggugcauccggugccucuggagcaccaagcccgucgagaccuccaacagcuucgacgugcugaaguccgaggacgcccaggggauggacaaccuggccugcgaggaccucaagcccgugagcgaggaggucguggagaaccccacgauccagaaggacgugcuggagugcaacgucaagaccaccgagguggugggcgacaucauccugaagccggccaacaacucccucaagaucaccgaggaggucgggcacacggaccugauggccgcguacguggacaacagcucccugaccaucaagaagcccaacgagcucagccgcgugcugggccugaagacccucgccacccacgggcuggccgccgucaacuccgugcccugggacacgaucgccaacuacgcgaagccguuccugaacaagguggucagcaccaccaccaacaucgugacgcgcugccucaaccgggugugcaccaacuacaugcccuacuucuucacccugcugcuccagcugugcaccuucacccgcuccacgaacagccggaucaaggccuccaugcccaccaccaucgccaagaacaccgucaagagcgugggcaaguucugccuggaggccagcuucaacuaccucaagucccccaacuucagcaagcugaucaacaucaucaucugguuccugcuccuguccgugugccugggcagccucaucuacuccacggccgcgcuggggguccugaugagcaaccucggcaugccguccuacugcaccggguaccgcgagggcuaccugaacagcaccaacgugaccaucgccacguacugcaccggcuccauccccugcagcgugugccuguccgggcucgacagccuggacaccuaccccucccuggagaccauccagaucacgaucagcuccuucaagugggaccucaccgccuucggccuggucgccgagugguuccuggccuacauccucuucacccgguucuucuacgugcuggggcuggcggccaucaugcagcucuucuucagcuacuucgccgugcacuucaucuccaacagcuggcugauguggcugaucaucaaccugguccagauggcccccaucuccgcgauggugcgcauguacaucuucuucgccagcuucuacuacguguggaagagcuacguccacgugguggacggcugcaacuccagcaccugcaugaugugcuacaagcggaaccgcgccacgcgggucgagugcaccaccaucgugaacgggguccgccgguccuucuacguguacgccaacggcggcaagggguucugcaagcuccacaacuggaacugcgugaacugcgacaccuucuacgccggcagcacguucaucuccgacgaggucgcgcgcgaccugagccugcaguucaagcggccgaucaaccccaccgaccaguccagcuacaucguggacuccgugaccgucaagaacgggagcauccaccucuacuucgacaaggccggccagaagaccuacgagcgccacucccugagccacuucgugaaccuggacaaccuccgggccaacaacacgaaggggucccugcccaucaacgugaucgucuucgacggcaagagcaagugcgaggaguccagcgccaaguccgccagcguguacuacucccagcugaugugccagcccauccuccugcuggaccaggcgcucgugagcgacgucggcgacagcgccgagguggccgugaagauguucgacgccuacgucaacaccuucuccagcaccuucaacgugccgauggagaagcugaagacccugguggccacggcggaggccgagcucgccaagaacgucucccuggacaacgugcugagcaccuucaucuccgccgcgcgccagggguucguggacagcgacgucgagaccaaggacgugguggagugccucaagcugucccaccagagcgacaucgaggucaccggcgacuccugcaacaacuacaugcugacguacaacaagguggagaacaugaccccccgggaccucggggccugcaucgacugcagcgcccgccacaucaacgcccagguggccaagucccacaacaucgcgcugaucuggaacgucaaggacuucaugagccuguccgagcagcuccggaagcagauccgcagcgccgccaagaagaacaaccugcccuucaagcugaccugcgccaccacgcgccagguggugaacgucgugaccaccaagaucgcccucaagggcgggugaggacuagucccuguucccagagcccacuuuuuuuucuuuuuuugaaauaaaauagccugucuuucagaucucaaaggcucuuuucagagccaccaaaaaaaaaaaaaaaaaaaaaaaaaaaaaaaaaaaaaaaaaaaaaaaaaaaaaaaaaaaaaaaaaaaaaaaaaaaaaaaaaaaaaaaaaaaaaaaaaaaaa

SEQ ID NO: 19793 - RNA, 6113 nt, Artificial Sequence
  SARS-CoV-2__MT791915.1__non-structural protein 3 (NSP3) mRNA gc
aggagagucccgcagucggcguccagcggcucugcuuguucgugugugugucguugcaggccuuauucaagcuuaccauggcccccaccaaggugaccuucggcgacgacacggucaucgaggugcagggguacaagagcgugaacaucaccuucgagcuggacgagcgcaucgacaagguccucaacgagaagugcuccgccuacaccguggagcugggcaccgaggugaacgaguucgcgugcgucguggccgacgccgugaucaagacgcugcagccggucagcgagcuccugaccccccuggggaucgaccucgacgagugguccauggccaccuacuaccuguucgacgagagcggcgaguucaagcuggccucccacauguacugcagcuucuacccccccgacgaggacgaggaggagggggacugcgaggaggaggaguucgagccguccacccaguacgaguaccggacggaggacgacuaccagggcaagccccucgaguucggcgcgaccagcgccgcccugcagcccgaggaggagcaggaggaggacuggcuggacgacgacucccagcagaccguggggcagcaggacggcagcgaggacaaccagaccacgaccauccagaccaucguggagguccagccccagcucgagauggagcugaccccgguggugcagacgaucgaggucaacuccuucagcggguaccugaagcucaccgacaacguguacaucaagaacgccgacaucguggaggaggcgaagaaggucaagcccaccgugguggucaacgccgccaacguguaccugaagcacggcgggggcguggccggcgcccugaacaaggcgaccaacaacgccaugcaggucgaguccgacgacuacaucgccacgaacgggccccucaaggugggcgggagcugcguccuguccggccacaaccuggccaagcacugccuccacguggugggccccaacgucaacaagggggaggacauccagcugcugaagagcgccuacgagaacuucaaccagcacgaggugcuccuggcgccgcugcucuccgccggcaucuucggggccgaccccauccacagccugcgcgugugcgucgacaccgugcggaccaacguguaccuggccgucuucgacaagaaccucuacgacaagcugguguccagcuuccuggagaugaagagcgagaagcagguggagcagaagaucgccgagauccccaaggaggaggucaagcccuucaucaccgaguccaagccgagcguggagcagcgcaagcaggacgacaagaagaucaaggcgugcguggaggaggucacgaccacccucgaggagaccaaguuccugacggagaaccugcuccuguacaucgacaucaacggcaaccugcaccccgacuccgccacccucgugagcgacaucgacaucaccuuccugaagaaggacgcccccuacaucgugggggacgucgugcaggagggcgugcugaccgccgucgugauccccacgaagaaggccggcgggaccaccgagaugcucgcgaaggcccugcggaaggugccgaccgacaacuacaucacgaccuaccccggccaggggcugaacggcuacaccgucgaggaggccaagaccgugcucaagaagugcaaguccgccuucuacauccugcccagcaucaucuccaacgagaagcaggagauccuggggaccgugagcuggaaccuccgcgagaugcuggcgcacgccgaggagacgcggaagcugaugcccgucugcguggagaccaaggccaucguguccaccauccagcgcaaguacaagggcaucaagauccaggagggcgucguggacuacggggcccgguucuacuucuacaccagcaagacgaccguggccucccugaucaacacccucaacgaccugaacgagacccuggucacgaugccgcucggcuacgugacccacgggcugaaccuggaggaggcggcccgcuacaugcggagccucaaggugcccgccaccgucuccgugagcucccccgacgccgugaccgccuacaacggcuaccugacgagcuccagcaagacccccgaggagcacuucaucgagaccaucucccuggcggggagcuacaaggacuggagcuacuccggccagagcacccagcucggcaucgaguuccugaagcgcggggacaaguccgucuacuacacgagcaacccgaccaccuuccaccuggacggcgaggugaucaccuucgacaaccucaagacgcugcugucccuccgggaggugcgcaccaucaaggucuucaccaccguggacaacaucaaccugcacacgcagguggucgacaugagcaugaccuacgggcagcaguucggccccaccuaccuggacggcgccgacgugaccaagaucaagccccacaacucccacgaggggaagacguucuacgugcucccgaacgacgacacccugcgggucgaggccuucgaguacuaccacaccaccgaccccagcuuccugggccgcuacauguccgcccucaaccacacgaagaaguggaaguacccccaggugaacgggcugaccagcaucaagugggccgacaacaacugcuaccuggcgaccgcccuccugacccugcagcagaucgagcucaaguucaaccccccggcccugcaggacgccuacuaccgggcgcgcgccggcgaggccgccaacuucugcgcccugauccucgcguacugcaacaagacggugggggagcugggcgacguccgggagaccauguccuaccuguuccagcacgccaaccucgacagcugcaagcgcgugcugaacgucgugugcaagaccugcggccagcagcagaccacccugaaggggguggaggccgucauguacaugggcacgcucuccuacgagcaguucaagaagggggugcagauccccugcaccugcggcaagcaggccaccaaguaccuggugcagcaggagagccccuucgucaugauguccgcccccccggcgcaguacgagcugaagcacgggaccuucacgugcgccagcgaguacaccggcaacuaccagugcggccacuacaagcacaucaccuccaaggagacccucuacugcaucgacggggcccugcugacgaagagcagcgaguacaagggccccaucaccgacguguucuacaaggagaacuccuacaccaccacgaucaagcccgugaccuacaagcucgacggggucgugugcaccgagaucgaccccaagcuggacaacuacuacaagaaggacaacagcuacuucaccgagcagccgaucgaccuggugcccaaccagcccuaccccaacgccuccuucgacaacuucaaguucgucugcgacaacaucaaguucgccgacgaccucaaccagcugacgggcuacaagaagccggcgagccgggagcugaaggugaccuucuuccccgaccucaacggggacguggucgccaucgacuacaagcacuacacccccuccuucaagaagggcgccaagcugcugcacaagcccaucguguggcacgugaacaacgccaccaacaaggcgacguacaagccgaacaccuggugcauccgcugccucuggagcaccaagcccgucgagaccuccaacagcuucgacgugcugaaguccgaggacgcccagggcauggacaaccuggccugcgaggaccucaagcccgugagcgaggaggucguggagaaccccacgauccagaaggacgugcuggagugcaacgucaagaccaccgagguggugggggacaucauccugaagccggccaacaacucccucaagaucaccgaggaggucggccacacggaccugauggccgcguacguggacaacagcucccugaccaucaagaagcccaacgagcucagccgcgugcuggggcugaagacccucgccacccacggccuggccgccgucaacuccgugcccugggacacgaucgccaacuacgcgaagccguuccugaacaagguggucagcaccaccaccaacaucgugacgcggugccucaaccgcgugugcaccaacuacaugcccuacuucuucacccugcugcuccagcugugcaccuucacccgguccacgaacagccgcaucaaggccuccaugcccaccaccaucgccaagaacaccgucaagagcguggggaaguucugccuggaggccagcuucaacuaccucaagucccccaacuucagcaagcugaucaacaucaucaucugguuccugcuccuguccgugugccugggcagccucaucuacuccacggccgcgcugggcguccugaugagcaaccucgggaugccguccuacugcaccggcuaccgggagggguaccugaacagcaccaacgugaccaucgccacguacugcaccggcuccauccccugcagcgugugccuguccggccucgacagccuggacaccuaccccucccuggagaccauccagaucacgaucagcuccuucaagugggaccucaccgccuucgggcuggucgccgagugguuccuggccuacauccucuucacccgcuucuucuacgugcugggccuggcggccaucaugcagcucuucuucagcuacuucgccgugcacuucaucuccaacagcuggcugauguggcugaucaucaaccugguccagauggcccccaucuccgcgauggugcggauguacaucuucuucgccagcuucuacuacguguggaagagcuacguccacgugguggacgggugcaacuccagcaccugcaugaugugcuacaagcgcaaccgggccacgcgcgucgagugcaccaccaucgugaacggcguccggcgcuccuucuacguguacgccaacgggggcaagggcuucugcaagcuccacaacuggaacugcgugaacugcgacaccuucugcgccgggagcacguucaucuccgacgaggucgcgcgggaccugagccugcaguucaagcgcccgaucaaccccaccgaccaguccagcuacaucguggacuccgugaccgucaagaacggcagcauccaccucuacuucgacaaggccgggcagaagaccuacgagcggcacucccugagccacuucgugaaccuggacaaccuccgcgccaacaacacgaagggcucccugcccaucaacgugaucgucuucgacgggaagagcaagugcgaggaguccagcgccaaguccgccagcguguacuacucccagcugaugugccagcccauccuccugcuggaccaggcgcucgugagcgacgucggcgacagcgccgagguggccgugaagauguucgacgccuacgucaacaccuucuccagcaccuucaacgugccgauggagaagcugaagacccugguggccacggcggaggccgagcucgccaagaacgucucccuggacaacgugcugagcaccuucaucuccgccgcgcggcagggcuucguggacagcgacgucgagaccaaggacgugguggagugccucaagcugucccaccagagcgacaucgaggucaccggggacuccugcaacaacuacaugcugacguacaacaagguggagaacaugaccccccgcgaccucggcgccugcaucgacugcagcgcccggcacaucaacgcccagguggccaagucccacaacaucgcgcugaucuggaacgucaaggacuucaugagccuguccgagcagcuccgcaagcagauccgcagcgccgccaagaagaacaaccugcccuucaagcugaccugcgccaccacgcggcagguggugaacgucgugaccaccaagaucgcccucaaggggggcugaggacuagucccuguucccagagcccacuuuuuuuucuuuuuuugaaauaaaauagccugucuuucagaucucaaaggcucuuuucagagccaccaaaaaaaaaaaaaaaaaaaaaaaaaaaaaaaaaaaaaaaaaaaaaaaaaaaaaaaaaaaaaaaaaaaaaaaaaaaaaaaaaaaaaaaaaaaaaaaaaaaaa

SEQ ID NO: 19794 - RNA, 6113 nt, Artificial Sequence
  SARS-CoV-2__MT791940.1__non-structural protein 3 (NSP3) mRNA gc
aggagagucccgcagucggcguccagcggcucugcuuguucgugugugugucguugcaggccuuauucaagcuuaccauggcccccaccaaggugaccuucggcgacgacacggucaucgaggugcagggguacaagagcgugaacaucaccuucgagcuggacgagcgcaucgacaagguccucaacgagaagugcuccgccuacaccguggagcugggcaccgaggugaacgaguucgcgugcgucguggccgacgccgugaucaagacgcugcagccggucagcgagcuccugaccccccuggggaucgaccucgacgagugguccauggccaccuacuaccuguucgacgagagcggcgaguucaagcuggccucccacauguacugcagcuucuacccccccgacgaggacgaggaggagggggacugcgaggaggaggaguucgagccguccacccaguacgaguacggcacggaggacgacuaccagggcaagccccucgaguucggggcgaccagcgccgcccugcagcccgaggaggagcaggaggaggacuggcuggacgacgacucccagcagaccgugggccagcaggacgggagcgaggacaaccagaccacgaccauccagaccaucguggagguccagccccagcucgagauggagcugaccccgguggugcagacgaucgaggucaacuccuucagcggcuaccugaagcucaccgacaacguguacaucaagaacgccgacaucguggaggaggcgaagaaggucaagcccaccgugguggucaacgccgccaacguguaccugaagcacgggggcggcguggccggggcccugaacaaggcgaccaacaacgccaugcaggucgaguccgacgacuacaucgccacgaacggcccccucaagguggggggcagcugcguccuguccggccacaaccuggccaagcacugccuccacgugguggggcccaacgucaacaagggcgaggacauccagcugcugaagagcgccuacgagaacuucaaccagcacgaggugcuccuggcgccgcugcucuccgccgggaucuucggcgccgaccccauccacagccugcgggugugcgucgacaccgugcgcaccaacguguaccuggccgucuucgacaagaaccucuacgacaagcugguguccagcuuccuggagaugaagagcgagaagcagguggagcagaagaucgccgagauccccaaggaggaggucaagcccuucaucaccgaguccaagccgagcguggagcagcggaagcaggacgacaagaagaucaaggcgugcguggaggaggucacgaccacccucgaggagaccaaguuccugacggagaaccugcuccuguacaucgacaucaacgggaaccugcaccccgacuccgccacccucgugagcgacaucgacaucaccuuccugaagaaggacgcccccuacaucgugggcgacgucgugcaggagggcgugcugaccgccgucgugauccccacgaagaaggccgggggcaccaccgagaugcucgcgaaggcccugcgcaaggugccgaccgacaacuacaucacgaccuaccccgggcagggccugaacggguacaccgucgaggaggccaagaccgugcucaagaagugcaaguccgccuucuacauccugcccagcaucaucuccaacgagaagcaggagauccugggcaccgugagcuggaacuggcgggagaugcucgcgcacgccgaggagacgcgcaagcugaugcccgucugcguggagaccaaggccaucguguccaccauccagcggaaguacaagggcaucaagauccaggagggggucguggacuacggcgcccgcuucuacuucuacaccagcaagacgaccguggccucccugaucaacacccugaacgaccucaacgagacccuggucacgaugccgcugggguacgugacccacggccucaaccuggaggaggcggcccgguacaugcgcagccugaaggugcccgccaccgucuccgugagcucccccgacgccgugaccgccuacaacggguaccucacgagcuccagcaagacccccgaggagcacuucaucgagaccaucucccuggcgggcagcuacaaggacuggagcuacuccggccagagcacccagcuggggaucgaguuccucaagcggggcgacaaguccgucuacuacacgagcaacccgaccaccuuccaccuggacggggaggugaucaccuucgacaaccugaagacgcuccugucccugcgcgaggugcggaccaucaaggucuucaccaccguggacaacaucaaccuccacacgcagguggucgacaugagcaugaccuacggccagcaguucggccccaccuaccuggacggggccgacgugaccaagaucaagccccacaacucccacgagggcaagacguucuacgugcugccgaacgacgacacccuccgcgucgaggccuucgaguacuaccacaccaccgaccccagcuuccuggggcgguacauguccgcccugaaccacacgaagaaguggaaguacccccaggugaacggccucaccagcaucaagugggccgacaacaacugcuaccuggcgaccgcccugcucacccugcagcagaucgagcugaaguucaaccccccggcccuccaggacgccuacuaccgcgcgcgggccggggaggccgccaacuucugcgcccugauccuggcguacugcaacaagacggugggcgagcucggcgacguccgcgagaccauguccuaccuguuccagcacgccaaccuggacagcugcaagcgggugcucaacgucgugugcaagaccugcgggcagcagcagaccacccugaagggcguggaggccgucauguacauggggacgcuguccuacgagcaguucaagaagggcgugcagauccccugcaccugcgggaagcaggccaccaaguaccucgugcagcaggagagccccuucgucaugauguccgcccccccggcgcaguacgagcugaagcacggcaccuucacgugcgccagcgaguacaccggcaacuaccagugcgggcacuacaagcacaucaccuccaaggagacccuguacugcaucgacggcgcccuccugacgaagagcagcgaguacaaggggcccaucaccgacguguucuacaaggagaacuccuacaccaccacgaucaagcccgugaccuacaagcuggacggcgucgugugcaccgagaucgaccccaagcucgacaacuacuacaagaaggacaacagcuacuucaccgagcagccgaucgaccuggugcccaaccagcccuaccccaacgccuccuucgacaacuucaaguucgucugcgacaacaucaaguucgccgacgaccugaaccagcucacgggguacaagaagccggcgagccgcgagcugaaggugaccuucuuccccgaccugaacggcgacguggucgccaucgacuacaagcacuacacccccuccuucaagaagggcgccaagcuccugcacaagcccaucguguggcacgugaacaacgccaccaacaaggcgacguacaagccgaacaccuggugcauccggugccuguggagcaccaagcccgucgagaccuccaacagcuucgacgugcucaaguccgaggacgcccaggggauggacaaccuggccugcgaggaccugaagcccgugagcgaggaggucguggagaaccccacgauccagaaggacgugcucgagugcaacgucaagaccaccgagguggugggcgacaucauccugaagccggccaacaacucccugaagaucaccgaggaggucgggcacacggaccucauggccgcguacguggacaacagcucccugaccaucaagaagcccaacgagcugagccgcgugcucggccugaagacccuggccacccacgggcucgccgccgucaacuccgugcccugggacacgaucgccaacuacgcgaagccguuccugaacaagguggucagcaccaccaccaacaucgugacgcgcugccugaaccgggugugcaccaacuacaugcccuacuucuucacccuccugcugcagcucugcaccuucacccgcuccacgaacagccggaucaaggccuccaugcccaccaccaucgccaagaacaccgucaagagcgugggcaaguucugccuggaggccagcuucaacuaccugaagucccccaacuucagcaagcucaucaacaucaucaucugguuccugcugcucuccgugugccugggcagccugaucuacuccacggccgcgcucgggguccugaugagcaaccugggcaugccguccuacugcaccggguaccgcgagggcuaccucaacagcaccaacgugaccaucgccacguacugcaccggcuccauccccugcagcgugugccuguccgggcuggacagccucgacaccuaccccucccuggagaccauccagaucacgaucagcuccuucaagugggaccugaccgccuucggccucgucgccgagugguuccuggccuacauccuguucacccgguucuucuacgugcucgggcuggcggccaucaugcagcuguucuucagcuacuucgccgugcacuucaucuccaacagcuggcucauguggcugaucaucaaccugguccagauggcccccaucuccgcgauggugcgcauguacaucuucuucgccagcuucuacuacguguggaagagcuacguccacgugguggacggcugcaacuccagcaccugcaugaugugcuacaagcggaaccgcgccacgcgggucgagugcaccaccaucgugaacgggguccgccgguccuucuacguguacgccaacggcggcaagggguucugcaagcugcacaacuggaacugcgugaacugcgacaccuucugcgccggcagcacguucaucuccgacgaggucgcgcgcgaccucagccugcaguucaagcggccgaucaaccccaccgaccaguccagcuacaucguggacuccgugaccgucaagaacgggagcauccaccuguacuucgacaaggccggccagaagaccuacgagcgccacucccucagccacuucgugaaccuggacaaccugcgggccaacaacacgaaggggucccuccccaucaacgugaucgucuucgacggcaagagcaagugcgaggaguccagcgccaaguccgccagcguguacuacucccagcugaugugccagcccauccugcuccuggaccaggcgcuggugagcgacgucggcgacagcgccgagguggccgugaagauguucgacgccuacgucaacaccuucuccagcaccuucaacgugccgauggagaagcucaagacccugguggccacggcggaggccgagcuggccaagaacgucucccucgacaacgugcugagcaccuucaucuccgccgcgcgccagggguucguggacagcgacgucgagaccaaggacgugguggagugccugaagcucucccaccagagcgacaucgaggucaccggcgacuccugcaacaacuacaugcugacguacaacaagguggagaacaugaccccccgggaccugggggccugcaucgacugcagcgcccgccacaucaacgcccagguggccaagucccacaacaucgcgcucaucuggaacgucaaggacuucaugagccuguccgagcagcugcggaagcagauccgcagcgccgccaagaagaacaaccuccccuucaagcugaccugcgccaccacgcgccagguggugaacgucgugaccaccaagaucgcccugaagggcgggugaggacuagucccuguucccagagcccacuuuuuuuucuuuuuuugaaauaaaauagccugucuuucagaucucaaaggcucuuuucagagccaccaaaaaaaaaaaaaaaaaaaaaaaaaaaaaaaaaaaaaaaaaaaaaaaaaaaaaaaaaaaaaaaaaaaaaaaaaaaaaaaaaaaaaaaaaaaaaaaaaaaaa

SEQ ID NO: 19795 - RNA, 6113 nt, Artificial Sequence
  SARS-CoV-2__MT791943.1__non-structural protein 3 (NSP3) mRNA gc
aggagagucccgcagucggcguccagcggcucugcuuguucgugugugugucguugcaggccuuauucaagcuuaccauggcccccaccaaggugaccuucggcgacgacacggucaucgaggugcagggguacaagagcgugaacaucaccuucgagcuggacgagcgcaucgacaagguccucaacgagaagugcuccgccuacaccguggagcugggcaccgaggugaacgaguucgcgugcgucguggccgacgccgugaucaagacgcugcagccggucagcgagcuccugaccccccuggggaucgaccucgacgagugguccauggccaccuacuaccuguucgacgagagcggcgaguucaagcuggccucccacauguacugcagcuucuacccccccgacgaggacgaggaggagggggacugcgaggaggaggaguucgagccguccacccaguacgaguacggcacggaggacgacuaccagggcaagccccucgaguucggggcgaccagcgccgcccugcagcccgaggaggagcaggaggaggacuggcuggacgacgacucccagcagaccgugggccagcaggacgggagcgaggacaaccagaccacgaccauccagaccaucguggagguccagccccagcucgagauggagcugaccccgguggugcagacgaucgaggucaacuccuucagcggcuaccugaagcucaccgacaacguguacaucaagaacgccgacaucguggaggaggcgaagaaggucaagcccaccgugguggucaacgccgccaacguguaccugaagcacgggggcggcguggccggggcccugaacaaggcgaccaacaacgccaugcaggucgaguccgacgacuacaucgccacgaacggcccccucaagguggggggcagcugcguccuguccggccacaaccuggccaagcacugccuccacgugguggggcccaacgucaacaagggcgaggacauccagcugcugaagagcgccuacgagaacuucaaccagcacgaggugcuccuggcgccgcugcucuccgccgggaucuucggcgccgaccccauccacagccugcgggugugcgucgacaccgugcgcaccaacguguaccuggccgucuucgacaagaaccucuacgacaagcugguguccagcuuccuggagaugaagagcgagaagcagguggagcagaagaucgccgagauccccaaggaggaggucaagcccuucaucaccgaguccaagccgagcguggagcagcggaagcaggacgacaagaagaucaaggcgugcguggaggaggucacgaccacccucgaggagaccaaguuccugacggagaaccugcuccuguacaucgacaucaacgggaaccugcaccccgacuccgccacccucgugagcgacaucgacaucaccuuccugaagaaggacgcccccuacaucgugggcgacgucgugcaggagggcgugcugaccgccgucgugauccccacgaagaaggccgggggcaccaccgagaugcucgcgaaggcccugcgcaaggugccgaccgacaacuacaucacgaccuaccccgggcagggccugaacggguacaccgucgaggaggccaagaccgugcucaagaagugcaaguccgccuucuacauccugcccagcaucaucuccaacgagaagcaggagauccugggcaccgugagcuggaaccuccgggagaugcuggcgcacgccgaggagacgcgcaagcugaugcccgucugcguggagaccaaggccaucguguccaccauccagcggaaguacaagggcaucaagauccaggagggggucguggacuacggcgcccgcuucuacuucuacaccagcaagacgaccguggccucccugaucaacacccucaacgaccugaacgagacccuggucacgaugccgcucggguacgugacccacggccugaaccuggaggaggcggcccgguacaugcgcagccucaaggugcccgccaccgucuccgugagcucccccgacgccgugaccgccuacaacggguaccugacgagcuccagcaagacccccgaggagcacuucaucgagaccaucucccuggcgggcagcuacaaggacuggagcuacuccggccagagcacccagcucgggaucgaguuccugaagcggggcgacaaguccgucuacuacacgagcaacccgaccaccuuccaccuggacggggaggugaucaccuucgacaaccucaagacgcugcugucccuccgcgaggugcggaccaucaaggucuucaccaccguggacaacaucaaccugcacacgcagguggucgacaugagcaugaccuacggccagcaguucggccccaccuaccuggacggggccgacgugaccaagaucaagccccacaacucccacgagggcaagacguucuacgugcucccgaacgacgacacccugcgcgucgaggccuucgaguacuaccacaccaccgaccccagcuuccuggggcgguacauguccgcccucaaccacacgaagaaguggaaguacccccaggugaacggccugaccagcaucaagugggccgacaacaacugcuaccuggcgaccgcccuccugacccugcagcagaucgagcucaaguucaaccccccggcccugcaggacgccuacuaccgcgcgcgggccggggaggccgccaacuucugcgcccugauccucgcguacugcaacaagacggugggcgagcugggcgacguccgcgagaccauguccuaccuguuccagcacgccaaccucgacagcugcaagcgggugcugaacgucgugugcaagaccugcgggcagcagcagaccacccugaagggcguggaggccgucauguacauggggacgcucuccuacgagcaguucaagaagggcgugcagauccccugcaccugcgggaagcaggccaccaaguaccuggugcagcaggagagccccuucgucaugauguccgcccccccggcgcaguacgagcugaagcacggcaccuucacgugcgccagcgaguacaccggcaacuaccagugcgggcacuacaagcacaucaccuccaaggagacccucuacugcaucgacggcgcccugcugacgaagagcagcgaguacaaggggcccaucaccgacguguucuacaaggagaacuccuacaccaccacgaucaagcccgugaccuacaagcucgacggcgucgugugcaccgagaucgaccccaagcuggacaacuacuacaagaaggacaacagcuacuucaccgagcagccgaucgaccuggugcccaaccagcccuaccccaacgccuccuucgacaacuucaaguucgucugcgacaacaucaaguucgccgacgaccucaaccagcugacgggguacaagaagccggcgagccgcgagcugaaggugaccuucuuccccgaccucaacggcgacguggucgccaucgacuacaagcacuacacccccuccuucaagaagggcgccaagcugcugcacaagcccaucguguggcacgugaacaacgccaccaacaaggcgacguacaagccgaacaccuggugcauccggugccucuggagcaccaagcccgucgagaccuccaacagcuucgacgugcugaaguccgaggacgcccaggggauggacaaccuggccugcgaggaccucaagcccgugagcgaggaggucguggagaaccccacgauccagaaggacgugcuggagugcaacgucaagaccaccgagguggugggcgacaucauccugaagccggccaacaacucccucaagaucaccgaggaggucgggcacacggaccugauggccgcguacguggacaacagcucccugaccaucaagaagcccaacgagcucagccgcgugcugggccugaagacccucgccacccacgggcuggccgccgucaacuccgugcccugggacacgaucgccaacuacgcgaagccguuccugaacaagguggucagcaccaccaccaacaucgugacgcgcugccucaaccgggugugcaccaacuacaugcccuacuucuucacccugcugcuccagcugugcaccuucacccgcuccacgaacagccggaucaaggccuccaugcccaccaccaucgccaagaacaccgucaagagcgugggcaaguucugccuggaggccagcuucaacuaccucaagucccccaacuucagcaagcugaucaacaucaucaucugguuccugcuccuguccgugugccugggcuuccucaucuacagcacggccgcgcuggggguccugauguccaaccucggcaugccgagcuacugcaccggguaccgcgagggcuaccugaacuccaccaacgugaccaucgccacguacugcaccggcagcauccccugcuccgugugccugagcgggcucgacucccuggacaccuaccccagccuggagaccauccagaucacgaucuccagcuucaagugggaccucaccgccuucggccuggucgccgagugguuccuggccuacauccucuucacccgguucuucuacgugcuggggcuggcggccaucaugcagcucuucuucuccuacuucgccgugcacuucaucagcaacuccuggcugauguggcugaucaucaaccugguccagauggcccccaucagcgcgauggugcgcauguacaucuucuucgccuccuucuacuacguguggaagagcuacguccacgugguggacggcugcaacagcuccaccugcaugaugugcuacaagcggaaccgcgccacgcgggucgagugcaccaccaucgugaacgggguccgccggagcuucuacguguacgccaacggcggcaagggguucugcaagcuccacaacuggaacugcgugaacugcgacaccuucugcgccggcuccacguucaucagcgacgaggucgcgcgcgaccugucccugcaguucaagcggccgaucaaccccaccgaccagagcuccuacaucguggacagcgugaccgucaagaacggguccauccaccucuacuucgacaaggccggccagaagaccuacgagcgccacagccugucccacuucgugaaccuggacaaccuccgggccaacaacacgaaggggagccugcccaucaacgugaucgucuucgacggcaaguccaagugcgaggagagcuccgccaagagcgccuccguguacuacagccagcugaugugccagcccauccuccugcuggaccaggcgcucguguccgacgucggcgacagcgccgagguggccgugaagauguucgacgccuacgucaacaccuucagcuccaccuucaacgugccgauggagaagcugaagacccugguggccacggcggaggccgagcucgccaagaacgucagccuggacaacgugcuguccaccuucaucagcgccgcgcgccagggguucguggacuccgacgucgagaccaaggacgugguggagugccucaagcugagccaccaguccgacaucgaggucaccggcgacagcugcaacaacuacaugcugacguacaacaagguggagaacaugaccccccgggaccucggggccugcaucgacugcuccgcccgccacaucaacgcccagguggccaagagccacaacaucgcgcugaucuggaacgucaaggacuucaugucccugagcgagcagcuccggaagcagauccgcuccgccgccaagaagaacaaccugcccuucaagcugaccugcgccaccacgcgccagguggugaacgucgugaccaccaagaucgcccucaagggcgggugaggacuagucccuguucccagagcccacuuuuuuuucuuuuuuugaaauaaaauagccugucuuucagaucucaaaggcucuuuucagagccaccaaaaaaaaaaaaaaaaaaaaaaaaaaaaaaaaaaaaaaaaaaaaaaaaaaaaaaaaaaaaaaaaaaaaaaaaaaaaaaaaaaaaaaaaaaaaaaaaaaaaa

SEQ ID NO: 19796 - RNA, 6113 nt, Artificial Sequence
  SARS-CoV-2__MT791948.1__non-structural protein 3 (NSP3) mRNA gc
aggagagucccgcagucggcguccagcggcucugcuuguucgugugugugucguugcaggccuuauucaagcuuaccauggcccccaccaaggugaccuucggcgacgacacggucaucgaggugcagggguacaagagcgugaacaucaccuucgagcuggacgagcgcaucgacaagguccucaacgagaagugcuccgccuacaccguggagcugggcaccgaggugaacgaguucgcgugcgucguggccgacgccgugaucaagacgcugcagccggucagcgagcuccugaccccccuggggaucgaccucgacgagugguccauggccaccuacuaccuguucgacgagagcggcgaguucaagcuggccucccacauguacugcagcuucuacccccccgacgaggacgaggaggagggggacugcgaggaggaggaguucgagccguccacccaguacgaguacggcacggaggacgacuaccagggcaagccccucgaguucggggcgaccagcgccgcccugcagcccgaggaggagcaggaggaggacuggcuggacgacgacucccagcagaccgugggccagcaggacgggagcgaggacaaccagaccacgaccauccagaccaucguggagguccagccccagcucgagauggagcugaccccgguggugcagacgaucgaggucaacuccuucagcggcuaccugaagcucaccgacaacguguacaucaagaacgccgacaucguggaggaggcgaagaaggucaagcccaccgugguggucaacgccgccaacguguaccugaagcacgggggcggcguggccggggcccugaacaaggcgaccaacaacgccaugcaggucgaguccgacgacuacaucgccacgaacggcccccucaagguggggggcagcugcguccuguccggccacaaccuggccaagcacugccuccacgugguggggcccaacgucaacaagggcgaggacauccagcugcugaagagcgccuacgagaacuucaaccagcacgaggugcuccuggcgccgcugcucuccgccgggaucuucggcgccgaccccauccacagccugcgggugugcgucgacaccgugcgcaccaacguguaccuggccgucuucgacaagaaccucuacgacaagcugguguccagcuuccuggagaugaagagcgagaagcagguggagcagaagaucgccgagauccccaaggaggaggucaagcccuucaucaccgaguccaagccgagcguggagcagcggaagcaggacgacaagaagaucaaggcgugcguggaggaggucacgaccacccucgaggagaccaaguuccugacggagaaccugcuccuguacaucgacaucaacgggaaccugcaccccgacuccgccacccucgugagcgacaucgacaucaccuuccugaagaaggacgcccccuacaucgugggcgacgucgugcaggagggcgugcugaccgccgucgugauccccacgaagaaggccgggggcaccaccgagaugcucgcgaaggcccugcgcaaggugccgaccgacaacuacaucacgaccuaccccgggcagggccugaacggguacaccgucgaggaggccaagaccgugcucaagaagugcaaguccgccuucuacauccugcccagcaucaucuccaacgagaagcaggagauccugggcaccgugagcuggaaccuccgggagaugcuggcgcacgccgaggagacgcgcaagcugaugcccgucugcguggagaccaaggccaucguguccaccauccagcggaaguacaagggcaucaagauccaggagggggucguggacuacggcgcccgcuucuacuucuacaccagcaagacgaccguggccucccugaucaacacccucaacgaccugaacgagacccuggucacgaugccgcucggguacgugacccacggccugaaccuggaggaggcggcccgguacaugcgcagccucaaggugcccgccaccgucuccgugagcucccccgacgccgugaccgccuacaacggguaccugacgagcuccagcaagacccccgaggagcacuucaucgagaccaucucccuggcgggcagcuacaaggacuggagcuacuccggccagagcacccagcucgggaucgaguuccugaagcggggcgacaaguccgucuacuacacgagcaacccgaccaccuuccaccuggacggggaggugaucaccuucgacaaccucaagacgcugcugucccuccgcgaggugcggaccaucaaggucuucaccaccguggacaacaucaaccugcacacgcagguggucgacaugagcaugaccuacggccagcaguucggccccaccuaccuggacggggccgacgugaccaagaucaagccccacaacucccacgagggcaagacguucuacgugcucccgaacgacgacacccugcgcgucgaggccuucgaguacuaccacaccaccgaccccagcuuccuggggcgguacauguccgcccucaaccacacgaagaaguggaaguacccccaggugaacggccugaccagcaucaagugggccgacaacaacugcuaccuggcgaccgcccuccugacccugcagcagaucgagcucaaguucaaccccccggcccugcaggacgccuacuaccgcgcgcgggccggggaggccgccaacuucugcgcccugauccucgcguacugcaacaagacggugggcgagcugggcgacguccgcgagaccauguccuaccuguuccagcacgccaaccucgacagcugcaagcgggugcugaacgucgugugcaagaccugcgggcagcagcagaccacccugaagggcguggaggccgucauguacauggggacgcucuccuacgagcaguucaagaagggcgugcagauccccugcaccugcgggaagcaggccaccaaguaccuggugcagcaggagagccccuucgucaugauguccgcccccccggcgcaguacgagcugaagcacggcaccuucacgugcgccagcgaguacaccggcaacuaccagugcgggcacuacaagcacaucaccuccaaggagacccucuacugcaucgacggcgcccugcugacgaagagcagcgaguacaaggggcccaucaccgacguguucuacaaggagaacuccuacaccaccacgaucaagcccgugaccuacaagcucgacggcgucgugugcaccgagaucgaccccaagcuggacaacuacuacaagaaggacaacagcuacuucaccgagcagccgaucgaccuggugcccaaccagcccuaccccaacgccuccuucgacaacuucaaguucgucugcgacaacaucaaguucgccgacgaccucaaccagcugacgggguacaagaagccggcgagccgcgagcugaaggugaccuucuuccccgaccucaacggcgacguggucgccaucgacuacaagcacuacacccccuccuucaagaagggcgccaagcugcugcacaagcccaucguguggcacgugaacaacgccaccaacaaggcgacguacaagccgaacaccuggugcauccggugccucuggagcaccaagcccgucgagaccuccaacagcuucgacgugcugaaguccgaggacgcccaggggauggacaaccuggccugcgaggaccucaagcccgugagcgaggaggucguggagaaccccacgauccagaaggacgugcuggagugcaacgucaagaccaccgagguggugggcgacaucauccugaagccggccaacaacucccucaagaucaccgaggaggucggguacacggaccugauggccgcguacguggacaacagcucccugaccaucaagaagcccaacgagcucagccgcgugcugggccugaagacccucgccacccacgggcuggccgccgucaacuccgugcccugggacacgaucgccaacuacgcgaagccguuccugaacaagguggucagcaccaccaccaacaucgugacgcgcugccucaaccgggugugcaccaacuacaugcccuacuucuucacccugcugcuccagcugugcaccuucacccgcuccacgaacagccggaucaaggccuccaugcccaccaccaucgccaagaacaccgucaagagcgugggcaaguucugccuggaggccagcuucaacuaccucaagucccccaacuucagcaagcugaucaacaucaucaucugguuccugcuccuguccgugugccugggcagccucaucuacuccacggccgcgcuggggguccugaugagcaaccucggcaugccguccuacugcaccggguaccgcgagggcuaccugaacagcaccaacgugaccaucgccacguacugcaccggcuccauccccugcagcgugugccuguccgggcucgacagccuggacaccuaccccucccuggagaccauccagaucacgaucagcuccuucaagugggaccucaccgccuucggccuggucgccgagugguuccuggccuacauccucuucacccgguucuucuacgugcuggggcuggcggccaucaugcagcucuucuucagcuacuucgccgugcacuucaucuccaacagcuggcugauguggcugaucaucaaccugguccagauggcccccaucuccgcgauggugcgcauguacaucuucuucgccagcuucuacuacguguggaagagcuacguccacgugguggacggcugcaacuccagcaccugcaugaugugcuacaagcggaaccgcgccacgcgggucgagugcaccaccaucgugaacgggguccgccgguccuucuacguguacgccaacggcggcaagggguucugcaagcuccacaacuggaacugcgugaacugcgacaccuucugcgccggcagcacguucaucuccgacgaggucgcgcgcgaccugagccugcaguucaagcggccgaucaaccccaccgaccaguccagcuacaucguggacuccgugaccgucaagaacgggagcauccaccucuacuucgacaaggccggccagaagaccuacgagcgccacucccugagccacuucgugaaccuggacaaccuccgggccaacaacacgaaggggucccugcccaucaacgugaucgucuucgacggcaagagcaagugcgaggaguccagcgccaaguccgccagcguguacuacucccagcugaugugccagcccauccuccugcuggaccaggcgcucgugagcgacgucggcgacagcgccgagguggccgugaagauguucgacgccuacgucaacaccuucuccagcaccuucaacgugccgauggagaagcugaagacccugguggccacggcggaggccgagcucgccaagaacgucucccuggacaacgugcugagcaccuucaucuccgccgcgcgccagggguucguggacagcgacgucgagaccaaggacgugguggagugccucaagcugucccaccagagcgacaucgaggucaccggcgacuccugcaacaacuacaugcugacguacaacaagguggagaacaugaccccccgggaccucggggccugcaucgacugcagcgcccgccacaucaacgcccagguggccaagucccacaacaucgcgcugaucuggaacgucaaggacuucaugagccuguccgagcagcuccggaagcagauccgcagcgccgccaagaagaacaaccugcccuucaagcugaccugcgccaccacgcgccagguggugaacgucgugaccaccaagaucgcccucaagggcgggugaggacuagucccuguucccagagcccacuuuuuuuucuuuuuuugaaauaaaauagccugucuuucagaucucaaaggcucuuuucagagccaccaaaaaaaaaaaaaaaaaaaaaaaaaaaaaaaaaaaaaaaaaaaaaaaaaaaaaaaaaaaaaaaaaaaaaaaaaaaaaaaaaaaaaaaaaaaaaaaaaaaaa

SEQ ID NO: 19797 - RNA, 6113 nt, Artificial Sequence
  SARS-CoV-2__MT791953.1__non-structural protein 3 (NSP3) mRNA gc
aggagagucccgcagucggcguccagcggcucugcuuguucgugugugugucguugcaggccuuauucaagcuuaccauggcccccaccaaggugaccuucggcgacgacacggucaucgaggugcagggguacaagagcgugaacaucaccuucgagcuggacgagcgcaucgacaagguccucaacgagaagugcuccgccuacaccguggagcugggcaccgaggugaacgaguucgcgugcgucguggccgacgccgugaucaagacgcugcagccggucagcgagcuccugaccccccuggggaucgaccucgacgagugguccauggccaccuacuaccuguucgacgagagcggcgaguucaagcuggccucccacauguacugcagcuucuacccccccgacgaggacgaggaggagggggacugcgaggaggaggaguucgagccguccacccaguacgaguacggcacggaggacgacuaccagggcaagccccucgaguucggggcgaccagcgccgcccugcagcccgaggaggagcaggaggaggacuggcuggacgacgacucccagcagaccgugggccagcaggacgggagcgaggacaaccagaccacgaccauccagaccaucguggagguccagccccagcucgagauggaguucaccccgguggugcagacgaucgaggucaacuccuucagcggcuaccugaagcugaccgacaacguguacaucaagaacgccgacaucguggaggaggcgaagaaggucaagcccaccgugguggucaacgccgccaacguguaccucaagcacgggggcggcguggccggggcccugaacaaggcgaccaacaacgccaugcaggucgaguccgacgacuacaucgccacgaacggcccccugaagguggggggcagcugcguccucuccggccacaaccuggccaagcacugccugcacgugguggggcccaacgucaacaagggcgaggacauccagcuccugaagagcgccuacgagaacuucaaccagcacgaggugcugcucgcgccgcugcuguccgccgggaucuucggcgccgaccccauccacagccuccgggugugcgucgacaccgugcgcaccaacguguaccuggccgucuucgacaagaaccuguacgacaagcucguguccagcuuccuggagaugaagagcgagaagcagguggagcagaagaucgccgagauccccaaggaggaggucaagcccuucaucaccgaguccaagccgagcguggagcagcggaagcaggacgacaagaagaucaaggcgugcguggaggaggucacgaccacccuggaggagaccaaguuccucacggagaaccugcugcucuacaucgacaucaacgggaaccugcaccccgacuccgccacccuggugagcgacaucgacaucaccuuccucaagaaggacgcccccuacaucguguccgacgucgugcaggagggcgugcugaccgccgucgugauccccacgaagaaggccggcgggaccaccgagaugcuggcgaaggcccuccgcaaggugccgaccgacaacuacaucacgaccuaccccggccaggggcugaacggcuacaccgucgaggaggccaagaccgugcugaagaagugcaagagcgccuucuacauccuccccuccaucaucagcaacgagaagcaggagauccuggggaccguguccuggaaccugcgggagaugcucgcgcacgccgaggagacgcgcaagcugaugcccgucugcguggagaccaaggccaucgugagcaccauccagcggaaguacaagggcaucaagauccaggagggcgucguggacuacggggcccgcuucuacuucuacaccuccaagacgaccguggccagccugaucaacacccugaacgaccucaacgagacccuggucacgaugccgcugggcuacgugacccacgggcucaaccuggaggaggcggcccgguacaugcgcucccugaaggugcccgccaccgucagcguguccagccccgacgccgugaccgccuacaacggcuaccucacguccagcuccaagacccccgaggagcacuucaucgagaccaucagccuggcggggagcuacaaggacugguccuacagcggccaguccacccagcugggcaucgaguuccucaagcggggggacaagagcgucuacuacacguccaacccgaccaccuuccaccuggacggcgaggugaucaccuucgacaaccugaagacgcuccugagccugcgcgaggugcggaccaucaaggucuucaccaccguggacaacaucaaccuccacacgcagguggucgacauguccaugaccuacgggcagcaguucggccccaccuaccuggacggcgccgacgugaccaagaucaagccccacaacagccacgaggggaagacguucuacgugcugccgaacgacgacacccuccgcgucgaggccuucgaguacuaccacaccaccgaccccuccuuccugggccgguacaugagcgcccugaaccacacgaagaaguggaaguacccccaggugaacgggcucaccuccaucaagugggccgacaacaacugcuaccuggcgaccgcccugcucacccugcagcagaucgagcugaaguucaaccccccggcccuccaggacgccuacuaccgcgcgcgggccggcgaggccgccaacuucugcgcccugauccuggcguacugcaacaagacggugggggagcucggcgacguccgcgagaccaugagcuaccuguuccagcacgccaaccuggacuccugcaagcgggugcucaacgucgugugcaagaccugcggccagcagcagaccacccugaaggggguggaggccgucauguacaugggcacgcugagcuacgagcaguucaagaagggggugcagauccccugcaccugcggcaagcaggccaccaaguaccucgugcagcaggagucccccuucgucaugaugagcgcccccccggcgcaguacgagcugaagcacgggaccuucacgugcgccuccgaguacaccggcaacuaccagugcggccacuacaagcacaucaccagcaaggagacccuguacugcaucgacggggcccuccugacgaagagcuccgaguacaagggccccaucaccgacguguucuacaaggagaacagcuacaccaccacgaucaagcccgugaccuacaagcuggacggggucgugugcaccgagaucgaccccaagcucgacaacuacuacaagaaggacaacuccuacuucaccgagcagccgaucgaccuggugcccaaccagcccuaccccaacgccagcuucgacaacuucaaguucgucugcgacaacaucaaguucgccgacgaccugaaccagcucacgggcuacaagaagccggcgucccgcgagcugaaggugaccuucuuccccgaccugaacggggacguggucgccaucgacuacaagcacuacacccccagcuucaagaagggcgccaagcuccugcacaagcccaucguguggcacgugaacaacgccaccaacaaggcgacguacaagccgaacaccuggugcauccggugccugugguccaccaagcccgucgagaccagcaacuccuucgacgugcucaagagcgaggacgcccagggcauggacaaccuggccugcgaggaccugaagcccguguccgaggaggucguggagaaccccacgauccagaaggacgugcucgagugcaacgucaagaccaccgagguggugggggacaucauccugaagccggccaacaacagccugaagaucaccgaggaggucggccacacggaccucauggccgcguacguggacaacuccagccugaccaucaagaagcccaacgagcugucccgcgugcucgggcugaagacccuggccacccacggccucgccgccgucaacagcgugcccugggacacgaucgccaacuacgcgaagccguuccugaacaagguggucuccaccaccaccaacaucgugacgcgcugccugaaccgggugugcaccaacuacaugcccuacuucuucacccuccugcugcagcucugcaccuucacccgcagcacgaacucccggaucaaggccagcaugcccaccaccaucgccaagaacaccgucaagagcguggggaaguucugccuggaggccuccuucaacuaccugaagagccccaacuucuccaagcucaucaacaucaucaucugguuccugcugcucagcgugugccugggcucccugaucuacagcacggccgcgcucggcguccugauguccaaccuggggaugccgagcuacugcaccggcuaccgcgagggguaccucaacuccaccaacgugaccaucgccacguacugcaccggcagcauccccugcuccgugugccugagcggccuggacucccucgacaccuaccccagccuggagaccauccagaucacgaucuccagcuucaagugggaccugaccgccuucgggcucgucgccgagugguuccuggccuacauccuguucacccgguucuucuacgugcucggccuggcggccaucaugcagcuguucuucuccuacuucgccgugcacuucaucagcaacuccuggcucauguggcugaucaucaaccugguccagauggcccccaucagcgcgauggugcgcauguacaucuucuucgccagcuucuacuacguguggaaguccuacguccacgugguggacgggugcaacagcuccaccugcaugaugugcuacaagcggaaccgcgccacgcgggucgagugcaccaccaucgugaacggcguccgccggagcuucuacguguacgccaacgggggcaagggcuucugcaagcugcacaacuggaacugcgugaacugcgacaccuucugcgccggguccacguucaucagcgacgaggucgcgcgcgaccucucccugcaguucaagcggccgaucaaccccaccgaccagagcuccuacaucguggacagcgugaccgucaagaacggcuccauccaccuguacuucgacaaggccgggcagaagaccuacgagcgccacagccucucccacuucgugaaccuggacaaccugcgggccaacaacacgaagggcagccuccccaucaacgugaucgucuucgacgggaaguccaagugcgaggagagcuccgccaagagcgccuccguguacuacagccagcugaugugccagcccauccugcuccuggaccaggcgcuggugagcgacgucggcgacuccgccgagguggccgugaagauguucgacgccuacgucaacaccuucagcuccaccuucaacgugccgauggagaagcucaagacccugguggccacggcggaggccgagcuggccaagaacgucagccucgacaacgugcuguccaccuucaucagcgccgcgcgccagggcuucguggacuccgacgucgagaccaaggacgugguggagugccugaagcucagccaccaguccgacaucgaggucaccggggacagcugcaacaacuacaugcugacguacaacaagguggagaacaugaccccccgggaccugggcgccugcaucgacugcuccgcccgccacaucaacgcccagguggccaagagccacaacaucgcgcucaucuggaacgucaaggacuucaugucccugagcgagcagcugcggaagcagauccgcuccgccgccaagaagaacaaccuccccuucaagcugaccugcgccaccacgcgccagguggugaacgucgugaccaccaagaucgcccugaaggggggcugaggacuagucccuguucccagagcccacuuuuuuuucuuuuuuugaaauaaaauagccugucuuucagaucucaaaggcucuuuucagagccaccaaaaaaaaaaaaaaaaaaaaaaaaaaaaaaaaaaaaaaaaaaaaaaaaaaaaaaaaaaaaaaaaaaaaaaaaaaaaaaaaaaaaaaaaaaaaaaaaaaaaa

SEQ ID NO: 19798 - RNA, 6113 nt, Artificial Sequence
  SARS-CoV-2__MT791956.1__non-structural protein 3 (NSP3) mRNA gc
aggagagucccgcagucggcguccagcggcucugcuuguucgugugugugucguugcaggccuuauucaagcuuaccauggcccccaccaaggugaccuucggcgacgacacggucaucgaggugcagggguacaagagcgugaacaucaccuucgagcuggacgagcgcaucgacaagguccucaacgagaagugcuccgccuacaccguggagcugggcaccgaggugaacgaguucgcgugcgucguggccgacgccgugaucaagacgcugcagccggucagcgagcuccugaccccccuggggaucgaccucgacgagugguccauggccaccuacuaccuguucgacgagagcggcgaguucaagcuggccucccacauguacugcagcuucuacccccccgacgaggacgaggaggagggggacugcgaggaggaggaguucgagccguccacccaguacgaguacggcacggaggacgacuaccagggcaagccccucgaguucggggcgaccagcgccgcccugcagcccgaggaggagcaggaggaggacuggcuggacgacgacucccagcagaccgugggccagcaggacgggagcgaggacaaccagaccacgaccauccagaccaucguggagguccagccccagcucgagauggagcugaccccgguggugcagacgaucgaggucaacuccuucagcggcuaccugaagcucaccgacaacguguacaucaagaacgccgacaucguggaggaggcgaagaaggucaagcccaccgugguggucaacgccgccaacguguaccugaagcacgggggcggcguggccggggcccugaacaaggcgaccaacaacgccaugcaggucgaguccgacgacuacaucgccacgaacggcccccucaagguggggggcagcugcguccuguccggccacaaccuggccaagcacugccuccacgugguggggcccaacgucaacaagggcgaggacauccagcugcugaagagcgccuacgagaacuucaaccagcacgaggugcuccuggcgccgcugcucuccgccgggaucuucggcgccgaccccauccacagccugcgggugugcgucgacaccgugcgcaccaacguguaccuggccgucuucgacaagaaccucuacgacaagcugguguccagcuuccuggagaugaagagcgagaagcagguggagcagaagaucgccgagauccccaaggaggaggucaagcccuucaucaccgaguccaagccgagcguggagcagcggaagcaggacgacaagaagaucaaggcgugcguggaggaggucacgaccacccucgaggagaccaaguuccugacggagaaccugcuccuguacaucgacaucaacgggaaccugcaccccgacuccgccacccucgugagcgacaucgacaucaccuuccugaagaaggacgcccccuacaucgugggcgacgucgugcaggagggcgugcugaccgccgucgugauccccacgaagaaggccgggggcaccaccgagaugcucgcgaaggcccugcgcaaggugccgaccgacaacuacaucacgaccuaccccgggcagggccugaacggguacaccgucgaggaggccaagaccgugcucaagaagugcaaguccgccuucuacauccugcccagcaucaucuccaacgagaagcaggagauccugggcaccgugagcuggaaccuccgggagaugcuggcgcacgccgaggagacgcgcaagcugaugcccgucugcguggagaccaaggccaucguguccaccauccagcggaaguacaagggcaucaagauccaggagggggucguggacuacggcgcccgcuucuacuucuacaccagcaagacgaccguggccucccugaucaacacccucaacgaccugaacgagacccuggucacgaugccgcucggguacgugacccacggccugaaccuggaggaggcggcccgguacaugcgcagccucaaggugcccgccaccgucuccgugagcucccccgacgccgugaccgccuacaacggguaccugacgagcuccagcaagacccccgaggagcacuucaucgagaccaucucccuggcgggcagcuacaaggacuggagcuacuccggccagagcacccagcucgggaucgaguuccugaagcggggcgacaaguccgucuacuacacgagcaacccgaccaccuuccaccuggacggggaggugaucaccuucgacaaccucaagacgcugcugucccuccgcgaggugcggaccaucaaggucuucaccaccguggacaacaucaaccugcacacgcagguggucgacaugagcaugaccuacggccagcaguucggccccaccuaccuggacggggccgacgugaccaagaucaagccccacaacucccacgagggcaagacguucuacgugcucccgaacgacgacacccugcgcgucgaggccuucgaguacuaccacaccaccgaccccagcuuccuggggcgguacauguccgcccucaaccacacgaagaaguggaaguacccccaggugaacggccugaccagcaucaagugggccgacaacaacugcuaccuggcgaccgcccuccugacccugcagcagaucgagcucaaguucaaccccccggcccugcaggacgccuacuaccgcgcgcgggccggggaggccgccaacuucugcgcccugauccucgcguacugcaacaagacggugggcgagcugggcgacguccgcgagaccauguccuaccuguuccagcacgccaaccucgacagcugcaagcgggugcugaacgucgugugcaagaccugcgggcagcagcagaccacccugaagggcguggaggccgucauguacauggggacgcucuccuacgagcaguucaagaagggcgugcagauccccugcaccugcgggaagcaggccaccaaguaccuggugcagcaggagagccccuucgucaugauguccgcccccccggcgcaguacgagcugaagcacggcaccuucacgugcgccagcgaguacaccggcaacuaccagugcgggcacuacaagcacaucaccuccaaggagacccucuacugcaucgacggcgcccugcugaucaagagcagcgaguacaaggggcccaucacggacguguucuacaaggagaacuccuacaccaccaccaucaagcccgugacguacaagcucgacggcgucgugugcaccgagaucgaccccaagcuggacaacuacuacaagaaggacaacagcuacuucaccgagcagccgaucgaccuggugcccaaccagcccuaccccaacgccuccuucgacaacuucaaguucgucugcgacaacaucaaguucgccgacgaccucaaccagcugaccggguacaagaagccggcgagccgcgagcugaaggugacguucuuccccgaccucaacggcgacguggucgccaucgacuacaagcacuacacccccuccuucaagaagggcgccaagcugcugcacaagcccaucguguggcacgugaacaacgccaccaacaaggcgaccuacaagccgaacacguggugcauccggugccucuggagcaccaagcccgucgagaccuccaacagcuucgacgugcugaaguccgaggacgcccaggggauggacaaccuggccugcgaggaccucaagcccgugagcgaggaggucguggagaaccccaccauccagaaggacgugcuggagugcaacgucaagacgaccgagguggugggcgacaucauccugaagccggccaacaacucccucaagaucaccgaggaggucgggcacaccgaccugauggccgcguacguggacaacagcucccugacgaucaagaagcccaacgagcucagccgcgugcugggccugaagacccucgccacccacgggcuggccgccgucaacuccgugcccugggacaccaucgccaacuacgcgaagccguuccugaacaagguggucagcacgaccaccaacaucgugacccgcugccucaaccgggugugcacgaacuacaugcccuacuucuucacccugcugcuccagcugugcaccuucacccgcuccaccaacagccggaucaaggccuccaugcccacgaccaucgccaagaacaccgucaagagcgugggcaaguucugccuggaggccagcuucaacuaccucaagucccccaacuucagcaagcugaucaacaucaucaucugguuccugcuccuguccgugugccugggcagccucaucuacuccaccgccgcgcuggggguccugaugagcaaccucggcaugccguccuacugcacgggguaccgcgagggcuaccugaacagcaccaacgugaccaucgccaccuacugcacgggcuccauccccugcagcgugugccuguccgggcucgacagccuggacaccuaccccucccuggagaccauccagaucaccaucagcuccuucaagugggaccucacggccuucggccuggucgccgagugguuccuggccuacauccucuucacccgguucuucuacgugcuggggcuggcggccaucaugcagcucuucuucagcuacuucgccgugcacuucaucuccaacagcuggcugauguggcugaucaucaaccugguccagauggcccccaucuccgcgauggugcgcauguacaucuucuucgccagcuucuacuacguguggaagagcuacguccacgugguggacggcugcaacuccagcaccugcaugaugugcuacaagcggaaccgcgccacccgggucgagugcacgaccaucgugaacgggguccgccgguccuucuacguguacgccaacggcggcaagggguucugcaagcuccacaacuggaacugcgugaacugcgacaccuucugcgccggcagcaccuucaucuccgacgaggucgcgcgcgaccugagccugcaguucaagcggccgaucaaccccacggaccaguccagcuacaucguggacuccgugaccgucaagaacgggagcauccaccucuacuucgacaaggccggccagaagaccuacgagcgccacucccugagccacuucgugaaccuggacaaccuccgggccaacaacaccaaggggucccugcccaucaacgugaucgucuucgacggcaagagcaagugcgaggaguccagcgccaaguccgccagcguguacuacucccagcugaugugccagcccauccuccugcuggaccaggcgcucgugagcgacgucggcgacagcgccgagguggccgugaagauguucgacgccuacgucaacacguucuccagcaccuucaacgugccgauggagaagcugaagacccugguggccaccgcggaggccgagcucgccaagaacgucucccuggacaacgugcugagcacguucaucuccgccgcgcgccagggguucguggacagcgacgucgagaccaaggacgugguggagugccucaagcugucccaccagagcgacaucgaggucaccggcgacuccugcaacaacuacaugcugaccuacaacaagguggagaacaugacgccccgggaccucggggccugcaucgacugcagcgcccgccacaucaacgcccagguggccaagucccacaacaucgcgcugaucuggaacgucaaggacuucaugagccuguccgagcagcuccggaagcagauccgcagcgccgccaagaagaacaaccugcccuucaagcugaccugcgccaccacccgccagguggugaacgucgugacgaccaagaucgcccucaagggcgggugaggacuagucccuguucccagagcccacuuuuuuuucuuuuuuugaaauaaaauagccugucuuucagaucucaaaggcucuuuucagagccaccaaaaaaaaaaaaaaaaaaaaaaaaaaaaaaaaaaaaaaaaaaaaaaaaaaaaaaaaaaaaaaaaaaaaaaaaaaaaaaaaaaaaaaaaaaaaaaaaaaaaa

SEQ ID NO: 19799 - RNA, 6113 nt, Artificial Sequence
  SARS-CoV-2__MT791958.1__non-structural protein 3 (NSP3) mRNA gc
aggagagucccgcagucggcguccagcggcucugcuuguucgugugugugucguugcaggccuuauucaagcuuaccauggcccccaccaaggugaccuucggcgacgacacggucaucgaggugcagggguacaagagcgugaacaucaccuucgagcuggacgagcgcaucgacaagguccucaacgagaagugcuccgccuacaccguggagcugggcaccgaggugaacgaguucgcgugcgucguggccgacgccgugaucaagacgcugcagccggucagcgagcuccugaccccccuggggaucgaccucgacgagugguccauggccaccuacuaccuguucgacgagagcggcgaguucaagcuggccucccacauguacugcagcuucuacccccccgacgaggacgaggaggagggggacugcgaggaggaggaguucgagccguccacccaguacgaguacggcacggaggacgacuaccagggcaagccccucgaguucggggcgaccagcgccgcccugcagcccgaggaggagcaggaggaggacuggcuggacgacgacucccagcagaccgugggccagcaggacgggagcgaggacaaccagaccacgaccauccagaccaucguggagguccagccccagcucgagauggagcugaccccgguggugcagacgaucgaggucaacuccuucagcggcuaccugaagcucaccgacaacguguacaucaagaacgccgacaucguggaggaggcgaagaaggucaagcccaccgugguggucaacgccgccaacguguaccugaagcacgggggcggcguggccggggcccugaacaaggcgaccaacaacgccaugcaggucgaguccgacgacuacaucgccacgaacggcccccucaagguggggggcagcugcguccuguccggccacaaccuggccaagcacugccuccacgugguggggcccaacgucaacaagggcgaggacauccagcugcugaagagcgccuacgagaacuucaaccagcacgaggugcuccuggcgccgcugcucuccgccgggaucuucggcgccgaccccauccacagccugcgggugugcgucgacaccgugcgcaccaacguguaccuggccgucuucgacaagaaccucuacgacaagcugguguccagcuuccuggagaugaagagcgagaagcagguggagcagaagaucgccgagauccccaaggaggaggucaagcccuucaucaccgaguccaagccgagcguggagcagcggaagcaggacgacaagaagaucaaggcgugcguggaggaggucacgaccacccucgaggagaccaaguuccugacggagaaccugcuccuguacaucgacaucaacgggaaccugcaccccgacuccgccacccucgugagcgacaucgacaucaccuuccugaagaaggacgcccccuacaucgugggcgacgucgugcaggagggcgugcugaccgccgucgugauccccacgaagaaggccgggggcaccaccgagaugcucgcgaaggcccugcgcaaggugccgaccgacaacuacaucacgaccuaccccgggcagggccugaacggguacaccgucgaggaggccaagaccgugcucaagaagugcaaguccgccuucuacauccugcccagcaucaucuccaacgagaagcaggagauccugggcaccgugagcuggaaccuccgggagaugcuggcgcacgccgaggagacgcgcaagcugaugcccgucugcguggagaccaaggccaucguguccaccauccagcggaaguacaagggcaucaagauccaggagggggucguggacuacggcgcccgcuucuacuucuacaccagcaagacgaccguggccucccugaucaacacccucaacgaccugaacgagacccuggucacgaugccgcucggguacgugacccacggccugaaccuggaggaggcggcccgguacaugcgcagccucaaggugcccgccaccgucuccgugagcucccccgacgccgugaccgccuacaacggguaccugacgagcuccagcaagacccccgaggagcacuucaucgagaccaucucccuggcgggcagcuacaaggacuggagcuacuccggccagagcacccagcucgggaucgaguuccugaagcggggcgacaaguccgucuacuacacgagcaacccgaccaccuuccaccuggacggggaggugaucaccuucgacaaccucaagacgcugcugucccuccgcgaggugcggaccaucaaggucuucaccaccguggacaacaucaaccugcacacgcagguggucgacaugagcaugaccuacggccagcaguucggccccaccuaccuggacggggccgacgugaccaagaucaagccccacaacucccacgagggcaagacguucuacgugcucccgaacgacgacacccugcgcgucgaggccuucgaguacuaccacaccaccgaccccagcuuccuggggcgguacauguccgcccucaaccacacgaagaaguggaaguacccccaggugaacggccugaccagcaucaagugggccgacaacaacugcuaccuggcgaccgcccuccugacccugcagcagaucgagcucaaguucaaccccccggcccugcaggacgccuacuaccgcgcgcgggccggggaggccgccaacuucugcgcccugauccucgcguacugcaacaagacggugggcgagcugggcgacguccgcgagaccauguccuaccuguuccagcacgccaaccucgacagcugcaagcgggugcugaacgucgugugcaagaccugcgggcagcagcagaccacccugaagggcguggaggccgucauguacauggggacgcucuccuacgagcaguucaagaagggcgugcagauccccugcaccugcgggaagcaggccaccaaguaccuggugcagcaggagagccccuucgucaugauguccgcccccccggcgcaguacgagcugaagcacggcaccuucacgugcgccagcgaguacaccggcaacuaccagugcgggcacuacaagcacaucaccuccaaggagacccucuacugcaucgacggcgcccugcugacgaagagcagcgaguacaaggggcccaucaccgacguguucuacaaggagaacuccuacaccaccacgaucaagcccgugaccuacaagcucgacggcgucgugugcaccgagaucgaccccaagcuggacaacuacuacaagaaggacaacagcuacuucaccgagcagccgaucgaccuggugcccaaccagcccuaccccaacgccuccuucgacaacuucaaguucgucugcgacaacaucaaguucgccgacgaccucaaccagcugacgggguacaagaagccggcgagccgcgagcugaaggugaccuucuuccccgaccucaacggcgacguggucgccaucgacuacaagcacuacacccccuccuucaagaagggcgccaagcugcugcacaagcccaucguguggcacgugaacaacgccaccaacaaggcgacguacaagccgaacaccuggugcauccggugccucuggagcaccaagcccgucgagaccuccaacagcuucgacgugcugaaguccgaggacgcccaggggauggacaaccuggccugcgaggaccucaagcccgugagcgaggaggucguggagaaccccacgauccagaaggacgugcuggagugcaacgucaagaccaccgagguggugggcgacaucauccugaagccggccaacaacucccucaagaucaccgaggaggucgggcacacggaccugauggccgcguacguggacaacagcucccugaccaucaagaagcccaacgagcucagccgcgugcugggccugaagacccucgccacccacgggcuggccgccgucaacuccgugcccugggacacgaucgccaacuacgcgaagccguuccugaacaagguggucagcaccaccaccaacaucgugacgcgcugccucaaccgggugugcaccaacuacaugcccuacuucuucacccugcugcuccagcugugcaccuucacccgcuccacgaacagccggaucaaggccuccaugcccaccaccaucgccaagaacaccgucaagagcgugggcaaguucugccuggaggccagcuucaacuaccucaagucccccaacuucagcaagcugaucaacaucaucaucugguuccugcuccuguccgugugccugggcagccucaucuacuccacggccgcgcuggggguccugaugagcaaccucggcaugccguccuacugcaccggguaccgcgagggcuaccugaacagcaccaacgugaccaucgccacguacugcaccggcuccauccccugcagcgugugccuguccgggcucgacagccuggacaccuaccccucccuggagaccauccagaucacgaucagcuccuucaagugggaccucaccgccuucggccuggucgccgagugguuccuggccuacauccucuucacccgguucuucuacgugcuggggcuggcggccaucaugcagcucuucuucagcuacuucgccgugcacuucaucuccaacagcuggcugauguggcugaucaucaaccugguccagauggcccccaucuccgcgauggugcgcauguacaucuucuucgccagcuucuacuacguguggaagagcuacguccacgugguggacggcugcaacuccagcaccugcaugaugugcuacaagcggaaccgcgccacgcgggucgagugcaccaccaucgugaacgggguccgccgguccuucuacguguacgccaacggcggcaagggguucugcaagcuccacaacuggaacugcgugaacugcgacaccuucugcgccggcagcacguucaucuccgacgaggucgcgcgcgaccugagccugcaguucaagcggccgaucaaccccaccgaccaguccagcuacaucguggacuccgugaccgucaagaacgggagcauccaccucuacuucgacaaggccggccagaagaccuacgagcgccacucccugagccacuucgugaaccuggacaaccuccgggccaacaacacgaaggggucccugcccaucaacgugaucgucuucgacggcaagagcaagugcgaggaguccagcgccaaguccgccagcguguacuacucccagcugaugugccagcccauccuccugcuggaccaggcgcucgugagcgacgucggcgacagcgccgagguggccgugaagauguucgacgccuacgucaacaccuucuccagcaccuucaacguguccauggagaagcugaagacccugguggccacggcggaggccgagcucgccaagaacgucagccuggacaacgugcuguccaccuucaucagcgccgcgcgccagggguucguggacuccgacgucgagaccaaggacgugguggagugccucaagcugagccaccaguccgacaucgaggucaccggcgacagcugcaacaacuacaugcugacguacaacaagguggagaacaugaccccgcgggaccucggggccugcaucgacugcuccgcccgccacaucaacgcccagguggccaagagccacaacaucgcgcugaucuggaacgucaaggacuucaugucccugagcgagcagcuccggaagcagauccgcuccgccgccaagaagaacaaccugcccuucaagcugaccugcgccaccacgcgccagguggugaacgucgugaccaccaagaucgcccucaagggcgggugaggacuagucccuguucccagagcccacuuuuuuuucuuuuuuugaaauaaaauagccugucuuucagaucucaaaggcucuuuucagagccaccaaaaaaaaaaaaaaaaaaaaaaaaaaaaaaaaaaaaaaaaaaaaaaaaaaaaaaaaaaaaaaaaaaaaaaaaaaaaaaaaaaaaaaaaaaaaaaaaaaaaa

SEQ ID NO: 19800 - RNA, 6113 nt, Artificial Sequence
  SARS-CoV-2__MT791962.1__non-structural protein 3 (NSP3) mRNA gc
aggagagucccgcagucggcguccagcggcucugcuuguucgugugugugucguugcaggccuuauucaagcuuaccauggcccccaccaaggugaccuucggcgacgacacggucaucgaggugcagggguacaagagcgugaacaucaccuucgagcuggacgagcgcaucgacaagguccucaacgagaagugcuccgccuacaccguggagcugggcaccgaggugaacgaguucgcgugcgucguggccgacgccgugaucaagacgcugcagccggucagcgagcuccugaccccccuggggaucgaccucgacgagugguccauggccaccuacuaccuguucgacgagagcggcgaguucaagcuggccucccacauguacugcagcuucuacccccccgacgaggacgaggaggagggggacugcgaggaggaggaguucgagccguccacccaguacgaguacggcacggaggacgacuaccagggcaagccccucgaguucggggcgaccagcgccgcccugcagcccgaggaggagcaggaggaggacuggcuggacgacgacucccagcagaccgugggccagcaggacgggagcgaggacaaccagaccacgaccauccagaccaucguggagguccagccccagcucgagauggagcugaccccgguggugcagacgaucgaggucaacuccuucagcggcuaccugaagcucaccgacaacguguacaucaagaacgccgacaucguggaggaggcgaagaaggucaagcccaccgugguggucaacgccgccaacguguaccugaagcacgggggcggcguggccggggcccugaacaaggcgaccaacaacgccaugcaggucgaguccgacgacuacaucgccacgaacggcccccucaagguggggggcagcugcguccuguccggccacaaccuggccgagcacugccuccacgugguggggcccaacgucaacaagggcgaggacauccagcugcugaagagcgccuacgagaacuucaaccagcacgaggugcuccuggcgccgcugcucuccgccgggaucuucggcgccgaccccauccacagccugcgggugugcgucgacaccgugcgcaccaacguguaccuggccgucuucgacaagaaccucuacgacaagcugguguccagcuuccuggagaugaagagcgagaagcagguggagcagaagaucgccgagauccccaaggaggaggucaagcccuucaucaccgaguccaagccgagcguggagcagcggaagcaggacgacaagaagaucaaggcgugcguggaggaggucacgaccacccucgaggagaccaaguuccugacggagaaccugcuccuguacaucgacaucaacgggaaccugcaccccgacuccgccacccucgugagcgacaucgacaucaccuuccugaagaaggacgcccccuacaucgugggcgacgucgugcaggagggcgugcugaccgccgucgugauccccacgaagaaggccgggggcaccaccgagaugcucgcgaaggcccugcgcaaggugccgaccgacaacuacaucacgaccuaccccgggcagggccugaacggguacaccgucgaggaggccaagaccgugcucaagaagugcaaguccgccuucuacauccugcccagcaucaucuccaacgagaagcaggagauccugggcaccgugagcuggaaccuccgggagaugcuggcgcacgccgaggagacgcgcaagcugaugcccgucugcguggagaccaaggccaucguguccaccauccagcggaaguacaagggcaucaagauccaggagggggucguggacuacggcgcccgcuucuacuucuacaccagcaagacgaccguggccucccugaucaacacccucaacgaccugaacgagacccuggucacgaugccgcucggguacgugacccacggccugaaccuggaggaggcggcccgguacaugcgcagccucaaggugcccgccaccgucuccgugagcucccccgacgccgugaccgccuacaacggguaccugacgagcuccagcaagacccccgaggagcacuucaucgagaccaucucccuggcgggcagcuacaaggacuggagcuacuccggccagagcacccagcucgggaucgaguuccugaagcggggcgacaaguccgucuacuacacgagcaacccgaccaccuuccaccuggacggggaggugaucaccuucgacaaccucaagacgcugcugucccuccgcgaggugcggaccaucaaggucuucaccaccguggacaacaucaaccugcacacgcagguggucgacaugagcaugaccuacggccagcaguucggccccaccuaccuggacggggccgacgugaccaagaucaagccccacaacucccacgagggcaagacguucuacgugcucccgaacgacgacacccugcgcgucgaggccuucgaguacuaccacaccaccgaccccagcuuccuggggcgguacauguccgcccucaaccacacgaagaaguggaaguacccccaggugaacggccugaccagcaucaagugggccgacaacaacugcuaccuggcgaccgcccuccugacccugcagcagaucgagcucaaguucaaccccccggcccugcaggacgccuacuaccgcgcgcgggccggggaggccgccaacuucugcgcccugauccucgcguacugcaacaagacggugggcgagcugggcgacguccgcgagaccauguccuaccuguuccagcacgccaaccucgacagcugcaagcgggugcugaacgucgugugcaagaccugcgggcagcagcagaccacccugaagggcguggaggccgucauguacauggggacgcucuccuacgagcaguucaagaagggcgugcagauccccugcaccugcgggaagcaggccaccaaguaccuggugcagcaggagagccccuucgucaugauguccgcccccccggcgcaguacgagcugaagcacggcaccuucacgugcgccagcgaguacaccggcaacuaccagugcgggcacuacaagcacaucaccuccaaggagacccucuacugcaucgacggcgcccugcugacgaagagcagcgaguacaaggggcccaucaccgacguguucuacaaggagaacuccuacaccaccacgaucaagcccgugaccuacaagcucgacggcgucgugugcaccgagaucgaccccaagcuggacaacuacuacaagaaggacaacagcuacuucaccgagcagccgaucgaccuggugcccaaccagcccuaccccaacgccuccuucgacaacuucaaguucgucugcgacaacaucaaguucgccgacgaccucaaccagcugacgggguacaagaagccggcgagccgcgagcugaaggugaccuucuuccccgaccucaacggcgacguggucgccaucgacuacaagcacuacacccccuccuucaagaagggcgccaagcugcugcacaagcccaucguguggcacgugaacaacgccaccaacaaggcgacguacaagccgaacaccuggugcauccggugccucuggagcaccaagcccgucgagaccuccaacagcuucgacgugcugaaguccgaggacgcccaggggauggacaaccuggccugcgaggaccucaagcccgugagcgaggaggucguggagaaccccacgauccagaaggacgugcuggagugcaacgucaagaccaccgagguggugggcgacaucauccugaagccggccaacaacucccucaagaucaccgaggaggucgggcacacggaccugauggccgcguacguggacaacagcucccugaccaucaagaagcccaacgagcucagccgcgugcugggccugaagacccucgccacccacgggcuggccgccgucaacuccgugcccugggacacgaucgccaacuacgcgaagccguuccugaacaagguggucagcaccaccaccaacaucgugacgcgcugccucaaccgggugugcaccaacuacaugcccuacuucuucacccugcugcuccagcugugcaccuucacccgcuccacgaacagccggaucaaggccuccaugcccaccaccaucgccaagaacaccgucaagagcgugggcaaguucugccuggaggccagcuucaacuaccucaagucccccaacuucagcaagcugaucaacaucaucaucugguuccugcuccuguccgugugccugggcagccucaucuacuccacggccgcgcuggggguccugaugagcaaccucggcaugccguccuacugcaccggguaccgcgagggcuaccugaacagcaccaacgugaccaucgccacguacugcaccggcuccauccccugcagcgugugccuguccgggcucgacagccuggacaccuaccccucccuggagaccauccagaucacgaucagcuccuucaagugggaccucaccgccuucggccuggucgccgagugguuccuggccuacauccucuucacccgguucuucuacgugcuggggcuggcggccaucaugcagcucuucuucagcuacuucgccgugcacuucaucuccaacagcuggcugauguggcugaucaucaaccugguccagauggcccccaucuccgcgauggugcgcauguacaucuucuucgccagcuucuacuacguguggaagagcuacguccacgugguggacggcugcaacuccagcaccugcaugaugugcuacaagcggaaccgcgccacgcgggucgagugcaccaccaucgugaacgggguccgccgguccuucuacguguacgccaacggcggcaagggguucugcaagcuccacaacuggaacugcgugaacugcgacaccuucugcgccggcagcacguucaucuccgacgaggucgcgcgcgaccugagccugcaguucaagcggccgaucaaccccaccgaccaguccagcuacaucguggacuccgugaccgucaagaacgggagcauccaccucuacuucgacaaggccggccagaagaccuacgagcgccacucccugagccacuucgugaaccuggacaaccuccgggccaacaacacgaaggggucccugcccaucaacgugaucgucuucgacggcaagagcaagugcgaggaguccagcgccaaguccgccagcguguacuacucccagcugaugugccagcccauccuccugcuggaccaggcgcucgugagcgacgucggcgacagcgccgagguggccgugaagauguucgacgccuacgucaacaccuucuccagcaccuucaacgugccgauggagaagcugaagacccugguggccacggcggaggccgagcucgccaagaacgucucccuggacaacgugcugagcaccuucaucuccgccgcgcgccagggguucguggacagcgacgucgagaccaaggacgugguggagugccucaagcugucccaccagagcgacaucgaggucaccggcgacuccugcaacaacuacaugcugacguacaacaagguggagaacaugaccccccgggaccucggggccugcaucgacugcagcgcccgccacaucaacgcccagguggccaagucccacaacaucgcgcugaucuggaacgucaaggacuucaugagccuguccgagcagcuccggaagcagauccgcagcgccgccaagaagaacaaccugcccuucaagcugaccugcgccaccacgcgccagguggugaacgucgugaccaccaagaucgcccucaagggcgggugaggacuagucccuguucccagagcccacuuuuuuuucuuuuuuugaaauaaaauagccugucuuucagaucucaaaggcucuuuucagagccaccaaaaaaaaaaaaaaaaaaaaaaaaaaaaaaaaaaaaaaaaaaaaaaaaaaaaaaaaaaaaaaaaaaaaaaaaaaaaaaaaaaaaaaaaaaaaaaaaaaaaa

SEQ ID NO: 19801 - RNA, 6113 nt, Artificial Sequence
  SARS-CoV-2__MT786438.1__non-structural protein 3 (NSP3) mRNA gc
aggagagucccgcagucggcguccagcggcucugcuuguucgugugugugucguugcaggccuuauucaagcuuaccauggcccccaccaaggugaccuucggcgacgacacggucaucgaggugcagggguacaagagcgugaacaucaccuucgagcuggacgagcgcaucgacaagguccucaacgagaagugcuccgccuacaccguggagcugggcaccgaggugaacgaguucgcgugcgucguggccgacgccgugaucaagacgcugcagccggucagcgagcuccugaccccccuggggaucgaccucgacgagugguccauggccaccuacuaccuguucgacgagagcggcgaguucaagcuggccucccacauguacugcagcuucuacccccccgacgaggacgaggaggagggggacugcgaggaggaggaguucgagccguccacccaguacgaguacggcacggaggacgacuaccagggcaagccccucgaguucggggcgaccagcgccgcccugcagcccgaggaggagcaggaggaggacuggcuggacgacgacucccagcagaccgugggccagcaggacgggagcgaggacaaccagaccacgaccauccagaccaucguggagguccagccccagcucgagauggagcugaccccgguggugcagacgaucgaggucaacuccuucagcggcuaccugaagcucaccgacaacguguacaucaagaacgccgacaucguggaggaggcgaagaaggucaagcccaccgugguggucaacgccgccaacguguaccugaagcacgggggcggcguggccggggcccugaacaaggcgaccaacaacgccaugcaggucgaguccgacgacuacaucgccacgaacggcccccucaagguggggggcagcugcguccuguccggccacaaccuggccaagcacugccuccacgugguggggcccaacgucaacaagggcgaggacauccagcugcugaagagcgccuacgagaacuucaaccagcacgaggugcuccuggcgccgcugcucuccgccgggaucuucggcgccgaccccauccacagccugcgggugugcgucgacaccgugcgcaccaacguguaccuggccgucuucgacaagaaccucuacgacaagcugguguccagcuuccuggagaugaagagcgagaagcagguggagcagaagaucgccgagauccccaaggaggaggucaagcccuucaucaccgaguccaagccgagcguggagcagcggaagcaggacgacaagaagaucaaggcgugcguggaggaggucacgaccacccucgaggagaccaaguuccugacggagaaccugcuccuguacaucgacaucaacgggaaccugcaccccgacuccgccacccucgugagcgacaucgacaucaccuuccugaagaaggacgcccccuacaucgugggcgacgucgugcaggagggcgugcugaccgccgucgugauccccacgaagaaggccgggggcaccaccgagaugcucgcgaaggcccugcgcaaggugccgaccgacaacuacaucacgaccuaccccgggcagggccugaacggguacaccgucgaggaggccaagaccgugcucaagaagugcaaguccgccuucuacauccugcccagcaucaucuccaacgagaagcaggagauccugggcaccgugagcuggaaccuccgggagaugcuggcgcacgccgaggagacgcgcaagcugaugcccgucugcguggagaccaaggccaucguguccaccauccagcggaaguacaagggcaucaagauccaggagggggucguggacuacggcgcccgcuucuacuucuacaccagcaagacgaccguggccucccugaucaacacccucaacgaccugaacgagacccuggucacgaugccgcucggguacgugacccacggccugaaccuggaggaggcggcccgguacaugcgcagccucaaggugcccgccaccgucuccgugagcucccccgacgccgugaccgccuacaacggguaccugacgagcuccagcaagacccccgaggagcacuucaucgagaccaucucccuggcgggcagcuacaaggacuggagcuacuccggccagagcacccagcucgggaucgaguuccugaagcggggcgacaaguccgucuacuacacgagcaacccgaccaccuuccaccuggacggggaggugaucaccuucgacaaccucaagacgcugcugucccuccgcgaggugcggaccaucaaggucuucaccaccguggacaacaucaaccugcacacgcagguggucgacaugagcaugaccuacggccagcaguucggccccaccuaccuggacggggccgacgugaccaagaucaagccccacaacucccacgagggcaagacguucuacgugcucccgaacgacgacacccugcgcgucgaggccuucgaguacuaccacaccaccgaccccagcuuccuggggcgguacauguccgcccucaaccacacgaagaaguggaaguacccccaggugaacggccugaccagcaucaagugggccgagaacaacugcuaccuggcgaccgcccuccugacccugcagcagaucgagcucaaguucaaccccccggcccugcaggacgccuacuaccgcgcgcgggccggggaggccgccaacuucugcgcccugauccucgcguacugcaacaagacggugggcgagcugggcgacguccgcgagaccauguccuaccuguuccagcacgccaaccucgacagcugcaagcgggugcugaacgucgugugcaagaccugcgggcagcagcagaccacccugaagggcguggaggccgucauguacauggggacgcucuccuacgagcaguucaagaagggcgugcagauccccugcaccugcgggaagcaggccaccaaguaccuggugcagcaggagagccccuucgucaugauguccgcccccccggcgcaguacgagcugaagcacggcaccuucacgugcgccagcgaguacaccggcaacuaccagugcgggcacuacaagcacaucaccuccaaggagacccucuacugcaucgacggcgcccugcugacgaagagcagcgaguacaaggggcccaucaccgacguguucuacaaggagaacuccuacaccaccacgaucaagcccgugaccuacaagcucgacggcgucgugugcaccgagaucgaccccaagcuggacaacuacuacaagaaggacaacagcuacuucaccgagcagccgaucgaccuggugcccaaccagcccuaccccaacgccuccuucgacaacuucaaguucgucugcgacaacaucaaguucgccgacgaccucaaccagcugacgggguacaagaagccggcgagccgcgagcugaaggugaccuucuuccccgaccucaacggcgacguggucgccaucgacuacaagcacuacacccccuccuucaagaagggcgccaagcugcugcacaagcccaucguguggcacgugaacaacgccaccaacaaggcgacguacaagccgaacaccuggugcauccggugccucuggagcaccaagcccgucgagaccuccaacagcuucgacgugcugaaguccgaggacgcccaggggauggacaaccuggccugcgaggaccucaagcccgugagcgaggaggucguggagaaccccacgauccagaaggacgugcuggagugcaacgucaagaccaccgagguggugggcgacaucauccugaagccggccaacaacucccucaagaucaccgaggaggucgggcacacggaccugauggccgcguacguggacaacagcucccugaccaucaagaagcccaacgagcucagccgcgugcugggccugaagacccucgccacccacgggcuggccgccgucaacuccgugcccugggacacgaucgccaacuacgcgaagccguuccugaacaagguggucagcaccaccaccaacaucgugacgcgcugccucaaccgggugugcaccaacuacaugcccuacuucuucacccugcugcuccagcugugcaccuucacccgcuccacgaacagccggaucaaggccuccaugcccaccaccaucgccaagaacaccgucaagagcgugggcaaguucugccuggaggccagcuucaacuaccucaagucccccaacuucagcaagcugaucaacaucaucaucugguuccugcuccuguccgugugccugggcagccucaucuacuccacggccgcgcuggggguccugaugagcaaccucggcaugccguccuacugcaccggguaccgcgagggcuaccugaacagcaccaacgugaccaucgccacguacugcaccggcuccauccccugcagcgugugccuguccgggcucgacagccuggacaccuaccccucccuggagaccauccagaucacgaucagcuccuucaagugggaccucaccgccuucggccuggucgccgagugguuccuggccuacauccucuucacccgguucuucuacgugcuggggcuggcggccaucaugcagcucuucuucagcuacuucgccgugcacuucaucuccaacagcuggcugauguggcugaucaucaaccugguccagauggcccccaucuccgcgauggugcgcauguacaucuucuucgccagcuucuacuacguguggaagagcuacguccacgugguggacggcugcaacuccagcaccugcaugaugugcuacaagcggaaccgcgccacgcgggucgagugcaccaccaucgugaacgggguccgccgguccuucuacguguacgccaacggcggcaagggguucugcaagcuccacaacuggaacugcgugaacugcgacaccuucugcgccggcagcacguucaucuccgacgaggucgcgcgcgaccugagccugcaguucaagcggccgaucaaccccaccgaccaguccagcuacaucguggacuccgugaccgucaagaacgggagcauccaccucuacuucgacaaggccggccagaagaccuacgagcgccacucccugagccacuucgugaaccuggacaaccuccgggccaacaacacgaaggggucccugcccaucaacgugaucgucuucgacggcaagagcaagugcgaggaguccagcgccaaguccgccagcguguacuacucccagcugaugugccagcccauccuccugcuggaccaggcgcucgugagcgacgucggcgacagcgccgagguggccgugaagauguucgacgccuacgucaacaccuucuccagcaccuucaacgugccgauggagaagcugaagacccugguggccacggcggaggccgagcucgccaagaacgucucccuggacaacgugcugagcaccuucaucuccgccgcgcgccagggguucguggacagcgacgucgagaccaaggacgugguggagugccucaagcugucccaccagagcgacaucgaggucaccggcgacuccugcaacaacuacaugcugacguacaacaagguggagaacaugaccccccgggaccucggggccugcaucgacugcagcgcccgccacaucaacgcccagguggccaagucccacaacaucgcgcugaucuggaacgucaaggacuucaugagccuguccgagcagcuccggaagcagauccgcagcgccgccaagaagaacaaccugcccuucaagcugaccugcgccaccacgcgccagguggugaacgucgugaccaccaagaucgcccucaagggcgggugaggacuagucccuguucccagagcccacuuuuuuuucuuuuuuugaaauaaaauagccugucuuucagaucucaaaggcucuuuucagagccaccaaaaaaaaaaaaaaaaaaaaaaaaaaaaaaaaaaaaaaaaaaaaaaaaaaaaaaaaaaaaaaaaaaaaaaaaaaaaaaaaaaaaaaaaaaaaaaaaaaaaa

SEQ ID NO: 19802 - RNA, 6113 nt, Artificial Sequence
  SARS-CoV-2__MT786444.1__non-structural protein 3 (NSP3) mRNA gc
aggagagucccgcagucggcguccagcggcucugcuuguucgugugugugucguugcaggccuuauucaagcuuaccauggcccccaccaaggugaccuucggcgacgacacggucaucgaggugcagggguacaagagcgugaacaucaccuucgagcuggacgagcgcaucgacaagguccucaacgagaagugcuccgccuacaccguggagcugggcaccgaggugaacgaguucgcgugcgucguggccgacgccgugaucaagacgcugcagccggucagcgagcuccugaccccccuggggaucgaccucgacgagugguccauggccaccuacuaccuguucgacgagagcggcgaguucaagcuggccucccacauguacugcagcuucuacccccccgacgaggacgaggaggagggggacugcgaggaggaggaguucgagccguccacccaguacgaguacggcacggaggacgacuaccagggcaagccccucgaguucggggcgaccagcgccgcccugcagcccgaggaggagcaggaggaggacuggcuggacgacgacucccagcagaccgugggccagcaggacgggagcgaggacaaccagaccacgaccauccagaccaucguggagguccagccccagcucgagauggagcugaccccgguggugcagacgaucgaggucaacuccuucagcggcuaccugaagcucaccgacaacguguacaucaagaacgccgacaucguggaggaggcgaagaaggucaagcccaccgugguggucaacgccgccaacguguaccugaagcacgggggcggcguggccggggcccugaacaaggcgaccaacaacgccaugcaggucgaguccgacgacuacaucgccacgaacggcccccucaagguggggggcagcugcguccuguccggccacaaccuggccaagcacugccuccacgugguggggcccaacgucaacaagggcgaggacauccagcugcugaagagcgccuacgagaacuucaaccagcacgaggugcuccuggcgccgcugcucuccgccgggaucuucggcgccgaccccauccacagccugcgggugugcgucgacaccgugcgcaccaacguguaccuggccgucuucgacaagaaccucuacgacaagcugguguccagcuuccuggagaugaagagcgagaagcagguggagcagaagaucgccgagauccccaaggaggaggucaagcccuucaucaccgaguccaagccgagcguggagcagcggaagcaggacgacaagaagaucaaggcgugcguggaggaggucacgaccacccucgaggagaccaaguuccugacggagaaccugcuccuguacaucgacaucaacgggaaccugcaccccgacuccgccacccucgugagcgacaucgacaucaccuuccugaagaaggacgcccccuacaucgugggcgacgucgugcaggagggcgugcugaccgccgucgugauccccacgaagaaggccgggggcaccaccgagaugcucgcgaaggcccugcgcaaggugccgaccgacaacuacaucacgaccuaccccgggcagggccugaacggguacaccgucgaggaggccaagaccgugcucaagaagugcaaguccgccuucuacauccugcccagcaucaucuccaacgagaagcaggagauccugggcaccgugagcuggaaccuccgggagaugcuggcgcacgccgaggagacgcgcaagcugaugcccgucugcguggagaccaaggccaucguguccaccauccagcggaaguacaagggcaucaagauccaggagggggucguggacuacggcgcccgcuucuacuucuacaccagcaagacgaccguggccucccugaucaacacccucaacgaccugaacgagacccuggucacgaugccgcucggguacgugacccacggccugaaccuggaggaggcggcccgguacaugcgcagccucaaggugcccgccaccgucuccgugagcucccccgacgccgugaccgccuacaacggguaccugacgagcuccagcaagacccccgaggagcacuucaucgagaccaucucccuggcgggcagcuacaaggacuggagcuacuccggccagagcacccagcucgggaucgaguuccugaagcggggcgacaaguccgucuacuacacgagcaacccgaccaccuuccaccuggacggggaggugaucaccuucgacaaccucaagacgcugcugucccuccgcgaggugcggaccaucaaggucuucaccaccguggacaacaucaaccugcacacgcagguggucgacaugagcaugaccuacggccagcaguucggccccaccuaccuggacggggccgacgugaccaagaucaagccccacaacucccacgagggcaagacguucuacgugcucccgaacgacgacacccugcgcgucgaggccuucgaguacuaccacaccaccgaccccagcuuccuggggcgguacauguccgcccucaaccacacgaagaaguggaaguacccccaggugaacggccugaccagcaucaagugggccgagaacaacugcuaccuggcgaccgcccuccugacccugcagcagaucgagcucaaguucaaccccccggcccugcaggacgccuacuaccgcgcgcgggccggggaggccgccaacuucugcgcccugauccucgcguacugcaacaagacggugggcgagcugggcgacguccgcgagaccauguccuaccuguuccagcacgccaaccucgacagcugcaagcgggugcugaacgucgugugcaagaccugcgggcagcagcagaccacccugaagggcguggaggccgucauguacauggggacgcucuccuacgagcaguucaagaagggcgugcagauccccugcaccugcgggaagcaggccaccaaguaccuggugcagcaggagagccccuucgucaugauguccgcccccccggcgcaguacgagcugaagcacggcaccuucacgugcgccagcgaguacaccggcaacuaccagugcgggcacuacaagcacaucaccuccaaggagacccucuacugcaucgacggcgcccugcugacgaagagcagcgaguacaaggggcccaucaccgacguguucuacaaggagaacuccuacaccaccacgaucaagcccgugaccuacaagcucgacggcgucgugugcaccgagaucgaccccaagcuggacaacuacuacaagaaggacaacagcuacuucaccgagcagccgaucgaccuggugcccaaccagcccuaccccaacgccuccuucgacaacuucaaguucgucugcgacaacaucaaguucgccgacgaccucaaccagcugacgggguacaagaagccggcgagccgcgagcugaaggugaccuucuuccccgaccucaacggcgacguggucgccaucgacuacaagcacuacacccccuccuucaagaagggcgccaagcugcugcacaagcccaucguguggcacgugaacaacgccaccaacaaggcgacguacaagccgaacaccuggugcauccggugccucuggagcaccaagcccgucgagaccuccaacagcuucgacgugcugaaguccgaggacgcccaggggauggacaaccuggccugcgaggaccucaagcccgugagcgaggaggucguggagaaccccacgauccagaaggacgugcuggagugcaacgucaagaccaccgagguggugggcgacaucauccugaagccggccaacaacucccucaagaucaccgaggaggucgggcacacggaccugauggccgcguacguggacaacuucagccugaccaucaagaagcccaacgagcucucccgcgugcugggccugaagacccucgccacccacgggcuggccgccgucaacagcgugcccugggacacgaucgccaacuacgcgaagccguuccugaacaagguggucuccaccaccaccaacaucgugacgcgcugccucaaccgggugugcaccaacuacaugcccuacuucuucacccugcugcuccagcugugcaccuucacccgcagcacgaacucccggaucaaggccagcaugcccaccaccaucgccaagaacaccgucaaguccgugggcaaguucugccuggaggccagcuucaacuaccucaagagccccaacuucuccaagcugaucaacaucaucaucugguuccugcuccugagcgugugccugggcucccucaucuacagcacggccgcgcuggggguccugauguccaaccucggcaugccgagcuacugcaccggguaccgcgagggcuaccugaacuccaccaacgugaccaucgccacguacugcaccggcagcauccccugcuccgugugccugagcgggcucgacucccuggacaccuaccccagccuggagaccauccagaucacgaucuccagcuucaagugggaccucaccgccuucggccuggucgccgagugguuccuggccuacauccucuucacccgguucuucuacgugcuggggcuggcggccaucaugcagcucuucuucuccuacuucgccgugcacuucaucagcaacuccuggcugauguggcugaucaucaaccugguccagauggcccccaucagcgcgauggugcgcauguacaucuucuucgccuccuucuacuacguguggaagagcuacguccacgugguggacggcugcaacagcuccaccugcaugaugugcuacaagcggaaccgcgccacgcgggucgagugcaccaccaucgugaacgggguccgccggagcuucuacguguacgccaacggcggcaagggguucugcaagcuccacaacuggaacugcgugaacugcgacaccuucugcgccggcuccacguucaucagcgacgaggucgcgcgcgaccugucccugcaguucaagcggccgaucaaccccaccgaccagagcuccuacaucguggacagcgugaccgucaagaacggguccauccaccucuacuucgacaaggccggccagaagaccuacgagcgccacagccugucccacuucgugaaccuggacaaccuccgggccaacaacacgaaggggagccugcccaucaacgugaucgucuucgacggcaaguccaagugcgaggagagcuccgccaagagcgccuccguguacuacagccagcugaugugccagcccauccuccugcuggaccaggcgcucguguccgacgucggcgacagcgccgagguggccgugaagauguucgacgccuacgucaacaccuucagcuccaccuucaacgugccgauggagaagcugaagacccugguggccacggcggaggccgagcucgccaagaacgucagccuggacaacgugcuguccaccuucaucagcgccgcgcgccagggguucguggacuccgacgucgagaccaaggacgugguggagugccucaagcugagccaccaguccgacaucgaggucaccggcgacagcugcaacaacuacaugcugacguacaacaagguggagaacaugaccccccgggaccucggggccugcaucgacugcuccgcccgccacaucaacgcccagguggccaagagccacaacaucgcgcugaucuggaacgucaaggacuucaugucccugagcgagcagcuccggaagcagauccgcuccgccgccaagaagaacaaccugcccuucaagcugaccugcgccaccacgcgccagguggugaacgucgugaccaccaagaucgcccucaagggcgggugaggacuagucccuguucccagagcccacuuuuuuuucuuuuuuugaaauaaaauagccugucuuucagaucucaaaggcucuuuucagagccaccaaaaaaaaaaaaaaaaaaaaaaaaaaaaaaaaaaaaaaaaaaaaaaaaaaaaaaaaaaaaaaaaaaaaaaaaaaaaaaaaaaaaaaaaaaaaaaaaaaaaa

SEQ ID NO: 19803 - RNA, 6113 nt, Artificial Sequence
  SARS-CoV-2__MT786809.1__non-structural protein 3 (NSP3) mRNA gc
aggagagucccgcagucggcguccagcggcucugcuuguucgugugugugucguugcaggccuuauucaagcuuaccauggcccccaccaaggugaccuucggcgacgacacggucaucgaggugcagggguacaagagcgugaacaucaccuucgagcuggacgagcgcaucgacaagguccucaacgagaagugcuccgccuacaccguggagcugggcaccgaggugaacgaguucgcgugcgucguggccgacgccgugaucaagacgcugcagccggucagcgagcuccugaccccccuggggaucgaccucgacgagugguccauggccaccuacuaccuguucgacgagagcggcgaguucaagcuggccucccacauguacugcagcuucuacccccccgacgaggacgaggaggagggggacugcgaggaggaggaguucgagccguccacccaguacgaguacggcacggaggacgacuaccagggcaagccccucgaguucggggcgaucagcgccgcccugcagcccgaggaggagcaggaggaggacuggcuggacgacgacucccagcagaccgugggccagcaggacgggagcgaggacaaccagaccaccacgauccagaccaucguggagguccagccccagcucgagauggagcugaccccgguggugcagaccaucgaggucaacuccuucagcggcuaccugaagcucacggacaacguguacaucaagaacgccgacaucguggaggaggcgaagaaggucaagcccaccgugguggucaacgccgccaacguguaccugaagcacgggggcggcguggccggggcccugaacaaggcgaccaacaacgccaugcaggucgaguccgacgacuacaucgccaccaacggcccccucaagguggggggcagcugcguccuguccggccacaaccuggccaagcacugccuccacgugguggggcccaacgucaacaagggcgaggacauccagcugcugaagagcgccuacgagaacuucaaccagcacgaggugcuccuggcgccgcugcucuccgccgggaucuucggcgccgaccccauccacagccugcgggugugcgucgacacggugcgcaccaacguguaccuggccgucuucgacaagaaccucuacgacaagcugguguccagcuuccuggagaugaagagcgagaagcagguggagcagaagaucgccgagauccccaaggaggaggucaagcccuucaucaccgaguccaagccgagcguggagcagcggaagcaggacgacaagaagaucaaggcgugcguggaggaggucaccacgacccucgaggagaccaaguuccugaccgagaaccugcuccuguacaucgacaucaacgggaaccugcaccccgacuccgccacgcucgugagcgacaucgacaucaccuuccugaagaaggacgcccccuacaucgugggcgacgucgugcaggagggcgugcugaccgccgucgugauccccaccaagaaggccgggggcacgaccgagaugcucgcgaaggcccugcgcaaggugccgaccgacaacuacaucaccacguaccccgggcagggccugaacggguacaccgucgaggaggccaagaccgugcucaagaagugcaaguccgccuucuacauccugcccagcaucaucuccaacgagaagcaggagauccugggcaccgugagcuggaaccuccgggagaugcuggcgcacgccgaggagacccgcaagcugaugcccgucugcguggagacgaaggccaucguguccaccauccagcggaaguacaagggcaucaagauccaggagggggucguggacuacggcgcccgcuucuacuucuacaccagcaagaccacgguggccucccugaucaacacccucaacgaccugaacgagacccuggucaccaugccgcucggguacgugacgcacggccugaaccuggaggaggcggcccgguacaugcgcagccucaaggugcccgccaccgucuccgugagcucccccgacgccgugaccgccuacaacggguaccugaccagcuccagcaagacgcccgaggagcacuucaucgagaccaucucccuggcgggcagcuacaaggacuggagcuacuccggccagagcacccagcucgggaucgaguuccugaagcggggcgacaaguccgucuacuacaccagcaacccgacgaccuuccaccuggacggggaggugaucaccuucgacaaccucaagacccugcugucccuccgcgaggugcggacgaucaaggucuucaccaccguggacaacaucaaccugcacacccagguggucgacaugagcaugacguacggccagcaguucggccccaccuaccuggacggggccgacgugaccaagaucaagccccacaacucccacgagggcaagaccuucuacgugcucccgaacgacgacacgcugcgcgucgaggccuucgaguacuaccacaccaccgaccccagcuuccuggggcgguacauguccgcccucaaccacaccaagaaguggaaguacccccaggugaacggccugacgagcaucaagugggccgacaacaacugcuaccuggcgaccgcccuccugacccugcagcagaucgagcucaaguucaaccccccggcccugcaggacgccuacuaccgcgcgcgggccggggaggccgccaacuucugcgcccugauccucgcguacugcaacaagaccgugggcgagcugggcgacguccgcgagacgauguccuaccuguuccagcacgccaaccucgacagcugcaagcgggugcugaacgucgugugcaagaccugcgggcagcagcagaccacccugaagggcguggaggccgucauguacauggggacccucuccuacgagcaguucaagaagggcgugcagauccccugcacgugcgggaagcaggccaccaaguaccuggugcagcaggagagccccuucgucaugauguccgcccccccggcgcaguacgagcugaagcacggcaccuucaccugcgccagcgaguacacgggcaacuaccagugcgggcacuacaagcacaucaccuccaaggagacccucuacugcaucgacggcgcccugcugaccaagagcagcgaguacaaggggcccaucacggacguguucuacaaggagaacuccuacaccaccaccaucaagcccgugacguacaagcucgacggcgucgugugcaccgagaucgaccccaagcuggacaacuacuacaagaaggacaacagcuacuucaccgagcagccgaucgaccuggugcccaaccagcccuaccccaacgccuccuucgacaacuucaaguucgucugcgacaacaucaaguucgccgacgaccucaaccagcugaccggguacaagaagccggcgagccgcgagcugaaggugacguucuuccccgaccucaacggcgacguggucgccaucgacuacaagcacuacacccccuccuucaagaagggcgccaagcugcugcacaagcccaucguguggcacgugaacaacgccaccaacaaggcgaccuacaagccgaacacguggugcauccggugccucuggagcaccaagcccgucgagaccuccaacagcuucgacgugcugaaguccgaggacgcccaggggauggacaaccuggccugcgaggaccucaagcccgugagcgaggaggucguggagaaccccaccauccagaaggacgugcuggagugcaacgucaagacgaccgagguggugggcgacaucauccugaagccggccaacaacucccucaagaucaccgaggaggucgggcacaccgaccugauggccgcguacguggacaacagcucccugacgaucaagaagcccaacgagcucagccgcgugcugggccugaagacccucgccacccacgggcuggccgccgucaacuccgugcccugggacaccaucgccaacuacgcgaagccguuccugaacaagguggucagcacgaccaccaacaucgugacccgcugccucaaccgggugugcacgaacuacaugcccuacuucuucacccugcugcuccagcugugcaccuucacccgcuccaccaacagccggaucaaggccuccaugcccacgaccaucgccaagaacaccgucaagagcgugggcaaguucugccuggaggccagcuucaacuaccucaagucccccaacuucagcaagcugaucaacaucaucaucugguuccugcuccuguccgugugccugggcagccucaucuacuccaccgccgcgcuggggguccugaugagcaaccucggcaugccguccuacugcacgggguaccgcgagggcuaccugaacagcaccaacgugaccaucgccaccuacugcacgggcuccauccccugcagcgugugccuguccgggcucgacagccuggacaccuaccccucccuggagaccauccagaucaccaucagcuccuucaagugggaccucacggccuucggccuggucgccgagugguuccuggccuacauccucuucacccgguucuucuacgugcuggggcuggcggccaucaugcagcucuucuucagcuacuucgccgugcacuucaucuccaacagcuggcugauguggcugaucaucaaccugguccagauggcccccaucuccgcgauggugcgcauguacaucuucuucgccagcuucuacuacguguggaagagcuacguccacgugguggacggcugcaacuccagcaccugcaugaugugcuacaagcggaaccgcgccacccgggucgagugcacgaccaucgugaacgggguccgccgguccuucuacguguacgccaacggcggcaagggguucugcaagcuccacaacuggaacugcgugaacugcgacaccuucugcgccggcagcaccuucaucuccgacgaggucgcgcgcgaccugagccugcaguucaagcggccgaucaaccccacggaccaguccagcuacaucguggacuccgugaccgucaagaacgggagcauccaccucuacuucgacaaggccggccagaagaccuacgagcgccacucccugagccacuucgugaaccuggacaaccuccgggccaacaacaccaaggggucccugcccaucaacgugaucgucuucgacggcaagagcaagugcgaggaguccagcgccaaguccgccagcguguacuacucccagcugaugugccagcccauccuccugcuggaccaggcgcucgugagcgacgucggcgacagcgccgagguggccgugaagauguucgacgccuacgucaacacguucuccagcaccuucaacgugccgauggagaagcugaagacccugguggccaccgcggaggccgagcucgccaagaacgucucccuggacaacgugcugagcacguucaucuccgccgcgcgccagggguucguggacagcgacgucgagaccaaggacgugguggagugccucaagcugucccaccagagcgacaucgaggucaccggcgacuccugcaacaacuacaugcugaccuacaacaagguggagaacaugacgccccgggaccucggggccugcaucgacugcagcgcccgccacaucaacgcccagguggccaagucccacaacaucgcgcugaucuggaacgucaaggacuucaugagccuguccgagcagcuccggaagcagauccgcagcgccgccaagaagaacaaccugcccuucaagcugaccugcgccaccacccgccagguggugaacgucgugacgaccaagaucgcccucaagggcgggugaggacuagucccuguucccagagcccacuuuuuuuucuuuuuuugaaauaaaauagccugucuuucagaucucaaaggcucuuuucagagccaccaaaaaaaaaaaaaaaaaaaaaaaaaaaaaaaaaaaaaaaaaaaaaaaaaaaaaaaaaaaaaaaaaaaaaaaaaaaaaaaaaaaaaaaaaaaaaaaaaaaaa

SEQ ID NO: 19804 - RNA, 6113 nt, Artificial Sequence
  SARS-CoV-2__MT786845.1__non-structural protein 3 (NSP3) mRNA gc
aggagagucccgcagucggcguccagcggcucugcuuguucgugugugugucguugcaggccuuauucaagcuuaccauggcccccaccaaggugaccuucggcgacgacacggucaucgaggugcagggguacaagagcgugaacaucaccuucgagcuggacgagcgcaucgacaagguccucaacgagaagugcuccgccuacaccguggagcugggcaccgaggugaacgaguucgcgugcgucguggccgacgccgugaucaagacgcugcagccggucagcgagcuccugaccccccuggggaucgaccucgacgagugguccauggccaccuacuaccuguucgacgagagcggcgaguucaagcuggccucccacauguacugcagcuucuacccccccgacgaggacgaggaggagggggacugcgaggaggaggaguucgagccguccacccaguacgaguacggcacggaggacgacuaccagggcaagccccucgaguucggggcgaccagcgccgcccugcagcccgaggaggagcaggaggaggacuggcuggacgacgacucccagcagaccgugggccagcaggacgggagcgaggacaaccagaccacgaccauccagaccaucguggagguccagccccagcucgagauggagcugaccccgguggugcagacgaucgaggucaacuccuucagcggcuaccugaagcucaccgacaacguguacaucaagaacgccgacaucguggaggaggcgaagaaggucaagcccaccgugguggucaacgccgccaacguguaccugaagcacgggggcggcguggccggggcccugaacaaggcgaccaacaacgccaugcaggucgaguccgacgacuacaucgccacgaacggcccccucaagguggggggcagcugcguccuguccggccacaaccuggccaagcacugccuccacgugguggggcccaacgucaacaagggcgaggacauccagcugcugaagagcgccuacgagaacuucaaccagcacgaggugcuccuggcgccgcugcucuccgccgggaucuucggcgccgaccccauccacagccugcgggugugcgucgacaccgugcgcaccaacguguaccuggccgucuucgacaagaaccucuacgacaagcugguguccagcuuccuggagaugaagagcgagaagcagguggagcagaagaucgccgagauccccaaggaggaggucaagcccuucaucaccgaguccaagccgagcguggagcagcggaagcaggacgacaagaagaucaaggcgugcguggaggaggucacgaccacccucgaggagaccaaguuccugacggagaaccugcuccuguacaucgacaucaacgggaaccugcaccccgacuccgccacccucgugagcgacaucgacaucaccuuccugaagaaggacgcccccuacaucgugggcgacgucgugcaggagggcgugcugaccgccgucgugauccccacgaagaaggccgggggcaccaccgagaugcucgcgaaggcccugcgcaaggugccgaccgacaacuacaucacgaccuaccccgggcagggccugaacggguacaccgucgaggaggccaagaccgugcucaagaagugcaaguccgccuucuacauccugcccagcaucaucuccaacgagaagcaggagauccugggcaccgugagcuggaaccuccgggagaugcuggcgcacgccgaggagacgcgcaagcugaugcccgucugcguggagaccaaggccaucguguccaccauccagcggaaguacaagggcaucaagauccaggagggggucguggacuacggcgcccgcuucuacuucuacaccagcaagacgaccguggccucccugaucaacacccucaacgaccugaacgagacccuggucacgaugccgcucggguacgugacccacggccugaaccuggaggaggcggcccgguacaugcgcagccucaaggugcccgccaccgucuccgugagcucccccgacgccgugaccgccuacaacggguaccugacgagcuccagcaagacccccgaggagcacuucaucgagaccaucucccuggcgggcagcuacaaggacuggagcuacuccggccagagcacccagcucgggaucgaguuccugaagcggggcgacaaguccgucuacuacacgagcaacccgaccaccuuccaccuggacggggaggugaucaccuucgacaaccucaagacgcugcugucccuccgcgaggugcggaccaucaaggucuucaccaccguggacaacaucaaccugcacacgcagguggucgacaugagcaugaccuacggccagcaguucggccccaccuaccuggacggggccgacgugaccaagaucaagccccacaacucccacgagggcaagacguucuacgugcucccgaacgacgacacccugcgcgucgaggccuucgaguacuaccacaccaccgaccccagcuuccuggggcgguacauguccgcccucaaccacacgaagaaguggaaguacccccaggugaacggccugaccagcaucaagugggccgacaacaacugcuaccuggcgaccgcccuccugacccugcagcagaucgagcucaaguucaaccccccggcccugcaggacgccuacuaccgcgcgcgggccggggaggccgccaacuucugcgcccugauccucgcguacugcaacaagacggugggcgagcugggcgacguccgcgagaccauguccuaccuguuccagcacgccaaccucgacagcugcaagcgggugcugaacgucgugugcaagaccugcgggcagcagcagaccacccugaagggcguggaggccgucauguacauggggacgcucuccuacgagcaguucaagaagggcgugcagauccugugcaccugcgggaagcaggccaccaaguaccuggugcagcaggagagccccuucgucaugauguccgccccccccgcgcaguacgagcucaagcacggcaccuucacgugcgccagcgaguacaccggcaacuaccagugcgggcacuacaagcacaucaccuccaaggagacccuguacugcaucgacggcgcccugcucacgaagagcagcgaguacaaggggccgaucaccgacguguucuacaaggagaacuccuacaccaccacgaucaagcccgugaccuacaagcuggacggcgucgugugcaccgagaucgaccccaagcuggacaacuacuacaagaaggacaacagcuacuucaccgagcagcccaucgaccucgugccgaaccagcccuaccccaacgccuccuucgacaacuucaaguucgucugcgacaacaucaaguucgccgacgaccugaaccagcugacgggguacaagaagcccgcgagccgcgagcucaaggugaccuucuucccggaccugaacggcgacguggucgccaucgacuacaagcacuacacccccuccuucaagaagggcgccaagcugcuccacaagcccaucguguggcacgugaacaacgccaccaacaaggcgacguacaagcccaacaccuggugcauccggugccuguggagcaccaagccggucgagaccuccaacagcuucgacgugcugaaguccgaggacgcccaggggauggacaaccucgccugcgaggaccugaagcccgugagcgaggaggucguggagaaccccacgauccagaaggacgugcuggagugcaacgucaagaccaccgagguggugggcgacaucauccucaagcccgccaacaacucccugaagaucaccgaggaggucgggcacacggaccugauggccgcguacguggacaacagcucccucaccaucaagaagccgaacgagcugagccgcgugcugggccucaagacccuggccacccacgggcuggccgccgucaacuccgugcccugggacacgaucgccaacuacgcgaagcccuuccucaacaagguggucagcaccaccaccaacaucgugacgcgcugccugaaccgggugugcaccaacuacaugccguacuucuucacccugcuccugcagcugugcaccuucacccgcuccacgaacagccggaucaaggccuccaugcccaccaccaucgccaagaacaccgucaagagcgugggcaaguucugccucgaggccagcuucaacuaccugaagucccccaacuucagcaagcugaucaacaucaucaucugguuccuccugcuguccgugugccucggcagccugaucuacuccacggccgcgcuggggguccucaugagcaaccugggcaugcccuccuacugcaccggguaccgcgagggcuaccugaacagcaccaacgugaccaucgccacguacugcaccggcuccaucccgugcagcgugugccucuccgggcuggacagccuggacaccuaccccucccucgagaccauccagaucacgaucagcuccuucaagugggaccugaccgccuucggccuggucgccgagugguuccucgccuacauccuguucacccgguucuucuacgugcuggggcucgcggccaucaugcagcuguucuucagcuacuucgccgugcacuucaucuccaacagcuggcugauguggcugaucaucaaccucguccagauggcccccaucuccgcgauggugcgcauguacaucuucuucgccagcuucuacuacguguggaagagcuacguccacgugguggacggcugcaacuccagcaccugcaugaugugcuacaagcggaaccgcgccacgcgggucgagugcaccaccaucgugaacgggguccgccgguccuucuacguguacgccaacggcggcaagggguucugcaagcugcacaacuggaacugcgugaacugcgacaccuucugcgccggcagcacguucaucuccgacgaggucgcgcgcgaccugagccuccaguucaagcggcccaucaacccgaccgaccaguccagcuacaucguggacuccgugaccgucaagaacgggagcauccaccuguacuucgacaaggccggccagaagaccuacgagcgccacucccugagccacuucgugaaccucgacaaccugcgggccaacaacacgaaggggucccugcccaucaacgugaucgucuucgacggcaagagcaagugcgaggaguccagcgccaaguccgccagcguguacuacucccagcucaugugccagcccauccugcugcucgaccaggcgcuggugagcgacgucggcgacagcgccgagguggccgugaagauguucgacgccuacgucaacaccuucuccagcaccuucaacgugcccauggagaagcugaagacccucguggccacggcggaggccgagcuggccaagaacgucucccuggacaacgugcucagcaccuucaucuccgccgcgcgccagggguucguggacagcgacgucgagaccaaggacgugguggagugccugaagcugucccaccagagcgacaucgaggucaccggcgacuccugcaacaacuacaugcucacguacaacaagguggagaacaugaccccgcgggaccugggggccugcaucgacugcagcgcccgccacaucaacgcccagguggccaagucccacaacaucgcgcugaucuggaacgucaaggacuucaugagccucuccgagcagcugcggaagcagauccgcagcgccgccaagaagaacaaccugcccuucaagcucaccugcgccaccacgcgccagguggugaacgucgugaccaccaagaucgcccugaagggcgggugaggacuagucccuguucccagagcccacuuuuuuuucuuuuuuugaaauaaaauagccugucuuucagaucucaaaggcucuuuucagagccaccaaaaaaaaaaaaaaaaaaaaaaaaaaaaaaaaaaaaaaaaaaaaaaaaaaaaaaaaaaaaaaaaaaaaaaaaaaaaaaaaaaaaaaaaaaaaaaaaaaaaa

SEQ ID NO: 19805 - RNA, 6113 nt, Artificial Sequence
  SARS-CoV-2__MT787503.1__non-structural protein 3 (NSP3) mRNA gc
aggagagucccgcagucggcguccagcggcucugcuuguucgugugugugucguugcaggccuuauucaagcuuaccauggcccccaccaaggugaccuucggcgacgacacggucaucgaggugcagggguacaagagcgugaacaucaccuucgagcuggacgagcgcaucgacaagguccucaacgagaagugcuccgccuacaccguggagcugggcaccgaggugaacgaguucgcgugcgucguggccgacgccgugaucaagacgcugcagccggucagcgagcuccugaccccccuggggaucgaccucgacgagugguccauggccaccuacuaccuguucgacgagagcggcgaguucaagcuggccucccacauguacugcagcuucuacccccccgacgaggacgaggaggagggggacugcgaggaggaggaguucgagccguccacccaguacgaguacggcacggaggacgacuaccagggcaagccccucgaguucggggcgaccagcgccgcccugcagcccgaggaggagcaggaggaggacuggcuggacgacgacucccagcagaccgugggccagcaggacgggagcgaggacaaccagaccacgaccauccagaccaucguggagguccagccccagcucgagauggagcugaccccgguggugcagacgaucgaggucaacuccuucagcggcuaccugaagcucaccgacaacguguacaucaagaacgccgacaucguggaggaggcgaagaaggucaagcccaccgugguggucaacgccgccaacguguaccugaagcacgggggcggcguggccggggcccugaacaaggcgaccaacaacgccaugcaggucgaguccgacgacuacaucgccacgaacggcccccucaagguggggggcagcugcguccuguccggccacaaccuggccaagcacugccuccacgugguggggcccaacgucaacaagggcgaggacauccagcugcugaagagcgccuacgagaacuucaaccagcacgaggugcuccuggcgccgcugcucuccgccgggaucuucggcgccgaccccauccacagccugcgggugugcgucgacaccgugcgcaccaacguguaccuggccgucuucgacaagaaccucuacgacaagcugguguccagcuuccuggagaugaagagcgagaagcagguggagcagaagaucgccgagauccccaaggaggaggucaagcccuucaucaccgaguccaagccgagcguggagcagcggaagcaggacgacaagaagaucaaggcgugcguggaggaggucacgaccacccucgaggagaccaaguuccugacggagaaccugcuccuguacaucgacaucaacgggaaccugcaccccgacuccgccacccucgugagcgacaucgacaucaccuuccugaagaaggacgcccccuacaucgugggcgacgucgugcaggagggcgugcugaccgccgucgugauccccacgaagaaggccgggggcaccaccgagaugcucgcgaaggcccugcgcaaggugccgaccgacaacuacaucacgaccuaccccgggcagggccugaacggguacaccgucgaggaggccaagaccgugcucaagaagugcaaguccgccuucuacauccugcccagcaucaucuccaacgagaagcaggagauccugggcaccgugagcuggaaccuccgggagaugcuggcgcacgccgaggagacgcgcaagcugaugcccgucugcguggagaccaaggccaucguguccaccauccagcggaaguacaagggcaucaagauccaggagggggucguggacuacggcgcccgcuucuacuucuacaccagcaagacgaccguggccucccugaucaacacccucaacgaccugaacgagacccuggucacgaugccgcucggguacgugacccacggccugaaccuggaggaggcggcccgguacaugcgcagccucaaggugcccgccaccgucuccgugagcucccccgacgccgugaccgccuacaacggguaccugacgagcuccagcaagacccccgaggagcacuucaucgagaccaucucccuggcgggcagcuacaaggacuggagcuacuccggccagagcacccagcucgggaucgaguuccugaagcggggcgacaaguccgucuacuacacgagcaacccgaccaccuuccaccuggacggggaggugaucaccuucgacaaccucaagacgcugcugucccuccgcgaggugcggaccaucaaggucuucaccaccguggacaacaucaaccugcacacgcaggugauggacaugagcaugaccuacggccagcaguucggccccaccuaccuggacggggccgacgucaccaagaucaagccccacaacucccacgagggcaagacguucuacgugcucccgaacgacgacacccugcgcguggaggccuucgaguacuaccacaccaccgaccccagcuuccuggggcgguacauguccgcccucaaccacacgaagaaguggaaguacccccaggucaacggccugaccagcaucaagugggccgacaacaacugcuaccuggcgaccgcccuccugacccugcagcagaucgagcucaaguucaaccccccggcccugcaggacgccuacuaccgcgcgcgggccggggaggccgccaacuucugcgcccugauccucgcguacugcaacaagacggugggcgagcugggcgacgugcgcgagaccauguccuaccuguuccagcacgccaaccucgacagcugcaagcggguccugaacguggucugcaagaccugcgggcagcagcagaccacccugaagggcguggaggccgugauguacauggggacgcucuccuacgagcaguucaagaagggcguccagauccccugcaccugcgggaagcaggccaccaaguaccuggugcagcaggagagccccuucgugaugauguccgcccccccggcgcaguacgagcugaagcacggcaccuucacgugcgccagcgaguacaccggcaacuaccagugcgggcacuacaagcacaucaccuccaaggagacccucuacugcaucgacggcgcccugcugacgaagagcagcgaguacaaggggcccaucaccgacgucuucuacaaggagaacuccuacaccaccacgaucaagcccgugaccuacaagcucgacggcguggucugcaccgagaucgaccccaagcuggacaacuacuacaagaaggacaacagcuacuucaccgagcagccgaucgaccuggugcccaaccagcccuaccccaacgccuccuucgacaacuucaaguucgugugcgacaacaucaaguucgccgacgaccucaaccagcugacgggguacaagaagccggcgagccgcgagcugaaggucaccuucuuccccgaccucaacggcgacgugguggccaucgacuacaagcacuacacccccuccuucaagaagggcgccaagcugcugcacaagcccaucgucuggcacgugaacaacgccaccaacaaggcgacguacaagccgaacaccuggugcauccggugccucuggagcaccaagcccguggagaccuccaacagcuucgacguccugaaguccgaggacgcccaggggauggacaaccuggccugcgaggaccucaagcccgugagcgaggagguggucgagaaccccacgauccagaaggacgugcuggagugcaacgugaagaccaccgaggucgugggcgacaucauccugaagccggccaacaacucccucaagaucaccgaggagguggggcacacggaccugauggccgcguacgucgacaacagcucccugaccaucaagaagcccaacgagcucagccgcgugcugggccugaagacccucgccacccacgggcuggccgccgugaacuccguccccugggacacgaucgccaacuacgcgaagccguuccugaacaagguggugagcaccaccaccaacaucgucacgcgcugccucaaccgggugugcaccaacuacaugcccuacuucuucacccugcugcuccagcugugcaccuucacccgcuccacgaacagccggaucaaggccuccaugcccaccaccaucgccaagaacaccgugaagagcgucggcaaguucugccuggaggccagcuucaacuaccucaagucccccaacuucagcaagcugaucaacaucaucaucugguuccugcuccuguccgugugccugggcagccucaucuacuccacggccgcgcugggggugcugaugagcaaccucggcaugccguccuacugcaccggguaccgcgagggcuaccugaacagcaccaacgucaccaucgccacguacugcaccggcuccauccccugcagcgugugccuguccgggcucgacagccuggacaccuaccccucccuggagaccauccagaucacgaucagcuccuucaagugggaccucaccgccuucggccugguggccgagugguuccuggccuacauccucuucacccgguucuucuacguccuggggcuggcggccaucaugcagcucuucuucagcuacuucgccgugcacuucaucuccaacagcuggcugauguggcugaucaucaaccuggugcagauggcccccaucuccgcgaugguccgcauguacaucuucuucgccagcuucuacuacguguggaagagcuacgugcacgucguggacggcugcaacuccagcaccugcaugaugugcuacaagcggaaccgcgccacgcggguggagugcaccaccaucgucaacggggugcgccgguccuucuacgucuacgccaacggcggcaagggguucugcaagcuccacaacuggaacugcgugaacugcgacaccuucugcgccggcagcacguucaucuccgacgagguggcgcgcgaccugagccugcaguucaagcggccgaucaaccccaccgaccaguccagcuacaucgucgacuccgugaccgugaagaacgggagcauccaccucuacuucgacaaggccggccagaagaccuacgagcgccacucccugagccacuucgucaaccuggacaaccuccgggccaacaacacgaaggggucccugcccaucaacgugaucguguucgacggcaagagcaagugcgaggaguccagcgccaaguccgccagcgucuacuacucccagcugaugugccagcccauccuccugcuggaccaggcgcucgugagcgacgugggcgacagcgccgaggucgccgugaagauguucgacgccuacgugaacaccuucuccagcaccuucaacgucccgauggagaagcugaagacccugguggccacggcggaggccgagcucgccaagaacgugucccuggacaacguccugagcaccuucaucuccgccgcgcgccagggguucguggacagcgacguggagaccaaggacgucguggagugccucaagcugucccaccagagcgacaucgaggugaccggcgacuccugcaacaacuacaugcugacguacaacaaggucgagaacaugaccccccgggaccucggggccugcaucgacugcagcgcccgccacaucaacgcccagguggccaagucccacaacaucgcgcugaucuggaacgugaaggacuucaugagccuguccgagcagcuccggaagcagauccgcagcgccgccaagaagaacaaccugcccuucaagcugaccugcgccaccacgcgccaggucgugaacguggucaccaccaagaucgcccucaagggcgggugaggacuagucccuguucccagagcccacuuuuuuuucuuuuuuugaaauaaaauagccugucuuucagaucucaaaggcucuuuucagagccaccaaaaaaaaaaaaaaaaaaaaaaaaaaaaaaaaaaaaaaaaaaaaaaaaaaaaaaaaaaaaaaaaaaaaaaaaaaaaaaaaaaaaaaaaaaaaaaaaaaaaa

SEQ ID NO: 19806 - RNA, 6113 nt, Artificial Sequence
  SARS-CoV-2__MT781415.1__non-structural protein 3 (NSP3) mRNA gc
aggagagucccgcagucggcguccagcggcucugcuuguucgugugugugucguugcaggccuuauucaagcuuaccauggcccccaccaaggugaccuucggcgacgacacggucaucgaggugcagggguacaagagcgugaacaucaccuucgagcuggacgagcgcaucgacaagguccucaacgagaagugcuccgccuacaccguggagcugggcaccgaggugaacgaguucgcgugcgucguggccgacgccgugaucaagacgcugcagccggucagcgagcuccugaccccccuggggaucgaccucgacgagugguccauggccaccuacuaccuguucgacgagagcggcgaguucaagcuggccucccacauguacugcagcuucuacccccccgacgaggacgaggaggagggggacugcgaggaggaggaguucgagccguccacccaguacgaguacggcacggaggacgacuaccagggcaagccccucgaguucggggcgaccagcgccgcccugcagcccgaggaggagcaggaggaggacuggcuggacgacgacucccagcagaccgugggccagcaggacgggagcgaggacaaccagaccacgaccauccagaccaucguggagguccagccccagcucgagauggagcugaccccgguggugcagacgaucgaggucaacuccuucagcggcuaccugaagcucaccgacaacguguacaucaagaacgccgacaucguggaggaggcgaagaaggucaagcccaccgugguggucaacgccgccaacguguaccugaagcacgggggcggcguggccggggcccugaacaaggcgaccaacaacgccaugcaggucgaguccgacgacuacaucgccacgaacggcccccucaagguggggggcagcugcguccuguccggccacaaccuggccaagcacugccuccacgugguggggcccaacgucaacaagggcgaggacauccagcugcugaagagcgccuacgagaacuucaaccagcacgaggugcuccuggcgccgcugcucuccgccgggaucuucggcgccgaccccauccacagccugcgggugugcgucgacaccgugcgcaccaacguguaccuggccgucuucgacaagaaccucuacgacaagcugguguccagcuuccuggagaugaagagcgagaagcagguggagcagaagaucgccgagauccccaaggaggaggucaagcccuucaucaccgaguccaagccgagcguggagcagcggaagcaggacgacaagaagaucaaggcgugcguggaggaggucacgaccacccucgaggagaccaaguuccugacggagaaccugcuccuguacaucgacaucaacgggaaccugcaccccgacuccgccacccucgugagcgacaucgacaucaccuuccugaagaaggacgcccccuacaucgugggcgacgucgugcaggagggcgugcugaccgccgucgugauccccacgaagaaggccgggggcaccaccgagaugcucgcgaaggcccugcgcaaggugccgaccgacaacuacaucacgaccuaccccgggcagggccugaacggguacaccgucgaggaggccaagaccgugcucaagaagugcaaguccgccuucuacauccugcccagcaucaucuccaacgagaagcaggagauccugggcaccgugagcuggaacuuccgggagaugcucgcgcacgccgaggagacgcgcaagcugaugcccgucugcguggagaccaaggccaucguguccaccauccagcggaaguacaagggcaucaagauccaggagggggucguggacuacggcgcccgcuucuacuucuacaccagcaagacgaccguggccucccugaucaacacccugaacgaccucaacgagacccuggucacgaugccgcugggguacgugacccacggccucaaccuggaggaggcggcccgguacaugcgcagccugaaggugcccgccaccgucuccgugagcucccccgacgccgugaccgccuacaacggguaccucacgagcuccagcaagacccccgaggagcacuucaucgagaccaucucccuggcgggcagcuacaaggacuggagcuacuccggccagagcacccagcuggggaucgaguuccucaagcggggcgacaaguccgucuacuacacgagcaacccgaccaccuuccaccuggacggggaggugaucaccuucgacaaccugaagacgcuccugucccugcgcgaggugcggaccaucaaggucuucaccaccguggacaacaucaaccuccacacgcagguggucgacaugagcaugaccuacggccagcaguucggccccaccuaccuggacggggccgacgugaccaagaucaagccccacaacucccacgagggcaagacguucuacgugcugccgaacgacgacacccuccgcgucgaggccuucgaguacuaccacaccaccgaccccagcuuccuggggcgguacauguccgcccugaaccacacgaagaaguggaaguacccccaggugaacggccucaccagcaucaagugggccgacaacaacugcuaccuggcgaccgcccugcucacccugcagcagaucgagcugaaguucaaccccccggcccuccaggacgccuacuaccgcgcgcgggccggggaggccgccaacuucugcgcccugauccuggcguacugcaacaagacggugggcgagcucggcgacguccgcgagaccauguccuaccuguuccagcacgccaaccuggacagcugcaagcgggugcucaacgucgugugcaagaccugcgggcagcagcagaccacccugaagggcguggaggccgucauguacauggggacgcuguccuacgagcaguucaagaagggcgugcagauccccugcaccugcgggaagcaggccaccaaguaccucgugcagcaggagagccccuucgucaugauguccgcccccccggcgcaguacgagcugaagcacggcaccuucacgugcgccagcgaguacaccggcaacuaccagugcgggcacuacaagcacaucaccuccaaggagacccuguacugcaucgacggcgcccuccugacgaagagcagcgaguacaaggggcccaucaccgacguguucuacaaggagaacuccuacaccaccacgaucaagcccgugaccuacaagcuggacggcgucgugugcaccgagaucgaccccaagcucgacaacuacuacaagaaggacaacagcuacuucaccgagcagccgaucgaccuggugcccaaccagcccuaccccaacgccuccuucgacaacuucaaguucgucugcgacaacaucaaguucgccgacgaccugaaccagcucacgggguacaagaagccggcgagccgcgagcugaaggugaccuucuuccccgaccugaacggcgacguggucgccaucgacuacaagcacuacacccccuccuucaagaagggcgccaagcuccugcacaagcccaucguguggcacgugaacaacgccaccaacaaggcgacguacaagccgaacaccuggugcauccggugccuguggagcaccaagcccgucgagaccuccaacagcuucgacgugcucaaguccgaggacgcccaggggauggacaaccuggccugcgaggaccugaagcccgugagcgaggaggucguggagaaccccacgauccagaaggacgugcucgagugcaacgucaagaccaccgagguggugggcgacaucauccugaagccggccaacaacucccugaagaucaccgaggaggucgggcacacggaccucauggccgcguacguggacaacagcucccugaccaucaagaagcccaacgagcugagccgcgugcucggccugaagacccuggccacccacgggcucgccgccgucaacuccgugcccugggacacgaucgccaacuacgcgaagccguuccugaacaagguggucagcaccaccaccaacaucgugacgcgcugccugaaccgggugugcaccaacuacaugcccuacuucuucacccuccugcugcagcucugcaccuucacccgcuccacgaacagccggaucaaggccuccaugcccaccaccaucgccaagaacaccgucaagagcgugggcaaguucugccuggaggccagcuucaacuaccugaagucccccaacuucagcaagcucaucaacaucaucaucugguuccugcugcucuccgugugccugggcagccugaucuacuccacggccgcgcucgggguccugaugagcaaccugggcaugccguccuacugcaccggguaccgcgagggcuaccucaacagcaccaacgugaccaucgccacguacugcaccggcuccauccccugcagcgugugccuguccgggcuggacagccucgacaccuaccccucccuggagaccauccagaucacgaucagcuccuucaagugggaccugaccgccuucggccucgucgccgagugguuccuggccuacauccuguucacccgguucuucuacgugcucgggcuggcggccaucaugcagcuguucuucagcuacuucgccgugcacuucaucuccaacagcuggcucauguggcugaucaucaaccugguccagauggcccccaucuccgcgauggugcgcauguacaucuucuucgccagcuucuacuacguguggaagagcuacguccacgugguggacggcugcaacuccagcaccugcaugaugugcuacaagcggaaccgcgccacgcgggucgagugcaccaccaucgugaacgggguccgccgguccuucuacguguacgccaacggcggcaagggguucugcaagcugcacaacuggaacugcgugaacugcgacaccuucugcgccggcagcacguucaucuccgacgaggucgcgcgcgaccucagccugcaguucaagcggccgaucaaccccaccgaccaguccagcuacaucguggacuccgugaccgucaagaacgggagcauccaccuguacuucgacaaggccggccagaagaccuacgagcgccacucccucagccacuucgugaaccuggacaaccugcgggccaacaacacgaaggggucccuccccaucaacgugaucgucuucgacggcaagagcaagugcgaggaguccagcgccaaguccgccagcguguacuacucccagcugaugugccagcccauccugcuccuggaccaggcgcuggugagcgacgucggcgacagcgccgagguggccgugaagauguucgacgccuacgucaacaccuucuccagcaccuucaacgugccgauggagaagcucaagacccugguggccacggcggaggccgagcuggccaagaacgucucccucgacaacgugcugagcaccuucaucuccgccgcgcgccagggguucguggacagcgacgucgagaccaaggacgugguggagugccugaagcucucccaccagagcgacaucgaggucaccggcgacuccugcaacaacuacaugcugacguacaacaagguggagaacaugaccccccgggaccugggggccugcaucgacugcagcgcccgccacaucaacgcccagguggccaagucccacaacaucgcgcucaucuggaacgucaaggacuucaugagccuguccgagcagcugcggaagcagauccgcagcgccgccaagaagaacaaccuccccuucaagcugaccugcgccaccacgcgccagguggugaacgucgugaccaccaagaucgcccugaagggcgggugaggacuagucccuguucccagagcccacuuuuuuuucuuuuuuugaaauaaaauagccugucuuucagaucucaaaggcucuuuucagagccaccaaaaaaaaaaaaaaaaaaaaaaaaaaaaaaaaaaaaaaaaaaaaaaaaaaaaaaaaaaaaaaaaaaaaaaaaaaaaaaaaaaaaaaaaaaaaaaaaaaaaa

SEQ ID NO: 19807 - RNA, 6113 nt, Artificial Sequence
  SARS-CoV-2__MT782381.1__non-structural protein 3 (NSP3) mRNA gc
aggagagucccgcagucggcguccagcggcucugcuuguucgugugugugucguugcaggccuuauucaagcuuaccauggcccccaccaaggugaccuucggcgacgacacggucaucgaggugcagggguacaagagcgugaacaucaccuucgagcuggacgagcgcaucgacaagguccucaacgagaagugcuccgccuacaccguggagcugggcaccgaggugaacgaguucgcgugcgucguggccgacgccgugaucaagacgcugcagccggucagcgagcuccugaccucccuggggaucgaccucgacgaguggagcauggccaccuacuaccuguucgacgaguccggcgaguucaagcuggccagccacauguacugcuccuucuacccccccgacgaggacgaggaggagggggacugcgaggaggaggaguucgagcccagcacccaguacgaguacggcacggaggacgacuaccagggcaagccgcucgaguucggggcgaccuccgccgcccugcagcccgaggaggagcaggaggaggacuggcuggacgacgacagccagcagaccgugggccagcaggacggguccgaggacaaccagaccacgaccauccagaccaucguggagguccagccccagcucgagauggagcugacccccguggugcagacgaucgaggucaacagcuucuccggcuaccugaagcucaccgacaacguguacaucaagaacgccgacaucguggaggaggcgaagaaggucaagccgaccgugguggucaacgccgccaacguguaccugaagcacgggggcggcguggccggggcccugaacaaggcgaccaacaacgccaugcaggucgagagcgacgacuacaucgccacgaacggcccccucaagguggggggcuccugcguccugagcggccacaaccuggccaagcacugccuccacgugguggggcccaacgucaacaagggcgaggacauccagcugcugaaguccgccuacgagaacuucaaccagcacgaggugcuccuggcgccccugcucagcgccgggaucuucggcgccgacccgauccacucccugcgggugugcgucgacaccgugcgcaccaacguguaccuggccgucuucgacaagaaccucuacgacaagcuggugagcagcuuccuggagaugaaguccgagaagcagguggagcagaagaucgccgagauccccaaggaggaggucaagcccuucaucaccgagagcaagcccuccguggagcagcggaagcaggacgacaagaagaucaaggcgugcguggaggaggucacgaccacccucgaggagaccaaguuccugacggagaaccugcuccuguacaucgacaucaacgggaaccugcacccggacagcgccacccucguguccgacaucgacaucaccuuccugaagaaggacgcccccuacaucgugggcgacgucgugcaggagggcgugcugaccgccgucgugauccccacgaagaaggccgggggcaccaccgagaugcucgcgaaggcccugcgcaaggugcccaccgacaacuacaucacgaccuacccggggcagggccugaacggguacaccgucgaggaggccaagaccgugcucaagaagugcaagagcgccuucuacauccugcccuccaucaucagcaacgagaagcaggagauccugggcaccguguccuggaaccuccgggagaugcuggcgcacgccgaggagacgcgcaagcugaugcccgucugcguggagaccaaggccaucgugagcaccauccagcggaaguacaagggcaucaagauccaggagggggucguggacuacggcgcccgcuucuacuucuacaccuccaagacgaccguggccagccugaucaacacccucaacgaccugaacgagacccuggucacgaugccccucggguacgugacccacggccugaaccuggaggaggcggcccgguacaugcgcucccucaaggugccggccaccgucagcguguccagccccgacgccgugaccgccuacaacggguaccugacguccagcuccaagacccccgaggagcacuucaucgagaccaucagccuggcgggcagcuacaaggacugguccuacagcggccaguccacccagcucgggaucgaguuccugaagcggggcgacaagagcgucuacuacacguccaaccccaccaccuuccaccuggacggggaggugaucaccuucgacaaccucaagacgcugcugagccuccgcgaggugcggaccaucaaggucuucaccaccguggacaacaucaaccugcacacgcagguggucgacauguccaugaccuacggccagcaguucggcccgaccuaccuggacggggccgacgugaccaagaucaagccccacaacagccacgagggcaagacguucuacgugcuccccaacgacgacacccugcgcgucgaggccuucgaguacuaccacaccaccgacccguccuuccuggggcgguacaugagcgcccucaaccacacgaagaaguggaaguacccccaggugaacggccugaccuccaucaagugggccgacaacaacugcuaccuggcgaccgcccuccugacccugcagcagaucgagcucaaguucaacccccccgcccugcaggacgccuacuaccgcgcgcgggccggggaggccgccaacuucugcgcccugauccucgcguacugcaacaagacggugggcgagcugggcgacguccgcgagaccaugagcuaccuguuccagcacgccaaccucgacuccugcaagcgggugcugaacgucgugugcaagaccugcgggcagcagcagaccacccugaagggcguggaggccgucauguacauggggacgcucagcuacgagcaguucaagaagggcgugcagaucccgugcaccugcgggaagcaggccaccaaguaccuggugcagcaggagucccccuucgucaugaugagcgccccccccgcgcaguacgagcugaagcacggcaccuucacgugcgccuccgaguacaccggcaacuaccagugcgggcacuacaagcacaucaccagcaaggagacccucuacugcaucgacggcgcccugcugacgaagagcuccgaguacaaggggccgaucaccgacguguucuacaaggagaacagcuacaccaccacgaucaagcccgugaccuacaagcucgacggcgucgugugcaccgagaucgaccccaagcuggacaacuacuacaagaaggacaacuccuacuucaccgagcagcccaucgaccuggugccgaaccagcccuaccccaacgccagcuucgacaacuucaaguucgucugcgacaacaucaaguucgccgacgaccucaaccagcugacgggguacaagaagcccgcgucccgcgagcugaaggugaccuucuucccggaccucaacggcgacguggucgccaucgacuacaagcacuacacccccagcuucaagaagggcgccaagcugcugcacaagcccaucguguggcacgugaacaacgccaccaacaaggcgacguacaagcccaacaccuggugcauccggugccucugguccaccaagccggucgagaccagcaacuccuucgacgugcugaagagcgaggacgcccaggggauggacaaccuggccugcgaggaccucaagcccguguccgaggaggucguggagaaccccacgauccagaaggacgugcuggagugcaacgucaagaccaccgagguggugggcgacaucauccugaagcccgccaacaacagccucaagaucaccgaggaggucgggcacacggaccugauggccgcguacguggacaacuccagccugaccaucaagaagccgaacgagcucucccgcgugcugggccugaagacccucgccacccacgggcuggccgccgucaacagcgugcccugggacacgaucgccaacuacgcgaagcccuuccugaacaagguggucuccaccaccaccaacaucgugacgcgcugccucaaccgggugugcaccaacuacaugccguacuucuucacccugcugcuccagcugugcaccuucacccgcagcacgaacucccggaucaaggccagcaugcccaccaccaucgccaagaacaccgucaagagcgugggcaaguucugccuggaggccuccuucaacuaccucaagagccccaacuucuccaagcugaucaacaucaucaucugguuccugcuccugagcgugugccugggcucccucaucuacagcacggccgcgcuggggguccugauguccaaccucggcaugcccagcuacugcaccggguaccgcgagggcuaccugaacuccaccaacgugaccaucgccacguacugcaccggcagcaucccgugcuccgugugccugagcgggcucgacucccuggacaccuaccccagccuggagaccauccagaucacgaucuccagcuucaagugggaccucaccgccuucggccuggucgccgagugguuccuggccuacauccucuucacccgguucuucuacgugcuggggcuggcggccaucaugcagcucuucuucuccuacuucgccgugcacuucaucagcaacuccuggcugauguggcugaucaucaaccugguccagauggcccccaucagcgcgauggugcgcauguacaucuucuucgccagcuucuacuacguguggaaguccuacguccacgugguggacggcugcaacagcuccaccugcaugaugugcuacaagcggaaccgcgccacgcgggucgagugcaccaccaucgugaacgggguccgccggagcuucuacguguacgccaacggcggcaagggguucugcaagcuccacaacuggaacugcgugaacugcgacaccuucugcgccggcuccacguucaucagcgacgaggucgcgcgcgaccugucccugcaguucaagcggcccaucaacccgaccgaccagagcuccuacaucguggacagcgugaccgucaagaacggguccauccaccucuacuucgacaaggccggccagaagaccuacgagcgccacagccugucccacuucgugaaccuggacaaccuccgggccaacaacacgaaggggagccugcccaucaacgugaucgucuucgacggcaaguccaagugcgaggagagcuccgccaagagcgccuccguguacuacagccagcugaugugccagcccauccuccugcuggaccaggcgcucgugagcgacgucggcgacuccgccgagguggccgugaagauguucgacgccuacgucaacaccuucagcuccaccuucaacgugcccauggagaagcugaagacccugguggccacggcggaggccgagcucgccaagaacgucagccuggacaacgugcuguccaccuucaucagcgccgcgcgccagggguucguggacuccgacgucgagaccaaggacgugguggagugccucaagcugagccaccaguccgacaucgaggucaccggcgacagcugcaacaacuacaugcugacguacaacaagguggagaacaugaccccgcgggaccucggggccugcaucgacugcuccgcccgccacaucaacgcccagguggccaagagccacaacaucgcgcugaucuggaacgucaaggacuucaugucccugagcgagcagcuccggaagcagauccgcuccgccgccaagaagaacaaccugcccuucaagcugaccugcgccaccacgcgccagguggugaacgucgugaccaccaagaucgcccucaagggcgggugaggacuagucccuguucccagagcccacuuuuuuuucuuuuuuugaaauaaaauagccugucuuucagaucucaaaggcucuuuucagagccaccaaaaaaaaaaaaaaaaaaaaaaaaaaaaaaaaaaaaaaaaaaaaaaaaaaaaaaaaaaaaaaaaaaaaaaaaaaaaaaaaaaaaaaaaaaaaaaaaaaaaa

SEQ ID NO: 19808 - RNA, 6113 nt, Artificial Sequence
  SARS-CoV-2__MT786334.1__non-structural protein 3 (NSP3) mRNA gc
aggagagucccgcagucggcguccagcggcucugcuuguucgugugugugucguugcaggccuuauucaagcuuaccauggcccccaccaaggugaccuucggcgacgacacggucaucgaggugcagggguacaagagcgugaacaucaccuucgagcuggacgagcgcaucgacaagguccucaacgagaagugcuccgccuacaccguggagcugggcaccgaggugaacgaguucgcgugcgucguggccgacgccgugaucaagacgcugcagccggucagcgagcuccugaccccccuggggaucgaccucgacgagugguccauggccaccuacuaccuguucgacgagagcggcgaguucaagcuggccucccacauguacugcagcuucuacccccccgacgaggacgaggaggagggggacugcgaggaggaggaguucgagccguccacccaguacgaguacggcacggaggacgacuaccagggcaagccccucgaguucggggcgaccagcgccgcccugcagcccgaggaggagcaggaggaggacuggcuggacgacgacucccagcagaccgugggccagcaggacgggagcgaggacaaccagaccacgaccauccagaccaucguggagguccagccccagcucgagauggagcugaccccgguggugcagacgaucgaggucaacuccuucagcggcuaccugaagcucaccgacaacguguacaucaagaacgccgacaucguggaggaggcgaagaaggucaagcccaccgugguggucaacgccgccaacguguaccugaagcacgggggcggcguggccggggcccugaacaaggcgaccaacaacgccaugcaggucgaguccgacgacuacaucgccacgaacggcccccucaagguggggggcagcugcguccuguccggccacaaccuggccaagcacugccuccacgugguggggcccaacgucaacaagggcgaggacauccagcugcugaagagcgccuacgagaacuucaaccagcacgaggugcuccuggcgccgcugcucuccgccgggaucuucggcgccgaccccauccacagccugcgggugugcgucgacaccgugcgcaccaacguguaccuggccgucuucgacaagaaccucuacgacaagcugguguccagcuuccuggagaugaagagcgagaagcagguggagcagaagaucgccgagauccccaaggaggaggucaagcccuucaucaccgaguccaagccgagcguggagcagcggaagcaggacgacaagaagaucaaggcgugcguggaggaggucacgaccacccucgaggagaccaaguuccugacggagaaccugcuccuguacaucgacaucaacgggaaccugcaccccgacuccgccacccucgugagcgacaucgacaucaccuuccugaagaaggacgcccccuacaucgugggcgacgucgugcaggagggcgugcugaccgccgucgugauccccacgaagaaggccgggggcaccaccgagaugcucgcgaaggcccugcgcaaggugccgaccgacaacuacaucacgaccuaccccgggcagggccugaacggguacaccgucgaggaggccaagaccgugcucaagaagugcaaguccgccuucuacauccugcccagcaucaucuccaacgagaagcaggagauccugggcaccgugagcuggaaccuccgggagaugcuggcgcacgccgaggagacgcgcaagcugaugcccgucugcguggagaccaaggccaucguguccaccauccagcggaaguacaagggcaucaagauccaggagggggucguggacuacggcgcccgcuucuacuucuacaccagcaagacgaccguggccucccugaucaacacccucaacgaccugaacgagacccuggucacgaugccgcucggguacgugacccacggccugaaccuggaggaggcggcccgguacaugcgcagccucaaggugcccgccaccgucuccgugagcucccccgacgccgugaccgccuacaacggguaccugacgagcuccagcaagacccccgaggagcacuucaucgagaccaucucccuggcgggcagcuacaaggacuggagcuacuccggccagagcacccagcucgggaucgaguuccugaagcggggcgacaaguccgucuacuacacgagcaacccgaccaccuuccaccuggacggggaggugaucaccuucgacaaccucaagacgcugcugucccuccgcgaggugcggaccaucaaggucuucaccaccguggacaacaucaaccugcacacgcagguggucgacaugagcaugaccuacggccagcaguucggccccaccuaccuggacggggccgacgugaccaagaucaagccccacaacucccacgagggcaagacguucuacgugcucccgaacgacgacacccugcgcgucgaggccuucgaguacuaccacaccaccgaccccagcuuccuggggcgguacauguccgcccucaaccacacgaagaaguggaaguacccccaggugaacggccugaccagcaucaagugggccgacaacaacugcuaccuggcgaccgcccuccugacccugcagcagaucgagcucaaguucaaccccccggcccugcaggacgccuacuaccgcgcgcgggccggggaggccgccaacuucugcgcccugauccucgcguacugcaacaagacggugggcgagcugggcgacguccgcgagaccauguccuaccuguuccagcacgccaaccucgacagcugcaagcgggugcugaacgucgugugcaagaccugcgggcagcagcagaccacccugaagggcguggaggccgucauguacauggggacgcucuccuacgagcaguucaagaagggcgugcagauccccugcaccugcgggaagcaggccaccaaguaccuggugcagcaggagagccccuucgucaugauguccgcccccccggcgcaguacgagcugaagcacggcaccuucacgugcgccagcgaguacaccggcaacuaccagugcgggcacuacaagcacaucaccuccaaggagacccucuacugcaucgacggcgcccugcugacgaagagcagcgaguacaaggggcccaucaccgacguguucuacaaggagaacuccuacaccaccacgaucaagcccgugaccuacaagcucgacggcgucgugugcaccgagaucgaccccaagcuggacaacuacuacaagaaggacaacagcuacuucaccgagcagccgaucgaccuggugcccaaccagcccuaccccaacgccuccuucgacaacuucaaguucgucugcgacaacaucaaguucgccgacgaccucaaccagcugacgggguacaagaagccggcgagccgcgagcugaaggugaccuucuuccccgaccucaacggcgacguggucgccaucgacuacaagcacuacacccccuccuucaagaagggcgccaagcugcugcacaagcccaucguguggcacgugaacaacgccaccaacaaggcgacguacaagccgaacaccuggugcauccggugccucuggagcaccaaguccgucgagaccagcaacuccuucgacgugcugaagagcgaggacgcccaggggauggacaaccuggccugcgaggaccucaagcccguguccgaggaggucguggagaaccccacgauccagaaggacgugcuggagugcaacgucaagaccaccgagguggugggcgacaucauccugaagcccgccaacaacagccucaagaucaccgaggaggucgggcacacggaccugauggccgcguacguggacaacuccagccugaccaucaagaagccgaacgagcucucccgcgugcugggccugaagacccucgccacccacgggcuggccgccgucaacagcgugcccugggacacgaucgccaacuacgcgaagcccuuccugaacaagguggucuccaccaccaccaacaucgugacgcgcugccucaaccgggugugcaccaacuacaugccguacuucuucacccugcugcuccagcugugcaccuucacccgcagcacgaacucccggaucaaggccagcaugcccaccaccaucgccaagaacaccgucaagagcgugggcaaguucugccuggaggccuccuucaacuaccucaagagccccaacuucuccaagcugaucaacaucaucaucugguuccugcuccugagcgugugccugggcucccucaucuacagcacggccgcgcuggggguccugauguccaaccucggcaugcccagcuacugcaccggguaccgcgagggcuaccugaacuccaccaacgugaccaucgccacguacugcaccggcagcaucccgugcuccgugugccugagcgggcucgacucccuggacaccuaccccagccuggagaccauccagaucacgaucuccagcuucaagugggaccucaccgccuucggccuggucgccgagugguuccuggccuacauccucuucacccgguucuucuacgugcuggggcuggcggccaucaugcagcucuucuucuccuacuucgccgugcacuucaucagcaacuccuggcugauguggcugaucaucaaccugguccagauggcccccaucagcgcgauggugcgcauguacaucuucuucgccagcuucuacuacguguggaaguccuacguccacgugguggacggcugcaacagcuccaccugcaugaugugcuacaagcggaaccgcgccacgcgggucgagugcaccaccaucgugaacgggguccgccggagcuucuacguguacgccaacggcggcaagggguucugcaagcuccacaacuggaacugcgugaacugcgacaccuucugcgccggcuccacguucaucagcgacgaggucgcgcgcgaccugucccugcaguucaagcggcccaucaacccgaccgaccagagcuccuacaucguggacagcgugaccgucaagaacggguccauccaccucuacuucgacaaggccggccagaagaccuacgagcgccacagccugucccacuucgugaaccuggacaaccuccgggccaacaacacgaaggggagccugcccaucaacgugaucgucuucgacggcaaguccaagugcgaggagagcuccgccaagagcgccuccguguacuacagccagcugaugugccagcccauccuccugcuggaccaggcgcucgugagcgacgucggcgacuccgccgagguggccgugaagauguucgacgccuacgucaacaccuucagcuccaccuucaacgugcccauggagaagcugaagacccugguggccacggcggaggccgagcucgccaagaacgucagccuggacaacgugcuguccaccuucaucagcgccgcgcgccagggguucguggacuccgacgucgagaccaaggacgugguggagugccucaagcugagccaccaguccgacaucgaggucaccggcgacagcugcaacaacuacaugcugacguacaacaagguggagaacaugaccccgcgggaccucggggccugcaucgacugcuccgcccgccacaucaacgcccagguggccaagagccacaacaucgcgcugaucuggaacgucaaggacuucaugucccugagcgagcagcuccggaagcagauccgcuccgccgccaagaagaacaaccugcccuucaagcugaccugcgccaccacgcgccagguggugaacgucgugaccaccaagaucgcccucaagggcgggugaggacuagucccuguucccagagcccacuuuuuuuucuuuuuuugaaauaaaauagccugucuuucagaucucaaaggcucuuuucagagccaccaaaaaaaaaaaaaaaaaaaaaaaaaaaaaaaaaaaaaaaaaaaaaaaaaaaaaaaaaaaaaaaaaaaaaaaaaaaaaaaaaaaaaaaaaaaaaaaaaaaaa

SEQ ID NO: 19809 - RNA, 6113 nt, Artificial Sequence
  SARS-CoV-2__MT775826.1__non-structural protein 3 (NSP3) mRNA gc
aggagagucccgcagucggcguccagcggcucugcuuguucgugugugugucguugcaggccuuauucaagcuuaccauggcccccaccaaggugaccuucggcgacgacacggucaucgaggugcagggguacaagagcgugaacaucaccuucgagcuggacgagcgcaucgacaagguccucaacgagaagugcuccgccuacaccguggagcugggcaccgaggugaacgaguucgcgugcgucguggccgacgccgugaucaagacgcugcagccggucagcgagcuccugaccccccuggggaucgaccucgacgagugguccauggccaccuacuaccuguucgacgagagcggcgaguucaagcuggccucccacauguacugcagcuucuacccccccgacgaggacgaggaggagggggacugcgaggaggaggaguucgagccguccacccaguacgaguacggcacggaggacgacuaccagggcaagccccucgaguucggggcgaccagcgccgcccugcagcccgaggaggagcaggaggaggacuggcuggacgacgacucccagcagaccgugggccagcaggacgggagcgaggacaaccagaccacgaccauccagaccaucguggagguccagccccagcucgagauggagcugaccccgguggugcagacgaucgaggucaacuccuucagcggcuaccugaagcucaccgacaacguguacaucaagaacgccgacaucguggaggaggcgaagaaggucaagcccaccgugguggucaacgccgccaacguguaccugaagcacgggggcggcguggccggggcccugaacaaggcgaccaacaacgccaugcaggucgaguccgacgacuacaucgccacgaacggcccccucaagguggggggcagcugcguccuguccggcuacaaccuggccaagcacugccuccacgugguggggcccaacgucaacaagggcgaggacauccagcugcugaagagcgccuacgagaacuucaaccagcacgaggugcuccuggcgccgcugcucuccgccgggaucuucggcgccgaccccauccacagccugcgggugugcgucgacaccgugcgcaccaacguguaccuggccgucuucgacaagaaccucuacgacaagcugguguccagcuuccuggagaugaagagcgagaagcagguggagcagaagaucgccgagauccccaaggaggaggucaagcccuucaucaccgaguccaagccgagcguggagcagcggaagcaggacgacaagaagaucaaggcgugcguggaggaggucacgaccacccucgaggagaccaaguuccugacggagaaccugcuccuguacaucgacaucaacgggaaccugcaccccgacuccgccacccucgugagcgacaucgacaucaccuuccugaagaaggacgcccccuacaucgugggcgacgucgugcaggagggcgugcugaccgccgucgugauccccacgaagaaggccgggggcaccaccgagaugcucgcgaaggcccugcgcaaggugccgaccgacaacuacaucacgaccuaccccgggcagggccugaacggguacaccgucgaggaggccaagaccgugcucaagaagugcaaguccgccuucuacauccugcccagcaucaucuccaacgagaagcaggagauccugggcaccgugagcuggaaccuccgggagaugcuggcgcacgccgaggagacgcgcaagcugaugcccgucugcguggagaccaaggccaucguguccaccauccagcggaaguacaagggcaucaagauccaggagggggucguggacuacggcgcccgcuucuacuucuacaccagcaagacgaccguggccucccugaucaacacccucaacgaccugaacgagacccuggucacgaugccgcucggguacgugacccacggccugaaccuggaggaggcggcccgguacaugcgcagccucaaggugcccgccaccgucuccgugagcucccccgacgccgugaccgccuacaacggguaccugacgagcuccagcaagacccccgaggagcacuucaucgagaccaucucccuggcgggcagcuacaaggacuggagcuacuccggccagagcacccagcucgggaucgaguuccugaagcggggcgacaaguccgucuacuacacgagcaacccgaccaccuuccaccuggacggggaggugaucaccuucgacaaccucaagacgcugcugucccuccgcgaggugcggaccaucaaggucuucaccaccguggacaacaucaaccugcacacgcagguggucgacaugagcaugaccuacggccagcaguucggccccaccuaccuggacggggccgacgugaccaagaucaagccccacaacucccacgagggcaagacguucuacgugcucccgaacgacgacacccugcgcgucgaggccuucgaguacuaccacaccaccgaccccagcuuccuggggcgguacauguccgcccucaaccacacgaagaaguggaaguacccccaggugaacggccugaccagcaucaagugggccgacaacaacugcuaccuggcgaccgcccuccugacccugcagcagaucgagcucaaguucaaccccccggcccugcaggacgccuacuaccgcgcgcgggccggggaggccgccaacuucugcgcccugauccucgcguacugcaacaagacggugggcgagcugggcgacguccgcgagaccauguccuaccuguuccagcacgccaaccucgacagcugcaagcgggugcugaacgucgugugcaagaccugcgggcagcagcagaccacccugaagggcguggaggccgucauguacauggggacgcucuccuacgagcaguucaagaagggcgugcagauccccugcaccugcgggaagcaggccaccaaguaccuggugcagcaggagagccccuucgucaugauguccgcccccccggcgcaguacgagcugaagcacggcaccuucacgugcgccagcgaguacaccggcaacuaccagugcgggcacuacaagcacaucaccuccaaggagacccucuacugcaucgacggcgcccugcugacgaagagcagcgaguacaaggggcccaucaccgacguguucuacaaggagaacuccuacaccaccacgaucaagcccgugaccuacaagcucgacggcgucgugugcaccgagaucgaccccaagcuggacaacuacuacaagaaggacaacagcuacuucaccgagcagccgaucgaccuggugcccaaccagcccuaccccaacgccuccuucgacaacuucaaguucgucugcgacaacaucaaguucgccgacgaccucaaccagcugacgggguacaagaagccggcgagccgcgagcugaaggugaccuucuuccccgaccucaacggcgacguggucgccaucgacuacaagcacuacacccccuccuucaagaagggcgccaagcugcugcacaagcccaucguguggcacgugaacaacgccaccaacaaggcgacguacaagccgaacaccuggugcauccggugccucuggagcaccaagcccgucgagaccuccaacagcuucgacgugcugaaguccgaggacgcccaggggauggacaaccuggccugcgaggaccucaagcccgugagcgaggaggucguggagaaccccacgauccagaaggacgugcuggagugcaacgucaagaccaccgagguggugggcgacaucauccugaagccggccaacaacucccucaagaucaccgaggaggucgggcacacggaccugauggccgcguacguggacaacagcucccugaccaucaagaagcccaacgagcucagccgcgugcugggccugaagacccucgccacccacgggcuggccgccgucaacuccgugcccugggacacgaucgccaacuacgcgaagccguuccugaacaagguggucagcaccaccaccaacaucgugacgcgcugccucaaccgggugugcaccaacuacaugcccuacuucuucacccugcugcuccagcugugcaccuucacccgcuccacgaacagccggaucaaggccuccaugcccaccaccaucgccaagaacaccgucaagagcgugggcaaguucugccuggaggccagcuucaacuaccucaagucccccaacuucagcaagcugaucaacaucaucaucugguuccugcuccuguccgugugccugggcagccucaucuacuccacggccgcgcuggggguccugaugagcaaccucggcaugccguccuacugcaccggguaccgcgagggcuaccugaacagcaccaacgugaccaucgccacguacugcaccggcuccauccccugcagcgugugccuguccgggcucgacagccuggacaccuaccccucccuggagaccauccagaucacgaucagcuccuucaagugggaccucaccgccuucggccuggucgccgagugguuccuggccuacauccucuucacccgguucuucuacgugcuggggcuggcggccaucaugcagcucuucuucagcuacuucgccgugcacuucaucuccaacagcuggcugauguggcugaucaucaaccugguccagauggcccccaucuccgcgauggugcgcauguacaucuucuucgccagcuucuacuacguguggaagagcuacguccacgugguggacggcugcaacuccagcaccugcaugaugugcuacaagcggaaccgcgccacgcgggucgagugcaccaccaucgugaacgggguccgccgguccuucuacguguacgccaacggcggcaagggguucugcaagcuccacaacuggaacugcgugaacugcgacaccuucugcgccggcagcacguucaucuccgacgaggucgcgcgcgaccugagccugcaguucaagcggccgaucaaccccaccgaccaguccagcuacaucguggacuccgugaccgucaagaacgggagcauccaccucuacuucgacaaggccggccagaagaccuacgagcgccacucccugagccacuucgugaaccuggacaaccuccgggccaacaacacgaaggggucccugcccaucaacgugaucgucuucgacggcaagagcaagugcgaggaguccagcgccaaguccgccagcguguacuacucccagcugaugugccagcccauccuccugcuggaccaggcgcucgugagcgacgucggcgacagcgccgagguggccgugaagauguucgacgccuacgucaacaccuucuccagcaccuucaacgugccgauggagaagcugaagacccugguggccacggcggaggccgagcucgccaagaacgucucccuggacaacgugcugagcaccuucaucuccgccgcgcgccagggguucguggacagcgacgucgagaccaaggacgugguggagugccucaagcugucccaccagagcgacaucgaggucaccggcgacuccugcaacaacuacaugcugacguacaacaagguggagaacaugaccccccgggaccucggggccugcaucgacugcagcgcccgccacaucaacgcccagguggccaagucccacaacaucgcgcugaucuggaacgucaaggacuucaugagccuguccgagcagcuccggaagcagauccgcagcgccgccaagaagaacaaccugcccuucaagcugaccugcgccaccacgcgccagguggugaacgucgugaccaccaagaucgcccucaagggcgggugaggacuagucccuguucccagagcccacuuuuuuuucuuuuuuugaaauaaaauagccugucuuucagaucucaaaggcucuuuucagagccaccaaaaaaaaaaaaaaaaaaaaaaaaaaaaaaaaaaaaaaaaaaaaaaaaaaaaaaaaaaaaaaaaaaaaaaaaaaaaaaaaaaaaaaaaaaaaaaaaaaaaa

SEQ ID NO: 19810 - RNA, 6113 nt, Artificial Sequence
  SARS-CoV-2__MT775832.1__non-structural protein 3 (NSP3) mRNA gc
aggagagucccgcagucggcguccagcggcucugcuuguucgugugugugucguugcaggccuuauucaagcuuaccauggcccccaccaaggugaccuucggcgacgacacggucaucgaggugcagggguacaagagcgugaacaucaccuucgagcuggacgagcgcaucgacaagguccucaacgagaagugcuccgccuacaccguggagcugggcaccgaggugaacgaguucgcgugcgucguggccgacgccgugaucaagacgcugcagccggucagcgagcuccugaccccccuggggaucgaccucgacgagugguccauggccaccuacuaccuguucgacgagagcggcgaguucaagcuggccucccacauguacugcagcuucuacccccccgacgaggacgaggaggagggggacugcgaggaggaggaguucgagccguccacccaguacgaguacggcacggaggacgacuaccagggcaagccccucgaguucggggcgaccagcgccgcccugcagcccgaggaggagcaggaggaggacuggcuggacgacgacucccagcagaccgugggccagcaggacgggagcgaggacaaccagaccacgaccauccagaccaucguggagguccagccccagcucgagauggagcugaccccgguggugcagacgaucgaggucaacuccuucagcggcuaccugaagcucaccgacaacguguacaucaagaacgccgacaucguggaggaggcgaagaaggucaagcccaccgugguggucaacgccgccaacguguaccugaagcacgggggcggcguggccggggcccugaacaaggcgaccaacaacgccaugcaggucgaguccgacgacuacaucgccacgaacggcccccucaagguggggggcagcugcguccuguccggccacaaccuggccaagcacugccuccacgugguggggcccaacgucaacaagggcgaggacauccagcugcugaagagcgccuacgagaacuucaaccagcacgaggugcuccuggcgccgcugcucuccgccgggaucuucggcgccgaccccauccacagccugcgggugugcgucgacaccgugcgcaccaacguguaccuggccgucuucgacaagaaccucuacgacaagcugguguccagcuuccuggagaugaagagcgagaagcagguggagcagaagaucgccgagauccccaaggaggaggucaagcccuucaucaccgaguccaagccgagcguggagcagcggaagcaggacgacaagaagaucaaggcgugcguggaggaggucacgaccacccucgaggagaccaaguuccugacggagaaccugcuccuguacaucgacaucaacgggaaccugcaccccgacuccgccacccucgugagcgacaucgacaucaccuuccugaagaaggacgcccccuacaucgugggcgacgucgugcaggagggcgugcugaccgccgucgugauccccacgaagaaggccgggggcaccaccgagaugcucgcgaaggcccugcgcaaggugccgaccgacaacuacaucacgaccuaccccgggcagggccugaacggguacaccgucgaggaggccaagaccgugcucaagaagugcaaguccgccuucuacauccugcccagcaucaucuccaacgagaagcaggagauccugggcaccgugagcuggaaccuccgggagaugcuggcgcacgccgaggagacgcgcaagcugaugcccgucugcguggagaccaaggccaucguguccaccauccagcggaaguacaagggcaucaagauccaggagggggucguggacuacggcgcccgcuucuacuucuacaccagcaagacgaccguggccucccugaucaacacccucaacgaccugaacgagacccuggucacgaugccgcucggguacgugacccacggccugaaccuggaggaggcggcccgguacaugcgcagccucaaggugcccgccaccgucuccgugagcucccccgacgccgugaccgccuacaacggguaccugacgagcuccagcaagacccccgaggagcacuucaucgagaccaucucccuggcgggcagcuacaaggacuggagcuacuccggccagagcacccagcucgggaucgaguuccugaagcggggcgacaaguccgucuacuacacgagcaacccgaccaccuuccaccuggacggggaggugaucaccuucgacaaccucaagacgcugcugucccuccgcgaggugcggaccaucaaggucuucaccaccguggacaacaucaaccugcacacgcagguggucgacaugagcaugaccuacggccagcaguucggccccaccuaccuggacggggccgacgugaccaagaucaagccccacaacucccacgagggcaagacguucuacgugcucccgaacgacgacacccugcgcgucgaggccuucgaguacuaccacaccaccgaccccagcuuccuggggcgguacauguccgcccucaaccacacgaagaaguggaaguacccccaggugaacggccugaccagcaucaagugggccgacaacaacugcuaccuggcgaccgcccuccugacccugcagcagaucgagcucaaguucaaccccccggcccugcaggacgccuacuaccgcgcgcgggccggggaggccgccaacuucugcgcccugauccucgcguacugcaacaagacggugggcgagcugggcgacguccgcgagaccauguccuaccuguuccagcacgccaaccucgacagcugcaagcgggugcugaacgucgugugcaagaccugcgggcagcagcagaccacccugaagggcguggaggccgucauguacauggggacgcucuccuacgagcaguucaagaagggcgugcagauccccugcaccugcgggaagcaggccaccaaguaccuggugcagcaggagagccccuucgucaugauguccgcccccccggcgcaguacgagcugaagcacggcaccuucacgugcgccagcgaguacaccggcaacuaccagugcgggcacuacaagcacaucaccuccaaggagacccucuacugcaucgacggcgcccugcugacgaagagcagcgaguacaaggggcccaucaccgacguguucuacaaggagaacuccuacaccaccacgaucaagcccgugaccuacaagcucgacggcgucgugugcaccgagaucgaccccaagcuggacaacuacuacaagaaggacaacagcuacuucaccgagcagccgaucgaccuggugcccaaccagcccuaccccaacgccuccuucgacaacuucaaguucgucugcgacaacaucaaguucgccgacgaccucaaccagcugacgggguacaagaagccggcgagccgcgagcugaaggugaccuucuuccccgaccucaacggcgacguggucgccaucgacuacaagcacuacacccccuccuucaagaagggcgccaagcugcugcacaagcccaucguguggcacgugaacaacgccaccaacaaggcgacguacaagccgaacaccuggugcauccggugccucuggagcaccaagcccgucgagaccuccaacagcuucgacgugcugaaguccgaggacgugcaggggauggacaaccuggccugcgaggaccucaagcccgucagcgaggaggugguggagaaccccacgauccagaaggacguccuggagugcaacgugaagaccaccgagguggucggcgacaucauccugaagccggccaacaacucccucaagaucaccgaggagguggggcacacggaccugauggccgccuacguggacaacagcucccugaccaucaagaagcccaacgagcucagccgcguccugggccugaagacccucgcgacccacgggcuggccgccgugaacuccgugcccugggacacgaucgccaacuacgccaagccguuccugaacaaggucgugagcaccaccaccaacaucgugacgcgcugccucaaccgggucugcaccaacuacaugcccuacuucuucacccugcugcuccagcugugcaccuucacccgcuccacgaacagccggaucaaggcguccaugcccaccaccaucgccaagaacaccgugaagagcgugggcaaguucugccuggaggccagcuucaacuaccucaagucccccaacuucagcaagcugaucaacaucaucaucugguuccugcuccuguccgucugccugggcagccucaucuacuccacggccgcccugggggugcugaugagcaaccucggcaugccguccuacugcaccggguaccgcgagggcuaccugaacagcaccaacgugaccaucgcgacguacugcaccggcuccauccccugcagcgucugccuguccgggcucgacagccuggacaccuaccccucccuggagaccauccagaucacgaucagcuccuucaagugggaccucaccgccuucggccugguggccgagugguuccuggccuacauccucuucacccgguucuucuacgugcuggggcuggccgcgaucaugcagcucuucuucagcuacuucgccguccacuucaucuccaacagcuggcugauguggcugaucaucaaccuggugcagauggcccccaucuccgccauggugcgcauguacaucuucuucgcgagcuucuacuacgucuggaagagcuacgugcacguggucgacggcugcaacuccagcaccugcaugaugugcuacaagcggaaccgcgccacgcggguggagugcaccaccaucgucaacggggugcgccgguccuucuacguguacgccaacggcggcaagggguucugcaagcuccacaacuggaacugcgucaacugcgacaccuucugcgccggcagcacguucaucuccgacgagguggcccgcgaccugagccugcaguucaagcggccgaucaaccccaccgaccaguccagcuacaucguggacuccgucaccgugaagaacgggagcauccaccucuacuucgacaaggcgggccagaagaccuacgagcgccacucccugagccacuucgugaaccuggacaaccuccgggccaacaacacgaaggggucccugcccaucaacgucaucguguucgacggcaagagcaagugcgaggaguccagcgccaaguccgccagcguguacuacucccagcugaugugccagcccauccuccugcuggaccaggcccucgucagcgacgugggcgacagcgcggagguggccgucaagauguucgacgccuacgugaacaccuucuccagcaccuucaacgugccgauggagaagcugaagacccuggucgccacggccgaggcggagcucgccaagaacgugucccuggacaacgugcugagcaccuucaucuccgccgcccgccagggguucgucgacagcgacguggagaccaaggacguggucgagugccucaagcugucccaccagagcgacaucgaggugaccggcgacuccugcaacaacuacaugcugacguacaacaagguggagaacaugaccccccgggaccucggggcgugcaucgacugcagcgcccgccacaucaacgcccaggucgccaagucccacaacaucgcccugaucuggaacgugaaggacuucaugagccuguccgagcagcuccggaagcagauccgcagcgcggccaagaagaacaaccugcccuucaagcugaccugcgccaccacgcgccagguggucaacguggugaccaccaagaucgcccucaagggcgggugaggacuagucccuguucccagagcccacuuuuuuuucuuuuuuugaaauaaaauagccugucuuucagaucucaaaggcucuuuucagagccaccaaaaaaaaaaaaaaaaaaaaaaaaaaaaaaaaaaaaaaaaaaaaaaaaaaaaaaaaaaaaaaaaaaaaaaaaaaaaaaaaaaaaaaaaaaaaaaaaaaaaa

SEQ ID NO: 19811 - RNA, 6113 nt, Artificial Sequence
  SARS-CoV-2__MT776407.1__non-structural protein 3 (NSP3) mRNA gc
aggagagucccgcagucggcguccagcggcucugcuuguucgugugugugucguugcaggccuuauucaagcuuaccauggcccccaccaaggugaccuucggcgacgacacggucaucgaggugcagggguacaagagcgugaacaucaccuucgagcuggacgagcgcaucgacaagguccucaacgagaagugcuccgccuacaccguggagcugggcaccgaggugaacgaguucgcgugcgucguggccgacgccgugaucaagacgcugcagccggucagcgagcuccugaccccccuggggaucgaccucgacgagugguccauggccaccuacuaccuguucgacgagagcggcgaguucaagcuggccucccacauguacugcagcuucuacccccccgacgaggacgaggaggagggggacugcgaggaggaggaguucgagccguccacccaguacgaguacggcacggaggacgacuaccagggcaagccccucgaguucggggcgaccagcgccgcccugcagcuggaggaggagcaggaggaggacuggcucgacgacgacucccagcagaccgugggccagcaggacgggagcgaggacaaccagaccacgaccauccagaccaucguggagguccagccccagcuggagauggagcugacccccguggugcagacgaucgaggucaacuccuucagcggcuaccucaagcugaccgacaacguguacaucaagaacgccgacaucguggaggaggcgaagaaggucaagccgaccgugguggucaacgccgccaacguguaccugaagcacgggggcggcguggccggggcccucaacaaggcgaccaacaacgccaugcaggucgaguccgacgacuacaucgccacgaacggcccccugaagguggggggcagcugcguccuguccggccacaaccucgccaagcacugccugcacgugguggggcccaacgucaacaagggcgaggacauccagcugcucaagagcgccuacgagaacuucaaccagcacgaggugcugcuggcgccccuccuguccgccgggaucuucggcgccgacccgauccacagccugcgggugugcgucgacaccgugcgcaccaacguguaccucgccgucuucgacaagaaccuguacgacaagcugguguccagcuuccucgagaugaagagcgagaagcagguggagcagaagaucgccgagauccccaaggaggaggucaagcccuucaucaccgaguccaagcccagcguggagcagcggaagcaggacgacaagaagaucaaggcgugcguggaggaggucacgaccacccuggaggagaccaaguuccugacggagaaccuccugcuguacaucgacaucaacgggaaccuccacccggacuccgccacccuggugagcgacaucgacaucaccuuccugaagaaggacgcccccuacaucgugggcgacgucgugcaggagggcgugcucaccgccgucgugauccccacgaagaaggccgggggcaccaccgagaugcuggcgaaggcccugcgcaaggugcccaccgacaacuacaucacgaccuacccggggcagggccucaacggguacaccgucgaggaggccaagaccgugcugaagaagugcaaguccgccuucuacauccugcccagcaucaucuccaacgagaagcaggagauccucggcaccgugagcuggaaccugcgggagaugcuggcgcacgccgaggagacgcgcaagcugaugcccgucugcguggagaccaaggccaucguguccaccauccagcggaaguacaagggcaucaagauccaggagggggucguggacuacggcgcccgcuucuacuucuacaccagcaagacgaccguggccucccucaucaacacccugaacgaccugaacgagacccucgucacgaugccccugggguacgugacccacggccugaaccucgaggaggcggcccgguacaugcgcagccugaaggugccggccaccgucuccgugagcucccccgacgccgugaccgccuacaacggguaccugacgagcuccagcaagacccccgaggagcacuucaucgagaccaucucccucgcgggcagcuacaaggacuggagcuacuccggccagagcacccagcuggggaucgaguuccugaagcggggcgacaaguccgucuacuacacgagcaaccccaccaccuuccaccucgacggggaggugaucaccuucgacaaccugaagacgcugcucucccugcgcgaggugcggaccaucaaggucuucaccaccguggacaacaucaaccugcacacgcagguggucgacaugagcaugaccuacggccagcaguucggcccgaccuaccucgacggggccgacgugaccaagaucaagccccacaacucccacgagggcaagacguucuacgugcugcccaacgacgacacccugcgcgucgaggccuucgaguacuaccacaccaccgacccgagcuuccucgggcgguacauguccgcccugaaccacacgaagaaguggaaguacccccaggugaacggccugaccagcaucaagugggccgacaacaacugcuaccucgcgaccgcccugcugacccuccagcagaucgagcugaaguucaacccccccgcccugcaggacgccuacuaccgcgcgcgggccggggaggccgccaacuucugcgcccucauccuggcguacugcaacaagacggugggcgagcugggcgacguccgcgagaccauguccuaccucuuccagcacgccaaccuggacagcugcaagcgggugcugaacgucgugugcaagaccugcgggcagcagcagaccacccucaagggcguggaggccgucauguacauggggacgcuguccuacgagcaguucaagaagggcgugcagaucccgugcaccugcgggaagcaggccaccaaguaccuggugcagcaggagagccccuucgucaugauguccgccccccccgcgcaguacgagcucaagcacggcaccuucacgugcgccagcgaguacaccggcaacuaccagugcgggcacuacaagcacaucaccuccaaggagacccuguacugcaucgacggcgcccugcucacgaagagcagcgaguacaaggggccgaucaccgacguguucuacaaggagaacuccuacaccaccacgaucaagcccgugaccuacaagcuggacggcgucgugugcaccgagaucgaccccaagcuggacaacuacuacaagaaggacaacagcuacuucaccgagcagcccaucgaccucgugccgaaccagcccuaccccaacgccuccuucgacaacuucaaguucgucugcgacaacaucaaguucgccgacgaccugaaccagcugacgggguacaagaagcccgcgagccgcgagcucaaggugaccuucuucccggaccugaacggcgacguggucgccaucgacuacaagcacuacacccccuccuucaagaagggcgccaagcugcuccacaagcccaucguguggcacgugaacaacgccaccaacaaggcgacguacaagcccaacaccuggugcauccggugccuguggagcaccaagccggucgagaccuccaacagcuucgacgugcugaaguccgaggacgcccaggggauggacaaccucgccugcgaggaccugaagcccgugagcgaggaggucguggagaaccccacgauccagaaggacgugcuggagugcaacgucaagaccaccgagguggugggcgacaucauccucaagcccgccaacaacucccugaagaucaccgaggaggucgggcacacggaccugauggccgcguacguggacaacagcucccucaucaucaagaagccgaacgagcugagccgcgugcugggccucaagacccuggccacccacgggcuggccgccgucaacuccgugcccugggacaccaucgccaacuacgcgaagcccuuccucaacaagguggucagcacgaccaccaacaucgugacccgcugccugaaccgggugugcacgaacuacaugccguacuucuucacccugcuccugcagcugugcaccuucacccgcuccaccaacagccggaucaaggccuccaugcccacgaccaucgccaagaacaccgucaagagcgugggcaaguucugccucgaggccagcuucaacuaccugaagucccccaacuucagcaagcugaucaacaucaucaucugguuccuccugcuguccgugugccucggcagccugaucuacuccaccgccgcgcuggggguccucaugagcaaccugggcaugcccuccuacugcacgggguaccgcgagggcuaccugaacagcaccaacgugaccaucgccaccuacugcacgggcuccaucccgugcagcgugugccucuccgggcuggacagccuggacaccuaccccucccucgagaccauccagaucaccaucagcuccuucaagugggaccugacggccuucggccuggucgccgagugguuccucgccuacauccuguucacccgguucuucuacgugcuggggcucgcggccaucaugcagcuguucuucagcuacuucgccgugcacuucaucuccaacagcuggcugauguggcugaucaucaaccucguccagauggcccccaucuccgcgauggugcgcauguacaucuucuucgccagcuucuacuacguguggaagagcuacguccacgugguggacggcugcaacuccagcaccugcaugaugugcuacaagcggaaccgcgccacccgggucgagugcacgaccaucgugaacgggguccgccgguccuucuacguguacgccaacggcggcaagggguucugcaagcugcacaacuggaacugcgugaacugcgacaccuucugcgccggcagcaccuucaucuccgacgaggucgcgcgcgaccugagccuccaguucaagcggcccaucaacccgacggaccaguccagcuacaucguggacuccgugaccgucaagaacgggagcauccaccuguacuucgacaaggccggccagaagaccuacgagcgccacucccugagccacuucgugaaccucgacaaccugcgggccaacaacaccaaggggucccugcccaucaacgugaucgucuucgacggcaagagcaagugcgaggaguccagcgccaaguccgccagcguguacuacucccagcucaugugccagcccauccugcugcucgaccaggcgcuggugagcgacgucggcgacagcgccgagguggccgugaagauguucgacgccuacgucaacacguucuccagcaccuucaacgugcccauggagaagcugaagacccucguggccaccgcggaggccgagcuggccaagaacgucucccuggacaacgugcucagcacguucaucuccgccgcgcgccagggguucguggacagcgacgucgagaccaaggacgugguggagugccugaagcugucccaccagagcgacaucgaggucaccggcgacuccugcaacaacuacaugcucaccuacaacaagguggagaacaugacgccgcgggaccugggggccugcaucgacugcagcgcccgccacaucaacgcccagguggccaagucccacaacaucgcgcugaucuggaacgucaaggacuucaugagccucuccgagcagcugcggaagcagauccgcagcgccgccaagaagaacaaccugcccuucaagcucaccugcgccaccacccgccagguggugaacgucgugacgaccaagaucgcccugaagggcgggugaggacuagucccuguucccagagcccacuuuuuuuucuuuuuuugaaauaaaauagccugucuuucagaucucaaaggcucuuuucagagccaccaaaaaaaaaaaaaaaaaaaaaaaaaaaaaaaaaaaaaaaaaaaaaaaaaaaaaaaaaaaaaaaaaaaaaaaaaaaaaaaaaaaaaaaaaaaaaaaaaaaaa

SEQ ID NO: 19812 - RNA, 6113 nt, Artificial Sequence
  SARS-CoV-2__MT772271.1__non-structural protein 3 (NSP3) mRNA gc
aggagagucccgcagucggcguccagcggcucugcuuguucgugugugugucguugcaggccuuauucaagcuuaccauggcccccaccaaggugaccuucggcgacgacacggucaucgaggugcagggguacaagagcgugaacaucaccuucgagcuggacgagcgcaucgacaagguccucaacgagaagugcuccgccuacaccguggagcugggcaccgaggugaacgaguucgcgugcgucguggccgacgccgugaucaagacgcugcagccggucagcgagcuccugaccccccuggggaucgaccucgacgagugguccauggccaccuacuaccuguucgacgagagcggcgaguucaagcuggccucccacauguacugcagcuucuacccccccgacgaggacgaggaggagggggacugcgaggaggaggaguucgagccguccacccaguacgaguacggcacggaggacgacuaccagggcaagccccucgaguucggggcgaccagcgccgcccugcagcccgaggaggagcaggaggaggacuggcuggacgacgacucccagcagaccgugggccagcaggacgggagcgaggacaaccagaccacgaccauccagaccaucguggagguccagccccagcucgagauggagcugaccccgguggugcagacgaucgaggucaacuccuucagcggcuaccugaagcucaccgacaacguguacaucaagaacgccgacaucguggaggaggcgaagaaggucaagcccaccgugguggucaacgccgccaacguguaccugaagcacgggggcggcguggccggggcccugaacaaggcgaccaacaacgccaugcaggucgaguccgacgacuacaucgccacgaacggcccccucaagguggggggcagcugcguccuguccggccacaaccuggccaagcacugccuccacgugguggggcccaacgucaacaagggcgaggacauccagcugcugaagagcgccuacgagaacuucaaccagcacgaggugcuccuggcgccgcugcucuccgccgggaucuucggcgccgaccccauccacagccugcgggugugcgucgacaccgugcgcaccaacguguaccuggccgucuucgacaagaaccucuacgacaagcugguguccagcuuccuggagaugaagagcgagaagcagguggagcagaagaucgccgagauccccaaggaggaggucaagcccuucaucaccgaguccaagccgagcguggagcagcggaagcaggacgacaagaagaucaaggcgugcguggaggaggucacgaccacccucgaggagaccaaguuccugacggagaaccugcuccuguacaucgacaucaacgggaaccugcaccccgacuccgccacccucgugagcgacaucgacaucaccuuccugaagaaggacgcccccuacaucgugggcgacgucgugcaggagggcgugcugaccgccgucgugauccccacgaagaaggccgggggcaccaccgagaugcucgcgaaggcccugcgcaaggugccgaccgacaacuacaucacgaccuaccccgggcagggccugaacggguacaccgucgaggaggccaagaccgugcucaagaagugcaaguccgccuucuacauccugcccagcaucaucuccaacgagaagcaggagauccugggcaccgugagcuggaaccuccgggagaugcuggcgcacgccgaggagacgcgcaagcugaugcccgucugcguggagaccaaggccaucguguccaccauccagcggaaguacaagggcaucaagauccaggagggggucguggacuacggcgcccgcuucuacuucuacaccagcaagacgaccguggccucccugaucaacacccucaacgaccugaacgagacccuggucacgaugccgcucggguacgugacccacggccugaaccuggaggaggcggcccgguacaugcgcagccucaaggugcccgccaccgucuccgugagcucccccgacgccgugaccgccuacaacggguaccugacgagcuccagcaagacccccgaggagcacuucaucgagaccaucucccuggcgggcagcuacaaggacuggagcuacuccggccagagcacccagcucgggaucgaguuccugaagcggggcgacaaguccgucuacuacacgagcaacccgaccaccuuccaccuggacggggaggugaucaccuucgacaaccucaagacgcugcugucccuccgcgaggugcggaccaucaaggucuucaccaccguggacaacaucaaccugcacacgcagguggucgacaugagcaugaccuacggccagcaguucggccccaccuaccuggacggggccgacgugaccaagaucaagccccacaacucccacgagggcaagacguucuacgugcucccgaacgacgacacccugcgcgucgaggccuucgaguacuaccacaccaccgaccccagcuuccuggggcgguacauguccgcccucaaccacacgaagaaguggaaguacccccaggugaacggccugaccagcaucaagugggccgacaacaacugcuaccuggcgaccgcccuccugacccugcagcagaucgagcucaaguucaaccccccggcccugcaggacgccuacuaccgcgcgcgggccggggaggccgccaacuucugcgcccugauccucgcguacugcaacaagacggugggcgagcugggcgacguccgcgagaccauguccuaccuguuccagcacgccaaccucgacagcugcaagcgggugcugaacgucgugugcaagaccugcgggcagcagcagaccacccugaagggcguggaggccgucauguacauggggacgcucuccuacgagcaguucaagaagggcgugcagauccccugcaccugcgggaagcaggccaccaaguaccuggugcagcaggagagccccuucgucaugauguccgcccccccggcgcaguacgagcugaagcacggcaccuucacgugcgccagcgaguacaccggcaacuaccagugcgggcacuacaagcacaucaccuccaaggagacccucuacugcaucgacggcgcccugcugacgaagagcagcgaguacaaggggcccaucaccgacguguucuacaaggagaacuccuacaccaccacgaucaagcccgugaccuacaagcucgacggcgucgugugcaccgagaucgaccccaagcuggacaacuacuacaagaaggacaacagcuacuucaccgagcagccgaucgaccuggugcccaaccagcccuaccccaacgccuccuucgacaacuucaaguucgucugcgacaacaucaaguucgccgacgaccucaaccagcugacgggguacaagaagccggcgagccgcgagcugaaggugaccuucuuccccgaccucaacggcgacguggucgccaucgacuacaagcacuacacccccuccuucaagaagggcgccaagcugcugcacaagcccaucguguggcacgugaacaacgccaccaacaaggcgacguacaagccgaacaccuggugcauccggugccucuggagcaccaagcccgucgagaccuccaacagcuucgacgugcugaaguccgaggacgcccaggggauggacaaccuggccugcgaggaccucaagcccgugagcgaggaggucguggagaaccccacgauccagaaggacgugcuggagugcaacgucaagaccaccgagguggugggcgacaucauccugaagccggccaacaacucccucaagaucaccgaggaggucgggcacacggaccugauggccgcguacguggacaacagcucccugaccaucaagaagcccaacgagcucagccgcgugcugggccugaagacccucgccacccacgggcuggccgccgucaacuccgugcccugggacacgaucgccaacuacgcgaagccguuccugaacaagguggucagcaccaccaccaacaucgugacgcgcugccucaaccgggugugcaccaacuacaugcccuacuucuucacccugcugcuccagcugugcaccuucacccgcuccacgaacagccggaucaaggccuccaugcccaccaccaucgccaagaacaccgucaagagcgugggcaaguucugccuggaggccagcuucaacuaccucaagucccccaacuucagcaagcugaucaacaucaucaucugguuccugcuccuguccgugugccugggcagccucaucuacuccacggccgcgcuggggguccugaugagcaaccucggcaugccguccuacugcaccggguaccgcgagggcuaccugaacagcaccaacgugaccaucgccacguacugcaccggcuccauccccugcagcgugugccuguccgggcucgacagccuggacaccuaccccucccuggagaccauccagaucacgaucagcuccuucaagugggaccucaccgccuucggccuggucgccgagugguuccuggccuacauccucuucacccgguucuucuacgugcuggggcuggcggccaucaugcagcucuucuucagcuacuucgccgugcacuucaucuccaacagcuggcugauguggcugaucaucaaccugguccagauggcccccaucuccgcgauggugcgcauguacaucuucuucgccagcuucuacuacguguggaagagcuacguccacgugguggacggcugcaacuccagcaccugcaugaugugcuacaagcggaaccgcgccacgcgggucgagugcaccaccaucgugaacgggguccgccgguccuucuacguguacgccaacggcggcaagggguucugcaagcuccacaacuggaacugcgugaacugcgacaccuucugcgccggcagcacguucaucuccgacgaggucgcgcgcgaccugagccugcaguucaagcggccgaucaaccccaccgaccaguccagcuacaucguggacuccgugaccgucaagaacgggagcauccaccucuacuucgacaaggccggccagaagaccuacgagcgccacucccugagccgguucgugaaccuggacaaccuccgcgccaacaacacgaaggggucccugcccaucaacgugaucgucuucgacggcaagagcaagugcgaggaguccagcgccaaguccgccagcguguacuacucccagcugaugugccagcccauccuccugcuggaccaggcgcucgugagcgacgucggcgacagcgccgagguggccgugaagauguucgacgccuacgucaacaccuucuccagcaccuucaacgugccgauggagaagcugaagacccugguggccacggcggaggccgagcucgccaagaacgucucccuggacaacgugcugagcaccuucaucuccgccgcgcggcagggguucguggacagcgacgucgagaccaaggacgugguggagugccucaagcugucccaccagagcgacaucgaggucaccggcgacuccugcaacaacuacaugcugacguacaacaagguggagaacaugaccccccgcgaccucggggccugcaucgacugcagcgcccggcacaucaacgcccagguggccaagucccacaacaucgcgcugaucuggaacgucaaggacuucaugagccuguccgagcagcuccgcaagcagauccgcagcgccgccaagaagaacaaccugcccuucaagcugaccugcgccaccacgcggcagguggugaacgucgugaccaccaagaucgcccucaagggcgggugaggacuagucccuguucccagagcccacuuuuuuuucuuuuuuugaaauaaaauagccugucuuucagaucucaaaggcucuuuucagagccaccaaaaaaaaaaaaaaaaaaaaaaaaaaaaaaaaaaaaaaaaaaaaaaaaaaaaaaaaaaaaaaaaaaaaaaaaaaaaaaaaaaaaaaaaaaaaaaaaaaaaa

SEQ ID NO: 19813 - RNA, 6113 nt, Artificial Sequence
  SARS-CoV-2__MT772417.1__non-structural protein 3 (NSP3) mRNA gc
aggagagucccgcagucggcguccagcggcucugcuuguucgugugugugucguugcaggccuuauucaagcuuaccauggcccccaccaaggugaccuucggcgacgacacggucaucgaggugcagggguacaagagcgugaacaucaccuucgagcuggacgagcgcaucgacaagguccucaacgagaagugcuccgccuacaccguggagcugggcaccgaggugaacgaguucgcgugcgucguggccgacgccgugaucaagacgcugcagccggucagcgagcuccugaccccccuggggaucgaccucgacgagugguccauggccaccuacuaccuguucgacgagagcggcgaguucaagcuggccucccacauguacugcagcuucuacccccccgacgaggacgaggaggagggggacugcgaggaggaggaguucgagccguccacccaguacgaguacggcacggaggacgacuaccagggcaagccccucgaguucggggcgaccagcgccgcccugcagcccgaggaggagcaggaggaggacuggcuggacgacgacucccagcagaccgugggccagcaggacgggagcgaggacaaccagaccacgaccauccagaccaucguggagguccagccccagcucgagauggagcugaccccgguggugcagacgaucgaggucaacuccuucagcggcuaccugaagcucaccgacaacguguacaucaagaacgccgacaucguggaggaggcgaagaaggucaagcccaccgugguggucaacgccgccaacguguaccugaagcacgggggcggcguggccggggcccugaacaaggcgaccaacaacgccaugcaggucgaguccgacgacuacaucgccacgaacggcccccucaagguggggggcagcugcguccuguccggccacaaccuggccaagcacugccuccacgugguggggcccaacgucaacaagggcgaggacauccagcugcugaagagcgccuacgagaacuucaaccagcacgaggugcuccuggcgccgcugcucuccgccgggaucuucggcgccgaccccauccacagccugcgggugugcgucgacaccgugcgcaccaacguguaccuggccgucuucgacaagaaccucuacgacaagcugguguccagcuuccuggagaugaagagcgagaagcagguggagcagaacaucgccgagauccccaaggaggaggucaagcccuucaucaccgaguccaagccgagcguggagcagcggaagcaggacgacaagaagaucaaggcgugcguggaggaggucacgaccacccucgaggagaccaaguuccugacggagaaccugcuccuguacaucgacaucaacgggaaccugcaccccgacuccgccacccucgugagcgacaucgacaucaccuuccugaagaaggacgcccccuacaucgugggcgacgucgugcaggagggcgugcugaccgccgucgugauccccacgaagaaggccgggggcaccaccgagaugcucgcgaaggcccugcgcaaggugccgaccgacaacuacaucacgaccuaccccgggcagggccugaacggguacaccgucgaggaggccaagaccgugcucaagaagugcaaguccgccuucuacauccugcccagcaucaucuccaacgagaagcaggagauccugggcaccgugagcuggaaccuccgggagaugcuggcgcacgccgaggagacgcgcaagcugaugcccgucugcguggagaccaaggccaucguguccaccauccagcggaaguacaagggcaucaagauccaggagggggucguggacuacggcgcccgcuucuacuucuacaccagcaagacgaccguggccucccugaucaacacccucaacgaccugaacgagacccuggucacgaugccgcucggguacgugacccacggccugaaccuggaggaggcggcccgguacaugcgcagccucaaggugcccgccaccgucuccgugagcucccccgacgccgugaccgccuacaacggguaccugacgagcuccagcaagacccccgaggagcacuucaucgagaccaucucccuggcgggcagcuacaaggacuggagcuacuccggccagagcacccagcucgggaucgaguuccugaagcggggcgacaaguccgucuacuacacgagcaacccgaccaccuuccaccuggacggggaggugaucaccuucgacaaccucaagacgcugcugucccuccgcgaggugcggaccaucaaggucuucaccaccguggacaacaucaaccugcacacgcagguggucgacaugagcaugaccuacggccagcaguucggccccaccuaccuggacggggccgacgugaccaagaucaagccccacaacucccacgagggcaagacguucuacgugcucccgaacgacgacacccugcgcgucgaggccuucgaguacuaccacaccaccgaccccagcuuccuggggcgguacauguccgcccucaaccacacgaagaaguggaaguacccccaggugaacggccugaccagcaucaagugggccgacaacaacugcuaccuggcgaccgcccuccugacccugcagcagaucgagcucaaguucaaccccccggcccugcaggacgccuacuaccgcgcgcgggccggggaggccgccaacuucugcgcccugauccucgcguacugcaacaagacggugggcgagcugggcgacguccgcgagaccauguccuaccuguuccagcacgccaaccucgacagcugcaagcgggugcugaacgucgugugcaagaccugcgggcagcagcagaccacccugcgcggcguggaggccgucauguacauggggacgcucuccuacgagcaguucaagaagggcgugcagauccccugcaccugcgggaagcaggccaccaaguaccuggugcagcaggagagccccuucgucaugauguccgcccccccggcgcaguacgagcugaagcacggcaccuucacgugcgccagcgaguacaccggcaacuaccagugcgggcacuacaagcacaucaccuccaaggagacccucuacugcaucgacggcgcccugcugacgaagagcagcgaguacaaggggcccaucaccgacguguucuacaaggagaacuccuacaccaccacgaucaagcccgugaccuacaagcucgacggcgucgugugcaccgagaucgaccccaagcuggacaacuacuacaagaaggacaacagcuacuucaccgagcagccgaucgaccuggugcccaaccagcccuaccccaacgccuccuucgacaacuucaaguucgucugcgacaacaucaaguucgccgacgaccucaaccagcugacgggguacaagaagccggcgagccgggagcugaaggugaccuucuuccccgaccucaacggcgacguggucgccaucgacuacaagcacuacacccccuccuucaagaagggcgccaagcugcugcacaagcccaucguguggcacgugaacaacgccaccaacaaggcgacguacaagccgaacaccuggugcauccgcugccucuggagcaccaagcccgucgagaccuccaacagcuucgacgugcugaaguccgaggacgcccaggggauggacaaccuggccugcgaggaccucaagcccgugagcgaggaggucguggagaaccccacgauccagaaggacgugcuggagugcaacgucaagaccaccgagguggugggcgacaucauccugaagccggccaacaacucccucaagaucaccgaggaggucgggcacacggaccugauggccgcguacguggacaacagcucccugaccaucaagaagcccaacgagcucagccgcgugcugggccugaagacccucgccacccacgggcuggccgccgucaacuccgugcccugggacacgaucgccaacuacgcgaagccguuccugaacaagguggucagcaccaccaccaacaucgugacgcggugccucaaccgcgugugcaccaacuacaugcccuacuucuucacccugcugcuccagcugugcaccuucacccgguccacgaacagccgcaucaaggccuccaugcccaccaccaucgccaagaacaccgucaagagcgugggcaaguucugccuggaggccagcuucaacuaccucaagucccccaacuucagcaagcugaucaacaucaucaucugguuccugcuccuguccgugugccugggcagccucaucuacuccacggccgcgcuggggguccugaugagcaaccucggcaugccguccuacugcaccggguaccgggagggcuaccugaacagcaccaacgugaccaucgccacguacugcaccggcuccauccccugcagcgugugccuguccgggcucgacagccuggacaccuaccccucccuggagaccauccagaucacgaucagcuccuucaagugggaccucaccgccuucggccuggucgccgagugguuccuggccuacauccucuucacccgcuucuucuacgugcuggggcuggcggccaucaugcagcucuucuucagcuacuucgccgugcacuucaucuccaacagcuggcugauguggcugaucaucaaccugguccagauggcccccaucuccgcgauggugcggauguacaucuucuucgccagcuucuacuacguguggaagagcuacguccacgugguggacggcugcaacuccagcaccugcaugaugugcuacaagcgcaaccgggccacgcgcgucgagugcaccaccaucgugaacgggguccggcgcuccuucuacguguacgccaacggcggcaagggguucugcaagcuccacaacuggaacugcgugaacugcgacaccuucugcgccggcagcacguucaucuccgacgaggucgcgcgggaccugagccugcaguucaagcgcccgaucaaccccaccgaccaguccagcuacaucguggacuccgugaccgucaagaacgggagcauccaccucuacuucgacaaggccggccagaagaccuacgagcggcacucccugagcuacuucgugaaccuggacaaccuccgcgccaacaacacgaaggggucccugcccaucaacgugaucgucuucgacggcaagagcaagugcgaggaguccagcgccaaguccgccagcguguacuacucccagcugaugugccagcccauccuccugcuggaccaggcgcucgugagcgacgucggcgacagcgccgagguggccgugaagauguucgacgccuacgucaacaccuucuccagcaccuucaacgugccgauggagaagcugaagacccugguggccacggcggaggccgagcucgccaagaacgucucccuggacaacgugcugagcaccuucaucuccgccgcgcggcagggguucguggacagcgacgucgagaccaaggacgugguggagugccucaagcugucccaccagagcgacaucgaggucaccggcgacuccugcaacaacuacaugcugacguacaacaagguggagaacaugaccccccgcgaccucggggccugcaucgacugcagcgcccggcacaucaacgcccagguggccaagucccacaacaucgcgcugaucuggaacgucaaggacuucaugagccuguccgagcagcuccgcaagcagauccgcagcgccgccaagaagaacaaccugcccuucaagcugaccugcgccaccacgcggcagguggugaacgucgugaccaccaagaucgcccucaagggcgggugaggacuagucccuguucccagagcccacuuuuuuuucuuuuuuugaaauaaaauagccugucuuucagaucucaaaggcucuuuucagagccaccaaaaaaaaaaaaaaaaaaaaaaaaaaaaaaaaaaaaaaaaaaaaaaaaaaaaaaaaaaaaaaaaaaaaaaaaaaaaaaaaaaaaaaaaaaaaaaaaaaaaa

SEQ ID NO: 19814 - RNA, 6113 nt, Artificial Sequence
  SARS-CoV-2__MT772475.1__non-structural protein 3 (NSP3) mRNA gc
aggagagucccgcagucggcguccagcggcucugcuuguucgugugugugucguugcaggccuuauucaagcuuaccauggcccccaccaaggugaccuucggcgacgacacggucaucgaggugcagggguacaagagcgugaacaucaccuucgagcuggacgagcgcaucgacaagguccucaacgagaagugcuccgccuacaccguggagcugggcaccgaggugaacgaguucgcgugcgucguggccgacgccgugaucaagacgcugcagccggucagcgagcuccugaccccccuggggaucgaccucgacgagugguccauggccaccuacuaccuguucgacgagagcggcgaguucaagcuggccucccacauguacugcagcuucuacccccccgacgaggacgaggaggagggggacugcgaggaggaggaguucgagccguccacccaguacgaguacggcacggaggacgacuaccagggcaagccccucgaguucggggcgaccagcgccgcccugcagcccgaggaggagcaggaggaggacuggcuggacgacgacucccagcagaccgugggccagcaggacgggagcgaggacaaccagaccacgaccauccagaccaucguggagguccagccccagcucgagauggagcugaccccgguggugcagacgaucgaggucaacuccuucagcggcuaccugaagcucaccgacaacguguacaucaagaacgccgacaucguggaggaggcgaagaaggucaagcccaccgugguggucaacgccgccaacguguaccugaagcacgggggcggcguggccggggcccugaacaaggcgaccaacaacgccaugcaggucgaguccgacgacuacaucgccacgaacggcccccucaagguggggggcagcugcguccuguccggccacaaccuggccaagcacugccuccacgugguggggcccaacgucaacaagggcgaggacauccagcugcugaagagcgccuacgagaacuucaaccagcacgaggugcuccuggcgccgcugcucuccgccgggaucuucggcgccgaccccauccacagccugcgggugugcgucgacaccgugcgcaccaacguguaccuggccgucuucgacaagaaccucuacgacaagcugguguccagcuuccuggagaugaagagcgagaagcagguggagcagaacaucgccgagauccccaaggaggaggucaagcccuucaucaccgaguccaagccgagcguggagcagcggaagcaggacgacaagaagaucaaggcgugcguggaggaggucacgaccacccucgaggagaccaaguuccugacggagaaccugcuccuguacaucgacaucaacgggaaccugcaccccgacuccgccacccucgugagcgacaucgacaucaccuuccugaagaaggacgcccccuacaucgugggcgacgucgugcaggagggcgugcugaccgccgucgugauccccacgaagaaggccgggggcaccaccgagaugcucgcgaaggcccugcgcaagguguccaccgacaacuacaucacgaccuacccggggcagggccugaacggguacaccgucgaggaggccaagaccgugcucaagaagugcaagagcgccuucuacauccugcccuccaucaucagcaacgagaagcaggagauccugggcaccguguccuggaaccuccgggagaugcuggcgcacgccgaggagacgcgcaagcugaugcccgucugcguggagaccaaggccaucgugagcaccauccagcggaaguacaagggcaucaagauccaggagggggucguggacuacggcgcccgcuucuacuucuacaccuccaagacgaccguggccagccugaucaacacccucaacgaccugaacgagacccuggucacgaugccccucggguacgugacccacggccugaaccuggaggaggcggcccgguacaugcgcucccucaaggugccggccaccgucagcguguccagccccgacgccgugaccgccuacaacggguaccugacguccagcuccaagacccccgaggagcacuucaucgagaccaucagccuggcgggcagcuacaaggacugguccuacagcggccaguccacccagcucgggaucgaguuccugaagcggggcgacaagagcgucuacuacacguccaaccccaccaccuuccaccuggacggggaggugaucaccuucgacaaccucaagacgcugcugagccuccgcgaggugcggaccaucaaggucuucaccaccguggacaacaucaaccugcacacgcagguggucgacauguccaugaccuacggccagcaguucggcccgaccuaccuggacggggccgacgugaccaagaucaagccccacaacagccacgagggcaagacguucuacgugcuccccaacgacgacacccugcgcgucgaggccuucgaguacuaccacaccaccgacccguccuuccuggggcgguacaugagcgcccucaaccacacgaagaaguggaaguacccccaggugaacggccugaccuccaucaagugggccgacaacaacugcuaccuggcgaccgcccuccugacccugcagcagaucgagcucaaguucaacccccccgcccugcaggacgccuacuaccgcgcgcgggccggggaggccgccaacuucugcgcccugauccucgcguacugcaacaagacggugggcgagcugggcgacguccgcgagaccaugagcuaccuguuccagcacgccaaccucgacuccugcaagcgggugcugaacgucgugugcaagaccugcgggcagcagcagaccacccugaagggcguggaggccgucauguacauggggacgcucagcuacgagcaguucaagaagggcgugcagaucccgugcaccugcgggaagcaggccaccaaguaccuggugcagcaggaguccagcuucgucaugauguccgccccccccgcgcaguacgagcugaagcacggcaccuucacgugcgccagcgaguacaccggcaacuaccagugcgggcacuacaagcacaucaccagcaaggagacccucuacugcaucgacggcgcccugcugacgaaguccagcgaguacaaggggcccaucaccgacguguucuacaaggagaacuccuacaccaccacgaucaagccggugaccuacaagcucgacggcgucgugugcaccgagaucgaccccaagcuggacaacuacuacaagaaggacaacagcuacuucaccgagcagcccaucgaccuggugcccaaccagccguaccccaacgccuccuucgacaacuucaaguucgucugcgacaacaucaaguucgccgacgaccucaaccagcugacgggguacaagaagcccgcgagccgcgagcugaaggugaccuucuuccccgaccucaacggcgacguggucgccaucgacuacaagcacuacaccccguccuucaagaagggcgccaagcugcugcacaagcccaucguguggcacgugaacaacgccaccaacaaggcgacguacaagcccaacaccuggugcauccggugccucuggagcaccaagcccgucgagaccuccaacagcuucgacgugcugaaguccgaggacgcccaggggauggacaaccuggccugcgaggaccucaagccggugagcgaggaggucguggagaaccccacgauccagaaggacgugcuggagugcaacgucaccaccaccgagguggugggcgacaucauccugaagcccgccaacaacucccucaagaucacggaggaggucgggcacaccgaccugauggccgcguacguggacaacagcucccugaccaucaagaagcccaacgagcucagccgcgugcugggccugaagacccucgccacgcacgggcuggccgccgucaacuccgugccgugggacaccaucgccaacuacgcgaagcccuuccugaacaagguggucagcaccaccacgaacaucgugacccgcugccucaaccgggugugcaccaacuacaugcccuacuucuucacccugcugcuccagcugugcaccuucacgcgcuccaccaacagccggaucaaggccagcaugccgaccaccaucgccaagaacacggucaaguccgugggcaaguucugccuggaggccagcuucaacuaccucaagucccccaacuucagcaagcugaucaacaucaucaucugguuccugcuccuguccgugugccugggcagccucaucuacuccaccgccgcgcuggggguccugaugagcaaccucggcaugcccuccuacugcaccggguaccgcgagggcuaccugaacagcaccaacgugacgaucgccaccuacugcaccggcuccauccccugcagcgugugccuguccgggcucgacagccuggacaccuacccgucccuggagacgauccagaucaccaucagcuccuucaagugggaccucaccgccuucggccuggucgccgagugguuccuggccuacauccucuucacccgguucuucuacgugcuggggcuggcggccaucaugcagcucuucuucagcuacuucgccgugcacuucaucuccaacagcuggcugauguggcugaucaucaaccugguccagauggcccccaucagcgcgauggugcgcauguacaucuucuucgccuccuucuacuacguguggaagagcuacguccacgugguggacggcugcaacuccagcacgugcaugaugugcuacaagcggaaccgcgccacccgggucgagugcaccaccaucgugaacgggguccgccgguccuucuacguguacgccaacggcggcaagggguucugcaagcuccacaacuggaacugcgugaacugcgacacguucugcgccggcagcaccuucaucuccgacgaggucgcgcgcgaccugagccugcaguucaagcggcccaucaaccccaccgaccaguccagcuacaucguggacuccgugaccgucaagaacgggagcauccaccucuacuucgacaaggccggccagaagacguacgagcgccacucccugagccacuucgugaacuucgacaaccugcgggccaacaacaccaaggggucccucccgaucaacgugaucgucuucgacggcaagagcaagugcgaggaguccagcgccaaguccgccagcguguacuacagccagcugaugugccagcccauccugcuccuggaccaggcgcugguguccgacgucggcgacagcgccgagguggccgugaagauguucgacgccuacgucaacaccuucuccagcaccuucaacgugcccauggagaagcucaagacgcugguggccaccgcggaggccgagcuggccaagaacgucucccucgacaacgugcugagcaccuucaucuccgccgcgcgccagggguucguggacagcgacgucgagaccaaggacgugguggagugccugaagcucucccaccagagcgacaucgaggucacgggcgacuccugcaacaacuacaugcugaccuacaacaagguggagaacaugaccccccgggaccugggggccugcaucgacugcagcgcccgccacaucaacgcccagguggccaagucccacaacaucgcgcucaucuggaacgucaaggacuucaugagccuguccgagcagcugcggaagcagauccgcagcgccgccaagaagaacaaccucccguucaagcugaccugcgccacgacccgccagguggugaacgucgugaccaccaagaucgcccugaagggcgggugaggacuagucccuguucccagagcccacuuuuuuuucuuuuuuugaaauaaaauagccugucuuucagaucucaaaggcucuuuucagagccaccaaaaaaaaaaaaaaaaaaaaaaaaaaaaaaaaaaaaaaaaaaaaaaaaaaaaaaaaaaaaaaaaaaaaaaaaaaaaaaaaaaaaaaaaaaaaaaaaaaaaa

SEQ ID NO: 19815 - RNA, 6113 nt, Artificial Sequence
  SARS-CoV-2__MT772564.1__non-structural protein 3 (NSP3) mRNA gc
aggagagucccgcagucggcguccagcggcucugcuuguucgugugugugucguugcaggccuuauucaagcuuaccauggcccccaccaaggugaccuucggcgacgacacggucaucgaggugcagggguacaagagcgugaacaucaccuucgagcuggacgagcgcaucgacaagguccucaacgagaagugcuccgccuacaccguggagcugggcaccgaggugaacgaguucgcgugcgucguggccgacgccgugaucaagacgcugcagccggucagcgagcuccugaccccccuggggaucgaccucgacgagugguccauggccaccuacuaccuguucgacgagagcggcgaguucaagcuggccucccacauguacugcagcuucuacccccccgacgaggacgaggaggagggggacugcgaggaggaggaguucgagccguccacccaguacgaguacggcacggaggacgacuaccagggcaagccccucgaguucggggcgaccagcgccgcccugcagcccgaggaggagcaggaggaggacuggcuggacgacgacucccagcagaccgugggccagcaggacgggagcgaggacaaccagaccacgaccauccagaccaucguggagguccagccccagcucgagauggagcugaccccgguggugcagacgaucgaggucaacuccuucagcggcuaccugaagcucaccgacaacguguacaucaagaacgccgacaucguggaggaggcgaagaaggucaagcccaccgugguggucaacgccgccaacguguaccugaagcacgggggcggcguggccggggcccugaacaaggcgaccaacaacgccaugcaggucgaguccgacgacuacaucgccacgaacggcccccucaagguggggggcagcugcguccuguccggccacaaccuggccaagcacugccuccacgugguggggcccaacgucaacaagggcgaggacauccagcugcugaagagcgccuacgagaacuucaaccagcacgaggugcuccuggcgccgcugcucuccgccgggaucuucggcgccgaccccauccacagccugcgggugugcgucgacaccgugcgcaccaacguguaccuggccgucuucgacaagaaccucuacgacaagcugguguccagcuuccuggagaugaagagcgagaagcagguggagcagaagaucgucgagauccccaaggaggaggugaagcccuucaucaccgaguccaagccgagcguggagcagcggaagcaggacgacaagaagaucaaggccugcgucgaggaggugacgaccacccucgaggagaccaaguuccugacggagaaccugcuccuguacaucgacaucaacgggaaccugcaccccgacuccgcgacccucgugagcgacaucgacaucaccuuccugaagaaggacgcccccuacaucgucggcgacguggugcaggagggcguccugaccgccguggugauccccacgaagaaggccgggggcaccaccgagaugcucgccaaggcgcugcgcaaggucccgaccgacaacuacaucacgaccuaccccgggcagggccugaacggguacaccguggaggaggccaagaccgugcucaagaagugcaaguccgccuucuacauccugcccagcaucaucuccaacgagaagcaggagauccugggcaccgucagcuggaaccuccgggagaugcuggcccacgcggaggagacgcgcaagcugaugcccgugugcguggagaccaaggccaucgucuccaccauccagcggaaguacaagggcaucaagauccaggagggggugguggacuacggcgcccgcuucuacuucuacaccagcaagacgaccgucgccucccugaucaacacccucaacgaccugaacgagacccuggugacgaugccgcucggguacgugacccacggccugaaccuggaggaggccgcgcgguacaugcgcagccucaagguccccgccaccguguccgugagcucccccgacgccgucaccgccuacaacggguaccugacgagcuccagcaagacccccgaggagcacuucaucgagaccaucucccuggccggcagcuacaaggacuggagcuacuccggccagagcacccagcucgggaucgaguuccugaagcggggcgacaaguccguguacuacacgagcaacccgaccaccuuccaccuggacggggaggugaucaccuucgacaaccucaagacgcugcugucccuccgcgagguccggaccaucaagguguucaccaccguggacaacaucaaccugcacacgcaggucguggacaugagcaugaccuacggccagcaguucggccccaccuaccuggacggggcggacgugaccaagaucaagccccacaacucccacgagggcaagacguucuacguccucccgaacgacgacacccugcgcguggaggccuucgaguacuaccacaccaccgaccccagcuuccuggggcgguacauguccgcccucaaccacacgaagaaguggaaguacccccaggugaacggccugaccagcaucaagugggccgacaacaacugcuaccuggccaccgcgcuccugacccugcagcagaucgagcucaaguucaaccccccggcccugcaggacgccuacuaccgcgcccgggcgggggaggccgccaacuucugcgcccugauccucgccuacugcaacaagacggucggcgagcugggcgacgugcgcgagaccauguccuaccuguuccagcacgcgaaccucgacagcugcaagcggguccugaacguggugugcaagaccugcgggcagcagcagaccacccugaagggcgucgaggccgugauguacauggggacgcucuccuacgagcaguucaagaagggcgugcagauccccugcaccugcgggaagcaggccaccaaguaccugguccagcaggagagccccuucgugaugauguccgcccccccggcccaguacgagcugaagcacggcaccuucacgugcgcgagcgaguacaccggcaacuaccagugcgggcacuacaagcacaucaccuccaaggagacccucuacugcaucgacggcgcccugcugacgaagagcagcgaguacaaggggcccaucaccgacguguucuacaaggagaacuccuacaccaccacgaucaagcccgucaccuacaagcucgacggcguggugugcaccgagaucgaccccaagcuggacaacuacuacaagaaggacaacagcuacuucaccgagcagccgaucgaccugguccccaaccagcccuaccccaacgccuccuucgacaacuucaaguucgugugcgacaacaucaaguucgccgacgaccucaaccagcugacgggguacaagaagccggccagccgcgagcugaaggugaccuucuuccccgaccucaacggcgacgucguggcgaucgacuacaagcacuacacccccuccuucaagaagggcgccaagcugcugcacaagcccaucguguggcacgucaacaacgccaccaacaaggccacguacaagccgaacaccuggugcauccggugccucuggagcaccaagcccguggagaccuccaacagcuucgacgugcugaaguccgaggacgcgcaggggauggacaaccuggccugcgaggaccucaagcccgucagcgaggaggugguggagaaccccacgauccagaaggacguccuggagugcaacgugaagaccaccgagguggucggcgacaucauccugaagccggccaacaacucccucaagaucaccgaggagguggggcacacggaccugauggccgccuacguggacaacagcucccugaccaucaagaagcccaacgagcucagccgcguccugggccugaagacccucgcgacccacgggcuggccgccgugaacuccgugcccugggacacgaucgccaacuacgccaagccguuccugaacaaggucgugagcaccaccaccaacaucgugacgcgcugccucaaccgggucugcaccaacuacaugcccuacuucuucacccugcugcuccagcugugcaccuucacccgcuccacgaacagccggaucaaggcguccaugcccaccaccaucgccaagaacaccgugaagagcgugggcaaguucugccuggaggccagcuucaacuaccucaagucccccaacuucagcaagcugaucaacaucaucaucugguuccugcuccuguccgucugccugggcagccucaucuacuccacggccgcccugggggugcugaugagcaaccucggcaugccguccuacugcaccggguaccgcgagggcuaccugaacagcaccaacgugaccaucgcgacguacugcaccggcuccauccccugcagcgucugccuguccgggcucgacagccuggacaccuaccccucccuggagaccauccagaucacgaucagcuccuucaagugggaccucaccgccuucggccugguggccgagugguuccuggccuacauccucuucacccgguucuucuacgugcuggggcuggccgcgaucaugcagcucuucuucagcuacuucgccguccacuucaucuccaacagcuggcugauguggcugaucaucaaccuggugcagauggcccccaucuccgccauggugcgcauguacaucuucuucgcgagcuucuacuacgucuggaagagcuacgugcacguggucgacggcugcaacuccagcaccugcaugaugugcuacaagcggaaccgcgccacgcggguggagugcaccaccaucgucaacggggugcgccgguccuucuacguguacgccaacggcggcaagggguucugcaagcuccacaacuggaacugcgucaacugcgacaccuucugcgccggcagcacguucaucuccgacgagguggcccgcgaccugagccugcaguucaagcggccgaucaaccccaccgaccaguccagcuacaucguggacuccgucaccgugaagaacgggagcauccaccucuacuucgacaaggcgggccagaagaccuacgagcgccacucccugagccacuucgugaaccuggacaaccuccgggccaacaacacgaaggggucccugcccaucaacgucaucguguucgacggcaagagcaagugcgaggaguccagcgccaaguccgccagcguguacuacucccagcugaugugccagcccauccuccugcuggaccaggcccucgucagcgacgugggcgacagcgcggagguggccgucaagauguucgacgccuacgugaacaccuucuccagcaccuucaacgugccgauggagaagcugaagacccuggucgccacggccgaggcggagcucgccaagaacgugucccuggacaacgugcugagcaccuucaucuccgccgcccgccagggguucgucgacagcgacguggagaccaaggacguggucgagugccucaagcugucccaccagagcgacaucgaggugaccggcgacuccugcaacaacuacaugcugacguacaacaagguggagaacaugaccccccgggaccucggggcgugcaucgacugcagcgcccgccacaucaacgcccaggucgccaagucccacaacaucgcccugaucuggaacgugaaggacuucaugagccuguccgagcagcuccggaagcagauccgcagcgcggccaagaagaacaaccugcccuucaagcugaccugcgccaccacgcgccagguggucaacguggugaccaccaagaucgcccucaagggcgggugaggacuagucccuguucccagagcccacuuuuuuuucuuuuuuugaaauaaaauagccugucuuucagaucucaaaggcucuuuucagagccaccaaaaaaaaaaaaaaaaaaaaaaaaaaaaaaaaaaaaaaaaaaaaaaaaaaaaaaaaaaaaaaaaaaaaaaaaaaaaaaaaaaaaaaaaaaaaaaaaaaaaa

SEQ ID NO: 19816 - RNA, 6113 nt, Artificial Sequence
  SARS-CoV-2__MT772565.1__non-structural protein 3 (NSP3) mRNA gc
aggagagucccgcagucggcguccagcggcucugcuuguucgugugugugucguugcaggccuuauucaagcuuaccauggcccccaccaaggugaccuucggcgacgacacggucaucgaggugcagggguacaagagcgugaacaucaccuucgagcuggacgagcgcaucgacaagguccucaacgagaagugcuccgccuacaccguggagcugggcaccgaggugaacgaguucgcgugcgucguggccgacgccgugaucaagacgcugcagccggucagcgagcuccugaccccccuggggaucgaccucgacgagugguccauggccaccuacuaccuguucgacgagagcggcgaguucaagcuggccucccacauguacugcagcuucuacccccccgacgaggacgaggaggagggggacugcgaggaggaggaguucgagccguccacccaguacgaguacggcacggaggacgacuaccagggcaagccccucgaguucggggcgaccagcgccgcccugcagcccgaggaggagcaggaggaggacuggcuggacgacgacucccagcagaccgugggccagcaggacgggagcgaggacaaccagaccacgaccauccagaccaucguggagguccagccccagcucgagauggagcugaccccgguggugcagacgaucgaggucaacuccuucagcggcuaccugaagcucaccgacaacguguacaucaagaacgccgacaucguggaggaggcgaagaaggucaagcccaccgugguggucaacgccgccaacguguaccugaagcacgggggcggcguggccggggcccugaacaaggcgaccaacaacgccaugcaggucgaguccgacgacuacaucgccacgaacggcccccucaagguggggggcagcugcguccuguccggccacaaccuggccaagcacugccuccacgugguggggcccaacgucaacaagggcgaggacauccaguuccugaagagcgccuacgagaacuucaaccagcacgaggugcugcucgcgccgcugcuguccgccgggaucuucggcgccgaccccauccacagccuccgggugugcgucgacaccgugcgcaccaacguguaccuggccgucuucgacaagaaccuguacgacaagcucguguccagcuuccuggagaugaagagcgagaagcagguggagcagaagaucgccgagauccccaaggaggaggucaagcccuucaucaccgaguccaagccgagcguggagcagcggaagcaggacgacaagaagaucaaggcgugcguggaggaggucacgaccacccuggaggagaccaaguuccucacggagaaccugcugcucuacaucgacaucaacgggaaccugcaccccgacuccgccacccuggugagcgacaucgacaucaccuuccucaagaaggacgcccccuacaucgugggcgacgucgugcaggagggcgugcugaccgccgucgugauccccacgaagaaggccgggggcaccaccgagaugcuggcgaaggcccuccgcaaggugccgaccgacaacuacaucacgaccuaccccgggcagggccugaacggguacaccgucgaggaggccaagaccgugcugaagaagugcaaguccgccuucuacauccuccccagcaucaucuccaacgagaagcaggagauccugggcaccgugagcuggaaccugcgggagaugcucgcgcacgccgaggagacgcgcaagcugaugcccgucugcguggagaccaaggccaucguguccaccauccagcggaaguacaagggcaucaagauccaggagggggucguggacuacggcgcccgcuucuacuucuacaccagcaagacgaccguggccucccugaucaacacccugaacgaccucaacgagacccuggucacgaugccgcugggguacgugacccacggccucaaccuggaggaggcggcccgguacaugcgcagccugaaggugcccgccaccgucuccgugagcucccccgacgccgugaccgccuacaacggguaccucacgagcuccagcaagacccccgaggagcacuucaucgagaccaucucccuggcgggcagcuacaaggacuggagcuacuccggccagagcacccagcuggggaucgaguuccucaagcggggcgacaaguccgucuacuacacgagcaacccgaccaccuuccaccuggacggggaggugaucaccuucgacaaccugaagacgcuccugucccugcgcgaggugcggaccaucaaggucuucaccaccguggacaacaucaaccuccacacgcagguggucgacaugagcaugaccuacggccagcaguucggccccaccuaccuggacggggccgacgugaccaagaucaagccccacaacucccacgagggcaagacguucuacgugcugccgaacgacgacacccuccgcgucgaggccuucgaguacuaccacaccaccgaccccagcuuccuggggcgguacauguccgcccugaaccacacgaagaaguggaaguacccccaggugaacggccucaccagcaucaagugggccgacaacaacugcuaccuggcgaccgcccugcucacccugcagcagaucgagcugaaguucaaccccccggcccuccaggacgccuacuaccgcgcgcgggccggggaggccgccaacuucugcgcccugauccuggcguacugcaacaagacggugggcgagcucggcgacguccgcgagaccauguccuaccuguuccagcacgccaaccuggacagcugcaagcgggugcucaacgucgugugcaagaccugcgggcagcagcagaccacccugaagggcguggaggccgucauguacauggggacgcuguccuacgagcaguucaagaagggcgugcagauccccugcaccugcgggaagcaggccaccaaguaccucgugcagcaggagagccccuucgucaugauguccgcccccccggcgcaguacgagcugaagcacggcaccuucacgugcgccagcgaguacaccggcaacuaccagugcgggcacuacaagcacaucaccuccaaggagacccuguacugcaucgacggcgcccuccugacgaagagcagcgaguacaaggggcccaucaccgacguguucuacaaggagaacuccuacaccaccacgaucaagcccgugaccuacaagcuggacggcgucgugugcaccgagaucgaccccaagcucgacaacuacuacaagaaggacaacagcuacuucaccgagcagccgaucgaccuggugcccaaccagcccuaccccaacgccuccuucgacaacuucaaguucgucugcgacaacaucaaguucgccgacgaccugaaccagcucacgggguacaagaagccggcgagccgcgagcugaaggugaccuucuuccccgaccugaacggcgacguggucgccaucgacuacaagcacuacacccccuccuucaagaagggcgccaagcuccugcacaagcccaucguguggcacgugaacaacgccaccaacaaggcgacguacaagccgaacaccuggugcauccggugccuguggagcaccaagcccgucgagaccuccaacagcuucgacgugcucaaguccgaggacgcccaggggauggacaaccuggccugcgaggaccugaagcccgugagcgaggaggucguggagaaccccacgauccagaaggacgugcucgagugcaacgucaagaccaccgagguggugggcgacaucauccugaagccggccaacaacucccugaagaucaccgaggaggucgggcacacggaccucauggccgcguacguggacaacagcucccugaccaucaagaagcccaacgagcugagccgcgugcucggccugaagacccuggccacccacgggcucgccgccgucaacuccgugcccugggacacgaucgccaacuacgcgaagccguuccugaacaagguggucagcaccaccaccaacaucgugacgcgcugccugaaccgggugugcaccaacuacaugcccuacuucuucacccuccugcugcagcucugcaccuucacccgcuccacgaacagccggaucaaggccuccaugcccaccaccaucgccaagaacaccgucaagagcgugggcaaguucugccuggaggccagcuucaacuaccugaagucccccaacuucagcaagcucaucaacaucaucaucugguuccugcugcucuccgugugccugggcagccugaucuacuccacggccgcgcucgggguccugaugagcaaccugggcaugccguccuacugcaccggguaccgcgagggcuaccucaacagcaccaacgugaccaucgccacguacugcaccggcuccauccccugcagcgugugccuguccgggcuggacagccucgacaccuaccccucccuggagaccauccagaucacgaucagcuccuucaagugggaccugaccgccuucggccucgucgccgagugguuccuggccuacauccuguucacccgguucuucuacgugcucgggcuggcggccaucaugcagcuguucuucagcuacuucgccgugcacuucaucuccaacagcuggcucauguggcugaucaucaaccugguccagauggcccccaucuccgcgauggugcgcauguacaucuucuucgccagcuucuacuacguguggaagagcuacguccacgugguggacggcugcaacuccagcaccugcaugaugugcuacaagcggaaccgcgccacgcgggucgagugcaccaccaucgugaacgggguccgccgguccuucuacguguacgccaacggcggcaagggguucugcaagcugcacaacuggaacugcgugaacugcgacaccuucugcgccggcagcacguucaucuccgacgaggucgcgcgcgaccucagccugcaguucaagcggccgaucaacuccaccgaccagagcuccuacaucguggacagcgugaccgucaagaacggguccauccaccuguacuucgacaaggccggccagaagaccuacgagcgccacagccucucccacuucgugaaccuggacaaccugcgggccaacaacacgaaggggagccuccccaucaacgugaucgucuucgacggcaaguccaagugcgaggagagcuccgccaagagcgccuccguguacuacagccagcugaugugccagcccauccugcuccuggaccaggcgcuggugagcgacgucggcgacuccgccgagguggccgugaagauguucgacgccuacgucaacaccuucagcuccaccuucaacgugcccauggagaagcucaagacccugguggccacggcggaggccgagcuggccaagaacgucagccucgacaacgugcuguccaccuucaucagcgccgcgcgccagggguucguggacuccgacgucgagaccaaggacgugguggagugccugaagcucagccaccaguccgacaucgaggucaccggcgacagcugcaacaacuacaugcugacguacaacaagguggagaacaugaccccgcgggaccugggggccugcaucgacugcuccgcccgccacaucaacgcccagguggccaagagccacaacaucgcgcucaucuggaacgucaaggacuucaugucccugagcgagcagcugcggaagcagauccgcuccgccgccaagaagaacaaccuccccuucaagcugaccugcgccaccacgcgccagguggugaacgucgugaccaccaagaucgcccugaagggcgggugaggacuagucccuguucccagagcccacuuuuuuuucuuuuuuugaaauaaaauagccugucuuucagaucucaaaggcucuuuucagagccaccaaaaaaaaaaaaaaaaaaaaaaaaaaaaaaaaaaaaaaaaaaaaaaaaaaaaaaaaaaaaaaaaaaaaaaaaaaaaaaaaaaaaaaaaaaaaaaaaaaaaa

SEQ ID NO: 19817 - RNA, 6113 nt, Artificial Sequence
  SARS-CoV-2__MT772569.1__non-structural protein 3 (NSP3) mRNA gc
aggagagucccgcagucggcguccagcggcucugcuuguucgugugugugucguugcaggccuuauucaagcuuaccauggcccccaccaaggugaccuucggcgacgacacggucaucgaggugcagggguacaagagcgugaacaucaccuucgagcuggacgagcgcaucgacaagguccucaacgagaagugcuccgccuacaccguggagcugggcaccgaggugaacgaguucgcgugcgucguggccgacgccgugaucaagacgcugcagccggucagcgagcuccugaccccccuggggaucgaccucgacgagugguccauggccaccuacuaccuguucgacgagagcggcgaguucaagcuggccucccacauguacugcagcuucuacccccccgacgaggacgaggaggagggggacugcgaggaggaggaguucgagccgcucacccaguacgaguacggcacggaggacgacuaccagggcaagccccuggaguucggggcgaccuccgccgcccugcagcccgaggaggagcaggaggaggacuggcucgacgacgacagccagcagaccgugggccagcaggacggguccgaggacaaccagaccacgaccauccagaccaucguggagguccagccccagcuggagauggagcugaccccgguggugcagacgaucgaggucaacagcuucuccggcuaccucaagcugaccgacaacguguacaucaagaacgccgacaucguggaggaggcgaagaaggucaagcccaccgugguggucaacgccgccaacguguaccugaagcacgggggcggcguggccggggcccucaacaaggcgaccaacaacgccaugcaggucgagagcgacgacuacaucgccacgaacggcccccugaagguggggggcuccugcguccugagcggccacaaccucgccaagcacugccugcacgugguggggcccaacgucaacaagggcgaggacauccagcugcucaaguccgccuacgagaacuucaaccagcacgaggugcugcuggcgccgcuccugagcgccgggaucuucggcgccgaccccauccacucccugcgggugugcgucgacaccgugcgcaccaacguguaccucgccgucuucgacaagaaccuguacgacaagcuggugagcuccuuccucgagaugaagagcgagaagcagguggagcagaagaucgccgagauccccaaggaggaggucaagcccuucaucaccgagagcaagccguccguggagcagcggaagcaggacgacaagaagaucaaggcgugcguggaggaggucacgaccacccuggaggagaccaaguuccugacggagaaccuccugcuguacaucgacaucaacgggaaccuccaccccgacagcgccacccugguguccgacaucgacaucaccuuccugaagaaggacgcccccuacaucgugggcgacgucgugcaggagggcgugcucaccgccgucgugauccccacgaagaaggccgggggcaccaccgagaugcuggcgaaggcccugcgcaaggugccgaccgacaacuacaucacgaccuaccccgggcagggccucaacggguacaccgucgaggaggccaagaccgugcugaagaagugcaagagcgccuucuacauccugcccuccaucaucagcaacgagaagcaggagauccucggcaccguguccuggaaccugcgggagaugcuggcgcacgccgaggagacgcgcaagcugaugcccgucugcguggagaccaaggccaucgugagcaccauccagcggaaguacaagggcaucaagauccaggagggggucguggacuacggcgcccgcuucuacuucuacaccuccaagacgaccguggccagccucaucaacacccugaacgaccugaacgagacccucgucacgaugccgcugggguacgugacccacggccugaaccucgaggaggcggcccgguacaugcgcucccugaaggugcccgccaccgucagcguguccagccccgacgccgugaccgccuacaacggguaccugacguccagcuccaagacccccgaggagcacuucaucgagaccaucagccucgcgggcuccuacaaggacuggagcuacagcggccaguccacccagcuggggaucgaguuccugaagcggggcgacaagagcgucuacuacacguccaacccgaccaccuuccaccucgacggggaggugaucaccuucgacaaccugaagacgcugcucagccugcgcgaggugcggaccaucaaggucuucaccaccguggacaacaucaaccugcacacgcagguggucgacauguccaugaccuacggccagcaguucggccccaccuaccucgacggggccgacgugaccaagaucaagccccacaacagccacgagggcaagacguucuacgugcugccgaacgacgacacccugcgcgucgaggccuucgaguacuaccacaccaccgaccccuccuuccucgggcgguacaugagcgcccugaaccacacgaagaaguggaaguacccccaggugaacggccugaccuccaucaagugggccgacaacaacugcuaccucgcgaccgcccugcugacccuccagcagaucgagcugaaguucaaccccccggcccugcaggacgccuacuaccgcgcgcgggccggggaggccgccaacuucugcgcccucauccuggcguacugcaacaagacggugggcgagcugggcgacguccgcgagaccaugagcuaccucuuccagcacgccaaccuggacuccugcaagcgggugcugaacgucgugugcaagaccugcgggcagcagcagaccacccucaagggcguggaggccgucauguacauggggacgcugagcuacgagcaguucaagaagggcgugcagauccccugcaccugcgggaagcaggccaccaaguaccuggugcagcaggagucccccuucgucaugaugagcgcccccccggcgcaguacgagcucaagcacggcaccuucacgugcgccuccgaguacaccggcaacuaccagugcgggcacuacaagcacaucaccagcaaggagacccuguacugcaucgacggcgcccugcucacgaaguccagcgaguacaaggggcccaucaccgacguguucuacaaggagaacagcuacaccaccacgaucaagcccgugaccuacaagcuggacggcgucgugugcaccgagaucgaccccaagcuggacaacuacuacaagaaggacaacuccuacuucaccgagcagccgaucgaccucgugcccaaccagcccuaccccaacgccagcuucgacaacuucaaguucgucugcgacaacaucaaguucgccgacgaccugaaccagcugacgggguacaagaagccggcgucccgcgagcucaaggugaccuucuuccccgaccugaacggcgacguggucgccaucgacuacaagcacuacacccccagcuucaagaagggcgccaagcugcuccacaagcccaucguguggcacgugaacaacgccaccaacaaggcgacguacaagccgaacaccuggugcauccggugccugugguccaccaagcccgucgagaccagcaacuccuucgacgugcugaagagcgaggacgcccaggggauggacaaccucgccugcgaggaccugaagcccguguccgaggaggucguggagaaccccacgauccagaaggacgugcuggagugcaacgucaagaccaccgagguggugggcgacaucauccucaagccggccaacaacagccugaagaucaccgaggaggucgggcacacggaccugauggccgcguacguggacaacuccagccucaccaucaagaagcccaacgagcugucccgcgugcugggccucaagacccuggccacccacgggcuggccgccgucaacagcgugcccugggacacgaucgccaacuacgcgaagccguuccucaacaagguggucuccaccaccaccaacaucgugacgcgcugccugaaccgggugugcaccaacuacaugcccuacuucuucacccugcuccugcagcugugcaccuucacccgcagcacgaacucccggaucaaggccagcaugcccaccaccaucgccaagaacaccgucaaguccgugggcaaguucugccucgaggccagcuucaacuaccugaagagccccaacuucuccaagcugaucaacaucaucaucugguuccuccugcugagcgugugccucggcucccugaucuacagcacggccgcgcuggggguccucauguccaaccugggcaugccgagcuacugcaccggguaccgcgagggcuaccugaacuccaccaacgugaccaucgccacguacugcaccggcagcauccccugcuccgugugccucagcgggcuggacucccuggacaccuaccccagccucgagaccauccagaucacgaucuccagcuucaagugggaccugaccgccuucggccuggucgccgagugguuccucgccuacauccuguucacccgguucuucuacgugcuggggcucgcggccaucaugcagcuguucuucuccuacuucgccgugcacuucaucagcaacuccuggcugauguggcugaucaucaaccucguccagauggcccccaucagcgcgauggugcgcauguacaucuucuucgccuccuucuacuacguguggaagagcuacguccacgugguggacggcugcaacagcuccaccugcaugaugugcuacaagcggaaccgcgccacgcgggucgagugcaccaccaucgugaacgggguccgccggagcuucuacguguacgccaacggcggcaagggguucugcaagcugcacaacuggaacugcgugaacugcgacaccuucugcgccggcuccacguucaucagcgacgaggucgcgcgcgaccugucccuccaguucaagcggccgaucaaccccaccgaccagagcuccuacaucguggacagcgugaccgucaagaacggguccauccaccuguacuucgacaaggccggccagaagaccuacgagcgccacagccugucccacuucgugaaccucgacaaccugcgggccaacaacacgaaggggagccugcccaucaacgugaucgucuucgacggcaaguccaagugcgaggagagcuccgccaagagcgccuccguguacuacagccagcucaugugccagcccauccugcugcucgaccaggcgcugguguccgacgucggcgacagcgccgagguggccgugaagauguucgacgccuacgucaacaccuucagcuccaccuucaacgugccgauggagaagcugaagacccucguggccacggcggaggccgagcuggccaagaacgucagccuggacaacgugcucuccaccuucaucagcgccgcgcgccagggguucguggacuccgacgucgagaccaaggacgugguggagugccugaagcugagccaccaguccgacaucgaggucaccggcgacagcugcaacaacuacaugcucacguacaacaagguggagaacaugaccccccgggaccugggggccugcaucgacugcuccgcccgccacaucaacgcccagguggccaagagccacaacaucgcgcugaucuggaacgucaaggacuucaugucccucagcgagcagcugcggaagcagauccgcuccgccgccaagaagaacaaccugcccuucaagcucaccugcgccaccacgcgccagguggugaacgucgugaccaccaagaucgcccugaagggcgggugaggacuagucccuguucccagagcccacuuuuuuuucuuuuuuugaaauaaaauagccugucuuucagaucucaaaggcucuuuucagagccaccaaaaaaaaaaaaaaaaaaaaaaaaaaaaaaaaaaaaaaaaaaaaaaaaaaaaaaaaaaaaaaaaaaaaaaaaaaaaaaaaaaaaaaaaaaaaaaaaaaaaa

SEQ ID NO: 19818 - RNA, 6113 nt, Artificial Sequence
  SARS-CoV-2__MT758193.1__non-structural protein 3 (NSP3) mRNA gc
aggagagucccgcagucggcguccagcggcucugcuuguucgugugugugucguugcaggccuuauucaagcuuaccauggcccccaccaaggugaccuucggcgacgacacggucaucgaggugcagggguacaagagcgugaacaucaccuucgagcuggacgagcgcaucgacaagguccucaacgagaagugcuccgccuacaccguggagcugggcaccgaggugaacgaguucgcgugcgucguggccgacgccgugaucaagacgcugcagccggucagcgagcuccugaccccccuggggaucgaccucgacgagugguccauggccaccuacuaccuguucgacgagagcggcgaguucaagcuggccucccacauguacugcagcuucuacccccccgacgaggacgaggaggagggggacugcgaggaggaggaguucgagccguccacccaguacgaguacggcacggaggacgacuaccagggcaagccccucgaguucggggcgaccagcgccgcccugcagcccgaggaggagcaggaggaggacuggcuggacgacgacucccagcagaccgugggccagcaggacgggagcgaggacaaccagaccacgaccauccagaccaucguggagguccagccccagcucgagauggagcugaccccgguggugcagacgaucgaggucaacuccuucagcggcuaccugaagcucaccgacaacguguacaucaagaacgccgacaucguggaggaggcgaagaaggucaagcccaccgugguggucaacgccgccaacguguaccugaagcacgggggcggcguggccggggcccugaacaaggcgaccaacaacgccaugcaggucgaguccgacgacuacaucgccacgaacggcccccucaagguggggggcagcugcguccuguccggccacaaccuggccaagcacugccuccacgugguggggcccaacgucaacaagggcgaggacauccagcugcugaagagcgccuacgagaacuucaaccagcacgaggugcuccuggcgccgcugcucuccgccgggaucuucggcgccgaccccauccacagccugcgggugugcgucgacaccgugcgcaccaacguguaccuggccgucuucgacaagaaccucuacgacaagcugguguccagcuuccuggagaugaagagcgagaagcagguggagcagaagaucgccgagauccccaaggaggaggucaagcccuucaucaccgaguccaagccgagcguggagcagcggaagcaggacgacaagaagaucaaggcgugcguggaggaggucacgaccacccucgaggagaccaaguuccugacggagaaccugcuccuguacaucgacaucaacgggaaccugcaccccgacuccgccacccucgugagcgacaucgacaucaccuuccugaagaaggacgcccccuacaucgugggcgacgucgugcaggagggcgugcugaccgccgucgugauccccacgaagaaggccgggggcaccaccgagaugcucgcgaaggcccugcgcaaggugccgaccgacaacuacaucacgaccuaccccgggcagggccugaacggguacaccgucgaggaggccaagaccgugcucaagaagugcaaguccgccuucuacauccugcccagcaucaucuccaacgagaagcaggagauccugggcaccgugagcuggaaccuccgggagaugcuggcgcacgccgaggagacgcgcaagcugaugcccgucugcguggagaccaaggccaucguguccaccauccagcggaaguacaagggcaucaagauccaggagggggucguggacuacggcgcccgcuucuacuucuacaccagcaagacgaccguggccucccugaucaacacccucaacgaccugaacgagacccuggucacgaugccgcucggguacgugacccacggccugaaccuggaggaggcggcccgguacaugcgcagccucaaggugcccgccaccgucuccgugagcucccccgacgccgugaccgccuacaacggguaccugacgagcuccagcaagacccccgaggagcacuucaucgagaccaucucccuggcgggcagcuacaaggacuggagcuacuccggccagagcacccagcucgggaucgaguuccugaagcggggcgacaaguccgucuacuacacgagcaacccgaccaccuuccaccuggacggggaggugaucaccuucgacaaccucaagacgcugcugucccuccgcgaggugcggaccaucaaggucuucaccaccguggacaacaucaaccugcacacgcagguggucgacaugagcaugaccuacggccagcaguucggccccaccuaccuggacggggccgacgugaccaagaucaagccccacaacucccacgagggcaagacguucuacgugcucccgaacgacgacacccugcgcgucgaggccuucgaguacuaccacaccaccgaccccagcuuccuggggcgguacauguccgcccucaaccacacgaagaaguggaaguacccccaggugaacggccugaccagcaucaagugggccgacaacaacugcuaccuggcgaccgcccuccugacccugcagcagaucgagcucaaguucaaccccccggcccugcaggacgccuacuaccgcgcgcgggccggggaggccgccaacuucugcgcccugauccucgcguacugcaacaagacggugggcgagcugggcgacguccgcgagaccauguccuaccuguuccagcacgccaaccucgacagcugcaagcgggugcugaacgucgugugcaagaccugcgggcagcagcagaccacccugaagggcguggaggccgucauguacauggggacgcucuccuacgagcaguucaagaagggcgugcagauccccugcaccugcgggaagcaggccaccaaguaccuggugcagcaggagagccccuucgucaugauguccgcccccccggcgcaguacgagcugaagcacggcaccuucacgugcgccagcgaguacaccggcaacuaccagugcgggcacuacaagcacaucaccuccaaggagacccucuacugcaucgacggcgcccugcugacgaagagcagcgaguacaaggggcccaucaccgacguguucuacaaggagaacuccuacaccaccacgaucaagcccgugaccuacaagcucgacggcgucgugugcaccgagaucgaccccaagcuggacaacuacuacaagaaggacaacagcuacuucaccgagcagccgaucgaccuggugcccaaccagcccuaccccaacgccuccuucgacaacuucaaguucgucugcgacaacaucaaguucgccgacgaccucaaccagcugacgggguacaagaagccggcgagccgcgagcugaaggugaccuucuuccccgaccucaacggcgacguggucgccaucgacuacaagcacuacacccccuccuucaagaagggcgccaagcugcugcacaagcccaucguguggcacgugaacaacgccaccaacaaggcgacguacaagccgaacaccuggugcauccggugccucuggagcaccaagcccgucgagaccuccaacagcuucgacgugcugaaguccgaggacgcccaggggauggacaaccuggccugcgaggaccucaagcccgugagcgaggaggucguggagaaccccacgauccagaaggacgugcuggagugcaacgucaagaccaccgagguggugggcgacaucauccugaagccggccaacaacucccucaagaucaccgaggaggucgggcacacggaccugauggccgcguacguggacaacagcucccugaccaucaagaagcccaacgagcucagccgcgugcugggccugaagacccucgccacccacgggcuggccgccgucaacuccgugcccugggacacgaucgccaacuacgcgaagccguuccugaacaagguggucagcaccaccaccaacaucgugacgcgcugccucaaccgggugugcaccaacuacaugcccuacuucuucacccugcugcuccagcugugcaccuucacccgcuccacgaacagccggaucaaggccuccaugcccaccaccaucgccaagaacaccgucaagagcgugggcaaguucugccuggaggccagcuucaacuaccucaagucccccaacuucagcaagcugaucaacaucaucaucugguuccugcuccuguccgugugccugggcagccucaucuacuccacggccgcgcuggggguccugaugagcaaccucggcaugccguccuacugcaccggguaccgcgagggcuaccugaacagcaccaacgugaccaucgccacguacugcaccggcuccauccccugcagcgugugccuguccgggcucgacagccuggacaccuaccccucccuggagaccauccagaucacgaucagcuccuucaagugggaccucaccgccuucggccuggucgccgagugguuccuggccuacauccucuucacccgguucuucuacgugcuggggcuggcggccaucaugcagcucuucuucagcuacuucgccgugcacuucaucuccaacagcuggcugauguggcugaucaucaaccugguccagauggcccccaucuccgcgauggugcgcauguacaucuucuucgccagcuucuacuacguguggaagagcuacguccacgugguggacggcugcaacuccagcaccugcaugaugugcuacaagcggaaccgcgccacgcgggucgagugcaccaccaucgugaacgggguccgccgguccuucuacguguacgccaacggcggcaagggguucugcaagcuccacaacuggaacugcgugaacugcgacaccuucugcgccggcagcacguucaucuccgacgaggucgcgcgcgaccugagccugcaguucaagcggccgaucaaccccaccgaccaguccagcuacaucguggacuccgugaccgucaagaacgggagcauccaccucuacuucgacaaggccggccagaagaccuacgagcgccacucccugagccacuucgugaaccuggacaaccuccgggccaacaacacgaaggggucccugcccaucaacgugaucgucuucgacggcaagagcaagugcgaggaguccagcgccaaguccgccagcguguacuacucccagcugaugugccagcccauccuccugcuggaccaggcgcucgugagcgacgucggcgacagcgccgagguggccgugaagauguucgacgccuacgucaacaccuucuccagcaccuucaacgugccgauggagaagcugaagacccugguggccacggcggaggccgagcucgccaagaacgucucccuggacaacgugcugagcaccuucaucuccgccgcgcgccagggguucguggacagcgacgucgagaccaaggacgugguggagugccucaagcugucccaccagagcgacaucgaggucaccggcgacuccugcaacaacuacaugcugacguacaacaagguggagaacaugaccccccgggaccucggggccugcaucgacugcagcgcccgccacaucaacgcccagguggccaagucccacaacaucgcgcugaucuggaacgucaaggacuucaugagccuguccgagcagcuccggaagcagauccgcagcgacgccaagaagaacaaccugcccuucaagcugaccugcgccaccacgcgccagguggugaacgucgugaccaccaagaucgcccucaagggcgggugaggacuagucccuguucccagagcccacuuuuuuuucuuuuuuugaaauaaaauagccugucuuucagaucucaaaggcucuuuucagagccaccaaaaaaaaaaaaaaaaaaaaaaaaaaaaaaaaaaaaaaaaaaaaaaaaaaaaaaaaaaaaaaaaaaaaaaaaaaaaaaaaaaaaaaaaaaaaaaaaaaaaa

SEQ ID NO: 19819 - RNA, 6113 nt, Artificial Sequence
  SARS-CoV-2__MT758215.1__non-structural protein 3 (NSP3) mRNA gc
aggagagucccgcagucggcguccagcggcucugcuuguucgugugugugucguugcaggccuuauucaagcuuaccauggcccccaccaaggugaccuucggcgacgacacggucaucgaggugcagggguacaagagcgugaacaucaccuucgagcuggacgagcgcaucgacaagguccucaacgagaagugcuccgccuacaccguggagcugggcaccgaggugaacgaguucgcgugcgucguggccgacgccgugaucaagacgcugcagccggucagcgagcuccugaccccccuggggaucgaccucgacgagugguccauggccaccuacuaccuguucgacgagagcggcgaguucaagcuggccucccacauguacugcagcuucuacccccccgacgaggacgaggaggagggggacugcgaggaggaggaguucgagccguccacccaguacgaguacggcacggaggacgacuaccagggcaagccccucgaguucggggcgaccagcgccgcccugcagcccgaggaggagcaggaggaggacuggcuggacgacgacucccagcagaccgugggccagcaggacgggagcgaggacaaccagaccacgaccauccagaccaucguggagguccagccccagcucgagauggagcugaccccgguggugcagacgaucgaggucaacuccuucagcggcuaccugaagcucaccgacaacguguacaucaagaacgccgacaucguggaggaggcgaagaaggucaagcccaccgugguggucaacgccgccaacguguaccugaagcacgggggcggcguggccggggcccugaacaaggcgaccaacaacgccaugcaggucgaguccgacgacuacaucgccacgaacggcccccucaagguggggggcagcugcguccuguccggccacaaccuggccaagcacugccuccacgugguggggcccaacgucaacaagggcgaggacauccagcugcugaagagcgccuacgagaacuucaaccagcacgaggugcuccuggcgccgcugcucuccgccgggaucuucggcgccgaccccauccacagccugcgggugugcgucgacaccgugcgcaccaacguguaccuggccgucuucgacaagaaccucuacgacaagcugguguccagcuuccuggagaugaagagcgagaagcagguggagcagaagaucgccgagauccccaaggaggaggucaagcccuucaucaccgaguccaagccgagcguggagcagcggaagcaggacgacaagaagaucaaggcgugcguggaggaggucacgaccacccucgaggagaccaaguuccugacggagaaccugcuccuguacaucgacaucaacgggaaccugcaccccgacuccgccacccucgugagcgacaucgacaucaccuuccugaagaaggacgcccccuacaucgugggcgacgucgugcaggagggcgugcugaccgccgucgugauccccacgaagaaggccgggggcaccaccgagaugcucgcgaaggcccugcgcaaggugccgaccgacaacuacaucacgaccuaccccgggcagggccugaacggguacaccgucgaggaggccaagaccgugcucaagaagugcaaguccgccuucuacauccugcccagcaucaucuccaacgagaagcaggagauccugggcaccgugagcuggaaccuccgggagaugcuggcgcacgccgaggagacgcgcaagcugaugcccgucugcguggagaccaaggccaucguguccaccauccagcggaaguacaagggcaucaagauccaggagggggucguggacuacggcgcccgcuucuacuucuacaccagcaagacgaccguggccucccugaucaacacccucaacgaccugaacgagacccuggucacgaugccgcucggguacgugacccacggccugaaccuggaggaggcggcccgguacaugcgcagccucaaggugcccgccaccgucuccgugagcucccccgacgccgugaccgccuacaacggguaccugacgagcuccagcaagacccccgaggagcacuucaucgagaccaucucccuggcgggcagcuacaaggacuggagcuacuccggccagagcacccagcucgggaucgaguuccugaagcggggcgacaaguccgucuacuacacgagcaacccgaccaccuuccaccuggacggggaggugaucaccuucgacaaccucaagacgcugcugucccuccgcgaggugcggaccaucaaggucuucaccaccguggacaacaucaaccugcacacgcagguggucgacaugagcaugaccuacggccagcaguucggccccaccuaccuggacggggccgacgugaccaagaucaagccccacaacucccacgagggcaagacguucuacgugcucccgaacgacgacacccugcgcgucgaggccuucgaguacuaccacaccaccgaccccagcuuccuggggcgguacauguccgcccucaaccacacgaagaaguggaaguacccccaggugaacggccugaccagcaucaagugggccgacaacaacugcuaccuggcgaccgcccuccugacccugcagcagaucgagcucaaguucaaccccccggcccugcaggacgccuacuaccgcgcgcgggccggggaggccgccaacuucugcgcccugauccucgcguacugcaacaagacggugggcgagcugggcgacguccgcgagaccauguccuaccuguuccagcacgccaaccucgacagcugcaagcgggugcugaacgucgugugcaagaccugcgggcagcagcagaccacccugaagggcguggaggccgucauguacauggggacgcucuccuacgagcaguucaagaagggcgugcagauccccugcaccugcgggaagcaggccaccaaguaccuggugcagcaggagagccccuucgucaugauguccgcccccccggcgcaguacgagcugaagcacggcaccuucacgugcgccagcgaguacaccggcaacuaccagugcgggcacuacaagcacaucaccuccaaggagacccucuacugcaucgacggcgcccugcugacgaagagcagcgaguacaaggggcccaucaccgacguguucuacaaggagaacuccuacaccaccacgaucaagcccgugaccuacaagcucgacggcgucgugugcaccgagaucgaccccaagcuggacaacuacuacaagaaggacaacagcuacuucaccgagcagccgaucgaccuggugcccaaccagcccuaccccaacgccuccuucgacaacuucaaguucgucugcgacaacaucaaguucgccgacgaccucaaccagcugacgggguacaagaagccggcgagccgcgagcugaaggugaccuucuuccccgaccucaacggcgacguggucgccaucgacuacaagcacuacacccccuccuucaagaagggcgccaagcugcugcacaagcccaucguguggcacgugaacaacgccaccaacaaggcgacguacaagccgaacaccuggugcauccggugccucuggagcaccaagcccgucgagaccuccaacagcuucgacgugcugaaguccgaggacgcccaggggauggacaaccuggccugcgaggaccucaagcccgugagcgaggaggucguggagaaccccacgauccagaaggacgugcuggagugcaacgucaagaccaccgagguggugggcgacaucauccugaagccggccaacaacucccucaagaucaccgaggaggucgggcacacggaccugauggccgcguacguggacaacagcucccugaccaucaagaagcccaacgagcucagccgcgugcugggccugaagacccucgccacccacgggcuggccgccgucaacuccgugcccugggacacgaucgccaacuacgcgaagccguuccugaacaagguggucagcaccaccaccaacaucgugacgcgcugccucaaccgggugugcaccaacuacaugcccuacuucuucacccugcugcuccagcugugcaccuucacccgcuccacgaacagccggaucaaggccuccaugcccaccaccaucgccaagaacaccgucaagagcgugggcaaguucugccuggaggccagcuucaacuaccucaagucccccaacuucagcaagcugaucaacaucaucaucugguuccugcuccuguccgugugccugggcagccucaucuacuccacggccgcgcuggggguccugaugagcaaccucggcaugccguccuacugcaccggguaccgcgagggcuaccugaacagcaccaacgugaccaucgccacguacugcaccggcuccauccccugcagcgugugccuguccgggcucgacagccuggacaccuaccccucccuggagaccauccagaucacgaucagcuccuucaagugggaccucaccgccuucggccuggucgccgagugguuccuggccuacauccucuucacccgguucuucuacgugcuggggcuggcggccaucaugcagcucuucuucagcuacuucgccguguacuucaucuccaacagcuggcugauguggcugaucaucaaccugguccagauggcccccaucuccgcgauggugcgcauguacaucuucuucgccagcuucuacuacguguggaagagcuacguccacgugguggacggcugcaacuccagcaccugcaugaugugcuacaagcggaaccgcgccacgcgggucgagugcaccaccaucgugaacgggguccgccgguccuucuacguguacgccaacggcggcaagggguucugcaagcuccacaacuggaacugcgugaacugcgacaccuucugcgccggcagcacguucaucuccgacgaggucgcgcgcgaccugagccugcaguucaagcggccgaucaaccccaccgaccaguccagcuacaucguggacuccgugaccgucaagaacgggagcauccaccucuacuucgacaaggccggccagaagaccuacgagcgccacucccugagccacuucgugaaccuggacaaccuccgggccaacaacacgaaggggucccugcccaucaacgugaucgucuucgacggcaagagcaagugcgaggaguccagcgccaaguccgccagcguguacuacucccagcugaugugccagcccauccuccugcuggaccaggcgcucgugagcgacgucggcgacagcgccgagguggccgugaagauguucgacgccuacgucaacaccuucuccagcaccuucaacgugccgauggagaagcugaagacccugguggccacggcggaggccgagcucgccaagaacgucucccuggacaacgugcugagcaccuucaucuccgccgcgcgccagggguucguggacagcgacgucgagaccaaggacgugguggagugccucaagcugucccaccagagcgacaucgaggucaccggcgacuccugcaacaacuacaugcugacguacaacaagguggagaacaugaccccccgggaccucggggccugcaucgacugcagcgcccgccacaucaacgcccagguggccaagucccacaacaucgcgcugaucuggaacgucaaggacuucaugagccuguccgagcagcuccggaagcagauccgcagcgccgccaagaagaacaaccugcccuucaagcugaccugcgccaccacgcgccagguggugaacgucgugaccaccaagaucgcccucaagggcgggugaggacuagucccuguucccagagcccacuuuuuuuucuuuuuuugaaauaaaauagccugucuuucagaucucaaaggcucuuuucagagccaccaaaaaaaaaaaaaaaaaaaaaaaaaaaaaaaaaaaaaaaaaaaaaaaaaaaaaaaaaaaaaaaaaaaaaaaaaaaaaaaaaaaaaaaaaaaaaaaaaaaaa

SEQ ID NO: 19820 - RNA, 6113 nt, Artificial Sequence
  SARS-CoV-2__MT758240.1__non-structural protein 3 (NSP3) mRNA gc
aggagagucccgcagucggcguccagcggcucugcuuguucgugugugugucguugcaggccuuauucaagcuuaccauggcccccaccaaggugaccuucggcgacgacacggucaucgaggugcagggguacaagagcgugaacaucaccuucgagcuggacgagcgcaucgacaagguccucaacgagaagugcuccgccuacaccguggagcugggcaccgaggugaacgaguucgcgugcgucguggccgacgccgugaucaagacgcugcagccggucagcgagcuccugaccccccuggggaucgaccucgacgagugguccauggccaccuacuaccuguucgacgagagcggcgaguucaagcuggccucccacauguacugcagcuucuacccccccgacgaggacgaggaggagggggacugcgaggaggaggaguucgagccguccacccaguacgaguacggcacggaggacgacuaccagggcaagccccucgaguucggggcgaccagcgccgcccugcagcccgaggaggagcaggaggaggacuggcuggacgacgacucccagcagaccgugggccagcaggacgggagcgaggacaaccagaccacgaccauccagaccaucguggagguccagccccagcucgagauggagcugaccccgguggugcagacgaucgaggucaacuccuucagcggcuaccugaagcucaccgacaacguguacaucaagaacgccgacaucguggaggaggcgaagaaggucaagcccaccgugguggucaacgccgccaacguguaccugaagcacgggggcggcguggccggggcccugaacaaggcgaccaacaacgccaugcaggucgaguccgacgacuacaucgccacgaacggcccccucaagguggggggcagcugcguccuguccggccacaaccuggccaagcacugccuccacgugguggggcccaacgucaacaagggcgaggacauccagcugcugaagagcgccuacgagaacuucaaccagcacgaggugcuccuggcgccgcugcucuccgccgggaucuucggcgccgacagcauccacucccugcgggugugcgucgacaccgugcgcaccaacguguaccuggccgucuucgacaagaaccucuacgacaagcuggugagcagcuuccuggagaugaaguccgagaagcagguggagcagaagaucgccgagauccccaaggaggaggucaagcccuucaucaccgagagcaagcccuccguggagcagcggaagcaggacgacaagaagaucaaggcgugcguggaggaggucacgaccacccucgaggagaccaaguuccugacggagaaccugcuccuguacaucgacaucaacgggaaccugcacccggacagcgccacccucguguccgacaucgacaucaccuuccugaagaaggacgcccccuacaucgugggcgacgucgugcaggagggcgugcugaccgccgucgugauccccacgaagaaggccgggggcaccaccgagaugcucgcgaaggcccugcgcaaggugcccaccgacaacuacaucacgaccuacccggggcagggccugaacggguacaccgucgaggaggccaagaccgugcucaagaagugcaagagcgccuucuacauccugcccuccaucaucagcaacgagaagcaggagauccugggcaccguguccuggaaccuccgggagaugcuggcgcacgccgaggagacgcgcaagcugaugcccgucugcguggagaccaaggccaucgugagcaccauccagcggaaguacaagggcaucaagauccaggagggggucguggacuacggcgcccgcuucuacuucuacaccuccaagacgaccguggccagccugaucaacacccucaacgaccugaacgagacccuggucacgaugccccucggguacgugacccacggccugaaccuggaggaggcggcccgguacaugcgcucccucaaggugccggccaccgucagcguguccagccccgacgccgugaccgccuacaacggguaccugacguccagcuccaagacccccgaggagcacuucaucgagaccaucagccuggcgggcagcuacaaggacugguccuacagcggccaguccacccagcucgggaucgaguuccugaagcggggcgacaagaucgucuacuacacgagcaaccccaccaccuuccaccuggacggggaggugaucaccuucgacaaccucaagacgcugcugucccuccgcgaggugcggaccaucaaggucuucaccaccguggacaacaucaaccugcacacgcagguggucgacaugagcaugaccuacggccagcaguucggcccgaccuaccuggacggggccgacgugaccaagaucaagccccacaacucccacgagggcaagacguucuacgugcuccccaacgacgacacccugcgcgucgaggccuucgaguacuaccacaccaccgacccgagcuuccuggggcgguacauguccgcccucaaccacacgaagaaguggaaguacccccaggugaacggccugaccagcaucaagugggccgacaacaacugcuaccuggcgaccgcccuccugacccugcagcagaucgagcucaaguucaacccccccgcccugcaggacgccuacuaccgcgcgcgggccggggaggccgccaacuucugcgcccugauccucgcguacugcaacaagacggugggcgagcugggcgacguccgcgagaccauguccuaccuguuccagcacgccaaccucgacagcugcaagcgggugcugaacgucgugugcaagaccugcgggcagcagcagaccacccugaagggcguggaggccgucauguacauggggacgcucuccuacgagcaguucaagaagggcgugcagaucccgugcaccugcgggaagcaggccaccaaguaccuggugcagcaggagagccccuucgucaugauguccgccccccccgcgcaguacgagcugaagcacggcaccuucacgugcgccagcgaguacaccggcaacuaccagugcgggcacuacaagcacaucaccuccaaggagacccucuacugcaucgacggcgcccugcugacgaagagcagcgaguacaaggggccgaucaccgacguguucuacaaggagaacuccuacaccaccacgaucaagcccgugaccuacaagcucgacggcgucgugugcaccgagaucgaccccaagcuggacaacuacuacaagaaggacaacagcuacuucaccgagcagcccaucgaccuggugccgaaccagcccuaccccaacgccuccuucgacaacuucaaguucgucugcgacaacaucaaguucgccgacgaccucaaccagcugacgggguacaagaagcccgcgagccgcgagcugaaggugaccuucuucccggaccucaacggcgacguggucgccaucgacuacaagcacuacacccccuccuucaagaagggcgccaagcugcugcacaagcccaucguguggcacgugaacaacgccaccaacaaggcgacguacaagcccaacaccuggugcauccggugccucuggagcaccaagccggucgagaccuccaacagcuucgacgugcugaaguccgaggacgcccaggggauggacaaccuggccugcgaggaccucaagcccgugagcgaggaggucguggagaaccccacgauccagaaggacgugcuggagugcaacgucaagaccaccgagguggugggcgacaucauccugaagcccgccaacaacucccucaagaucaccgaggaggucgggcacacggaccugauggccgcguacguggacaacagcucccugaccaucaagaagccgaacgagcucagccgcgugcugggccugaagacccucgccacccacgggcuggccgccgucaacuccgugcccugggacacgaucgccaacuacgcgaagcccuuccugaacaagguggucagcaccaccaccaacaucgugacgcgcugccucaaccgggugugcaccaacuacaugccguacuucuucacccugcugcuccagcugugcaccuucacccgcuccacgaacagccggaucaaggccuccaugcccaccaccaucgccaagaacaccgucaagagcgugggcaaguucugccuggaggccagcuucaacuaccucaagucccccaacuucagcaagcugaucaacaucaucaucugguuccugcuccuguccgugugccugggcagccucaucuacuccacggccgcgcuggggguccugaugagcaaccucggcaugcccuccuacugcaccggguaccgcgagggcuaccugaacagcaccaacgugaccaucgccacguacugcaccggcuccaucccgugcagcgugugccuguccgggcucgacagccuggacaccuaccccucccuggagaccauccagaucacgaucagcuccuucaagugggaccucaccgccuucggccuggucgccgagugguuccuggccuacauccucuucacccgguucuucuacgugcuggggcuggcggccaucaugcagcucuucuucagcuacuucgccgugcacuucaucuccaacagcuggcugauguggcugaucaucaaccugguccagauggcccccaucuccgcgauggugcgcauguacaucuucuucgccagcuucuacuacguguggaagagcuacguccacgugguggacggcugcaacuccagcaccugcaugaugugcuacaagcggaaccgcgccacgcgggucgagugcaccaccaucgugaacgggguccgccgguccuucuacguguacgccaacggcggcaagggguucugcaagcuccacaacuggaacugcgugaacugcgacaccuucugcgccggcagcacguucaucuccgacgaggucgcgcgcgaccugagccugcaguucaagcggcccaucaacccgaccgaccaguccagcuacaucguggacuccgugaccgucaagaacgggagcauccaccucuacuucgacaaggccggccagaagaccuacgagcgccacucccugagccacuucgugaaccuggacaaccuccgggccaacaacacgaaggggucccugcccaucaacgugaucgucuucgacggcaagagcaagugcgaggaguccagcgccaaguccgccagcguguacuacucccagcugaugugccagcccauccuccugcuggaccaggcgcucgugagcgacgucggcgacagcgccgagguggccgugaagauguucgacgucuacgugaacaccuucuccagcaccuucaacgugcccauggagaagcugaagacccuggucgccacggccgaggcggagcucgccaagaacgugucccuggacaacgugcugagcaccuucaucuccgccgcccgccagggguucgucgacagcgacguggagaccaaggacguggucgagugccucaagcugucccaccagagcgacaucgaggugaccggcgacuccugcaacaacuacaugcugacguacaacaagguggagaacaugaccccgcgggaccucggggcgugcaucgacugcagcgcccgccacaucaacgcccaggucgccaagucccacaacaucgcccugaucuggaacgugaaggacuucaugagccuguccgagcagcuccggaagcagauccgcagcgcggccaagaagaacaaccugcccuucaagcugaccugcgccaccacgcgccagguggucaacguggugaccaccaagaucgcccucaagggcgggugaggacuagucccuguucccagagcccacuuuuuuuucuuuuuuugaaauaaaauagccugucuuucagaucucaaaggcucuuuucagagccaccaaaaaaaaaaaaaaaaaaaaaaaaaaaaaaaaaaaaaaaaaaaaaaaaaaaaaaaaaaaaaaaaaaaaaaaaaaaaaaaaaaaaaaaaaaaaaaaaaaaaa

SEQ ID NO: 19821 - RNA, 6113 nt, Artificial Sequence
  SARS-CoV-2__MT758436.1__non-structural protein 3 (NSP3) mRNA gc
aggagagucccgcagucggcguccagcggcucugcuuguucgugugugugucguugcaggccuuauucaagcuuaccauggcccccaccaaggugaccuucggcgacgacacggucaucgaggugcagggguacaagagcgugaacaucaccuucgagcuggacgagcgcaucgacaagguccucaacgagaagugcuccgccuacaccguggagcugggcaccgaggugaacgaguucgcgugcgucguggccgacgccgugaucaagacgcugcagccggucagcgagcuccugaccccccuggggaucgaccucgacgagugguccauggccaccuacuaccuguucgacgagagcggcgaguucaagcuggccucccacauguacugcagcuucuacccccccgacgaggacgaggaggagggggacugcgaggaggaggaguucgagccguccacccaguacgaguacggcacggaggacgacuaccagggcaagccccucgaguucggggcgaccagcgccgcccugcagcccgaggaggagcaggaggaggacuggcuggacgacgacucccagcagaccgugggccagcaggacgggagcgaggacaaccagaccacgaccauccagaccaucguggagguccagccccagcucgagauggagcugaccccgguggugcagacgaucgaggucaacuccuucagcggcuaccugaagcucaccgacaacguguacaucaagaacgccgacaucguggaggaggcgaagaaggucaagcccaccgugguggucaacgccgccaacguguaccugaagcacgggggcggcguggccggggcccugaacaaggcgaccaacaacgccaugcaggucgaguccgacgacuacaucgccacgaacggcccccucaagguggggggcagcugcguccuguccggccacaaccuggccaagcacugccuccacgugguggggcccaacgucaacaagggcgaggacauccagcugcugaagagcgccuacgagaacuucaaccagcacgaggugcuccuggcgccgcugcucuccgccgggaucuucggcgccgaccccauccacagccugcgggugugcgucgacaccgugcgcaccaacguguaccuggccgucuucgacaagaaccucuacgacaagcugguguccagcuuccuggagaugaagagcgagaagcagguggagcagaagaucgccgagauccccaaggaggaggucaagcccuucaucaccgaguccaagccgagcguggagcagcggaagcaggacgacaagaagaucaaggcgugcguggaggaggucacgaccacccucgaggagaccaaguuccugacggagaaccugcuccuguacaucgacaucaacgggaaccugcaccccgacuccgccacccucgugagcgacaucgacaucaccuuccugaagaaggacgcccccuacaucgugggcgacgucgugcaggagggcgugcugaccgccgucgugauccccacgaagaaggccgggggcaccaccgagaugcucgcgaaggcccugcgcaaggugccgaccgacaacuacaucacgaccuaccccgggcagggccugaacggguacaccgucgaggaggccaagaccgugcucaagaagugcaaguccgccuucuacauccugcccagcaucaucuccaacgagaagcaggagauccugggcaccgugagcuggaaccuccgggagaugcuggcgcacgccgaggagacgcgcaagcugaugcccgucugcguggagaccaaggccaucguguccaccauccagcggaaguacaagggcaucaagauccaggagggggucguggacuacggcgcccgcuucuacuucuacaccagcaagacgaccguggccucccugaucaacacccucaacgaccugaacgagacccuggucacgaugccgcucggguacgugacccacggccugaaccuggaggaggcggcccgguacaugcgcagccucaaggugcccgccaccgucuccgugagcucccccgacgccgugaccgccuacaacggguaccugacgagcuccagcaagacccccgaggagcacuucaucgagaccaucucccuggcgggcagcuacaaggacuggagcuacuccggccagagcacccagcucgggaucgaguuccugaagcggggcgacaaguccgucuacuacacgagcaacccgaccaccuuccaccuggacggggaggugaucaccuucgacaaccucaagacgcugcugucccuccgcgaggugcggaccaucaaggucuucaccgccguggacaacaucaaccugcacacccagguggucgacaugagcaugacguacggccagcaguucggccccaccuaccuggacggggccgacgugaccaagaucaagccccacaacucccacgagggcaagaccuucuacgugcucccgaacgacgacacgcugcgcgucgaggccuucgaguacuaccacaccaccgaccccagcuuccuggggcgguacauguccgcccucaaccacaccaagaaguggaaguacccccaggugaacggccugacgagcaucaagugggcggacaacaacugcuaccuggccaccgcccuccugacccugcagcagaucgagcucaaguucaaccccccggcccugcaggacgcguacuaccgcgcccgggccggggaggccgccaacuucugcgcgcugauccucgccuacugcaacaagaccgugggcgagcugggcgacguccgcgagacgauguccuaccuguuccagcacgccaaccucgacagcugcaagcgggugcugaacgucgugugcaagaccugcgggcagcagcagaccacccugaagggcguggaggccgucauguacauggggacccucuccuacgagcaguucaagaagggcgugcagauccccugcacgugcgggaagcaggccaccaaguaccuggugcagcaggagagccccuucgucaugauguccgcgcccccggcccaguacgagcugaagcacggcaccuucaccugcgccagcgaguacacgggcaacuaccagugcgggcacuacaagcacaucaccuccaaggagacccucuacugcaucgacggcgcccugcugaccaagagcagcgaguacaaggggcccaucacggacguguucuacaaggagaacuccuacaccaccaccaucaagcccgugacguacaagcucgacggcgucgugugcaccgagaucgaccccaagcuggacaacuacuacaagaaggacaacagcuacuucaccgagcagccgaucgaccuggugcccaaccagcccuaccccaacgccuccuucgacaacuucaaguucgucugcgacaacaucaaguucgcggacgaccucaaccagcugaccggguacaagaagccggccagccgcgagcugaaggugacguucuuccccgaccucaacggcgacguggucgccaucgacuacaagcacuacacccccuccuucaagaagggcgccaagcugcugcacaagcccaucguguggcacgugaacaacgcgaccaacaaggccaccuacaagccgaacacguggugcauccggugccucuggagcaccaagcccgucgagaccuccaacagcuucgacgugcugaaguccgaggacgcccaggggauggacaaccuggccugcgaggaccucaagcccgugagcgaggaggucguggagaaccccaccauccagaaggacgugcuggagugcaacgucaagacgaccgagguggugggcgacaucauccugaagccggccaacaacucccucaagaucaccgaggaggucgggcacaccgaccugauggcggccuacguggacaacagcucccugacgaucaagaagcccaacgagcucagccgcgugcugggccugaagacccucgccacccacgggcuggccgccgucaacuccgugcccugggacaccaucgcgaacuacgccaagccguuccugaacaagguggucagcacgaccaccaacaucgugacccgcugccucaaccgggugugcacgaacuacaugcccuacuucuucacccugcugcuccagcugugcaccuucacccgcuccaccaacagccggaucaaggccuccaugcccacgaccaucgccaagaacaccgucaagagcgugggcaaguucugccuggaggccagcuucaacuaccucaagucccccaacuucagcaagcugaucaacaucaucaucugguuccugcuccuguccgugugccugggcagccucaucuacuccaccgcggcccuggggguccugaugagcaaccucggcaugccguccuacugcacgggguaccgcgagggcuaccugaacagcaccaacgugaccaucgccaccuacugcacgggcuccauccccugcagcgugugccuguccgggcucgacagccuggacaccuaccccucccuggagaccauccagaucaccaucagcuccuucaagugggaccucacggccuucggccuggucgccgagugguuccuggcguacauccucuucacccgguucuucuacgugcuggggcuggccgccaucaugcagcucuucuucagcuacuucgccgugcacuucaucuccaacagcuggcugauguggcugaucaucaaccugguccagauggcgcccaucuccgccauggugcgcauguacaucuucuucgccagcuucuacuacguguggaagagcuacguccacgugguggacggcugcaacuccagcaccugcaugaugugcuacaagcggaaccgcgccacccgggucgagugcacgaccaucgugaacgggguccgccgguccuucuacguguacgccaacggcggcaagggguucugcaagcuccacaacuggaacugcgugaacugcgacaccuucugcgcgggcagcaccuucaucuccgacgaggucgcccgcgaccugagccugcaguucaagcggccgaucaaccccacggaccaguccagcuacaucguggacuccgugaccgucaagaacgggagcauccaccucuacuucgacaaggccggccagaagaccuacgagcgccacucccugagccacuucgugaaccuggacaaccuccgggccaacaacaccaaggggucccugcccaucaacgugaucgucuucgacggcaagagcaagugcgaggaguccagcgccaaguccgcgagcguguacuacucccagcugaugugccagcccauccuccugcuggaccaggcccucgugagcgacgucggcgacagcgccgagguggccgugaagauguucgacgccuacgucaacacguucuccagcaccuucaacgugccgauggagaagcugaagacccugguggcgaccgccgaggccgagcucgccaagaacgucucccuggacaacgugcugagcacguucaucuccgcggcccgccagggguucguggacagcgacgucgagaccaaggacgugguggagugccucaagcugucccaccagagcgacaucgaggucaccggcgacuccugcaacaacuacaugcugaccuacaacaagguggagaacaugacgccccgggaccucggggccugcaucgacugcagcgcccgccacaucaacgcccagguggcgaagucccacaacaucgcccugaucuggaacgucaaggacuucaugagccuguccgagcagcuccggaagcagauccgcagcgccgccaagaagaacaaccugcccuucaagcugaccugcgccaccacccgccagguggugaacgucgugacgaccaagaucgcgcucaagggcgggugaggacuagucccuguucccagagcccacuuuuuuuucuuuuuuugaaauaaaauagccugucuuucagaucucaaaggcucuuuucagagccaccaaaaaaaaaaaaaaaaaaaaaaaaaaaaaaaaaaaaaaaaaaaaaaaaaaaaaaaaaaaaaaaaaaaaaaaaaaaaaaaaaaaaaaaaaaaaaaaaaaaaa

SEQ ID NO: 19822 - RNA, 6113 nt, Artificial Sequence
  SARS-CoV-2__MT758439.1__non-structural protein 3 (NSP3) mRNA gc
aggagagucccgcagucggcguccagcggcucugcuuguucgugugugugucguugcaggccuuauucaagcuuaccauggcccccaccaaggugaccuucggcgacgacacggucaucgaggugcagggguacaagagcgugaacaucaccuucgagcuggacgagcgcaucgacaagguccucaacgagaagugcuccgccuacaccguggagcugggcaccgaggugaacgaguucgcgugcgucguggccgacgccgugaucaagacgcugcagccggucagcgagcuccugaccccccuggggaucgaccucgacgagugguccauggccaccuacuaccuguucgacgagagcggcgaguucaagcuggccucccacauguacugcagcuucuacccccccgacgaggacgaggaggagggggacugcgaggaggaggacuucgagccguccacccaguacgaguacggcacggaggacgacuaccagggcaagccccucgaguucggggcgaccagcgccgcccugcagcccgaggaggagcaggaggaggacuggcuggacgacgacucccagcagaccgugggccagcaggacgggagcgaggacaaccagaccacgaccauccagaccaucguggagguccagccccagcucgagauggagcugaccccgguggugcagacgaucgaggucaacuccuucagcggcuaccugaagcucaccgacaacguguacaucaagaacgccgacaucguggaggaggcgaagaaggucaagcccaccgugguggucaacgccgccaacguguaccugaagcacgggggcggcguggccggggcccugaacaaggcgaccaacaacgccaugcaggucgaguccgacgacuacaucgccacgaacggcccccucaagguggggggcagcugcguccuguccggccacaaccuggccaagcacugccuccacgugguggggcccaacgucaacaagggcgaggacauccagcugcugaagagcgccuacgagaacuucaaccagcacgaggugcuccuggcgccgcugcucuccgccgggaucuucggcgccgaccccauccacagccugcgggugugcgucgacaccgugcgcaccaacguguaccuggccgucuucgacaagaaccucuacgacaagcugguguccagcuuccuggagaugaagagcgagaagcagguggagcagaagaucgccgagauccccaaggaggaggucaagcccuucaucaccgaguccaagccgagcguggagcagcggaagcaggacgacaagaagaucaaggcgugcguggaggaggucacgaccacccucgaggagaccaaguuccugacggagaaccugcuccuguacaucgacaucaacgggaaccugcaccccgacuccgccacccucgugagcgacaucgacaucaccuuccugaagaaggacgcccccuacaucgugggcgacgucgugcaggagggcgugcugaccgccgucgugauccccacgaagaaggccgggggcaccaccgagaugcucgcgaaggcccugcgcaaggugccgaccgacaacuacaucacgaccuaccccgggcagggccugaacggguacaccgucgaggaggccaagaccgugcucaagaagugcaaguccgccuucuacauccugcccagcaucaucuccaacgagaagcaggagauccugggcaccgugagcuggaaccuccgggagaugcuggcgcacgccgaggagacgcgcaagcugaugcccgucugcguggagaccaaggccaucguguccaccauccagcggaaguacaagggcaucaagauccaggagggggucguggacuacggcgcccgcuucuacuucuacaccagcaagacgaccguggccucccugaucaacacccucaacgaccugaacgagacccuggucacgaugccgcucggguacgugacccacggccugaaccuggaggaggcggcccgguacaugcgcagccucaaggugcccgccaccgucuccgugagcucccccgacgccgugaccgccuacaacggguaccugacgagcuccagcaagacccccgaggagcacuucaucgagaccaucucccuggcgggcagcuacaaggacuggagcuacuccggccagagcacccagcucgggaucgaguuccugaagcggggcgacaaguccgucuacuacacgagcaacccgaccaccuuccaccuggacggggaggugaucaccuucgacaaccucaagacgcugcugucccuccgcgaggugcggaccaucaaggucuucaccaccguggacaacaucaaccugcacacgcagguggucgacaugagcaugaccuacggccagcaguucggccccaccuaccuggacggggccgacgugaccaagaucaagccccacaacucccacgagggcaagacguucuacgugcucccgaacgacgacacccugcgcgucgaggccuucgaguacuaccacaccaccgaccccagcuuccuggggcgguacauguccgcccucaaccacacgaagaaguggaaguacccccaggugaacggccugaccagcaucaagugggccgacaacaacugcuaccuggcgaccgcccuccugacccugcagcagaucgagcucaaguucaaccccccggcccugcaggacgccuacuaccgcgcgcgggccggggaggccgccaacuucugcgcccugauccucgcguacugcaacaagacggugggcgagcugggcgacguccgcgagaccauguccuaccuguuccagcacgccaaccucgacagcugcaagcgggugcugaacgucgugugcaagaccugcgggcagcagcagaccacccugaagggcguggaggccgucauguacauggggacgcucuccuacgagcaguucaagaagggcgugcagauccccugcaccugcgggaagcaggccaccaaguaccuggugcagcaggagagccccuucgucaugauguccgcccccccggcgcaguacgagcugaagcacggcaccuucacgugcgccagcgaguacaccggcaacuaccagugcgggcacuacaagcacaucaccuccaaggagacccucuacugcaucgacggcgcccugcugacgaagagcagcgaguacaaggggcccaucaccgacguguucuacaaggagaacuccuacaccaccacgaucaagcccgugaccuacaagcucgacggcgucgugugcaccgagaucgaccccaagcuggacaacuacuacaagaaggacaacagcuacuucaccgagcagccgaucgaccuggugcccaaccagcccuaccccaacgccuccuucgacaacuucaaguucgucugcgacaacaucaaguucgccgacgaccucaaccagcugacgggguacaagaagccggcgagccgcgagcugaaggugaccuucuuccccgaccucaacggcgacguggucgccaucgacuacaagcacuacacccccuccuucaagaagggcgccaagcugcugcacaagcccaucguguggcacgugaacaacgccaccaacaaggcgacguacaagccgaacaccuggugcauccggugccucuggagcaccaagcccgucgagaccuccaacagcuucgacgugcugaaguccgaggacgcccaggggauggacaaccuggccugcgaggaccucaagcccgugagcgaggaggucguggagaaccccacgauccagaaggacgugcuggagugcaacgucaagaccaccgagguggugggcgacaucauccugaagccggccaacaacucccucaagaucaccgaggaggucgggcacacggaccugauggccgcguacguggacaacagcucccugaccaucaagaagcccaacgagcucagccgcgugcugggccugaagacccucgccacccacgggcuggccgccgucaacuccgugcccugggacacgaucgccaacuacgcgaagccguuccugaacaagguggucagcaccaccaccaacaucgugacgcgcugccucaaccgggugugcaccaacuacaugcccuacuucuucacccugcugcuccagcugugcaccuucacccgcuccacgaacagccggaucaaggccuccaugcccaccaccaucgccaagaacaccgucaagagcgugggcaaguucugccuggaggccagcuucaacuaccucaagucccccaacuucagcaagcugaucaacaucaucaucugguuccugcuccuguccgugugccugggcagccucaucuacuccacggccgcgcuggggguccugaugagcaaccucggcaugccguccuacugcaccggguaccgcgagggcuaccugaacagcaccaacgugaccaucgccacguacugcaccggcuccauccccugcagcgugugccuguccgggcucgacagccuggacaccuaccccucccuggagaccauccagaucacgaucagcuccuucaagugggaccucaccgccuucggccuggucgccgagugguuccuggccuacauccucuucacccgguucuucuacgugcuggggcuggcggccaucaugcagcucuucuucagcuacuucgccgugcacuucaucuccaacagcuggcugauguggcugaucaucaaccugguccagauggcccccaucuccgcgauggugcgcauguacaucuucuucgccagcuucuacuacguguggaagagcuacguccacgugguggacggcugcaacuccagcaccugcaugaugugcuacaagcggaaccgcgccacgcgggucgagugcaccaccaucgugaacgggguccgccgguccuucuacguguacgccaacggcggcaagggguucugcaagcuccacaacuggaacugcgugaacugcgacaccuucugcgccggcagcacguucaucuccgacgaggucgcgcgcgaccugagccugcaguucaagcggccgaucaaccccaccgaccaguccagcuacaucguggacuccgugaccgucaagaacgggagcauccaccucuacuucgacaaggccggccagaagaccuacgagcgccacucccugagccacuucgugaaccuggacaaccuccgggccaacaacacgaaggggucccugcccaucaacgugaucgucuucgacggcaagagcaagugcgaggaguccagcgccaaguccgccagcguguacuacucccagcugaugugccagcccauccuccugcuggaccaggcgcucgugagcgacgucggcgacagcgccgagguggccgugaagauguucgacgccuacgucaacaccuucuccagcaccuucaacgugccgauggagaagcugaagacccugguggccacggcggaggccgagcucgccaagaacgucucccuggacaacgugcugagcaccuucaucuccgccgcgcgccagggguucguggacagcgacgucgagaccaaggacgugguggagugccucaagcugucccaccagagcgacaucgaggucaccggcgacuccugcaacaacuacaugcugacguacaacaagguggagaacaugaccccccgggaccucggggccugcaucgacugcagcgcccgccacaucaacgcccagguggccaagucccacaacaucgcgcugaucuggaacgucaaggacuucaugagccuguccgagcagcuccggaagcagauccgcagcgccgccaagaagaacaaccugcccuucaagcugaccugcgccaccacgcgccagguggugaacgucgugaccaccaagaucgcccucaagggcgggugaggacuagucccuguucccagagcccacuuuuuuuucuuuuuuugaaauaaaauagccugucuuucagaucucaaaggcucuuuucagagccaccaaaaaaaaaaaaaaaaaaaaaaaaaaaaaaaaaaaaaaaaaaaaaaaaaaaaaaaaaaaaaaaaaaaaaaaaaaaaaaaaaaaaaaaaaaaaaaaaaaaaa

SEQ ID NO: 19823 - RNA, 6113 nt, Artificial Sequence
  SARS-CoV-2__MT762396.1__non-structural protein 3 (NSP3) mRNA gc
aggagagucccgcagucggcguccagcggcucugcuuguucgugugugugucguugcaggccuuauucaagcuuaccauggcccccaccaaggugaccuucggcgacgacacggucaucgaggugcagggguacaagagcgugaacaucaccuucgagcuggacgagcgcaucgacaagguccucaacgagaagugcuccgccuacaccguggagcugggcaccgaggugaacgaguucgcgugcgucguggccgacgccgugaucaagauccugcagccggucagcgagcuccugacgccccuggggaucgaccucgacgagugguccauggccaccuacuaccuguucgacgagagcggcgaguucaagcuggccucccacauguacugcagcuucuacccccccgacgaggacgaggaggagggggacugcgaggaggaggaguucgagccguccacccaguacgaguacggcaccgaggacgacuaccagggcaagccccucgaguucggggcgacgagcgccgcccugcagcccgaggaggagcaggaggaggacuggcuggacgacgacucccagcagaccgugggccagcaggacgggagcgaggacaaccagaccaccacgauccagaccaucguggagguccagccccagcucgagauggagcugaccccgguggugcagaccaucgaggucaacuccuucagcggcuaccugaagcucacggacaacguguacaucaagaacgccgacaucguggaggaggcgaagaaggucaagcccaccgugguggucaacgccgccaacguguaccugaagcacgggggcggcguggccggggcccugaacaaggcgaccaacaacgccaugcaggucgaguccgacgacuacaucgccaccaacggcccccucaagguggggggcagcugcguccuguccggccacaaccuggccaagcacugccuccacgugguggggcccaacgucaacaagggcgaggacauccagcugcugaagagcgccuacgagaacuucaaccagcacgaggugcuccuggcgccgcugcucuccgccgggaucuucggcgccgaccccauccacagccugcgggugugcgucgacacggugcgcaccaacguguaccuggccgucuucgacaagaaccucuacgacaagcugguguccagcuuccuggagaugaagagcgagaagcagguggagcagaagaucgccgagauccccaaggaggaggucaagcccuucaucaccgaguccaagccgagcguggagcagcggaagcaggacgacaagaagaucaaggcgugcguggaggaggucaccacgacccucgaggagaccaaguuccugaccgagaaccugcuccuguacaucgacaucaacgggaaccugcaccccgacuccgccacgcucgugagcgacaucgacaucaccuuccugaagaaggacgcccccuacaucgugggcgacgucgugcaggagggcgugcugaccgccgucgugauccccaccaagaaggccgggggcacgaccgagaugcucgcgaaggcccugcgcaaggugccgaccgacaacuacaucaccacguaccccgggcagggccugaacggguacaccgucgaggaggccaagaccgugcucaagaagugcaaguccgccuucuacauccugcccagcaucaucuccaacgagaagcaggagauccugggcaccgugagcuggaaccuccgggagaugcuggcgcacgccgaggagacccgcaagcugaugcccgucugcguggagacgaaggccaucguguccaccauccagcggaaguacaagggcaucaagauccaggagggggucguggacuacggcgcccgcuucuacuucuacaccagcaagaccacgguggccucccugaucaacacccucaacgaccugaacgagacccuggucaccaugccgcucggguacgugacgcacggccugaaccuggaggaggcggcccgguacaugcgcagccucaaggugcccgccaccgucuccgugagcucccccgacgccgugaccgccuacaacggguaccugaccagcuccagcaagacgcccgaggagcacuucaucgagaccaucucccuggcgggcagcuacaaggacuggagcuacuccggccagagcacccagcucgggaucgaguuccugaagcggggcgacaaguccgucuacuacaccagcaacccgacgaccuuccaccuggacggggaggugaucaccuucgacaaccucaagacccugcugucccuccgcgaggugcggacgaucaaggucuucaccaccguggacaacaucaaccugcacacccagguggucgacaugagcaugacguacggccagcaguucggccccaccuaccuggacggggccgacgugaccaagaucaagccccacaacucccacgagggcaagaccuucuacgugcucccgaacgacgacacgcugcgcgucgaggccuucgaguacuaccacaccaccgaccccagcuuccuggggcgguacauguccgcccucaaccacaccaagaaguggaaguacccccaggugaacggccugacgagcaucaagugggccgacaacaacugcuaccuggcgaccgcccuccugacccugcagcagaucgagcucaaguucaaccccccggcccugcaggacgccuacuaccgcgcgcgggccggggaggccgccaacuucugcgcccugauccucgcguacugcaacaagaccgugggcgagcugggcgacguccgcgagacgauguccuaccuguuccagcacgccaaccucgacagcugcaagcgggugcugaacgucgugugcaagaccugcgggcagcagcagaccacccugaagggcguggaggccgucauguacauggggacccucuccuacgagcaguucaagaagggcgugcagauccccugcacgugcgggaagcaggccaccaaguaccuggugcagcaggagagccccuucgucaugauguccgcccccccggcgcaguacgagcugaagcacggcaccuucaccugcgccagcgaguacacgggcaacuaccagugcgggcacuacaagcacaucaccuccaaggagacccucuacugcaucgacggcgcccugcugaccaagagcagcgaguacaaggggcccaucacggacguguucuacaaggagaacuccuacaccaccaccaucaagcccgugacguacaagcucgacggcgucgugugcaccgagaucgaccccaagcuggacaacuacuacaagaaggacaacagcuacuucaccgagcagccgaucgaccuggugcccaaccagcccuaccccaacgccuccuucgacaacuucaaguucgucugcgacaacaucaaguucgccgacgaccucaaccagcugaccggguacaagaagccggcgagccgcgagcugaaggugacguucuuccccgaccucaacggcgacguggucgccaucgacuacaagcacuacacccccuccuucaagaagggcgccaagcugcugcacaagcccaucguguggcacgugaacaacgccaccaacaaggcgaccuacaagccgaacacguggugcauccggugccucuggagcaccaagcccgucgagaccuccaacagcuucgacgugcugaaguccgaggacgcccaggggauggacaaccuggccugcgaggaccucaagcccgugagcgaggaggucguggagaaccccaccauccagaaggacgugcuggagugcaacgucaagacgaccgagguggugggcgacaucauccugaagccggccaacaacucccucaagaucaccgaggaggucgggcacaccgaccugauggccgcguacguggacaacagcucccugacgaucaagaagcccaacgagcucagccgcgugcugggccugaagacccucgccacccacgggcuggccgccgucaacuccgugcccugggacaccaucgccaacuacgcgaagccguuccugaacaagguggucagcacgaccaccaacaucgugacccgcugccucaaccgggugugcacgaacuacaugcccuacuucuucacccugcugcuccagcugugcaccuucacccgcuccaccaacagccggaucaaggccuccaugcccacgaccaucgccaagaacaccgucaagagcgugggcaaguucugccuggaggccagcuucaacuaccucaagucccccaacuucagcaagcugaucaacaucaucaucugguuccugcuccuguccgugugccugggcagccucaucuacuccaccgccgcgcuggggguccugaugagcaaccucggcaugccguccuacugcacgggguaccgcgagggcuaccugaacagcaccaacgugaccaucgccaccuacugcacgggcuccauccccugcagcgugugccuguccgggcucgacagccuggacaccuaccccucccuggagaccauccagaucaccaucagcuccuucaagugggaccucacggccuucggccuggucgccgagugguuccuggccuacauccucuucacccgguucuucuacgugcuggggcuggcggccaucaugcagcucuucuucagcuacuucgccgugcacuucaucuccaacagcuggcugauguggcugaucaucaaccugguccagauggcccccaucuccgcgauggugcgcauguacaucuucuucgccagcuucuacuacguguggaagagcuacguccacgugguggacggcugcaacuccagcaccugcaugaugugcuacaagcggaaccgcgccacccgggucgagugcacgaccaucgugaacgggguccgccgguccuucuacguguacgccaacggcggcaagggguucugcaagcuccacaacuggaacugcgugaacugcgacaccuucugcgccggcagcaccuucaucuccgacgaggucgcgcgcgaccugagccugcaguucaagcggccgaucaaccccacggaccaguccagcuacaucguggacuccgugaccgucaagaacgggagcauccaccucuacuucgacaaggccggccagaagaccuacgagcgccacucccugagccacuucgugaaccuggacaaccuccgggccaacaacaccaaggggucccugcccaucaacgugaucgucuucgacggcaagagcaagugcgaggaguccagcgccaaguccgccagcguguacuacucccagcugaugugccagcccauccuccugcuggaccaggcgcucgugagcgacgucggcgacagcgccgagguggccgugaagauguucgacgccuacgucaacacguucuccagcaccuucaacgugccgauggagaagcugaagacccugguggccaccgcggaggccgagcucgccaagaacgucucccuggacaacgugcugagcacguucaucuccgccgcgcgccagggguucguggacagcgacgucgagaccaaggacgugguggagugccucaagcugucccaccagagcgacaucgaggucaccggcgacuccugcaacaacuacaugcugaccuacaacaagguggagaacaugacgccccgggaccucggggccugcaucgacugcagcgcccgccacaucaacgcccagguggccaagucccacaacaucgcgcugaucuggaacgucaaggacuucaugagccuguccgagcagcuccggaagcagauccgcagcgccgccaagaagaacaaccugcccuucaagcugaccugcgccaccacccgccagguggugaacgucgugacgaccaagaucgcccucaagggcgggugaggacuagucccuguucccagagcccacuuuuuuuucuuuuuuugaaauaaaauagccugucuuucagaucucaaaggcucuuuucagagccaccaaaaaaaaaaaaaaaaaaaaaaaaaaaaaaaaaaaaaaaaaaaaaaaaaaaaaaaaaaaaaaaaaaaaaaaaaaaaaaaaaaaaaaaaaaaaaaaaaaaaa

SEQ ID NO: 19824 - RNA, 6113 nt, Artificial Sequence
  SARS-CoV-2__MT762397.1__non-structural protein 3 (NSP3) mRNA gc
aggagagucccgcagucggcguccagcggcucugcuuguucgugugugugucguugcaggccuuauucaagcuuaccauggcccccaccaaggugaccuucggcgacgacacggucaucgaggugcagggguacaagagcgugaacaucaccuucgagcuggacgagcgcaucgacaagguccucaacgagaagugcuccgccuacaccguggagcugggcaccgaggugaacgaguucgcgugcgucguggccgacgccgugaucaagacgcugcagccggucagcgagcuccugaccccccuggggaucgaccucgacgagugguccauggccaccuacuaccuguucgacgagagcggcgaguucaagcuggccucccacauguacugcagcuucuacccccccgacgaggacgaggaggagggggacugcgaggaggaggaguucgagccguccacccaguacgaguacggcacggaggacgacuaccagggcaagccccucgaguucggggcgaccagcgccgcccugcagcccgaggaggagcaggaggaggacuggcuggacgacgacucccagcagaccgugggccagcaggacgggagcgaggacaaccagaccacgaccauccagaccaucguggagguccagccccagcucgagauggagcugaccccgguggugcagacgaucgaggucaacuccuucagcggcuaccugaagcucaccgacaacguguacaucaagaacgccgacaucguggaggaggcgaagaaggucaagcccaccgugguggucaacgccgccaacguguaccugaagcacgggggcggcguggccggggcccugaacaaggcgaccaacaacgccaugcaggucgaguccgacgacuacaucgccacgaacggcccccucaagguggggggcagcugcguccuguccggccacaaccuggccaagcacugccuccacgugguggggcccaacgucaacaagggcgaggacauccagcugcugaagagcgccuacgagaacuucaaccagcacgaggugcuccuggcgccgcugcucuccgccgggaucuucggcgccgaccccauccacagccugcgggugugcgucgacaccgugcgcaccaacguguaccuggccgucuucgacaagaaccucuacgacaagcugguguccagcuuccuggagaugaagagcgagaagcagguggagcagaagaucgccgagauccccaaggaggaggucaagcccuucaucaccgaguccaagccgagcguggagcagcggaagcaggacgacaagaagaucaaggcgugcguggaggaggucacgaccacccucgaggagaccaaguuccugacggagaaccugcuccuguacaucgacaucaacgggaaccugcaccccgacuccgccacccucgugagcgacaucgacaucaccuuccugaagaaggacgcccccuacaucgugggcgacgucgugcaggagggcgugcugaccgccgucgugauccccacgaagaaggccgggggcaccaccgagaugcucgcgaaggcccugcgcaaggugccgaccgacaacuacaucacgaccuaccccgggcagggccugaacggguacaccgucgaggaggccaagaccgugcucaagaagugcaaguccgccuucuacauccugcccagcaucaucuccaacgagaagcaggagauccugggcaccgugagcuggaaccuccgggagaugcuggcgcacgccgaggagacgcgcaagcugaugcccgucugcguggagaccaaggccaucguguccaccauccagcggaaguacaagggcaucaagauccaggagggggucguggacuacggcgcccgcuucuacuucuacaccagcaagacgaccguggccucccugaucaacacccucaacgaccugaacgagacccuggucacgaugccgcucggguacgugacccacggccugaaccuggaggaggcggcccgguacaugcgcagccucaaggugcccgccaccgucuccgugagcucccccgacgccgugaccgccuacaacggguaccugacgagcuccagcaagacccccgaggagcacuucaucgagaccaucucccuggcgggcagcuacaaggacuggagcuacuccggccagagcacccagcucgggaucgaguuccugaagcggggcgacaaguccgucuacuacacgagcaacccgaccaccuuccaccuggacggggaggugaucaccuucgacaaccucaagacgcugcugucccuccgcgaggugcggaccaucaaggucuucaccaccguggacaacaucaaccugcacacgcagguggucgacaugagcaugaccuacggccagcaguucggccccaccuaccuggacggggccgacgugaccaagaucaagccccacaacucccacgagggcaagacguucuacgugcucccgaacgacgacacccugcgcgucgaggccuucgaguacuaccacaccaccgaccccagcuuccuggggcgguacauguccgcccucaaccacacgaagaaguggaaguacccccaggugaacggccugaccagcaucaagugggccgacaacaacugcuaccuggcgaccgcccuccugacccugcagcagaucgagcucaaguucaaccccccggcccugcaggacgccuacuaccgcgcgcgggccggggaggccgccaacuucugcgcccugauccucgcguacugcaacaagacggugggcgagcugggcgacguccgcgagaccauguccuaccuguuccagcacgccaaccucgacagcugcaagcgggugcugaacgucgugugcaagaccugcgggcagcagcagaccacccugaagggcguggaggccgucauguacauggggacgcucuccuacgagcaguucaagaagggcgugcagauccccugcaccugcgggaagcaggccaccaaguaccuggugcagcaggagagccccuucgucaugauguccgcccccccggcgcaguacgagcugaagcacggcaccuucacgugcgccagcgaguacaccggcaacuaccagugcgggcacuacaagcacaucaccuccaaggagacccucuacugcaucgacggcgcccugcugacgaagagcagcgaguacaaggggcccaucaccgacguguucuacaaggagaacuccuacaccaccacgaucaagcccgugaccuacaagcucgacggcgucgugugcaccgagaucgaccccaagcuggacaacuacuacaagaaggacaacagcuacuucaccgagcagccgaucgaccuggugcccaaccagcccuaccccaacgccuccuucgacaacuucaaguucgucugcgacaacaucaaguucgccgacgaccucaaccagcugacgggguaccgcaagccggcgagccgggagcugaaggugaccuucuuccccgaccucaacggcgacguggucgccaucgacuacaagcacuacacccccuccuucaagaagggcgccaagcugcugcacaagcccaucguguggcacgugaacaacgccaccaacaaggcgacguacaagccgaacaccuggugcauccgcugccucuggagcaccaagcccgucgagaccuccaacagcuucgacgugcugaaguccgaggacgcccaggggauggacaaccuggccugcgaggaccucaagcccgugagcgaggaggucguggagaaccccacgauccagaaggacgugcuggagugcaacgucaagaccaccgagguggugggcgacaucauccugaagccggccaacaacucccucaagaucaccgaggaggucgggcacacggaccugauggccgcguacguggacaacagcucccugaccaucaagaagcccaacgagcucagccgcgugcugggccugaagacccucgccacccacgggcuggccgccgucaacuccgugcccugggacacgaucgccaacuacgcgaagccguuccugaacaagguggucagcaccaccaccaacaucgugacgcggugccucaaccgcgugugcaccaacuacaugcccuacuucuucacccugcugcuccagcugugcaccuucacccgguccacgaacagccgcaucaaggccuccaugcccaccaccaucgccaagaacaccgucaagagcgugggcaaguucugccuggaggccagcuucaacuaccucaagucccccaacuucagcaagcugaucaacaucaucaucugguuccugcuccuguccgugugccugggcagccucaucuacuccacggccgcgcuggggguccugaugagcaaccucggcaugccguccuacugcaccggguaccgggagggcuaccugaacagcaccaacgugaccaucgccacguacugcaccggcuccauccccugcagcgugugccuguccgggcucgacagccuggacaccuaccccucccuggagaccauccagaucacgaucagcuccuucaagugggaccucaccgccuucggccuggucgccgagugguuccuggccuacauccucuucacccgcuucuucuacgugcuggggcuggcggccaucaugcagcucuucuucagcuacuucgccgugcacuucaucuccaacagcuggcugauguggcugaucaucaaccugguccagauggcccccaucuccgcgauggugcggauguacaucuucuucgccagcuucuacuacguguggaagagcuacguccacgugguggacggcugcaacuccagcaccugcaugaugugcuacaagcgcaaccgggccacgcgcgucgagugcaccaccaucgugaacgggguccggcgcuccuucuacguguacgccaacggcggcaagggguucugcaagcuccacaacuggaacugcgugaacugcgacaccuucugcgccggcagcacguucaucuccgacgaggucgcgcgggaccugagccugcaguucaagcgcccgaucaaccccaccgaccaguccagcuacaucguggacuccgugaccgucaagaacgggagcauccaccucuacuucgacaaggccggccagaagaccuacgagcggcacucccugagccacuucgugaaccuggacaaccuccgcgccaacaacacgaaggggucccugcccaucaacgugaucgucuucgacggcaagagcaagugcgaggaguccagcgccaaguccgccagcguguacuacucccagcugaugugccagcccauccuccugcuggaccaggcgcucgugagcgacgucggcgacagcgccgagguggccgugaagauguucgacgccuacgucaacaccuucuccagcaccuucaacgugccgauggagaagcugaagacccugguggccacggcggaggccgagcucgccaagaacgucucccuggacaacgugcugagcaccuucaucuccgccgcgcggcagggguucguggacagcgacgucgagaccaaggacgugguggagugccucaagcugucccaccagagcgacaucgaggucaccggcgacuccugcaacaacuacaugcugacguacaacaagguggagaacaugaccccccgcgaccucggggccugcaucgacugcagcgcccggcacaucaacgcccagguggccaagucccacaacaucgcgcugaucuggaacgucaaggacuucaugagccuguccgagcagcuccgcaagcagauccgcagcgccgccaagaagaacaaccugcccuucaagcugaccugcgccaccacgcggcagguggugaacgucgugaccaccaagaucgcccucaagggcgggugaggacuagucccuguucccagagcccacuuuuuuuucuuuuuuugaaauaaaauagccugucuuucagaucucaaaggcucuuuucagagccaccaaaaaaaaaaaaaaaaaaaaaaaaaaaaaaaaaaaaaaaaaaaaaaaaaaaaaaaaaaaaaaaaaaaaaaaaaaaaaaaaaaaaaaaaaaaaaaaaaaaaa

SEQ ID NO: 19825 - RNA, 6113 nt, Artificial Sequence
  SARS-CoV-2__MT762398.1__non-structural protein 3 (NSP3) mRNA gc
aggagagucccgcagucggcguccagcggcucugcuuguucgugugugugucguugcaggccuuauucaagcuuaccauggcccccaccaaggugaccuucggcgacgacacggucaucgaggugcagggguacaagagcgugaacaucaccuucgagcuggacgagcgcaucgacaagguccucaacgagaagugcuccgccuacaccguggagcugggcaccgaggugaacgaguucgcgugcgucguggccgacgccgugaucaagacgcugcagccggucagcgagcuccugacccugcucgggaucgaccuggacgagugguccauggccaccuacuaccuguucgacgagagcggcgaguucaagcucgccucccacauguacugcagcuucuacccccccgacgaggacgaggaggagggggacugcgaggaggaggaguucgagcccuccacccaguacgaguacggcacggaggacgacuaccagggcaagccgcuggaguucggggcgaccagcgccgcccugcagcccgaggaggagcaggaggaggacuggcucgacgacgacucccagcagaccgugggccagcaggacgggagcgaggacaaccagaccacgaccauccagaccaucguggagguccagccccagcuggagauggagcugacccccguggugcagacgaucgaggucaacuccuucagcggcuaccucaagcugaccgacaacguguacaucaagaacgccgacaucguggaggaggcgaagaaggucaagccgaccgugguggucaacgccgccaacguguaccugaagcacgggggcggcguggccggggcccucaacaaggcgaccaacaacgccaugcaggucgaguccgacgacuacaucgccacgaacggcccccugaagguggggggcagcugcguccuguccggccacaaccucgccaagcacugccugcacgugguggggcccaacgucaacaagggcgaggacauccagcugcucaagagcgccuacgagaacuucaaccagcacgaggugcugcuggcgccccuccuguccgccgggaucuucggcgccgacccgauccacagccugcgggugugcgucgacaccgugcgcaccaacguguaccucgccgucuucgacaagaaccuguacgacaagcugguguccagcuuccucgagaugaagagcgagaagcagguggagcagaagaucgccgagauccccaaggaggaggucaagcccuucaucaccgaguccaagcccagcguggagcagcggaagcaggacgacaagaagaucaaggcgugcguggaggaggucacgaccacccuggaggagaccaaguuccugacggagaaccuccugcuguacaucgacaucaacgggaaccuccacccggacuccgccacccuggugagcgacaucgacaucaccuuccugaagaaggacgcccccuacaucgugggcgacgucgugcaggagggcgugcucaccgccgucgugauccccacgaagaaggccgggggcaccaccgagaugcuggcgaaggcccugcgcaaggugcccaccgacaacuacaucacgaccuacccggggcagggccucaacggguacaccgucgaggaggccaagaccgugcugaagaagugcaaguccgccuucuacauccugcccagcaucaucuccaacgagaagcaggagauccucggcaccgugagcuggaaccugcgggagaugcuggcgcacgccgaggagacgcgcaagcugaugcccgucugcguggagaccaaggccaucguguccaccauccagcggaaguacaagggcaucaagauccaggagggggucguggacuacggcgcccgcuucuacuucuacaccagcaagacgaccguggccucccucaucaacacccugaacgaccugaacgagacccucgucacgaugccccugggguacgugacccacggccugaaccucgaggaggcggcccgguacaugcgcagccugaaggugccggccaccgucuccgugagcucccccgacgccgugaccgccuacaacggguaccugacgagcuccagcaagacccccgaggagcacuucaucgagaccaucucccucgcgggcagcuacaaggacuggagcuacuccggccagagcacccagcuggggaucgaguuccugaagcggggcgacaaguccgucuacuacacgagcaaccccaccaccuuccaccucgacggggaggugaucaccuucgacaaccugaagacgcugcucucccugcgcgaggugcggaccaucaaggucuucaccaccguggacaacaucaaccugcacacgcagguggucgacaugagcaugaccuacggccagcaguucggcccgaccuaccucgacggggccgacgugaccaagaucaagccccacaacucccacgagggcaagacguucuacgugcugcccaacgacgacacccugcgcgucgaggccuucgaguacuaccacaccaccgacccgagcuuccucgggcgguacauguccgcccugaaccacacgaagaaguggaaguacccccaggugaacggccugaccagcaucaagugggccgacaacaacugcuaccucgcgaccgcccugcugacccuccagcagaucgagcugaaguucaacccccccgcccugcaggacgccuacuaccgcgcgcgggccggggaggccgccaacuucugcgcccucauccuggcguacugcaacaagacggugggcgagcugggcgacguccgcgagaccauguccuaccucuuccagcacgccaaccuggacagcugcaagcgggugcugaacgucgugugcaagaccugcgggcagcagcagaccacccucaagggcguggaggccgucauguacauggggacgcuguccuacgagcaguucaagaagggcgugcagaucccgugcaccugcgggaagcaggccaccaaguaccuggugcagcaggagagccccuucgucaugauguccgccccccccgcgcaguacgagcucaagcacggcaccuucacgugcgccagcgaguacaccggcaacuaccagugcgggcacuacaagcacaucaccuccaaggagacccuguacugcaucgacggcgcccugcucacgaagagcagcgaguacaaggggccgaucaccgacguguucuacaaggagaacuccuacaccaccacgaucaagcccgugaccuacaagcuggacggcgucgugugcaccgagaucgaccccaagcuggacaacuacuacaagaaggacaacagcuacuucaccgagcagcccaucgaccucgugccgaaccagcccuaccccaacgccuccuucgacaacuucaaguucgucugcgacaacaucaaguucgccgacgaccugaaccagcugacgggguacaagaagcccgcgagccgcgagcucaaggugaccuucuucccggaccugaacggcgacguggucgccaucgacuacaagcacuacacccccuccuucaagaagggcgccaagcugcuccacaagcccaucguguggcacgugaacaacgccaccaacaaggcgacguacaagcccaacaccuggugcauccggugccuguggagcaccaagccggucgagaccuccaacagcuucgacgugcugaaguccgaggacgcccaggggauggacaaccucgccugcgaggaccugaagcccgugagcgaggaggucguggagaaccccacgauccagaaggacgugcuggagugcaacgucaagaccaccgagguggugggcgacaucauccucaagcccgccaacaacucccugaagaucaccgaggaggucgggcacacggaccugauggccgcguacguggacaacagcucccucaccaucaagaagccgaacgagcugagccgcgugcugggccucaagacccuggccacccacgggcuggccgccgucaacuccgugcccugggacacgaucgccaacuacgcgaagcccuuccucaacaagguggucagcaccaccaccaacaucgugacgcgcugccugaaccgggugugcaccaacuacaugccguacuucuucacccugcuccugcagcugugcaccuucacccgcuccacgaacagccggaucaaggccuccaugcccaccaccaucgccaagaacaccgucaagagcgugggcaaguucugccucgaggccagcuucaacuaccugaagucccccaacuucagcaagcugaucaacaucaucaucugguuccuccugcuguccgugugccucggcagccugaucuacuccacggccgcgcuggggguccucaugagcaaccugggcaugcccuccuacugcaccggguaccgcgagggcuaccugaacagcaccaacgugaccaucgccacguacugcaccggcuccaucccgugcagcgugugccucuccgggcuggacagccuggacaccuaccccucccucgagaccauccagaucacgaucagcuccuucaagugggaccugaccgccuucggccuggucgccgagugguuccucgccuacauccuguucacccgguucuucuacgugcuggggcucgcggccaucaugcagcuguucuucagcuacuucgccgugcacuucaucuccaacagcuggcugauguggcugaucaucaaccucguccagauggcccccaucuccgcgauggugcgcauguacaucuucuucgccagcuucuacuacguguggaagagcuacguccacgugguggacggcugcaacuccagcaccugcaugaugugcuacaagcggaaccgcgccacgcgggucgagugcaccaccaucgugaacgggguccgccgguccuucuacguguacgccaacggcggcaagggguucugcaagcugcacaacuggaacugcgugaacugcgacaccuucugcgccggcagcacguucaucuccgacgaggucgcgcgcgaccugagccuccaguucaagcggcccaucaacccgaccgaccaguccagcuacaucguggacuccgugaccgucaagaacgggagcauccaccuguacuucgacaaggccggccagaagaccuacgagcgccacucccugagccacuucgugaaccucgacaaccugcgggccaacaacacgaaggggucccugcccaucaacgugaucgucuucgacggcaagagcaagugcgaggaguccagcgccaaguccgccagcguguacuacucccagcucaugugccagcccauccugcugcucgaccaggcgcuggugagcgacgucggcgacagcgccgagguggccgugaagauguucgacgccuacgucaacaccuucuccagcaccuucaacgugcccauggagaagcugaagacccucguggccacggcggaggccgagcuggccaagaacgucucccuggacaacgugcucagcaccuucaucuccgccgcgcgccagggguucguggacagcgacgucgagaccaaggacgugguggagugccugaagcugucccaccagagcgacaucgaggucaccggcgacuccugcaacaacuacaugcucacguacaacaagguggagaacaugaccccgcgggaccugggggccugcaucgacugcagcgcccgccacaucaacgcccagguggccaagucccacaacaucgcgcugaucuggaacgucaaggacuucaugagccucuccgagcagcugcggaagcagauccgcagcgccgccaagaagaacaaccugcccuucaagcucaccugcgccaccacgcgccagguggugaacgucgugaccaccaagaucgcccugaagggcgggugaggacuagucccuguucccagagcccacuuuuuuuucuuuuuuugaaauaaaauagccugucuuucagaucucaaaggcucuuuucagagccaccaaaaaaaaaaaaaaaaaaaaaaaaaaaaaaaaaaaaaaaaaaaaaaaaaaaaaaaaaaaaaaaaaaaaaaaaaaaaaaaaaaaaaaaaaaaaaaaaaaaaa

SEQ ID NO: 19826 - RNA, 6113 nt, Artificial Sequence
  SARS-CoV-2__MT764179.1__non-structural protein 3 (NSP3) mRNA gc
aggagagucccgcagucggcguccagcggcucugcuuguucgugugugugucguugcaggccuuauucaagcuuaccauggcccccaccaaggugaccuucggcgacgacacggucaucgaggugcagggguacaagagcgugaacaucaccuucgagcuggacgagcgcaucgacaagguccucaacgagaagugcuccgccuacaccguggagcugggcaccgaggugaacgaguucgcgugcgucguggccgacgccgugaucaagacgcugcagccggucagcgagcuccugaccccccuggggaucgaccucgacgagugguccauggccaccuacuaccuguucgacgagagcggcgaguucaagcuggccucccacauguacugcagcuucuacccccccgacgaggacgaggaggagggggacugcgaggaggaggaguucgagccguccacccaguacgaguacggcacggaggacgacuaccagggcaagccccucgaguucggggcgaccagcgccgcccugcagcuggaggaggagcaggaggaggacuggcucgacgacgacucccagcagaccgugggccagcaggacgggagcgaggacaaccagaccacgaccauccagaccaucguggagguccagccccagcuggagauggagcugacccccguggugcagacgaucgaggucaacuccuucagcggcuaccucaagcugaccgacaacguguacaucaagaacgccgacaucguggaggaggcgaagaaggucaagccgaccgugguggucaacgccgccaacguguaccugaagcacgggggcggcguggccggggcccucaacaaggcgaccaacaacgccaugcaggucgaguccgacgacuacaucgccacgaacggcccccugaagguggggggcagcugcguccuguccggccacaaccucgccaagcacugccugcacgugguggggcccaacgucaacaagggcgaggacauccagcugcucaagagcgccuacgagaacuucaaccagcacgaggugcugcuggcgccccuccuguccgccgggaucuucggcgccgacccgauccacagccugcgggugugcgucgacaccgugcgcaccaacguguaccucgccgucuucgacaagaaccuguacgacaagcugguguccagcuuccucgagaugaagagcgagaagcagguggagcagaagaucgccgagauccccaaggaggaggucaagcccuucaucaccgaguccaagcccagcguggagcagcggaagcaggacgacaagaagaucaaggcgugcguggaggaggucacgaccacccuggaggagaccaaguuccugacggagaaccuccugcuguacaucgacaucaacgggaaccuccacccggacuccgccacccuggugagcgacaucgacaucaccuuccugaagaaggacgcccccuacaucgugggcgacgucgugcaggagggcgugcucaccgccgucgugauccccacgaagaaggccgggggcaccaccgagaugcuggcgaaggcccugcgcaaggugcccaccgacaacuacaucacgaccuacccggggcagggccucaacggguacaccgucgaggaggccaagaccgugcugaagaagugcaaguccgccuucuacauccugcccagcaucaucuccaacgagaagcaggagauccucggcaccgugagcuggaaccugcgggagaugcuggcgcacgccgaggagacgcgcaagcugaugcccgucugcguggagaccaaggccaucguguccaccauccagcggaaguacaagggcaucaagauccaggagggggucguggacuacggcgcccgcuucuacuucuacaccagcaagacgaccguggccucccucaucaacacccugaacgaccugaacgagacccucgucacgaugccccugggguacgugacccacggccugaaccucgaggaggcggcccgguacaugcgcagccugaaggugccggccaccgucuccgugagcucccccgacgccgugaccgccuacaacggguaccugacgagcuccagcaagacccccgaggagcacuucaucgagaccaucucccucgcgggcagcuacaaggacuggagcuacuccggccagagcacccagcuggggaucgaguuccugaagcggggcgacaaguccgucuacuacacgagcaaccccaccaccuuccaccucgacggggaggugaucaccuucgacaaccugaagacgcugcucucccugcgcgaggugcggaccaucaaggucuucaccaccguggacaacaucaaccugcacacgcagguggucgacaugagcaugaccuacggccagcaguucggcccgaccuaccucgacggguccgacgugaccaagaucaagccccacaacagccacgagggcaagacguucuacgugcugcccaacgacgacacccugcgcgucgaggccuucgaguacuaccacaccaccgacccguccuuccucgggcgguacaugagcgcccugaaccacacgaagaaguggaaguacccccaggugaacggccugaccuccaucaagugggccgacaacaacugcuaccucgccaccgcgcugcugacccuccagcagaucgagcugaaguucaacccccccgcccugcaggacgccuacuaccgcgcccgggcgggggaggccgccaacuucugcgcccucauccuggccuacugcaacaagacggugggcgagcugggcgacguccgcgagaccaugagcuaccucuuccagcacgcgaaccuggacuccugcaagcgggugcugaacgucgugugcaagaccugcgggcagcagcagaccacccucaagggcguggaggccgucauguacauggggacgcugagcuacgagcaguucaagaagggcgugcagaucccgugcaccugcgggaagcaggccaccaaguaccuggugcagcaggagucccccuucgucaugaugagcgccccccccgcccaguacgagcucaagcacggcaccuucacgugcgcguccgaguacaccggcaacuaccagugcgggcacuacaagcacaucaccagcaaggagacccuguacugcaucgacggcgcccugcucacgaagagcuccgaguacaaggggccgaucaccgacguguucuacaaggagaacagcuacaccaccacgaucaagcccgugaccuacaagcuggacggcgucgugugcaccgagaucgaccccaagcuggacaacuacuacaagaaggacaacuccuacuucaccgagcagcccaucgaccucgugccgaaccagcccuaccccaacgccagcuucgacaacuucaaguucgucugcgacaacaucaaguucgccgacgaccugaaccagcugacgggguacaagaagcccgccucccgcgagcucaaggugaccuucuucccggaccugaacggcgacguggucgcgaucgacuacaagcacuacacccccagcuucaagaagggcgccaagcugcuccacaagcccaucguguggcacgugaacaacgccaccaacaaggccacguacaagcccaacaccuggugcauccggugccugugguccaccaagccggucgagaccagcaacuccuucgacgugcugaagagcgaggacgcgcaggggauggacaaccucgccugcgaggaccugaagcccguguccgaggaggucguggagaaccccacgauccagaaggacgugcuggagugcaacgucaagaccaccgagguggugggcgacaucauccucaagcccgccaacaacagccugaagaucaccgaggaggucgggcacacggaccugauggccgccuacguggacaacuccagccucaccaucaagaagccgaacgagcugucccgcgugcugggccucaagacccuggcgacccacgggcuggccgccgucaacagcgugcccugggacacgaucgccaacuacgccaagcccuuccucaacaagguggucuccaccaccaccaacaucgugacgcgcugccugaaccgggugugcaccaacuacaugccguacuucuucacccugcuccugcagcugugcaccuucacccgcagcacgaacucccggaucaaggcgagcaugcccaccaccaucgccaagaacaccgucaagagcgugggcaaguucugccucgaggccuccuucaacuaccugaagagccccaacuucuccaagcugaucaacaucaucaucugguuccuccugcugagcgugugccucggcucccugaucuacagcacggccgcccuggggguccucauguccaaccugggcaugcccagcuacugcaccggguaccgcgagggcuaccugaacuccaccaacgugaccaucgcgacguacugcaccggcagcaucccgugcuccgugugccucagcgggcuggacucccuggacaccuaccccagccucgagaccauccagaucacgaucuccagcuucaagugggaccugaccgccuucggccuggucgccgagugguuccucgccuacauccuguucacccgguucuucuacgugcuggggcucgccgcgaucaugcagcuguucuucuccuacuucgccgugcacuucaucagcaacuccuggcugauguggcugaucaucaaccucguccagauggcccccaucagcgccauggugcgcauguacaucuucuucgcgagcuucuacuacguguggaaguccuacguccacgugguggacggcugcaacagcuccaccugcaugaugugcuacaagcggaaccgcgccacgcgggucgagugcaccaccaucgugaacgggguccgccggagcuucuacguguacgccaacggcggcaagggguucugcaagcugcacaacuggaacugcgugaacugcgacaccuucugcgccggcuccacguucaucagcgacgaggucgcccgcgaccugucccuccaguucaagcggcccaucaacccgaccgaccagagcuccuacaucguggacagcgugaccgucaagaacggguccauccaccuguacuucgacaaggcgggccagaagaccuacgagcgccacagccugucccacuucgugaaccucgacaaccugcgggccaacaacacgaaggggagccugcccaucaacgugaucgucuucgacggcaaguccaagugcgaggagagcuccgccaagagcgccuccguguacuacagccagcucaugugccagcccauccugcugcucgaccaggcccuggugagcgacgucggcgacuccgcggagguggccgugaagauguucgacgccuacgucaacaccuucagcuccaccuucaacgugcccauggagaagcugaagacccucguggccacggccgaggcggagcuggccaagaacgucagccuggacaacgugcucuccaccuucaucagcgccgcccgccagggguucguggacuccgacgucgagaccaaggacgugguggagugccugaagcugagccaccaguccgacaucgaggucaccggcgacagcugcaacaacuacaugcucacguacaacaagguggagaacaugaccccgcgggaccugggggcgugcaucgacugcuccgcccgccacaucaacgcccagguggccaagagccacaacaucgcccugaucuggaacgucaaggacuucaugucccucagcgagcagcugcggaagcagauccgcuccgcggccaagaagaacaaccugcccuucaagcucaccugcgccaccacgcgccagguggugaacgucgugaccaccaagaucgcccugaagggcgggugaggacuagucccuguucccagagcccacuuuuuuuucuuuuuuugaaauaaaauagccugucuuucagaucucaaaggcucuuuucagagccaccaaaaaaaaaaaaaaaaaaaaaaaaaaaaaaaaaaaaaaaaaaaaaaaaaaaaaaaaaaaaaaaaaaaaaaaaaaaaaaaaaaaaaaaaaaaaaaaaaaaaa

SEQ ID NO: 19827 - RNA, 6113 nt, Artificial Sequence
  SARS-CoV-2__MT755602.1__non-structural protein 3 (NSP3) mRNA gc
aggagagucccgcagucggcguccagcggcucugcuuguucgugugugugucguugcaggccuuauucaagcuuaccauggcccccaccaaggugaccuucggcgacgacacggucaucgaggugcagggguacaagagcgugaacaucaccuucgagcuggacgagcgcaucgacaagguccucaacgagaagugcuccgccuacaccguggagcugggcaccgaggugaacgaguucgcgugcgucguggccgacgccgugaucaagacgcugcagccggucagcgagcuccugaccccccuggggaucgaccucgacgagugguccauggccaccuacuaccuguucgacgagagcggcgaguucaagcuggccucccacauguacugcagcuucuacccccccgacgaggacgaggaggagggggacugcgaggaggaggaguucgagccguccacccaguacgaguacggcacggaggacgacuaccagggcaagccccucgaguucggggcgaccagcgccgcccugcagcccgaggaggagcaggaggaggacuggcuggacgacgacucccagcagaccgugggccagcaggacgggagcgaggacaaccagaccacgaccauccagaccaucguggagguccagccccagcucgagauggagcugaccccgguggugcagacgaucgaggucaacuccuucagcggcuaccugaagcucaccgacaacguguacaucaagaacgccgacaucguggaggaggcgaagaaggucaagcccaccgugguggucaacgccgccaacguguaccugaagcacgggggcggcguggccggggcccugaacaaggcgaccaacaacgccaugcaggucgaguccgacgacuacaucgccacgaacggcccccucaagguggggggcagcugcguccuguccggccacaaccuggccaagcacugccuccacgugguggggcccaacgucaacaagggcgaggacauccagcugcugaagagcgccuacgagaacuucaaccagcacgaggugcuccuggcgccgcugcucuccgccgggaucuucggcgccgaccccauccacagccugcgggugugcgucgacaccgugcgcaccaacguguaccuggccgucuucgacaagaaccucuacgacaagcugguguccagcuuccuggagaugaagagcgagaagcagguggagcagaagaucgccgagauccccaaggaggaggucaagcccuucaucaccgaguccaagccgagcguggagcagcggaagcaggacgacaagaagaucaaggcgugcguggaggaggucacgaccacccucgaggagaccaaguuccugacggagaaccugcuccuguacaucgacaucaacgggaaccugcaccccgacuccgccacccucgugagcgacaucgacaucaccuuccugaagaaggacgcccccuacaucgugggcgacgucgugcaggagggcgugcugaccgccgucgugauccccacgaagaaggccgggggcaccaccgagaugcucgcgaaggcccugcgcaaggugccgaccgacaacuacaucacgaccuaccccgggcagggccugaacggguacaccgucgaggaggccaagaccgugcucaagaagugcaaguccgccuucuacauccugcccagcaucaucuccaacgagaagcaggagauccugggcaccgugagcuggaaccuccgggagaugcuggcgcacgccgaggagacgcgcaagcugaugcccgucugcguggagaccaaggccaucguguccaccauccagcggaaguacaagggcaucaagauccaggagggggucguggacuacggcgcccgcuucuacuucuacaccagcaagacgaccguggccucccugaucaacacccucaacgaccugaacgagacccuggucacgaugccgcucggguacgugacccacggccugaaccuggaggaggcggcccgguacaugcgcagccucaaggugcccgccaccgucuccgugagcucccccgacgccgugaccgccuacaacggguaccugacgagcuccagcaagacccccgaggagcacuucaucgagaccaucucccuggcgggcagcuacaaggacuggagcuacuccggccagagcacccagcucgggaucgaguuccugaagcggggcgacaaguccgucuacuacacgagcaacccgaccaccuuccaccuggacggggaggugaucaccuucgacaaccucaagacgcugcugucccuccgcgaggugcggaccaucaaggucuucaccaccguggacaacaucaaccugcacacgcagguggucgacaugagcaugaccuacggccagcaguucggccccaccuaccuggacggggccgacgugaccaagaucaagccccacaacucccacgagggcaagacguucuacgugcucccgaacgacgacacccugcgcgucgaggccuucgaguacuaccacaccaccgaccccagcuuccuggggcgguacauguccgcccucaaccacacgaagaaguggaaguacccccaggugaacggccugaccagcaucaagugggccgacaacaacugcuaccuggcgaccgcccuccugacccugcagcagaucgagcucaaguucaaccccccggcccugcaggacgccuacuaccgcgcgcgggccggggaggccgccaacuucugcgcccugauccucgcguacugcaacaagacggugggcgagcugggcgacguccgcgagaccauguccuaccuguuccagcacgccaaccucgacagcugcaagcgggugcugaacgucgugugcaagaccugcgggcagcagcagaccacccugaagggcguggaggccgucauguacauggggacgcucuccuacgagcaguucaagaagggcgugcagauccccugcaccugcgggaagcaggccaccaaguaccuggugcagcaggagagccccuucgucaugauguccgcccccccggcgcaguacgagcugaagcacggcaccuucacgugcgccagcgaguacaccggcaacuaccagugcgggcacuacaagcacaucaccuccaaggagacccucuacugcaucgacggcgcccugcugacgaagagcagcgaguacaaggggcccaucaccgacguguucuacaaggagaacuccuacaccaccacgaucaagcccgugaccuacaagcucgacggcgucgugugcaccgagaucgaccccaagcuggacaacuacuacaagaaggacaacagcuacuucaccgagcagccgaucgaccuggugcccaaccagcccuaccccaacgccuccuucgacaacuucaaguucgucugcgacaacaucaaguucgccgacgaccucaaccagcugacgggguacaagaagccggcgagccgcgagcugaaggugaccuucuuccccgaccucaacggcgacguggucgccaucgacuacaagcacuacacccccuccuucaagaagggcgccaagcugcugcacaagcccaucguguggcacgugaacaacgccaccaacaaggcgacguacaagccgaacaccuggugcauccggugccucuggagcaccaagcccgucgagaccuccaacagcuucgacgugcugaaguccgaggacgcccaggggauggacaaccuggccugcgaggaccucaagcccgugagcgaggaggucguggagaaccccacgauccagaagaacgugcuggagugcaacgucaagaccaccgagguggugggcgacaucauccugaagccggccaacaacucccucaagaucaccgaggaggucgggcacacggaccugauggccgcguacguggacaacagcucccugaccaucaagaagcccaacgagcucagccgcgugcugggccugaagacccucgccacccacgggcuggccgccgucaacuccgugcccugggacacgaucgccaacuacgcgaagccguuccugaacaagguggucagcaccaccaccaacaucgugacgcgcugccucaaccgggugugcaccaacuacaugcccuacuucuucacccugcugcuccagcugugcaccuucacccgcuccacgaacagccggaucaaggccuccaugcccaccaccaucgccaagaacaccgucaagagcgugggcaaguucugccuggaggccagcuucaacuaccucaagucccccaacuucagcaagcugaucaacaucaucaucugguuccugcuccuguccgugugccugggcagccucaucuacuccacggccgcgcuggggguccugaugagcaaccucggcaugccguccuacugcaccggguaccgcgagggcuaccugaacagcaccaacgugaccaucgccacguacugcaccggcuccauccccugcagcgugugccuguccgggcucgacagccuggacaccuaccccucccuggagaccauccagaucacgaucagcuccuucaagugggaccucaccgccuucggccuggucgccgagugguuccuggccuacauccucuucacccgguucuucuacgugcuggggcuggcggccaucaugcagcucuucuucagcuacuucgccgugcacuucaucuccaacagcuggcugauguggcugaucaucaaccugguccagauggcccccaucuccgcgauggugcgcauguacaucuucuucgccagcuucuacuacguguggaagagcuacguccacgugguggacggcugcaacuccagcaccugcaugaugugcuacaagcggaaccgcgccacgcgggucgagugcaccaccaucgugaacgggguccgccgguccuucuacguguacgccaacggcggcaagggguucugcaagcuccacaacuggaacugcgugaacugcgacaccuucugcgccggcagcacguucaucuccgacgaggucgcgcgcgaccugagccugcaguucaagcggccgaucaaccccaccgaccaguccagcuacaucguggacuccgugaccgucaagaacgggagcauccaccucuacuucgacaaggccggccagaagaccuacgagcgccacucccugagccacuucgugaaccuggacaaccuccgggccaacaacacgaaggggucccugcccaucaacgugaucgucuucgacggcaagagcaagugcgaggaguccagcgccaaguccgccagcguguacuacucccagcugaugugccagcccauccuccugcuggaccaggcgcucgugagcgacgucggcgacagcgccgagguggccgugaagauguucgacgccuacgucaacaccuucuccagcaccuucaacgugccgauggagaagcugaagacccugguggccacggcggaggccgagcucgccaagaacgucucccuggacaacgugcugagcaccuucaucuccgccgcgcgccagggguucguggacagcgacgucgagaccaaggacgugguggagugccucaagcugucccaccagagcgacaucgaggucaccggcgacuccugcaacaacuacaugcugacguacaacaagguggagaacaugaccccccgggaccucggggccugcaucgacugcagcgcccgccacaucaacgcccagguggccaagucccacaacaucgcgcugaucuggaacgucaaggacuucaugagccuguccgagcagcuccggaagcagauccgcagcgccgccaagaagaacaaccugcccuucaagcugaccugcgccaccacgcgccagguggugaacgucgugaccaccaagaucgcccucaagggcgggugaggacuagucccuguucccagagcccacuuuuuuuucuuuuuuugaaauaaaauagccugucuuucagaucucaaaggcucuuuucagagccaccaaaaaaaaaaaaaaaaaaaaaaaaaaaaaaaaaaaaaaaaaaaaaaaaaaaaaaaaaaaaaaaaaaaaaaaaaaaaaaaaaaaaaaaaaaaaaaaaaaaaa

SEQ ID NO: 19828 - RNA, 6113 nt, Artificial Sequence
  SARS-CoV-2__MT755830.1__non-structural protein 3 (NSP3) mRNA gc
aggagagucccgcagucggcguccagcggcucugcuuguucgugugugugucguugcaggccuuauucaagcuuaccauggcccccaccaaggugaccuucggcgacgacacggucaucgaggugcagggguacaagagcgugaacaucaccuucgagcuggacgagcgcaucgacaagguccucaacgagaagugcuccgccuacaccguggagcugggcaccgagguggacgaguucgcgugcgucguggccgacgccgugaucaagacgcugcagccggucagcgagcuccugaccccccuggggaucgaccucgacgagugguccauggccaccuacuaccuguucgacgagagcggcgaguucaagcuggccucccacauguacugcagcuucuacccccccgacgaggacgaggaggagggggacugcgaggaggaggaguucgagccguccacccaguacgaguacggcacggaggacgacuaccagggcaagccccucgaguucggggcgaccagcgccgcccugcagcccgaggaggagcaggaggaggacuggcuggacgacgacucccagcagaccgugggccagcaggacgggagcgaggacaaccagaccacgaccauccagaccaucguggagguccagccccagcucgagauggagcugaccccgguggugcagacgaucgaggucaacuccuucagcggcuaccugaagcucaccgacaacguguacaucaagaacgccgacaucguggaggaggcgaagaaggucaagcccaccgugguggucaacgccgccaacguguaccugaagcacgggggcggcguggccggggcccugaacaaggcgaccaacaacgccaugcaggucgaguccgacgacuacaucgccacgaacggcccccucaagguggggggcagcugcguccuguccggccacaaccuggccaagcacugccuccacgugguggggcccaacgucaacaagggcgaggacauccagcugcugaagagcgccuacgagaacuucaaccagcacgaggugcuccuggcgccgcugcucuccgccgggaucuucggcgccgaccccauccacagccugcgggugugcgucgacaccgugcgcaccaacguguaccuggccgucuucgacaagaaccucuacgacaagcugguguccagcuuccuggagaugaagagcgagaagcagguggagcagaagaucgccgagauccccaaggaggaggucaagcccuucaucaccgaguccaagccgagcguggagcagcggaagcaggacgacaagaagaucaaggcgugcguggaggaggucacgaccacccucgaggagaccaaguuccugacggagaaccugcuccuguacaucgacaucaacgggaaccugcaccccgacuccgccacccucgugagcgacaucgacaucaccuuccugaagaaggacgcccccuacaucgugggcgacgucgugcaggagggcgugcugaccgccgucgugauccccacgaagaaggccgggggcaccaccgagaugcucgcgaaggcccugcgcaaggugccgaccgacaacuacaucacgaccuaccccgggcagggccugaacggguacaccgucgaggaggccaagaccgugcucaagaagugcaaguccgccuucuacauccugcccagcaucaucuccaacgagaagcaggagauccugggcaccgugagcuggaaccuccgggagaugcuggcgcacgccgaggagacgcgcaagcugaugcccgucugcguggagaccaaggccaucguguccaccauccagcggaaguacaagggcaucaagauccaggagggggucguggacuacggcgcccgcuucuacuucuacaccagcaagacgaccguggccucccugaucaacacccucaacgaccugaacgagacccuggucacgaugccgcucggguacgugacccacggccugaaccuggaggaggcggcccgguacaugcgcagccucaaggugcccgccaccgucuccgugagcucccccgacgccgugaccgccuacaacggguaccugacgagcuccagcaagacccccgaggagcacuucaucgagaccaucucccuggcgggcagcuacaaggacuggagcuacuccggccagagcacccagcucgggaucgaguuccugaagcggggcgacaaguccgucuacuacacgagcaacccgaccaccuuccaccuggacggggaggugaucaccuucgacaaccucaagacgcugcugucccuccgcgaggugcggaccaucaaggucuucaccaccguggacaacaucaaccugcacacgcagguggucgacaugagcaugaccuacggccagcaguucggccccaccuaccuggacggggccgacgugaccaagaucaagccccacaacucccacgagggcaagacguucuacgugcucccgaacgacgacacccugcgcgucgaggccuucgaguacuaccacaccaccgaccccagcuuccuggggcgguacauguccgcccucaaccacacgaagaaguggaaguacccccaggugaacggccugaccagcaucaagugggccgacaacaacugcuaccuggcgaccgcccuccugacccugcagcagaucgagcucaaguucaaccccccggcccugcaggacgccuacuaccgcgcgcgggccggggaggccgccaacuucugcgcccugauccucgcguacugcaacaagacggugggcgagcugggcgacguccgcgagaccauguccuaccuguuccagcacgccaaccucgacagcugcaagcgggugcugaacgucgugugcaagaccugcgggcagcagcagaccacccugaagggcguggaggccgucauguacauggggacgcucuccuacgagcaguucaagaagggcgugcagauccccugcaccugcgggaagcaggccaccaaguaccuggugcagcaggagagccccuucgucaugauguccgcccccccggcgcaguacgagcugaagcacggcaccuucacgugcgccagcgaguacaccggcaacuaccagugcgggcacuacaagcacaucaccuccaaggagacccucuacugcaucgacggcgcccugcugacgaagagcagcgaguacaaggggcccaucaccgacguguucuacaaggagaacuccuacaccaccacgaucaagcccgugaccuacaagcucgacggcgucgugugcaccgagaucgaccccaagcuggacaacuacuacaagaaggacaacagcuacuucaccgagcagccgaucgaccuggugcccaaccagcccuaccccaacgccuccuucgacaacuucaaguucgucugcgacaacaucaaguucgccgacgaccucaaccagcugacgggguacaagaagccggcgagccgcgagcugaaggugaccuucuuccccgaccucaacggcgacguggucgccaucgacuacaagcacuacacccccuccuucaagaagggcgccaagcugcugcacaagcccaucguguggcacgugaacaacgccaccaacaaggcgacguacaagccgaacaccuggugcauccggugccucuggagcaccaagcccgucgagaccuccaacagcuucgacgugcugaaguccgaggacgcccaggggauggacaaccuggccugcgaggaccucaagcccgugagcgaggaggucguggagaaccccacgauccagaaggacgugcuggagugcaacgucaagaccaccgagguggugggcgacaucauccugaagccggccaacaacucccucaagaucaccgaggaggucgggcacacggaccugauggccgcguacguggacaacagcucccugaccaucaagaagcccaacgagcucagccgcgugcugggccugaagacccucgccacccacgggcuggccgccgucaacuccgugcccugggacacgaucgccaacuacgcgaagccguuccugaacaagguggucagcaccaccaccaacaucgugacgcgcugccucaaccgggugugcaccaacuacaugcccuacuucuucacccugcugcuccagcugugcaccuucacccgcuccacgaacagccggaucaaggccuccaugcccaccaccaucgccaagaacaccgucaagagcgugggcaaguucugccuggaggccagcuucaacuaccucaagucccccaacuucagcaagcugaucaacaucaucaucugguuccugcuccuguccgugugccugggcagccucaucuacuccacggccgcgcuggggguccugaugagcaaccucggcaugccguccuacugcaccggguaccgcgagggcuaccugaacagcaccaacgugaccaucgccacguacugcaccggcuccauccccugcagcgugugccuguccgggcucgacagccuggacaccuaccccucccuggagaccauccagaucacgaucagcuccuucaagugggaccucaccgccuucggccuggucgccgagugguuccuggccuacauccucuucacccgguucuucuacgugcuggggcuggcggccaucaugcagcucuucuucagcuacuucgccgugcacuucaucuccaacagcuggcugauguggcugaucaucaaccugguccagauggcccccaucuccgcgauggugcgcauguacaucuucuucgccagcuucuacuacguguggaagagcuacguccacgugguggacggcugcaacuccagcaccugcaugaugugcuacaagcggaaccgcgccacgcgggucgagugcaccaccaucgugaacgggguccgccgguccuucuacguguacgccaacggcggcaagggguucugcaagcuccacaacuggaacugcgugaacugcgacaccuucugcgccggcagcacguucaucuccgacgaggucgcgcgcgaccugagccugcaguucaagcggccgaucaaccccaccgaccaguccagcuacaucguggacuccgugaccgucaagaacgggagcauccaccucuacuucgacaaggccggccagaagaccuacgagcgccacucccugagccacuucgugaaccuggacaaccuccgggccaacaacacgaaggggucccugcccaucaacgugaucgucuucgacggcaagagcaagugcgaggaguccagcgccaaguccgccagcguguacuacucccagcugaugugccagcccauccuccugcuggaccaggcgcucgugagcgacgucggcgacagcgccgagguggccgugaagauguucgacgccuacgucaacaccuucuccagcaccuucaacgugccgauggagaagcugaagacccugguggccacggcggaggccgagcucgccaagaacgucucccuggacaacgugcugagcaccuucaucuccgccgcgcgccagggguucguggacagcgacgucgagaccaaggacgugguggagugccucaagcugucccaccagagcgacaucgaggucaccggcgacuccugcaacaacuacaugcugacguacaacaagguggagaacaugaccccccgggaccucggggccugcaucgacugcagcgcccgccacaucaacgcccagguggccaagucccacaacaucgcgcugaucuggaacgucaaggacuucaugagccuguccgagcagcuccggaagcagauccgcagcgccgccaagaagaacaaccugcccuucaagcugaccugcgccaccacgcgccagguggugaacgucgugaccaccaagaucgcccucaagggcgggugaggacuagucccuguucccagagcccacuuuuuuuucuuuuuuugaaauaaaauagccugucuuucagaucucaaaggcucuuuucagagccaccaaaaaaaaaaaaaaaaaaaaaaaaaaaaaaaaaaaaaaaaaaaaaaaaaaaaaaaaaaaaaaaaaaaaaaaaaaaaaaaaaaaaaaaaaaaaaaaaaaaaa

SEQ ID NO: 19829 - RNA, 6113 nt, Artificial Sequence
  SARS-CoV-2__MT755834.1__non-structural protein 3 (NSP3) mRNA gc
aggagagucccgcagucggcguccagcggcucugcuuguucgugugugugucguugcaggccuuauucaagcuuaccauggcccccaccaaggugaccuucggcgacgacacggucaucgaggugcagggguacaagagcgugaacaucaccuucgagcuggacgagcgcaucgacaagguccucaacgagaagugcuccgccuacaccguggagcugggcaccgaggugaacgaguucgcgugcgucguggccgacgccgugaucaagacgcugcagccggucagcgagcuccugaccccccuggggaucgaccucgacgagugguccauggccaccuacuaccuguucgacgagagcggcgaguucaagcuggccucccacauguacugcagcuucuacccccccgacgaggacgaggaggagggggacugcgaggaggaggaguucgagccguccacccaguacgaguacggcacggaggacgacuaccagggcaagccccucgaguucggggcgaccagcgccgcccugcagcccgaggaggagcaggaggaggacuggcuggacgacgacucccagcagaccgugggccagcaggacgggagcgaggacaaccagaccacgaccauccagaccaucguggagguccagccccagcucgagauggagcugaccccgguggugcagacgaucgaggucaacuccuucagcggcuaccugaagcucaccgacaacguguacaucaagaacgccgacaucguggaggaggcgaagaaggucaagcccaccgugguggucaacgccgccaacguguaccugaagcacgggggcggcguggccggggcccugaacaaggcgaccaacaacgccaugcaggucgaguccgacgacuacaucgccacgaacggcccccucaagguggggggcagcugcguccuguccggccacaaccuggccaagcacugccuccacgugguggggcccaacgucaacaagggcgaggacauccagcugcugaagagcgccuacgagaacuucaaccagcacgaggugcuccuggcgccgcugcucuccgccgggaucuucggcgccgaccccauccacagccugcgggugugcgucgacaccgugcgcaccaacguguaccuggccgucuucgacaagaaccucuacgacaagcugguguccagcuuccuggagaugaagagcgagaagcagguggagcagaagaucgccgagauccccaaggaggaggucaagcccuucaucaccgaguccaagccgagcguggagcagcggaagcaggacgacaagaagaucaaggcgugcguggaggaggucacgaccacccucgaggagaccaaguuccugacggagaaccugcuccuguacaucgacaucaacgggaaccugcaccccgacuccgccacccucgugagcgacaucgacaucaccuuccugaagaaggacgcccccuacaucgugggcgacgucgugcaggagggcgugcugaccgccgucgugauccccacgaagaaggccgggggcaccaccgagaugcucgcgaaggcccugcgcaaggugccgaccgacaacuacaucacgaccuaccccgggcagggccugaacggguacaccgucgaggaggccaagaccgugcucaagaagugcaaguccgccuucuacauccugcccagcaucaucuccaacgagaagcaggagauccugggcaccgugagcuggaaccuccgggagaugcuggcgcacgccgaggagacgcgcaagcugaugcccgucugcguggagaccaaggccaucguguccaccauccagcggaaguacaagggcaucaagauccaggucggggugguggacuacggcgcccgcuucuacuucuacaccagcaagacgaccgucgccucccugaucaacacccucaacgaccugaacgagacccuggugacgaugccgcucggguacgugacccacggccugaaccuggaggaggcggcccgguacaugcgcagccucaagguccccgccaccguguccgugagcucccccgacgccgucaccgccuacaacggguaccugacgagcuccagcaagacccccgaggagcacuucaucgagaccaucucccuggcgggcagcuacaaggacuggagcuacuccggccagagcacccagcucgggaucgaguuccugaagcggggcgacaaguccguguacuacacgagcaacccgaccaccuuccaccuggacggggaggugaucaccuucgacaaccucaagacgcugcugucccuccgcgagguccggaccaucaagguguucaccaccguggacaacaucaaccugcacacgcaggucguggacaugagcaugaccuacggccagcaguucggccccaccuaccuggacggggccgacgugaccaagaucaagccccacaacucccacgagggcaagacguucuacguccucccgaacgacgacacccugcgcguggaggccuucgaguacuaccacaccaccgaccccagcuuccuggggcgguacauguccgcccucaaccacacgaagaaguggaaguacccccaggugaacggccugaccagcaucaagugggccgacaacaacugcuaccuggcgaccgcccuccugacccugcagcagaucgagcucaaguucaaccccccggcccugcaggacgccuacuaccgcgcgcgggccggggaggccgccaacuucugcgcccugauccucgcguacugcaacaagacggucggcgagcugggcgacgugcgcgagaccauguccuaccuguuccagcacgccaaccucgacagcugcaagcggguccugaacguggugugcaagaccugcgggcagcagcagaccacccugaagggcgucgaggccgugauguacauggggacgcucuccuacgagcaguucaagaagggcgugcagauccccugcaccugcgggaagcaggccaccaaguaccugguccagcaggagagccccuucgugaugauguccgcccccccggcgcaguacgagcugaagcacggcaccuucacgugcgccagcgaguacaccggcaacuaccagugcgggcacuacaagcacaucaccuccaaggagacccucuacugcaucgacggcgcccugcugacgaagagcagcgaguacaaggggcccaucaccgacguguucuacaaggagaacuccuacaccaccacgaucaagcccgucaccuacaagcucgacggcguggugugcaccgagaucgaccccaagcuggacaacuacuacaagaaggacaacagcuacuucaccgagcagccgaucgaccugguccccaaccagcccuaccccaacgccuccuucgacaacuucaaguucgugugcgacaacaucaaguucgccgacgaccucaaccagcugacgggguacaagaagccggcgagccgcgagcugaaggugaccuucuuccccgaccucaacggcgacgucguggccaucgacuacaagcacuacacccccuccuucaagaagggcgccaagcugcugcacaagcccaucguguggcacgucaacaacgccaccaacaaggcgacguacaagccgaacaccuggugcauccggugccucuggagcaccaagcccguggagaccuccaacagcuucgacgugcugaaguccgaggacgcccaggggauggacaaccuggccugcgaggaccucaagcccgucagcgaggaggugguggagaaccccacgauccagaaggacguccuggagugcaacgugaagaccaccgagguggucggcgacaucauccugaagccggccaacaacucccucaagaucaccgaggagguggggcacacggaccugauggccgcguacguggacaacagcucccugaccaucaagaagcccaacgagcucagccgcguccugggccugaagacccucgccacccacgggcuggccgccgugaacuccgugcccugggacacgaucgccaacuacgcgaagccguuccugaacaaggucgugagcaccaccaccaacaucgugacgcgcugccucaaccgggucugcaccaacuacaugcccuacuucuucacccugcugcuccagcugugcaccuucacccgcuccacgaacagccggaucaaggccuccaugcccaccaccaucgccaagaacaccgugaagagcgugggcaaguucugccuggaggccagcuucaacuaccucaagucccccaacuucagcaagcugaucaacaucaucaucugguuccugcuccuguccgucugccugggcagccucaucuacuccacggccgcgcugggggugcugaugagcaaccucggcaugccguccuacugcaccggguaccgcgagggcuaccugaacagcaccaacgugaccaucgccacguacugcaccggcuccauccccugcagcgucugccuguccgggcucgacagccuggacaccuaccccucccuggagaccauccagaucacgaucagcuccuucaagugggaccucaccgccuucggccugguggccgagugguuccuggccuacauccucuucacccgguucuucuacgugcuggggcuggcggccaucaugcagcucuucuucagcuacuucgccguccacuucaucuccaacagcuggcugauguggcugaucaucaaccuggugcagauggcccccaucuccgcgauggugcgcauguacaucuucuucgccagcuucuacuacgucuggaagagcuacgugcacguggucgacggcugcaacuccagcaccugcaugaugugcuacaagcggaaccgcgccacgcggguggagugcaccaccaucgucaacggggugcgccgguccuucuacguguacgccaacggcggcaagggguucugcaagcuccacaacuggaacugcgucaacugcgacaccuucugcgccggcagcacguucaucuccgacgagguggcgcgcgaccugagccugcaguucaagcggccgaucaaccccaccgaccaguccagcuacaucguggacuccgucaccgugaagaacgggagcauccaccucuacuucgacaaggccggccagaagaccuacgagcgccacucccugagccacuucgugaaccuggacaaccuccgggccaacaacacgaaggggucccugcccaucaacgucaucguguucgacggcaagagcaagugcgaggaguccagcgccaaguccgccagcguguacuacucccagcugaugugccagcccauccuccugcuggaccaggcgcucgucagcgacgugggcgacagcgccgagguggccgucaagauguucgacgccuacgugaacaccuucuccagcaccuucaacgugccgauggagaagcugaagacccuggucgccacggcggaggccgagcucgccaagaacgugucccuggacaacgugcugagcaccuucaucuccgccgcgcgccagggguucgucgacagcgacguggagaccaaggacguggucgagugccucaagcugucccaccagagcgacaucgaggugaccggcgacuccugcaacaacuacaugcugacguacaacaagguggagaacaugaccccccgggaccucggggccugcaucgacugcagcgcccgccacaucaacgcccaggucgccaagucccacaacaucgcgcugaucuggaacgugaaggacuucaugagccuguccgagcagcuccggaagcagauccgcagcgccgccaagaagaacaaccugcccuucaagcugaccugcgccaccacgcgccagguggucaacguggugaccaccaagaucgcccucaagggcgggugaggacuagucccuguucccagagcccacuuuuuuuucuuuuuuugaaauaaaauagccugucuuucagaucucaaaggcucuuuucagagccaccaaaaaaaaaaaaaaaaaaaaaaaaaaaaaaaaaaaaaaaaaaaaaaaaaaaaaaaaaaaaaaaaaaaaaaaaaaaaaaaaaaaaaaaaaaaaaaaaaaaaa

SEQ ID NO: 19830 - RNA, 6113 nt, Artificial Sequence
  SARS-CoV-2__MT755883.1__non-structural protein 3 (NSP3) mRNA gc
aggagagucccgcagucggcguccagcggcucugcuuguucgugugugugucguugcaggccuuauucaagcuuaccauggcccccaccaaggugaccuucggcgacgacacggucaucgaggugcagggguacaagagcgugaacaucaccuucgagcuggacgagcgcaucgacaagguccucaacgagaagugcuccgccuacaccguggagcugggcaccgaggugaacgaguucgcgugcgucguggccgacgccgugaucaagacgcugcagccggucagcgagcuccugaccccccuggggaucgaccucgacgagugguccauggccaccuacuaccuguucgacgagagcggcgaguucaagcuggccucccacauguacugcagcuucuacccccccgacgaggacgaggaggagggggacugcgaggaggaggaguucgagccguccacccaguacgaguacggcacggaggacgacuaccagggcaagccccucgaguucggggcgaccagcgccgcccugcagcccgaggaggagcaggaggaggacuggcuggacgacgacucccagcagaccgugggccagcaggacgggagcgaggacaaccagaccacgaccauccagaccaucguggagguccagccccagcucgagauggagcugaccccgguggugcagacgaucgaggucaacuccuucagcggcuaccugaagcucaccgacaacguguacaucaagaacgccgacaucguggaggaggcgaagaaggucaagcccaccgugguggucaacgccgccaacguguaccugaagcacgggggcggcguggccggggcccugaacaaggcgaccaacaacgccaugcaggucgaguccgacgacuacaucgccacgaacggcccccucaagguggggggcagcugcguccuguccggccacaaccuggccaagcacugccuccacgugguggggcccaacgucaacaagggcgaggacauccagcugcugaagagcgccuacgagaacuucaaccagcacgaggugcuccuggcgccgcugcucuccgccgggaucuucggcgccgaccccauccacagccugcgggugugcgucgacaccgugcgcaccaacguguaccuggccgucuucgacaagaaccucuacgacaagcugguguccagcuuccuggagaugaagagcgagaagcagguggagcagaagaucgccgagauccccaaggaggaggucaagcccuucaucaccgaguccaagccgagcguggagcagcggaagcaggacgacaagaagaucaaggcgugcguggaggaggucacgaccacccucgaggagaccaaguuccugacggagaaccugcuccuguacaucgacaucaacgggaaccugcaccccgacuccgccacccucgugagcgacaucgacaucaccuuccugaagaaggacgcccccuacaucgugggcgacgucgugcaggagggcgugcugaccgccgucgugauccccacgaagaaggccgggggcaccaccgagaugcucgcgaaggcccugcgcaaggugccgaccgacaacuacaucacgaccuaccccgggcagggccugaacggguacaccgucgaggaggccaagaccgugcucaagaagugcaaguccgccuucuacauccugcccagcaucaucuccaacgagaagcaggagauccugggcaccgugagcuggaaccuccgggagaugcuggcgcacgccgaggagacgcgcaagcugaugcccgucugcguggagaccaaggccaucguguccaccauccagcggaaguacaagggcaucaagauccaggagggggucguggacuacggcgcccgcuucuacuucuacaccagcaagacgaccguggccucccugaucaacacccucaacgaccugaacgagacccuggucacgaugccgcucggguacgugacccacggccugaaccuggaggaggcggcccgguacaugcgcagccucaaggugcccgccaccgucuccgugagcucccccgacgccgugaccgccuacaacggguaccugacgagcuccagcaagacccccgaggagcacuucaucgagaccaucucccuggcgggcagcuacaaggacuggagcuacuccggccagagcacccagcucgggaucgaguuccugaagcggggcgacaaguccgucuacuacacgagcaacccgaccaccuuccaccuggacggggaggugaucaccuucgacaaccucaagacgcugcugucccuccgcgaggugcggaccaucaaggucuucaccaccguggacaacaucaaccugcacacgcagguggucgacaugagcaugaccuacggccagcaguucggccccaccuaccuggacggggccgacgugaccaagaucaagccccacaacucccacgagggcaagacguucuacgugcucccgaacgacgacacccugcgcgucgaggccuucgaguacuaccacaccaccgaccccagcuuccuggggcgguacauguccgcccucaaccacacgaagaaguggaaguacccccaggugaacggccugaccagcaucaagugggccgacaacaacugcuaccuggcgaccgcccuccugacccugcagcagaucgagcucaaguucaaccccccggcccugcaggacgccuacuaccgcgcgcgggccggggaggccgccaacuucugcgcccugauccucgcguacugcaacaagacggugggcgagcugggcgacguccgcgagaccauguccuaccuguuccagcacgccaaccucgacagcugcaagcgggugcugaacgucgugugcaagaccugcgggcagcagcagaccacccugaagggcguggaggccgucauguacauggggacgcucuccuacgagcaguucaagaagggcgugcagauccccugcaccugcgggaagcaggccaccaaguaccuggugcagcaggagagccccuucgucaugauguccgcccccccggcgcaguacgagcugaagcacggcaccuucacgugcgccagcgaguacaccggcaacuaccagugcgggcacuacaagcacaucaccuccaaggagacccucuacugcaucgacggcgcccugcugacgaagagcagcgaguacaaggggcccaucaccgacguguucuacaaggagaacuccuacaccaccacgaucaagcccgugaccuacaagcucgacggcgucgugugcaccgagaucgaccccaagcuggacaacuacuacaagaaggacaacagcuacuucaccgagcagccgaucgaccuggugcccaaccagcccuaccccaacgccuccuucgacaacuucaaguucgucugcgacaacaucaaguucgccgacgaccucaaccagcugacgggguacaagaagccggcgagccgcgagcugaaggugaccuucuuccccgaccucaacggcgacguggucgccaucgacuacaagcacuacacccccuccuucaagaagggcgccaagcugcugcacaagcccaucguguggcacgugaacaacgccaccaacaaggcgacguacaagccgaacaccuggugcauccggugccucuggagcaccaagcccgucgagaccuccaacagcuucgacgugcugaaguccgaggacgcccaggggauggacaaccuggccugcgaggaccucaagcccgugagcgaggaggucguggagaaccccacgauccagaaggacgugcuggagugcaacgucaagaccaccgagguggugggcgacaucauccugaagccggccaacaacucccucaagaucaccgaggaggucgggcacacggaccugauggccgcguacguggacaacagcucccugaccaucaagaagcccaacgagcucagccgcgugcugggccugaagacccucgccacccacgggcuggccgccgucaacuccgugcccugggacacgaucgccaacuacgcgaagccguuccugaacaagguggucagcaccaccaccaacaucgugacgcgcugccucaaccgggugugcaccaacuacaugcccuacuucuucacccugcugcuccagcugugcaccuucacccgcuccacgaacagccggaucaaggccuccaugcccaccaccaucgccaagaacaccgucaagagcgugggcaaguucugccuggaggccagcuucaacuaccucaagucccccaacuucagcaagcugaucaacaucaucaucugguuccugcuccuguccgugugccugggcagccucaucuacuccacggccgcgcuggggguccugaugagcaaccucggcaugccguccuacugcaccggguaccgcgagggcuaccugaacagcaccaacgugaccaucgccacguacugcaccggcuccauccccugcagcgugugccuguccgggcucgacagccuggacaccuaccccucccuggagaccauccagaucacgaucagcuccuucaagugggaccucaccgccuucggccuggucgccgagugguuccuggccuacauccucuucacccgguucuucuacgugcuggggcuggcggccaucaugcagcucuucuucagcuacuucgccgugcacuucaucuccaacagcuggcugauguggcugaucaucaaccugguccagauggcccccaucuccgcgauggugcgcauguacaucuucuucgccagcuucuacuacguguggaagagcuacguccacgugguggacggcugcaacuccagcaccugcaugaugugcuacaagcggaaccgcgccacgcgggucgagugcaccaccaucgugaacgggguccgccgguccuucuacguguacgccaacggcggcaagggguucugcaagcuccacaacuggaacugcgugaacugcgacaccuucugcgccggcagcacguucaucuccgacgaggucgcgcgcgaccugagccugcaguucaagcggccgaucaaccccaccgaccaguccagcuacaucguggacuccgugaccgucaagaacgggagcauccaccucuacuucgacaaggccggccagaagaccuacgagcgccacucccugagccacuucgugaaccuggacaaccuccgggccaacaacacgaaggggucccugcccaucaacgugaucgucuucgacggcaagagcaagugcgaggaguccagcgccaaguccgccagcguguacuacucccagcugaugugccagcccauccuccugcuggaccaggcgcucgugagcgacgucggcgacagcgccgagguggccgugcgcauguucgacgccuacgucaacaccuucuccagcaccuucaacgugccgauggagaagcugaagacccugguggccacggcggaggccgagcucgccaagaacgucucccuggacaacgugcugagcaccuucaucuccgccgcgcggcagggguucguggacagcgacgucgagaccaaggacgugguggagugccucaagcugucccaccagagcgacaucgaggucaccggcgacuccugcaacaacuacaugcugacguacaacaagguggagaacaugaccccccgcgaccucggggccugcaucgacugcagcgcccggcacaucaacgcccagguggccaagucccacaacaucgcgcugaucuggaacgucaaggacuucaugagccuguccgagcagcuccgcaagcagauccgcagcgccgccaagaagaacaaccugcccuucaagcugaccugcgccaccacgcggcagguggugaacgucgugaccaccaagaucgcccucaagggcgggugaggacuagucccuguucccagagcccacuuuuuuuucuuuuuuugaaauaaaauagccugucuuucagaucucaaaggcucuuuucagagccaccaaaaaaaaaaaaaaaaaaaaaaaaaaaaaaaaaaaaaaaaaaaaaaaaaaaaaaaaaaaaaaaaaaaaaaaaaaaaaaaaaaaaaaaaaaaaaaaaaaaaa

SEQ ID NO: 19831 - RNA, 6113 nt, Artificial Sequence
  SARS-CoV-2__MT755884.1__non-structural protein 3 (NSP3) mRNA gc
aggagagucccgcagucggcguccagcggcucugcuuguucgugugugugucguugcaggccuuauucaagcuuaccauggcccccaccaaggugaccuucggcgacgacacggucaucgaggugcagggguacaagagcgugaacaucaccuucgagcuggacgagcgcaucgacaagguccucaacgagaagugcuccgccuacaccguggagcugggcaccgaggugaacgaguucgcgugcgucguggccgacgccgugaucaagacgcugcagccggucagcgagcuccugaccccccuggggaucgaccucgacgagugguccauggccaccuacuaccuguucgacgagagcggcgaguucaagcuggccucccacauguacugcagcuucuacccccccgacgaggacgaggaggagggggacugcgaggaggaggaguucgagccguccacccaguacgaguacggcacggaggacgacuaccagggcaagccccucgaguucggggcgaccagcgccgcccugcagcccgaggaggagcaggaggaggacuggcuggacgacgacucccagcagaccgugggccagcaggacgggagcgaggacaaccagaccacgaccauccagaccaucguggagguccagccccagcucgagauggagcugaccccgguggugcagacgaucgaggucaacuccuucagcggcuaccugaagcucaccgacaacguguacaucaagaacgccgacaucguggaggaggcgaagaaggucaagcccaccgugguggucaacgccgccaacguguaccugaagcacgggggcggcguggccggggcccugaacaaggcgaccaacaacgccaugcaggucgaguccgacgacuacaucgccacgaacggcccccucaagguggggggcagcugcguccuguccggccacaaccuggccaagcacugccuccacgugguggggcccaacgucaacaagggcgaggacauccagcugcugaagagcgccuacgagaacuucaaccagcacgaggugcuccuggcgccgcugcucuccgccgggaucuucggcgccgaccccauccacagccugcgggugugcgucgacaccgugcgcaccaacguguaccuggccgucuucgacaagaaccucuacgacaagcugguguccagcuuccuggagaugaagagcgagaagcagguggagcagaagaucgccgagauccccaaggaggaggucaagcccuucaucaccgaguccaagccgagcguggagcagcggaagcaggacgacaagaagaucaaggcgugcguggaggaggucacgaccacccucgaggagaccaaguuccugacggagaaccugcuccuguacaucgacaucaacgggaaccugcaccccgacuccgccacccucgugagcgacaucgacaucaccuuccugaagaaggacgcccccuacaucgugggcgacgucgugcaggagggcgugcugaccgccgucgugauccccacgaagaaggccgggggcaccaccgagaugcucgcgaaggcccugcgcaaggugccgaccgacaacuacaucacgaccuaccccgggcagggccugaacggguacaccgucgaggaggccaagaccgugcucaagaagugcaaguccgccuucuacauccugcccagcaucaucuccaacgagaagcaggagauccugggcaccgugagcuggaaccuccgggagaugcuggcgcacgccgaggagacgcgcaagcugaugcccgucugcguggagaccaaggccaucguguccaccauccagcggaaguacaagggcaucaagauccaggagggggucguggacuacggcgcccgcuucuacuucuacaccagcaagacgaccguggccucccugaucaacacccucaacgaccugaacgagacccuggucacgaugccgcucggguacgugacccacggccugaaccuggaggaggcggcccgguacaugcgcagccucaaggugcccgccaccgucuccgugagcucccccgacgccgugaccgccuacaacggguaccugacgagcuccagcaagacccccgaggagcacuucaucgagaccaucucccuggcgggcagcuacaaggacuggagcuacuccggccagagcacccagcucgggaucgaguuccugaagcggggcgacaaguccgucuacuacacgagcaacccgaccaccuuccaccuggacggggaggugaucaccuucgacaaccucaagacgcugcugucccuccgcgaggugcggaccaucaaggucuucaccaccguggacaacaucaaccugcacacgcagguggucgacaugagcaugaccuacggccagcaguucggccccaccuaccuggacggggccgacgugaccaagaucaagccccacaacucccacgagggcaagacguucuacgugcucccgaacgacgacacccugcgcgucgaggccuucgaguacuaccacaccaccgaccccagcuuccuggggcgguacauguccgcccucaaccacacgaagaaguggaaguacccccaggugaacggccugaccagcaucaagugggccgggaacaacugcuaccuggcgaccgcccuccugacccugcagcagaucgagcucaaguucaaccccccggcccugcaggacgccuacuaccgcgcgcgggccggcgaggccgccaacuucugcgcccugauccucgcguacugcaacaagacggugggcgagcugggggacguccgcgagaccauguccuaccuguuccagcacgccaaccucgacagcugcaagcgggugcugaacgucgugugcaagaccugcggccagcagcagaccacccugaaggggguggaggccgucauguacaugggcacgcucuccuacgagcaguucaagaagggggugcagauccccugcaccugcggcaagcaggccaccaaguaccuggugcagcaggagagccccuucgucaugauguccgcccccccggcgcaguacgagcugaagcacggcaccuucacgugcgccagcgaguacaccgggaacuaccagugcggccacuacaagcacaucaccuccaaggagacccucuacugcaucgacggggcccugcugacgaagagcagcgaguacaagggccccaucaccgacguguucuacaaggagaacuccuacaccaccacgaucaagcccgugaccuacaagcucgacggggucgugugcaccgagaucgaccccaagcuggacaacuacuacaagaaggacaacagcuacuucaccgagcagccgaucgaccuggugcccaaccagcccuaccccaacgccuccuucgacaacuucaaguucgucugcgacaacaucaaguucgccgacgaccucaaccagcugacgggcuacaagaagccggcgagccgcgagcugaaggugaccuucuuccccgaccucaacggcgacguggucgccaucgacuacaagcacuacacccccuccuucaagaagggggccaagcugcugcacaagcccaucguguggcacgugaacaacgccaccaacaaggcgacguacaagccgaacaccuggugcauccggugccucuggagcaccaagcccgucgagaccuccaacagcuucgacgugcugaaguccgaggacgcccagggcauggacaaccuggccugcgaggaccucaagcccgugagcgaggaggucguggagaaccccacgauccagaaggacgugcuggagugcaacgucaagaccaccgagguggugggggacaucauccugaagccggccaacaacucccucaagaucaccgaggaggucggccacacggaccugauggccgcguacguggacaacagcucccugaccaucaagaagcccaacgagcucagccgcgugcuggggcugaagacccucgccacccacggccuggccgccgucaacuccgugcccugggacacgaucgccaacuacgcgaagccguuccugaacaagguggucagcaccaccaccaacaucgugacgcgcugccucaaccgggugugcaccaacuacaugcccuacuucuucacccugcugcuccagcugugcaccuucacccgcuccacgaacagccggaucaaggccuccaugcccaccaccaucgccaagaacaccgucaagagcgugggcaaguucugccuggaggccagcuucaacuaccucaagucccccaacuucagcaagcugaucaacaucaucaucugguuccugcuccuguccgugugccuggggagccucaucuacuccacggccgcgcugggcguccugaugagcaaccucgggaugccguccuacugcaccggcuaccgcgagggcuaccugaacagcaccaacgugaccaucgccacguacugcaccggguccauccccugcagcgugugccuguccggccucgacagccuggacaccuaccccucccuggagaccauccagaucacgaucagcuccuucaagugggaccucaccgccuucgggcuggucgccgagugguuccuggccuacauccucuucacccgguucuucuacgugcugggccuggcggccaucaugcagcucuucuucagcuacuucgccgugcacuucaucuccaacagcuggcugauguggcugaucaucaaccugguccagauggcccccaucuccgcgauggugcgcauguacaucuucuucgccagcuucuacuacguguggaagagcuacguccacgugguggacgggugcaacuccagcaccugcaugaugugcuacaagcggaaccgcgccacgcgggucgagugcaccaccaucgugaacggcguccgccgguccuucuacguguacgccaacggcgggaagggcuucugcaagcuccacaacuggaacugcgugaacugcgacaccuucugcgccgggagcacguucaucuccgacgaggucgcgcgcgaccugagccugcaguucaagcggccgaucaaccccaccgaccaguccagcuacaucguggacuccgugaccgucaagaacggcagcauccaccucuacuucgacaaggccgggcagaagaccuacgagcgccacucccugagccacuucgugaaccuggacaaccuccgggccaacaacacgaagggcucccugcccaucaacgugaucgucuucgacggcaagagcaagugcgaggaguccagcgccaaguccgccagcguguacuacucccagcugaugugccagcccauccuccugcuggaccaggcgcucgugagcgacgucggggacagcgccgagguggccgugaagauguucgacgccuacgucaacaccuucuccagcaccuucaacgugccgauggagaagcugaagacccugguggccacggcggaggccgagcucgccaagaacgucucccuggacaacgugcugagcaccuucaucuccgccgcgcgccagggcuucguggacagcgacgucgagaccaaggacgugguggagugccucaagcugucccaccagagcgacaucgaggucaccggggacuccugcaacaacuacaugcugacguacaacaagguggagaacaugaccccccgggaccucggcgccugcaucgacugcagcgcccgccacaucaacgcccagguggccaagucccacaacaucgcgcugaucuggaacgucaaggacuucaugagccuguccgagcagcuccggaagcagauccgcagcgccgccaagaagaacaaccugcccuucaagcugaccugcgccaccacgcgccagguggugaacgucgugaccaccaagaucgcccucaaggggggcugaggacuagucccuguucccagagcccacuuuuuuuucuuuuuuugaaauaaaauagccugucuuucagaucucaaaggcucuuuucagagccaccaaaaaaaaaaaaaaaaaaaaaaaaaaaaaaaaaaaaaaaaaaaaaaaaaaaaaaaaaaaaaaaaaaaaaaaaaaaaaaaaaaaaaaaaaaaaaaaaaaaaa

SEQ ID NO: 19832 - RNA, 6113 nt, Artificial Sequence
  SARS-CoV-2__MT755885.1__non-structural protein 3 (NSP3) mRNA gc
aggagagucccgcagucggcguccagcggcucugcuuguucgugugugugucguugcaggccuuauucaagcuuaccauggcccccaccaaggugaccuucggcgacgacacggucaucgaggugcagggguacaagagcgugaacaucaccuucgagcuggacgagcgcaucgacaagguccucaacgagaagugcuccgccuacaccguggagcugggcaccgaggugaacgaguucgcgugcgucguggccgacgccgugaucaagacgcugcagccggucagcgagcuccugaccccccuggggaucgaccucgacgagugguccauggccaccuacuaccuguucgacgagagcggcgaguucaagcuggccucccacauguacugcagcuucuacccccccgacgaggacgaggaggagggggacugcgaggaggaggaguucgagccguccacccaguacgaguacggcacggaggacgacuaccagggcaagccccucgaguucggggcgaccagcgccgcccugcagcccgaggaggagcaggaggaggacuggcuggacgacgacucccagcagaccgugggccagcaggacgggagcgaggacaaccagaccacgaccauccagaccaucguggagguccagccccagcucgagauggagcugaccccgguggugcagacgaucgaggucaacuccuucagcggcuaccugaagcucaccgacaacguguacaucaagaacgccgacaucguggaggaggcgaagaaggucaagcccaccgugguggucaacgccgccaacguguaccugaagcacgggggcggcguggccggggcccugaacaaggcgaccaacaacgccaugcaggucgaguccgacgacuacaucgccacgaacggcccccucaagguggggggcagcugcguccuguccggccacaaccuggccaagcacugccuccacgugguggggcccaacgucaacaagggcgaggacauccagcugcugaagagcgccuacgagaacuucaaccagcacgaggugcuccuggcgccgcugcucuccgccgggaucuucggcgccgaccccauccacagccugcgggugugcgucgacaccgugcgcaccaacguguaccuggccgucuucgacaagaaccucuacgacaagcugguguccagcuuccuggagaugaagagcgagaagcagguggagcagaagaucgccgagauccccaaggaggaggucaagcccuucaucaccgaguccaagccgagcguggagcagcggaagcaggacgacaagaagaucaaggcgugcguggaggaggucacgaccacccucgaggagaccaaguuccugacggagaaccugcuccuguacaucgacaucaacgggaaccugcaccccgacuccgccacccucgugagcgacaucgacaucaccuuccugaagaaggacgcccccuacaucgugggcgacgucgugcaggagggcgugcugaccgccgucgugauccccacgaagaaggccgggggcaccaccgagaugcucgcgaaggcccugcgcaaggugccgaccgacaacuacaucacgaccuaccccgggcagggccugaacggguacaccgucgaggaggccaagaccgugcucaagaagugcaaguccgccuucuacauccugcccagcaucaucuccaacgagaagcaggagauccugggcaccgugagcuggaaccuccgggagaugcuggcgcacgccgaggagacgcgcaagcugaugcccgucugcguggagaccaaggccaucguguccaccauccagcggaaguacaagggcaucaagauccaggagggggucguggacuacggcgcccgcuucuacuucuacaccagcaagacgaccguggccucccugaucaacacccucaacgaccugaacgagacccuggucacgaugccgcucggguacgugacccacggccugaaccuggaggaggcggcccgguacaugcgcagccucaaggugcccgccaccgucuccgugagcucccccgacgccgugaccgccuacaacggguaccugacgagcuccagcaagacccccgaggagcacuucaucgagaccaucucccuggcgggcagcuacaaggacuggagcuacuccggccagagcacccagcucgggaucgaguuccugaagcggggcgacaaguccgucuacuacacgagcaacccgaccaccuuccaccuggacggggaggugaucaccuucgacaaccucaagacgcugcugucccuccgcgaggugcggaccaucaaggucuucaccaccguggacaacaucaaccugcacacgcagguggucgacaugagcaugaccuacggccagcaguucggccccaccuaccuggacggggccgacgugaccaagaucaagccccacaacucccacgagggcaagacguucuacgugcucccgaacgacgacacccugcgcgucgaggccuucgaguacuaccacaccaccgaccccagcuuccuggggcgguacauguccgcccucaaccacacgaagaaguggaaguacccccaggugaacggccugaccagcaucaagugggccgacaacaacugcuaccuggcgaccgcccuccugacccugcagcagaucgagcucaaguucaaccccccggcccugcaggacgccuacuaccgcgcgcgggccggggaggccgccaacuucugcgcccugauccucgcguacugcaacaagacggugggcgagcugggcgacguccgcgagaccauguccuaccuguuccagcacgccaaccucgacagcugcaagcgggugcugaacgucgugugcaagaccugcgggcagcagcagaccacccugaagggcguggaggccgucauguacauggggacgcucuccuacgagcaguucaagaagggcgugcagauccccugcaccugcgggaagcaggccaccaaguaccuggugcagcaggagagccccuucgucaugauguccgcccccccggcgcaguacgagcugaagcacggcaccuucacgugcgccagcgaguacaccggcaacuaccagugcgggcacuacaagcacaucaccuccaaggagacccucuacugcaucgacggcgcccugcugacgaagagcagcgaguacaaggggcccaucaccgacguguucuacaaggagaacuccuacaccaccacgaucaagcccgugaccuacaagcucgacggcgucgugugcaccgagaucgaccccaagcuggacaacuacuacaagaaggacaacagcuacuucaccgagcagccgaucgaccuggugcccaaccagcccuaccccaacgccuccuucgacaacuucaaguucgucugcgacaacaucaaguucgccgacgaccucaaccagcugacgggguacaagaagccggcgagccgcgagcugaaggugaccuucuuccccgaccucaacggcgacguggucgccaucgacuacaagcacuacacccccuccuucaagaagggcgccaagcugcugcacaagcccaucguguggcacgugaacaacgccaccaacaaggcgacguacaagccgaacaccuggugcauccggugccucuggagcaccaagcccgucgagaccuccaacagcuucgacgugcugaaguccgaggacgcccaggggauggacaaccuggccugcgaggaccucaagcccgugagcgaggaggucguggagaaccccacgauccagaaggacgugcuggagugcaacgucaagaccaccgagguggugggcgacaucauccugaagccggccaacaacucccucaagaucaccgaggaggucgggcacacggaccugauggccgcguacguggacaacagcucccugaccaucaagaagcccaacgagcucagccgcgugcugggccugaagacccucgccacccacgggcuggccgccgucaacuccgugcccugggacacgaucgccaacuacgcgaagccguuccugaacaagguggucagcaccaccaccaacaucgugacgcgcugccucaaccgggugugcaccaacuacaugcccuacuucuucacccugcugcuccagcugugcaccuucacccgcuccacgaacagccggaucaaggccuccaugcccaccaccaucgccaagaacaccgucaagagcgugggcaaguucugccuggaggccagcuucaacuaccucaagucccccaacuucagcaagcugaucaacaucaucaucugguuccugcuccuguccgugugccugggcagccucaucuacuccacggccgcgcuggggguccugaugagcaaccucggcaugccguccuacugcaccggguaccgcaagggcuaccugaacagcaccaacgugaccaucgccacguacugcaccggcuccauccccugcagcgugugccuguccgggcucgacagccuggacaccuaccccucccuggagaccauccagaucacgaucagcuccuucaagugggaccucaccgccuucggccuggucgccgagugguuccuggccuacauccucuucacccgguucuucuacgugcuggggcuggcggccaucaugcagcucuucuucagcuacuucgccgugcacuucaucuccaacagcuggcugauguggcugaucaucaaccugguccagauggcccccaucuccgcgauggugcgcauguacaucuucuucgccagcuucuacuacguguggaagagcuacguccacgugguggacggcugcaacuccagcaccugcaugaugugcuacaagcggaaccgcgccacgcgggucgagugcaccaccaucgugaacgggguccgccgguccuucuacguguacgccaacggcggcaagggguucugcaagcuccacaacuggaacugcgugaacugcgacaccuucugcgccggcagcacguucaucuccgacgaggucgcgcgcgaccugagccugcaguucaagcggccgaucaaccccaccgaccaguccagcuacaucguggacuccgugaccgucaagaacgggagcauccaccucuacuucgacaaggccggccagaagaccuacgagcgccacucccugagccacuucgugaaccuggacaaccuccgggccaacaacacgaaggggucccugcccaucaacgugaucgucuucgacggcaagagcaagugcgaggaguccagcgccaaguccgccagcguguacuacucccagcugaugugccagcccauccuccugcuggaccaggcgcucgugagcgacgucggcgacagcgccgagguggccgugaagauguucgacgccuacgucaacaccuucuccagcaccuucaacgugccgauggagaagcugaagacccugguggccacggcggaggccgagcucgccaagaacgucucccuggacaacgugcugagcaccuucaucuccgccgcgcgccagggguucguggacagcgacgucgagaccaaggacgugguggagugccucaagcugucccaccagagcgacaucgaggucaccggcgacuccugcaacaacuacaugcugacguacaacaagguggagaacaugaccccccgggaccucggggccugcaucgacugcagcgcccgccacaucaacgcccagguggccaagucccacaacaucgcgcugaucuggaacgucaaggacuucaugagccuguccgagcagcuccggaagcagauccgcagcgccgccaagaagaacaaccugcccuucaagcugaccugcgccaccacgcgccagguggugaacgucgugaccaccaagaucgcccucaagggcgggugaggacuagucccuguucccagagcccacuuuuuuuucuuuuuuugaaauaaaauagccugucuuucagaucucaaaggcucuuuucagagccaccaaaaaaaaaaaaaaaaaaaaaaaaaaaaaaaaaaaaaaaaaaaaaaaaaaaaaaaaaaaaaaaaaaaaaaaaaaaaaaaaaaaaaaaaaaaaaaaaaaaaa

SEQ ID NO: 19833 - RNA, 6113 nt, Artificial Sequence
  SARS-CoV-2__MT755889.1__non-structural protein 3 (NSP3) mRNA gc
aggagagucccgcagucggcguccagcggcucugcuuguucgugugugugucguugcaggccuuauucaagcuuaccauggcccccaccaaggugaccuucggcgacgacacggucaucgaggugcagggguacaagagcgugaacaucaccuucgagcuggacgagcgcaucgacaagguccucaacgagaagugcuccgccuacaccguggagcugggcaccgaggugaacgaguucgcgugcgucguggccgacgccgugaucaagacgcugcagccggucagcgagcuccugaccccccuggggaucgaccucgacgagugguccauggccaccuacuaccuguucgacgagagcggcgaguucaagcuggccucccacauguacugcagcuucuacccccccgacgaggacgaggaggagggggacugcgaggaggaggaguucgagccguccacccaguacgaguacggcacggaggacgacuaccagggcaagccccucgaguucggggcgaccagcgccgcccugcagcccgaggaggagcaggaggaggacuggcuggacgacgacucccagcagaccgugggccagcaggacgggagcgaggacaaccagaccacgaccauccagaccaucguggagguccagccccagcucgagauggagcugaccccgguggugcagacgaucgaggucaacuccuucagcggcuaccugaagcucaccgacaacguguacaucaagaacgccgacaucguggaggaggcgaagaaggucaagcccaccgugguggucaacgccgccaacguguaccugaagcacgggggcggcguggccggggcccugaacaaggcgaccaacaacgccaugcaggucgaguccgacgacuacaucgccacgaacggcccccucaagguggggggcagcugcguccuguccggccacaaccuggccaagcacugccuccacgugguggggcccaacgucaacaagggcgaggacauccagcugcugaagagcgccuacgagaacuucaaccagcacgaggugcuccuggcgccgcugcucuccgccgggaucuucggcgccgaccccauccacagccugcgggugugcgucgacaccgugcgcaccaacguguaccuggccgucuucgacaagaaccucuacgacaagcugguguccagcuuccuggagaugaagagcgagaagcagguggagcagaagaucgccgagauccccaaggaggaggucaagcccuucaucaccgaguccaagccgagcguggagcagcggaagcaggacgacaagaagaucaaggcgugcguggaggaggucacgaccacccucgaggagaccaaguuccugacggagaaccugcuccuguacaucgacaucaacgggaaccugcaccccgacuccgccacccucgugagcgacaucgacaucaccuuccugaagaaggacgcccccuacaucgugggcgacgucgugcaggagggcgugcugaccgccgucgugauccccacgaagaaggccgggggcaccaccgagaugcucgcgaaggcccugcgcaaggugccgaccgacaacuacaucacgaccuaccccgggcagggccugaacggguacaccgucgaggaggccaagaccgugcucaagaagugcaaguccgccuucuacauccugcccagcaucaucuccaacgagaagcaggagauccugggcaccgugagcuggaaccuccgggagaugcuggcgcacgccgaggagacgcgcaagcugaugcccgucugcguggagaccaaggccaucguguccaccauccagcggaaguacaagggcaucaagauccaggagggggucguggacuacggcgcccgcuucuacuucuacaccagcaagacgaccguggccucccugaucaacacccucaacgaccugaacgagacccuggucacgaugccgcucggguacgugacccacggccugaaccuggaggaggcggcccgguacaugcgcagccucaaggugcccgccaccgucuccgugagcucccccgacgccgugaccgccuacaacggguaccugacgagcuccagcaagacccccgaggagcacuucaucgagaccaucucccuggcgggcagcuacaaggacuggagcuacuccggccagagcacccagcucgggaucgaguuccugaagcggggcgacaaguccgucuacuacacgagcaacccgaccaccuuccaccuggacggggaggugaucaccuucgacaaccucaagacgcugcugucccuccgcgaggugcggaccaucaaggucuucaccaccguggacaacaucaaccugcacacgcagguggucgacaugagcaugaccuacggccagcaguucggccccaccuaccuggacggggccgacgugaccaagaucaagccccacaacucccacgagggcaagacguucuacgugcucccgaacgacgacacccugcgcgucgaggccuucgaguacuaccacaccaccgaccccagcuuccuggggcgguacauguccgcccucaaccacacgaagaaguggaaguacccccaggugaacggccugaccagcaucaagugggccgacaacaacugcuaccuggcgaccgcccuccugacccugcagcagaucgagcucaaguucaaccccccggcccugcaggacgccuacuaccgcgcgcgggccggggaggccgccaacuucugcgcccugauccucgcguacugcaacaagacggugggcgagcugggcgacguccgcgagaccauguccuaccuguuccagcacgccaaccucgacagcugcaagcgggugcugaacgucgugugcaagaccugcgggcagcagcagaccacccugaagggcguggaggccgucauguacauggggacgcucuccuacgagcaguucaagaagggcgugcagauccccugcaccugcgggaagcaggccaccaaguaccuggugcagcaggagagccccuucgucaugauguccgcccccccggcgcaguacgagcugaagcacggcaccuucacgugcgccagcgaguacaccggcaacuaccagugcgggcacuacaagcacaucaccuccaaggagacccucuacugcaucgacggcgcccugcugacgaagagcagcgaguacaaggggcccaucaccgacguguucuacaaggagaacuccuacaccaccacgaucaagcccgugaccuacaagcucgacggcgucgugugcaccgagaucgaccccaagcuggacaacuacuacaagaaggacaacagcuacuucaccgagcagccgaucgaccuggugcccaaccagcccuaccccaacgccuccuucgacaacuucaaguucgucugcgacaacaucaaguucgccgacgaccucaaccagcugacgggguacaagaagccggcgagccgcgagcugaaggugaccuucuuccccgaccucaacggcgacguggucgccaucgacuacaagcacuacacccccuccuucaagaagggcgccaagcugcugcacaagcccaucguguggcacgugaacaacgccaccaacaaggcgacguacaagccgaacaccuggugcauccggugccucuggagcaccaagcccgucgagaccuccaacagcuucgacgugcugaaguccgaggacgcccaggggauggacaaccuggccugcgaggaccucaagcccgugagcgaggaggucguggagaaccccacgauccagaaggacgugcuggagugcaacgucaagaccaccgagguggugggcgacaucauccugaagccggccaacaacucccucaagaucaccgaggaggucgggcacacggaccugauggccgcguacguggacaacagcucccugaccaucaagaagcccaacgagcucagccgcgugcugggccugaagacccucgccacccacgggcuggccgccgucaacuccgugcccugggacacgaucgccaacuacgcgaagccguuccugaacaagguggucagcaccaccaccaacaucgugacgcgcugccucaaccgggugugcaccaacuacaugcccuacuucuucacccugcugcuccagcugugcaccuucacccgcuccacgaacagccggaucaaggccuccaugcccaccaccaucgccaagaacaccgucaagagcgugggcaaguucugccuggaggccagcuucaacuaccucaagucccccaacuucagcaagcugaucaacaucaucaucugguuccugcuccuguccgugugccugggcagccucaucuacuccacggccgcgcuggggguccugaugagcaaccucggcaugccguccuacugcaccggguaccgcgagggcuaccugaacagcaccaacgugaccaucgccacguacugcaccggcuccauccccugcagcgugugccuguccgggcucgacagccuggacaccuaccccucccuggagaccauccagaucacgaucagcuccuucaagugggaccucaccgccuucggccuggucgccgagugguuccuggccuacauccucuucacccgguucuucuacgugcuggggcuggcggccaucaugcagcucuucuucagcuacuucgccgugcacuucaucuccaacagcuggcugauguggcugaucaucaaccugguccagaccgcccccaucuccgcgauggugcgcauguacaucuucuucgccagcuucuacuacguguggaagagcuacguccacgugguggacggcugcaacuccagcgccugcaugaugugcuacaagcggaaccgcgccacgcgggucgagugcaccaccaucgugaacgggguccgccgguccuucuacguguacgccaacggcggcaagggguucugcaagcuccacaacuggaacugcgugaacugcgacaccuucugcgcgggcagcacguucaucuccgacgaggucgcccgcgaccugagccugcaguucaagcggccgaucaaccccaccgaccaguccagcuacaucguggacuccgugaccgucaagaacgggagcauccaccucuacuucgacaaggccggccagaagaccuacgagcgccacucccugagccacuucgugaaccuggacaaccuccgggccaacaacacgaaggggucccugcccaucaacgugaucgucuucgacggcaagagcaagugcgaggaguccagcgccaaguccgcgagcguguacuacucccagcugaugugccagcccauccuccugcuggaccaggcccucgugagcgacgucggcgacagcgccgagguggccgugaagauguucgacgccuacgucaacaccuucuccagcaccuucaacgugccgauggagaagcugaagacccugguggcgacggccgaggccgagcucgccaagaacgucucccuggacaacgugcugagcaccuucaucuccgcggcccgccagggguucguggacagcgacgucgagaccaaggacgugguggagugccucaagcugucccaccagagcgacaucgaggucaccggcgacuccugcaacaacuacaugcugacguacaacaagguggagaacaugaccccccgggaccucggggccugcaucgacugcagcgcccgccacaucaacgcccagguggcgaagucccacaacaucgcccugaucuggaacgucaaggacuucaugagccuguccgagcagcuccggaagcagauccgcagcgccgccaagaagaacaaccugcccuucaagcugaccugcgccaccacgcgccagguggugaacgucgugaccaccaagaucgcgcucaagggcgggugaggacuagucccuguucccagagcccacuuuuuuuucuuuuuuugaaauaaaauagccugucuuucagaucucaaaggcucuuuucagagccaccaaaaaaaaaaaaaaaaaaaaaaaaaaaaaaaaaaaaaaaaaaaaaaaaaaaaaaaaaaaaaaaaaaaaaaaaaaaaaaaaaaaaaaaaaaaaaaaaaaaaa

SEQ ID NO: 19834 - RNA, 6113 nt, Artificial Sequence
  SARS-CoV-2__MT755897.1__non-structural protein 3 (NSP3) mRNA gc
aggagagucccgcagucggcguccagcggcucugcuuguucgugugugugucguugcaggccuuauucaagcuuaccauggcccccaccaaggugaccuucggcgacgacacggucaucgaggugcagggguacaagagcgugaacaucaccuucgagcuggacgagcgcaucgacaagguccucaacgagaagugcuccgccuacaccguggagcugggcaccgaggugaacgaguucgcgugcgucguggccgacgccgugaucaagacgcugcagccggucagcgagcuccugaccccccuggggaucgaccucgacgagugguccauggccaccuacuaccuguucgacgagagcggcgaguucaagcuggccucccacauguacugcagcuucuacccccccgacgaggacgaggaggagggggacugcgaggaggaggaguucgagccguccacccaguacgaguacggcacggaggacgacuaccagggcaagccccucgaguucggggcgaccagcgccgcccugcagcccgaggaggagcaggaggaggacuggcuggacgacgacucccagcagaccgugggccagcaggacgggagcgaggacaaccagaccacgaccauccagaccaucguggagguccagccccagcucgagauggagcugaccccgguggugcagacgaucgaggucaacuccuucagcggcuaccugaagcucaccgacaacguguacaucaagaacgccgacaucguggaggaggcgaagaaggucaagcccaccgugguggucaacgccgccaacguguaccugaagcacgggggcggcaucgccggggcccugaacaaggcgaccaacaacgccaugcagguggaguccgacgacuacaucgccacgaacggcccccucaaggucgggggcagcugcgugcuguccggccacaaccuggccaagcacugccuccacgucguggggcccaacgugaacaagggcgaggacauccagcugcugaagagcgccuacgagaacuucaaccagcacgagguccuccuggcgccgcugcucuccgccgggaucuucggcgccgaccccauccacagccugcgggugugcguggacaccguccgcaccaacguguaccuggccguguucgacaagaaccucuacgacaagcuggucuccagcuuccuggagaugaagagcgagaagcagguggagcagaagaucgccgagauccccaaggaggaggugaagcccuucaucaccgaguccaagccgagcgucgagcagcggaagcaggacgacaagaagaucaaggcgugcguggaggaggugacgaccacccucgaggagaccaaguuccugacggagaaccugcuccuguacaucgacaucaacgggaaccugcaccccgacuccgccacccucgucagcgacaucgacaucaccuuccugaagaaggacgcccccuacaucgugggcgacgugguccaggagggcgugcugaccgccguggucauccccacgaagaaggccgggggcaccaccgagaugcucgcgaaggcccugcgcaaggugccgaccgacaacuacaucacgaccuaccccgggcagggccugaacggguacaccguggaggaggccaagaccguccucaagaagugcaaguccgccuucuacauccugcccagcaucaucuccaacgagaagcaggagauccugggcaccgugagcuggaaccuccgggagaugcuggcgcacgccgaggagacgcgcaagcugaugcccgugugcgucgagaccaaggccaucguguccaccauccagcggaaguacaagggcaucaagauccaggaggggguggucgacuacggcgcccgcuucuacuucuacaccagcaagacgaccguggccucccugaucaacacccucaacgaccugaacgagacccuggugacgaugccgcucggguacgucacccacggccugaaccuggaggaggcggcccgguacaugcgcagccucaaggugcccgccaccguguccgucagcucccccgacgccgugaccgccuacaacggguaccugacgagcuccagcaagacccccgaggagcacuucaucgagaccaucucccuggcgggcagcuacaaggacuggagcuacuccggccagagcacccagcucgggaucgaguuccugaagcggggcgacaaguccguguacuacacgagcaacccgaccaccuuccaccuggacggggaggucaucaccuucgacaaccucaagacgcugcugucccuccgcgaggugcggaccaucaagguguucaccaccgucgacaacaucaaccugcacacgcaggugguggacaugagcaugaccuacggccagcaguucggccccaccuaccuggacggggccgacgucaccaagaucaagccccacaacucccacgagggcaagacguucuacgugcucccgaacgacgacacccugcgcguggaggccuucgaguacuaccacaccaccgaccccagcuuccuggggcgguacauguccgcccucaaccacacgaagaaguggaaguacccccaggucaacggccugaccagcaucaagugggccgacaacaacugcuaccuggcgaccgcccuccugacccugcagcagaucgagcucaaguucaaccccccggcccugcaggacgccuacuaccgcgcgcgggccggggaggccgccaacuucugcgcccugauccucgcguacugcaacaagacggugggcgagcugggcgacgugcgcgagaccauguccuaccuguuccagcacgccaaccucgacagcugcaagcggguccugaacguggucugcaagaccugcgggcagcagcagaccacccugaagggcguggaggccgugauguacauggggacgcucuccuacgagcaguucaagaagggcguccagauccccugcaccugcgggaagcaggccaccaaguaccuggugcagcaggagagccccuucgugaugauguccgcccccccggcgcaguacgagcugaagcacggcaccuucacgugcgccagcgaguacaccggcaacuaccagugcgggcacuacaagcacaucaccuccaaggagacccucuacugcaucgacggcgcccugcugacgaagagcagcgaguacaaggggcccaucaccgacgucuucuacaaggagaacuccuacaccaccacgaucaagcccgugaccuacaagcucgacggcguggucugcaccgagaucgaccccaagcuggacaacuacuacaagaaggacaacagcuacuucaccgagcagccgaucgaccuggugcccaaccagcccuaccccaacgccuccuucgacaacuucaaguucgugugcgacaacaucaaguucgccgacgaccucaaccagcugacgggguacaagaagccggcgagccgcgagcugaaggucaccuucuuccccgaccucaacggcgacgugguggccaucgacuacaagcacuacacccccuccuucaagaagggcgccaagcugcugcacaagcccaucgucuggcacgugaacaacgccaccaacaaggcgacguacaagccgaacaccuggugcauccggugccucuggagcaccaagcccguggagaccuccaacagcuucgacguccugaaguccgaggacgcccaggggauggacaaccuggccugcgaggaccucaagcccgugagcgaggagguggucgagaaccccacgauccagaaggacgugcuggagugcaacgugaagaccaccgaggucgugggcgacaucauccugaagccggccaacaacucccucaagaucaccgaggagguggggcacacggaccugauggccgcguacgucgacaacagcucccugaccaucaagaagcccaacgagcucagccgcgugcugggccugaagacccucgccacccacgggcuggccgccgugaacuccguccccugggacacgaucgccaacuacgcgaagccguuccugaacaagguggugagcaccaccaccaacaucgucacgcgcugccucaaccgggugugcaccaacuacaugcccuacuucuucacccugcugcuccagcugugcaccuucacccgcuccacgaacagccggaucaaggccuccaugcccaccaccaucgccaagaacaccgugaagagcgucggcaaguucugccuggaggccagcuucaacuaccucaagucccccaacuucagcaagcugaucaacaucaucaucugguuccugcuccuguccgugugccugggcagccucaucuacuccacggccgcgcugggggugcugaugagcaaccucggcaugccguccuacugcaccggguaccgcgagggcuaccugaacagcaccaacgucaccaucgccacguacugcaccggcuccauccccugcagcgugugccuguccgggcucgacagccuggacaccuaccccucccuggagaccauccagaucacgaucagcuccuucaagugggaccucaccgccuucggccugguggccgagugguuccuggccuacauccucuucacccgguucuucuacguccuggggcuggcggccaucaugcagcucuucuucagcuacuucgccgugcacuucaucuccaacagcuggcugauguggcugaucaucaaccuggugcagauggcccccaucuccgcgaugguccgcauguacaucuucuucgccagcuucuacuacguguggaagagcuacgugcacgucguggacggcugcaacuccagcaccugcaugaugugcuacaagcggaaccgcgccacgcggguggagugcaccaccaucgucaacggggugcgccgguccuucuacgucuacgccaacggcggcaagggguucugcaagcuccacaacuggaacugcgugaacugcgacaccuucugcgccggcagcacguucaucuccgacgagguggcgcgcgaccugagccugcaguucaagcggccgaucaaccccaccgaccaguccagcuacaucgucgacuccgugaccgugaagaacgggagcauccaccucuacuucgacaaggccggccagaagaccuacgagcgccacucccugagccacuucgucaaccuggacaaccuccgggccaacaacacgaaggggucccugcccaucaacgugaucguguucgacggcaagagcaagugcgaggaguccagcgccaaguccgccagcgucuacuacucccagcugaugugccagcccauccuccugcuggaccaggcgcucgugagcgacgugggcgacagcgccgaggucgccgugaagauguucgacgccuacgugaacaccuucuccagcaccuucaacgucccgauggagaagcugaagacccugguggccacggcggaggccgagcucgccaagaacgugucccuggacaacguccugagcaccuucaucuccgccgcgcgccagggguucguggacagcgacguggagaccaaggacgucguggagugccucaagcugucccaccagagcgacaucgaggugaccggcgacuccugcaacaacuacaugcugacguacaacaaggucgagaacaugaccccccgggaccucggggccugcaucgacugcagcgcccgccacaucaacgcccagguggccaagucccacaacaucgcgcugaucuggaacgugaaggacuucaugagccuguccgagcagcuccggaagcagauccgcagcgccgccaagaagaacaaccugcccuucaagcugaccugcgccaccacgcgccaggucgugaacguggucaccaccaagaucgcccucaagggcgggugaggacuagucccuguucccagagcccacuuuuuuuucuuuuuuugaaauaaaauagccugucuuucagaucucaaaggcucuuuucagagccaccaaaaaaaaaaaaaaaaaaaaaaaaaaaaaaaaaaaaaaaaaaaaaaaaaaaaaaaaaaaaaaaaaaaaaaaaaaaaaaaaaaaaaaaaaaaaaaaaaaaaa

SEQ ID NO: 19835 - RNA, 6113 nt, Artificial Sequence
  SARS-CoV-2__MT755898.1__non-structural protein 3 (NSP3) mRNA gc
aggagagucccgcagucggcguccagcggcucugcuuguucgugugugugucguugcaggccuuauucaagcuuaccauggcccccaccaaggugaccuucggcgacgacacggucaucgaggugcagggguacaagagcgugaacaucaccuucgagcuggacgagcgcaucgacaagguccucaacgagaagugcuccgccuacaccguggagcugggcaccgaggugaacgaguucgcgugcgucguggccgacgccgugaucaagacgcugcagccggucagcgagcuccugaccccccuggggaucgaccucgacgagugguccauggccaccuacuaccuguucgacgagagcggcgaguucaagcuggccucccacauguacugcagcuucuacccccccgacgaggacgaggaggagggggacugcgaggaggaggaguucgagccguccacccaguacgaguacggcacggaggacgacuaccagggcaagccccucgaguucggggcgaccagcgccgcccugcagcccgaggaggagcaggaggaggacuggcuggacgacgacucccagcagaccgugggccagcaggacgggagcgaggacaaccagaccacgaccauccagaccaucguggagguccagccccagcucgagauggagcugaccccgguggugcagacgaucgaggucaacuccuucagcggcuaccugaagcucaccgacaacguguacaucaagaacgccgacaucguggaggaggcgaagaaggucaagcccaccgugguggucaacgccgccaacguguaccugaagcacgggggcggcguggccggggcccugaacaaggcgaccaacaacgccaugcaggucgaguccgacgacuacaucgccacgaacggcccccucaagguggggggcagcugcguccuguccggccacaaccuggccaagcacugccuccacgugguggggcccaacgucaacaagggcgaggacauccagcugcugaagagcgccuacgagaacuucaaccagcacgaggugcuccuggcgccgcugcucuccgccgggaucuucggcgccgaccccauccacagccugcgggugugcgucgacaccgugcgcaccaacguguaccuggccgucuucgacaagaaccucuacgacaagcugguguccagcuuccuggagaugaagagcgagaagcagguggagcagaagaucgccgagauccccaaggaggaggucaagcccuucaucaccgaguccaagccgagcguggagcagcggaagcaggacgacaagaagaucaaggcgugcguggaggaggucacgaccacccucgaggagaccaaguuccugacggagaaccugcuccuguacaucgacaucaacgggaaccugcaccccgacuccgccacccucgugagcgacaucgacaucaccuuccugaagaaggacgcccccuacaucgugggcgacgucgugcaggagggcgugcugaccgccgucgugauccccacgaagaaggccgggggcaccaccgagaugcucgcgaaggcccugcgcaaggugccgaccgacaacuacaucacgaccuaccccgggcagggccugaacggguacaccgucgaggaggccaagaccgugcucaagaagugcaaguccgccuucuacauccugcccagcaucaucuccaacgagaagcaggagauccugggcaccgugagcuggaaccuccgggagaugcuggcgcacgccgaggagacgcgcaagcugaugcccgucugcguggagaccaaggccaucguguccaccauccagcggaaguacaagggcaucaagauccaggagggggucguggacuacggcgcccgcuucuacuucuacaccagcaagacgaccguggccucccugaucaacacccucaacgaccugaacgagacccuggucacgaugccgcucggguacgugacccacggccugaaccuggaggaggcggcccgguacaugcgcagccucaaggugcccgccaccgucuccgugagcucccccgacgccgugaccgccuacaacggguaccugacgagcuccagcaagacccccgaggagcacuucaucgagaccaucucccuggcgggcagcuacaaggacuggagcuacuccggccagagcacccagcucgggaucgaguuccugaagcggggcgacaaguccgucuacuacacgagcaacccgaccaccuuccaccuggacggggaggugaucaccuucgacaaccucaagacgcugcugucccuccgcgaggugcggaccaucaaggucuucaccaccguggacaacaucaaccugcacacgcagguggucgacaugagcaugaccuacggccagcaguucggccccaccuaccuggacggggccgacgugaccaagaucaagccccacaacucccacgagggcaagacguucuacgugcucccgaacgacgacacccugcgcgucgaggccuucgaguacuaccacaccaccgaccccagcuuccuggggcgguacauguccgcccucaaccacacgaagaaguggaaguacccccaggugaacggccugaccagcaucaagugggccgacaacaacugcuaccuggcgaccgcccuccugacccugcagcagaucgagcucaaguucaaccccccggcccugcaggacgccuacuaccgcgcgcgggccggggaggccgccaacuucugcgcccugauccucgcguacugcaacaagacggugggcgagcugggcgacguccgcgagaccauguccuaccuguuccagcacgccaaccucgacagcugcaagcgggugcugaacgucgugugcaagaccugcgggcagcagcagaccacccugaagggcguggaggccgucauguacauggggacgcucuccuacgagcaguucaagaagggcgugcagauccccugcaccugcgggaagcaggccaccaaguaccuggugcagcaggagagccccuucgucaugauguccgcccccccggugcaguacgagcugaagcacggcaccuucacgugcgcgagcgaguacaccggcaacuaccagugcgggcacuacaagcacaucaccuccaaggagacccucuacugcaucgacggcgcccugcugacgaagagcagcgaguacaaggggcccaucaccgacguguucuacaaggagaacuccuacaccaccacgaucaagcccgucaccuacaagcucgacggcguggugugcaccgagaucgaccccaagcuggacaacuacuacaagaaggacaacagcuacuucaccgagcagccgaucgaccugguccccaaccagcccuaccccaacgccuccuucgacaacuucaaguucgugugcgacaacaucaaguucgccgacgaccucaaccagcugacgggguacaagaagccggccagccgcgagcugaaggugaccuucuuccccgaccucaacggcgacgucguggcgaucgacuacaagcacuacacccccuccuucaagaagggcgccaagcugcugcacaagcccaucguguggcacgucaacaacgccaccaacaaggccacguacaagccgaacaccuggugcauccggugccucuggagcaccaagcccguggagaccuccaacagcuucgacgugcugaaguccgaggacgcgcaggggauggacaaccuggccugcgaggaccucaagcccgucagcgaggaggugguggagaaccccacgauccagaaggacguccuggagugcaacgugaagaccaccgagguggucggcgacaucauccugaagccggccaacaacucccucaagaucaccgaggagguggggcacacggaccugauggccgccuacguggacaacagcucccugaccaucaagaagcccaacgagcucagccgcguccugggccugaagacccucgcgacccacgggcuggccgccgugaacuccgugcccugggacacgaucgccaacuacgccaagccguuccugaacaaggucgugagcaccaccaccaacaucgugacgcgcugccucaaccgggucugcaccaacuacaugcccuacuucuucacccugcugcuccagcugugcaccuucacccgcuccacgaacagccggaucaaggcguccaugcccaccaccaucgccaagaacaccgugaagagcgugggcaaguucugccuggaggccagcuucaacuaccucaagucccccaacuucagcaagcugaucaacaucaucaucugguuccugcuccuguccgucugccugggcagccucaucuacuccacggccgcccugggggugcugaugagcaaccucggcaugccguccuacugcaccggguaccgcgagggcuaccugaacagcaccaacgugaccaucgcgacguacugcaccggcuccauccccugcagcgucugccuguccgggcucgacagccuggacaccuaccccucccuggagaccauccagaucacgaucagcuccuucaagugggaccucaccgccuucggccugguggccgagugguuccuggccuacauccucuucacccgguucuucuacgugcuggggcuggccgcgaucaugcagcucuucuucagcuacuucgccguccacuucaucuccaacagcuggcugauguggcugaucaucaaccuggugcagauggcccccaucuccgccauggugcgcauguacaucuucuucgcgagcuucuacuacgucuggaagagcuacgugcacguggucgacggcugcaacuccagcaccugcaugaugugcuacaagcggaaccgcgccacgcggguggagugcaccaccaucgucaacggggugcgccgguccuucuacguguacgccaacggcggcaagggguucugcaagcuccacaacuggaacugcgucaacugcgacaccuucugcgccggcagcacguucaucuccgacgagguggcccgcgaccugagccugcaguucaagcggccgaucaaccccaccgaccaguccagcuacaucguggacuccgucaccgugaagaacgggagcauccaccucuacuucgacaaggcgggccagaagaccuacgagcgccacucccugagccacuucgugaaccuggacaaccuccgggccaacaacacgaaggggucccugcccaucaacgucaucguguucgacggcaagagcaagugcgaggaguccagcgccaaguccgccagcguguacuacucccagcugaugugccagcccauccuccugcuggaccaggcccucgucagcgacgugggcgacagcgcggagguggccgucaagauguucgacgccuacgugaacaccuucuccagcaccuucaacgugccgauggagaagcugaagacccuggucgccacggccgaggcggagcucgccaagaacgugucccuggacaacgugcugagcaccuucaucuccgccgcccgccagggguucgucgacagcgacguggagaccaaggacguggucgagugccucaagcugucccaccagagcgacaucgaggugaccggcgacuccugcaacaacuacaugcugacguacaacaagguggagaacaugaccccccgggaccucggggcgugcaucgacugcagcgcccgccacaucaacgcccaggucgccaagucccacaacaucgcccugaucuggaacgugaaggacuucaugagccuguccgagcagcuccggaagcagauccgcagcgcggccaagaagaacaaccugcccuucaagcugaccugcgccaccacgcgccagguggucaacguggugaccaccaagaucgcccucaagggcgggugaggacuagucccuguucccagagcccacuuuuuuuucuuuuuuugaaauaaaauagccugucuuucagaucucaaaggcucuuuucagagccaccaaaaaaaaaaaaaaaaaaaaaaaaaaaaaaaaaaaaaaaaaaaaaaaaaaaaaaaaaaaaaaaaaaaaaaaaaaaaaaaaaaaaaaaaaaaaaaaaaaaaa

SEQ ID NO: 19836 - RNA, 6113 nt, Artificial Sequence
  SARS-CoV-2__MT755916.1__non-structural protein 3 (NSP3) mRNA gc
aggagagucccgcagucggcguccagcggcucugcuuguucgugugugugucguugcaggccuuauucaagcuuaccauggcccccaccaaggugaccuucggcgacgacacggucaucgaggugcagggguacaagagcgugaacaucaccuucgagcuggacgagcgcaucgacaagguccucaacgagaagugcuccgccuacaccguggagcugggcaccgaggugaacgaguucgcgugcgucguggccgacgccgugaucaagacgcugcagccggucagcgagcuccugaccccccuggggaucgaccucgacgagugguccauggccaccuacuaccuguucgacgagagcggcgaguucaagcuggccucccacauguacugcagcuucuacccccccgacgaggacgaggaggagggggacugcgaggaggaggaguucgagccguccacccaguacgaguacggcacggaggacgacuaccagggcaagccccucgaguucggggcgaccagcgccgcccugcagcccgaggaggagcaggaggaggacuggcuggacgacgacucccagcagaccgugggccagcaggacgggagcgaggacaaccagaccacgaccauccagaccaucguggagguccagccccagcucgagauggagcugaccccgguggugcagacgaucgaggucaacuccuucagcggcuaccugaagcucaccgacaacguguacaucaagaacgccgacaucguggaggaggcgaagaaggucaagcccaccgugguggucaacgccgccaacguguaccugaagcacgggggcggcguggccggggcccugaacaaggcgaccaacaacgccaugcaggucgaguccgacgacuacaucgccacgaacggcccccucaagguggggggcagcugcguccuguccggccacaaccuggccaagcacugccuccacgugguggggcccaacgucaacaagggcgaggacauccagcugcugaagagcgccuacgagaacuucaaccagcacgaggugcuccuggcgccgcugcucuccgccgggaucuucggcgccgaccccauccacagccugcgggugugcgucgacaccgugcgcaccaacguguaccuggccgucuucgacaagaaccucuacgacaagcugguguccagcuuccuggagaugaagagcgagaagcagguggagcagaagaucgccgagauccccaaggaggaggucaagcccuucaucaccgaguccaagccgagcguggagcagcggaagcaggacgacaagaagaucaaggcgugcguggaggaggucacgaccacccucgaggagaccaaguuccugacggagaaccugcuccuguacaucgacaucaacgggaaccugcaccccgacuccgccacccucgugagcgacaucgacaucaccuuccugaagaaggacgcccccuacaucgugggcgacgucgugcaggagggcgugcugaccgccgucgugauccccacgaagaaggccgggggcaccaccgagaugcucgcgaaggcccugcgcaaggugccgaccgacaacuacaucacgaccuaccccgggcagggccugaacggguacaccgucgaggaggccaagaccgugcucaagaagugcaaguccgccuucuacauccugcccagcaucaucuccaacgagaagcaggagauccugggcaccgugagcuggaaccuccgggagaugcuggcgcacgccgaggagacgcgcaagcugaugcccgucugcguggagaccaaggccaucguguccaccauccagcggaaguacaagggcaucaagauccaggagggggucguggacuacggcgcccgcuucuacuucuacaccagcaagacgaccguggccucccugaucaacacccucaacgaccugaacgagacccuggucacgaugccgcucggguacgugacccacggccugaaccuggaggaggcggcccgguacaugcgcagccucaaggugcccgccaccgucuccgugagcucccccgacgccgugaccgccuacaacggguaccugacgagcuccagcaagacccccgaggagcacuucaucgagaccaucucccuggcgggcagcuacaaggacuggagcuacuccggccagagcacccagcucgggaucgaguuccugaagcggggcgacaaguccgucuacuacacgagcaacccgaccaccuuccaccuggacggggaggugaucaccuucgacaaccucaagacgcugcugucccuccgcgaggugcggaccaucaaggucuucaccaccguggacaacaucaaccugcacacgcagguggucgacaugagcaugaccuacggccagcaguucggccccaccuaccuggacggggccgacgugaccaagaucaagccccacaacucccacgagggcaagacguucuacgugcucccgaacgacgacacccugcgcgucgaggccuucgaguacuaccacaccaccgaccccagcuuccuggggcgguacauguccgcccucaaccacacgaagaaguggaaguacccccaggugaacggccugaccagcaucaagugggccgacaacaacugcuaccuggcgaccgcccuccugacccugcagcagaucgagcuccgcuucaaccccccggcccugcaggacgccuacuaccgggcgcgcgccggggaggccgccaacuucugcgcccugauccucgcguacugcaacaagacggugggcgagcugggcgacguccgggagaccauguccuaccuguuccagcacgccaaccucgacagcugcaagcgcgugcugaacgucgugugcaagaccugcgggcagcagcagaccacccugaagggcguggaggccgucauguacauggggacgcucuccuacgagcaguucaagaagggcgugcagauccccugcaccugcgggaagcaggccaccaaguaccuggugcagcaggagagccccuucgucaugauguccgcccccccggcgcaguacgagcugaagcacggcaccuucacgugcgccagcgaguacaccggcaacuaccagugcgggcacuacaagcacaucaccuccaaggagacccucuacugcaucgacggcgcccugcugacgaagagcagcgaguacaaggggcccaucaccgacguguucuacaaggagaacuccuacaccaccacgaucaagcccgugaccuacaagcucgacggcgucgugugcaccgagaucgaccccaagcuggacaacuacuacaagaaggacaacagcuacuucaccgagcagccgaucgaccuggugcccaaccagcccuaccccaacgccuccuucgacaacuucaaguucgucugcgacaacaucaaguucgccgacgaccucaaccagcugacgggguacaagaagccggcgagccgggagcugaaggugaccuucuuccccgaccucaacggcgacguggucgccaucgacuacaagcacuacacccccuccuucaagaagggcgccaagcugcugcacaagcccaucguguggcacgugaacaacgccaccaacaaggcgacguacaagccgaacaccuggugcauccgcugccucuggagcaccaagcccgucgagaccuccaacagcuucgacgugcugaaguccgaggacgcccaggggauggacaaccuggccugcgaggaccucaagcccgugagcgaggaggucguggagaaccccacgauccagaaggacgugcuggagugcaacgucaagaccaccgagguggugggcgacaucauccugaagccggccaacaacucccucaagaucaccgaggaggucgggcacacggaccugauggccgcguacguggacaacagcucccugaccaucaagaagcccaacgagcucagccgcgugcugggccugaagacccucgccacccacgggcuggccgccgucaacuccgugcccugggacacgaucgccaacuacgcgaagccguuccugaacaagguggucagcaccaccaccaacaucgugacgcggugccucaaccgcgugugcaccaacuacaugcccuacuucuucacccugcugcuccagcugugcaccuucacccgguccacgaacagccgcaucaaggccuccaugcccaccaccaucgccaagaacaccgucaagagcgugggcaaguucugccuggaggccagcuucaacuaccucaagucccccaacuucagcaagcugaucaacaucaucaucugguuccugcuccuguccgugugccugggcagccucaucuacuccacggccgcgcuggggguccugaugagcaaccucggcaugccguccuacugcaccggguaccgggagggcuaccugaacagcaccaacgugaccaucgccacguacugcaccggcuccauccccugcagcgugugccuguccgggcucgacagccuggacaccuaccccucccuggagaccauccagaucacgaucagcuccuucaagugggaccucaccgccuucggccuggucgccgagugguuccuggccuacauccucuucacccgcuucuucuacgugcuggggcuggcggccaucaugcagcucuucuucagcuacuucgccgugcacuucaucuccaacagcuggcugauguggcugaucaucaaccugguccagauggcccccaucuccgcgauggugcggauguacaucuucuucgccagcuucuacuacguguggaagagcuacguccacgugguggacggcugcaacuccagcaccugcaugaugugcuacaagcgcaaccgggccacgcgcgucgagugcaccaccaucgugaacgggguccggcgcuccuucuacguguacgccaacggcggcaagggguucugcaagcuccacaacuggaacugcgugaacugcgacaccuucugcgccggcagcacguucaucuccgacgaggucgcgcgggaccugagccugcaguucaagcgcccgaucaaccccaccgaccaguccagcuacaucguggacuccgugaccgucaagaacgggagcauccaccucuacuucgacaaggccggccagaagaccuacgagcggcacucccugagccacuucgugaaccuggacaaccuccgcgccaacaacacgaaggggucccugcccaucaacgugaucgucuucgacggcaagagcaagugcgaggaguccagcgccaaguccgccagcguguacuacucccagcugaugugccagcccauccuccugcuggaccaggcgcucgugagcgacgucggcgacagcgccgagguggccgugaagauguucgacgccuacgucaacaccuucuccagcaccuucaacgugccgauggagaagcugaagacccugguggccacggcggaggccgagcucgccaagaacgucucccuggacaacgugcugagcaccuucaucuccgccgcgcggcagggguucguggacagcgacgucgagaccaaggacgugguggagugccucaagcugucccaccagagcgacaucgaggucaccggcgacuccugcaacaacuacaugcugacguacaacaagguggagaacaugaccccccgcgaccucggggccugcaucgacugcagcgcccggcacaucaacgcccacguggccaagucccacaacaucgcgcugaucuggaacgucaaggacuucaugagccuguccgagcagcuccgcaagcagauccgcagcgccgccaagaagaacaaccugcccuucaagcugaccugcgccaccacgcggcagguggugaacgucgugaccaccaagaucgcccucaagggcgggugaggacuagucccuguucccagagcccacuuuuuuuucuuuuuuugaaauaaaauagccugucuuucagaucucaaaggcucuuuucagagccaccaaaaaaaaaaaaaaaaaaaaaaaaaaaaaaaaaaaaaaaaaaaaaaaaaaaaaaaaaaaaaaaaaaaaaaaaaaaaaaaaaaaaaaaaaaaaaaaaaaaaa

SEQ ID NO: 19837 - RNA, 6113 nt, Artificial Sequence
  SARS-CoV-2__MT757029.1__non-structural protein 3 (NSP3) mRNA gc
aggagagucccgcagucggcguccagcggcucugcuuguucgugugugugucguugcaggccuuauucaagcuuaccauggcccccaccaaggugaccuucggcgacgacacggucaucgaggugcagggguacaagagcgugaacaucaccuucgagcuggacgagcgcaucgacaagguccucaacgagaagugcuccgccuacaccguggagcugggcaccgaggugaacgaguucgcgugcgucguggccgacgccgugaucaagacgcugcagccggucagcgagcuccugaccccccuggggaucgaccucgacgagugguccauggccaccuacuaccuguucgacgagagcggcgaguucaagcuggccucccacauguacugcagcuucuacccccccgacgaggacgaggaggagggggacugcgaggaggaggaguucgagccguccacccaguacgaguacggcacggaggacgacuaccagggcaagccccucgaguucggggcgaccagcgccgcccugcagcuggaggaggagcaggaggaggacuggcucgacgacgacucccagcagaccgugggccagcaggacgggagcgaggacaaccagaccacgaccauccagaccaucguggagguccagccccagcuggagauggagcugacccccguggugcagacgaucgaggucaacuccuucagcggcuaccucaagcugaccgacaacguguacaucaagaacgccgacaucguggaggaggcgaagaaggucaagccgaccgugguggucaacgccgccaacguguaccugaagcacgggggcggcguggccggggcccucaacaaggcgaccaacaacgccaugcaggucgaguccgacgacuacaucgccacgaacggcccccugaagguggggggcagcugcguccuguccggccacaaccucgccaagcacugccugcacgugguggggcccaacgucaacaagggcgaggacauccagcugcucaagagcgccuacgagaacuucaaccagcacgaggugcugcuggcgccccuccuguccgccgggaucuucggcgccgacccgauccacagccugcgggugugcgucgacaccgugcgcaccaacguguaccucgccgucuucgacaagaaccuguacgacaagcugguguccagcuuccucgagaugaagagcgagaagcagguggagcagaagaucgccgagauccccaaggaggaggucaagcccuucaucaccgaguccaagcccagcguggagcagcggaagcaggacgacaagaagaucaaggcgugcguggaggaggucacgaccacccuggaggagaccaaguuccugacggagaaccuccugcuguacaucgacaucaacgggaaccuccacccggacuccgccacccuggugagcgacaucgacaucaccuuccugaagaaggacgcccccuacaucgugggcgacgucgugcaggagggcgugcucaccgccgucgugauccccacgaagaaggccgggggcaccaccgagaugcuggcgaaggcccugcgcaaggugcccaccgacaacuacaucacgaccuacccggggcagggccucaacggguacaccgucgaggaggccaagaccgugcugaagaagugcaaguccgccuucuacauccugcccagcaucaucuccaacgagaagcaggagauccucggcaccgugagcuggaaccugcgggagaugcuggcgcacgccgaggagacgcgcaagcugaugcccgucugcguggagaccaaggccaucguguccaccauccagcggaaguacaagggcaucaagauccaggagggggucguggacuacggcgcccgcuucuacuucuacaccagcaagacgaccguggccucccucaucaacacccugaacgaccugaacgagacccucgucacgaugccccugggguacgugacccacggccugaaccucgaggaggcggcccgguacaugcgcagccugaaggugccggccaccgucuccgugagcucccccgacgccgugaccgccuacaacggguaccugacgagcuccagcaagacccccgaggagcacuucaucgagaccaucucccucgcgggcagcuacaaggacuggagcuacuccggccagagcacccagcuggggaucgaguuccugaagcggggcgacaaguccgucuacuacacgagcaaccccaccaccuuccaccucgacggggaggugaucaccuucgacaaccugaagacgcugcucucccugcgcgaggugcggaccaucaaggucuucaccaccguggacaacaucaaccugcacacgcagguggucgacaugagcaugaccuacggccagcaguucggccucaccuaccuggacggggccgacgugaccaagaucaagccgcacaacucccacgagggcaagacguucuacgugcugcccaacgacgacacccuccgcgucgaggccuucgaguacuaccacaccaccgaccccagcuuccuggggcgguacauguccgcccugaaccacacgaagaaguggaaguacccgcaggugaacggccucaccagcaucaagugggccgacaacaacugcuaccuggcgaccgcccugcucacccugcagcagaucgagcugaaguucaacccccccgcccuccaggacgccuacuaccgcgcgcgggccggggaggccgccaacuucugcgcccugauccuggcguacugcaacaagacggugggcgagcucggcgacguccgcgagaccauguccuaccuguuccagcacgccaaccuggacagcugcaagcgggugcucaacgucgugugcaagaccugcgggcagcagcagaccacccugaagggcguggaggccgucauguacauggggacgcuguccuacgagcaguucaagaagggcgugcagauccccugcaccugcgggaagcaggccaccaaguaccucgugcagcaggagagcccguucgucaugauguccgccccccccgcgcaguacgagcugaagcacggcaccuucacgugcgccagcgaguacaccggcaacuaccagugcgggcacuacaagcacaucaccuccaaggagacccuguacugcaucgacggcgcccuccugacgaagagcagcgaguacaaggggcccaucaccgacguguucuacaaggagaacuccuacaccaccacgaucaagccggugaccuacaagcuggacggcgucgugugcaccgagaucgaccccaagcucgacaacuacuacaagaaggacaacagcuacuucaccgagcagcccaucgaccuggugcccaaccagccguaccccaacgccuccuucgacaacuucaaguucgucugcgacaacaucaaguucgccgacgaccugaaccagcucacgggguacaagaagcccgcgagccgcgagcugaaggugaccuucuuccccgaccugaacggcgacguggucgccaucgacuacaagcacuacaccccguccuucaagaagggcgccaagcuccugcacaagcccaucguguggcacgugaacaacgccaccaacaaggcgacguacaagcccaacaccuggugcauccggugccuguggagcaccaagcccgucgagaccuccaacagcuucgacgugcucaaguccgaggacgcccaggggauggacaaccuggccugcgaggaccugaagccggugagcgaggaggucguggagaaccccacgauccagaaggacgugcucgagugcaacgucaagaccaccgagguggugggcgacaucauccugaagcccgccaacaacucccugaagaucaccgaggaggucgggcacacggaccucauggccgcguacguggacaacagcucccugaccaucaagaagcccaacgagcugagccgcgugcucggccugaagacccuggccacccacgggcucgccgccgucaacuccgugccgugggacacgaucgccaacuacgcgaagcccuuccugaacaagguggucagcaccaccaccaacaucgugacgcgcugccugaaccgggugugcaccaacuacaugcccuacuucuucacccuccugcugcagcucugcaccuucacccgcuccacgaacagccggaucaaggccuccaugccgaccaccaucgccaagaacaccgucaagagcgugggcaaguucugccuggaggccagcuucaacuaccugaagucccccaacuucagcaagcucaucaacaucaucaucugguuccugcugcucuccgugugccugggcagccugaucuacuccacggccgcgcucgggguccugaugagcaaccugggcaugcccuccuacugcaccggguaccgcgagggcuaccucaacagcaccaacgugaccaucgccacguacugcaccggcuccauccccugcagcgugugccuguccgggcuggacagccucgacaccuacccgucccuggagaccauccagaucacgaucagcuccuucaagugggaccugaccgccuucggccucgucgccgagugguuccuggccuacauccuguucacccgguucuucuacgugcucgggcuggcggccaucaugcagcuguucuucagcuacuucgccgugcacuucaucuccaacagcuggcugauguggcucaucaucaaccugguccagauggcccccaucuccgcgauggugcgcauguacaucuucuucgccagcuucuacuacguguggaagagcuacguccacgugguggacggcugcaacuccagcaccugcaugaugugcuacaagcggaaccgcgccacgcgggucgagugcaccaccaucgugaacgggguccgccgguccuucuacguguacgccaacggcggcaagggguucugcaagcugcacaacuggaacugcgugaacugcgacaccuucugcgccggcagcacguucaucuccgacgaggucgcgcgcgaccucagccugcaguucaagcggcccaucaaccccaccgaccaguccagcuacaucguggacuccgugaccgucaagaacgggagcauccaccuguacuucgacaaggccggccagaagaccuacgagcgccacucccucagccacuucgugaaccuggacaaccugcgggccaacaacacgaaggggucccucccgaucaacgugaucgucuucgacggcaagagcaagugcgaggaguccagcgccaaguccgccagcguguacuacucccagcugaugugccagcccauccugcuccuggaccaggcgcuggugagcgacgucggcgacagcgccgagguggccgugaagauguucgacgccuacgucaacaccuucuccagcaccuucaacgugcccauggagaagcucaagacccugguggccacggcggaggccgagcuggccaagaacgucucccucgacaacgugcugagcaccuucaucuccgccgcgcgccagggguucguggacagcgacgucgagaccaaggacgugguggagugccugaagcucucccaccagagcgacaucgaggucaccggcgacuccugcaacaacuacaugcugacguacaacaagguggagaacaugaccccccgggaccugggggccugcaucgacugcagcgcccgccacaucaacgcccagguggccaagucccacaacaucgcgcucaucuggaacgucaaggacuucaugagccuguccgagcagcugcggaagcagauccgcagcgccgccaagaagaacaaccucccguucaagcugaccugcgccaccacgcgccagguggugaacgucgugaccaccaagaucgcccugaagggcgggugaggacuagucccuguucccagagcccacuuuuuuuucuuuuuuugaaauaaaauagccugucuuucagaucucaaaggcucuuuucagagccaccaaaaaaaaaaaaaaaaaaaaaaaaaaaaaaaaaaaaaaaaaaaaaaaaaaaaaaaaaaaaaaaaaaaaaaaaaaaaaaaaaaaaaaaaaaaaaaaaaaaaa

SEQ ID NO: 19838 - RNA, 6113 nt, Artificial Sequence
  SARS-CoV-2__MT757047.1__non-structural protein 3 (NSP3) mRNA gc
aggagagucccgcagucggcguccagcggcucugcuuguucgugugugugucguugcaggccuuauucaagcuuaccauggcccccaccaaggugaccuucggcgacgacacggucaucgaggugcagggguacaagagcgugaacaucaccuucgagcuggacgagcgcaucgacaagguccucaacgagaagugcuccgccuacaccguggagcugggcaccgaggugaacgaguucgcgugcgucguggccgacgccgugaucaagacgcugcagccggucagcgagcuccugaccccccuggggaucgaccucgacgagugguccauggccaccuacuaccuguucgacgagagcggcgaguucaagcuggccucccacauguacugcagcuucuacccccccgacgaggacgaggaggagggggacugcgaggaggaggaguucgagccguccacccaguacgaguacggcacggaggacgacuaccagggcaagccccucgaguucggggcgaccagcgccgcccugcagcuggaggaggagcaggaggaggacuggcucgacgacgacucccagcagaccgugggccagcaggacgggagcgaggacaaccagaccacgaccauccagaccaucguggagguccagccccagcuggagauggagcugacccccguggugcagacgaucgaggucaacuccuucagcggcuaccucaagcugaccgacaacguguacaucaagaacgccgacaucguggaggaggcgaagaaggucaagccgaccgugguggucaacgccgccaacguguaccugaagcacgggggcggcguggccggggcccucaacaaggcgaccaacaacgccaugcaggucgaguccgacgacuacaucgccacgaacggcccccugaagguggggggcagcugcguccuguccggccacaaccucgccaagcacugccugcacgugguggggcccaacgucaacaagggcgaggacauccagcugcucaagagcgccuacgagaacuucaaccagcacgaggugcugcuggcgccccuccuguccgccgggaucuucggcgccgacccgauccacagccugcgggugugcgucgacaccgugcgcaccaacguguaccucgccgucuucgacaagaaccuguacgacaagcugguguccagcuuccucgagaugaagagcgagaagcagguggagcagaagaucgccgagauccccaaggaggaggucaagcccuucaucaccgaguccaagcccagcguggagcagcggaagcaggacgacaagaagaucaaggcgugcguggaggaggucacgaccacccuggaggagaccaaguuccugacggagaaccuccugcuguacaucgacaucaacgggaaccuccacccggacuccgccacccuggugagcgacaucgacaucaccuuccugaagaaggacgcccccuacaucgugggcgacgucgugcaggagggcgugcucaccgccgucgugauccccacgaagaaggccgggggcaccaccgagaugcuggcgaaggcccugcgcaaggugcccaccgacaacuacaucacgaccuacccggggcagggccucaacggguacaccgucgaggaggccaagaccgugcugaagaagugcaaguccgccuucuacauccugcccagcaucaucuccaacgagaagcaggagauccucggcaccgugagcuggaaccugcgggagaugcuggcgcacgccgaggagacgcgcaagcugaugcccgucugcguggagaccaaggccaucguguccaccauccagcggaaguacaagggcaucaagauccaggagggggucguggacuacggcgcccgcuucuacuucuacaccagcaagacgaccguggccucccucaucaacacccugaacgaccugaacgagacccucgucacgaugccccugggguacgugacccacggccugaaccucgaggaggcggcccgguacaugcgcagccugaaggugccggccaccgucuccgugagcucccccgacgccgugaccgccuacaacggguaccugacgagcuccagcaagacccccgaggagcacuucaucgagaccaucucccucgcgggcagcuacaaggacuggagcuacuccggccagagcacccagcuggggaucgaguuccugaagcggggcgacaaguccgucuacuacacgagcaaccccaccaccuuccaccucgacggggaggugaucaccuucgacaaccugaagacgcugcucucccugcgcgaggugcggaccaucaaggucuucaccaccguggacaacaucaaccugcacacgcagguggucgacaugagcaugaccuacggccagcaguucggcccgaccuaccucgacggggccgacgugaccaagaucaagccccacaacucccacgagggcaagacguucuacgugcugcccaacgacgacacccugcgcgucgaggccuucgaguacuaccacgccaccgacccgagcuuccucgggcgguacauguccgcccugaaccacaccaagaaguggaaguacccccaggugaacggccugacgagcaucaagugggcggacaacaacugcuaccucgccaccgcccugcugacccuccagcagaucgagcugaaguucaacccccccgcccugcaggacgcguacuaccgcgcccgggccggggaggccgccaacuucugcgcgcucauccuggccuacugcaacaagaccgugggcgagcugggcgacguccgcgagacgauguccuaccucuuccagcacgccaaccuggacagcugcaagcgggugcugaacgucgugugcaagaccugcgggcagcagcagaccacccucaagggcguggaggccgucauguacauggggacccuguccuacgagcaguucaagaagggcgugcagaucccgugcacgugcgggaagcaggccaccaaguaccuggugcagcaggagagccccuucgucaugauguccgcgccccccgcccaguacgagcucaagcacggcaccuucaccugcgccagcgaguacacgggcaacuaccagugcgggcacuacaagcacaucaccuccaaggagacccuguacugcaucgacggcgcccugcucaccaagagcagcgaguacaaggggccgaucacggacguguucuacaaggagaacuccuacaccaccaccaucaagcccgugacguacaagcuggacggcgucgugugcaccgagaucgaccccaagcuggacaacuacuacaagaaggacaacagcuacuucaccgagcagcccaucgaccucgugccgaaccagcccuaccccaacgccuccuucgacaacuucaaguucgucugcgacaacaucaaguucgcggacgaccugaaccagcugaccggguacaagaagcccgccagccgcgagcucaaggugacguucuucccggaccugaacggcgacguggucgccaucgacuacaagcacuacacccccuccuucaagaagggcgccaagcugcuccacaagcccaucguguggcacgugaacaacgcgaccaacaaggccaccuacaagcccaacacguggugcauccggugccuguggagcaccaagccggucgagaccuccaacagcuucgacgugcugaaguccgaggacgcccaggggauggacaaccucgccugcgaggaccugaagcccgugagcgaggaggucguggagaaccccaccauccagaaggacgugcuggagugcaacgucaagacgaccgagguggugggcgacaucauccucaagcccgccaacaacucccugaagaucaccgaggaggucgggcacaccgaccugauggcggccuacguggacaacagcucccucacgaucaagaagccgaacgagcugagccgcgugcugggccucaagacccuggccacccacgggcuggccgccgucaacuccgugcccugggacaccaucgcgaacuacgccaagcccuuccucaacaagguggucagcacgaccaccaacaucgugacccgcugccugaaccgggugugcacgaacuacaugccguacuucuucacccugcuccugcagcugugcaccuucacccgcuccaccaacagccggaucaaggccuccaugcccacgaccaucgccaagaacaccgucaagagcgugggcaaguucugccucgaggccagcuucaacuaccugaagucccccaacuucagcaagcugaucaacaucaucaucugguuccuccugcuguccgugugccucggcagccugaucuacuccaccgcggcccuggggguccucaugagcaaccugggcaugcccuccuacugcacgggguaccgcgagggcuaccugaacagcaccaacgugaccaucgccaccuacugcacgggcuccaucccgugcagcgugugccucuccgggcuggacagccuggacaccuaccccucccucgagaccauccagaucaccaucagcuccuucaagugggaccugacggccuucggccuggucgccgagugguuccucgcguacauccuguucacccgguucuucuacgugcuggggcucgccgccaucaugcagcuguucuucagcuacuucgccgugcacuucaucuccaacagcuggcugauguggcugaucaucaaccucguccagauggcgcccaucuccgccauggugcgcauguacaucuucuucgccagcuucuacuacguguggaagagcuacguccacgugguggacggcugcaacuccagcaccugcaugaugugcuacaagcggaaccgcgccacccgggucgagugcacgaccaucgugaacgggguccgccgguccuucuacguguacgccaacggcggcaagggguucugcaagcugcacaacuggaacugcgugaacugcgacaccuucugcgcgggcagcaccuucaucuccgacgaggucgcccgcgaccugagccuccaguucaagcggcccaucaacccgacggaccaguccagcuacaucguggacuccgugaccgucaagaacgggagcauccaccuguacuucgacaaggccggccagaagaccuacgagcgccacucccugagccacuucgugaaccucgacaaccugcgggccaacaacaccaaggggucccugcccaucaacgugaucgucuucgacggcaagagcaagugcgaggaguccagcgccaaguccgcgagcguguacuacucccagcucaugugccagcccauccugcugcucgaccaggcccuggugagcgacgucggcgacagcgccgagguggccgugaagauguucgacgccuacgucaacacguucuccagcaccuucaacgugcccauggagaagcugaagacccucguggcgaccgccgaggccgagcuggccaagaacgucucccuggacaacgugcucagcacguucaucuccgcggcccgccagggguucguggacagcgacgucgagaccaaggacgugguggagugccugaagcugucccaccagagcgacaucgaggucaccggcgacuccugcaacaacuacaugcucaccuacaacaagguggagaacaugacgccgcgggaccugggggccugcaucgacugcagcgcccgccacaucaacgcccagguggcgaagucccacaacaucgcccugaucuggaacgucaaggacuucaugagccucuccgagcagcugcggaagcagauccgcagcgccgccaagaagaacaaccugcccuucaagcucaccugcgccaccacccgccagguggugaacgucgugacgaccaagaucgcgcugaagggcgggugaggacuagucccuguucccagagcccacuuuuuuuucuuuuuuugaaauaaaauagccugucuuucagaucucaaaggcucuuuucagagccaccaaaaaaaaaaaaaaaaaaaaaaaaaaaaaaaaaaaaaaaaaaaaaaaaaaaaaaaaaaaaaaaaaaaaaaaaaaaaaaaaaaaaaaaaaaaaaaaaaaaaa

SEQ ID NO: 19839 - RNA, 6113 nt, Artificial Sequence
  SARS-CoV-2__MT757076.1__non-structural protein 3 (NSP3) mRNA gc
aggagagucccgcagucggcguccagcggcucugcuuguucgugugugugucguugcaggccuuauucaagcuuaccauggcccccaccaaggugaccuucggcgacgacacggucaucgaggugcagggguacaagagcgugaacaucaccuucgagcuggacgagcgcaucgacaagguccucaacgagaagugcuccgccuacaccguggagcugggcaccgaggugaacgaguucgcgugcgucguggccgacgccgugaucaagacgcugcagccggucagcgagcuccugaccccccuggggaucgaccucgacgagugguccauggccaccuacuaccuguucgacgagagcggcgaguucaagcuggccucccacauguacugcagcuucuacccccccgacgaggacgaggaggagggggacugcgaggaggaggaguucgagccguccacccaguacgaguacggcacggaggacgacuaccagggcaagccccucgaguucggggcgaccagcgccgcccugcagcccgaggaggagcaggaggaggacuggcuggacgacgacucccagcagaccgugggccagcaggacgggagcgaggacaaccagaccacgaccauccagaccaucguggagguccagccccagcucgagauggagcugaccccgguggugcagacgaucgaggucaacuccuucagcggcuaccugaagcucaccgacaacguguacaucaagaacgccgacaucguggaggaggcgaagaaggucaagcccaccgugguggucaacgccgccaacguguaccugaagcacgggggcggcguggccggggcccugaacaaggcgaccaacaacgccaugcaggucgaguccgacgacuacaucgccacgaacggcccccucaagguggggggcagcugcguccuguccggccacaaccuggccaagcacugccuccacgugguggggcccaacgucaacaagggcgaggacauccagcugcugaagagcgccuacgagaacuucaaccagcacgaggugcuccuggcgccgcugcucuccgccgggaucuucggcgccgaccccauccacagccugcgggugugcgucgacaccgugcgcaccaacguguaccuggccgucuucgacaagaaccucuacgacaagcugguguccagcuuccuggagaugaagagcgagaagcagguggagcagaagaucgccgagauccccaaggaggaggucaagcccuucaucaccgaguccaagccgagcguggagcagcggaagcaggacgacaagaagaucaaggcgugcguggaggaggucacgaccacccucgaggagaccaaguuccugacggagaaccugcuccuguacaucgacaucaacgggaaccugcaccccgacuccgccacccucgugagcgacaucgacaucaccuuccugaagaaggacgcccccuacaucgugggcgacgucgugcaggagggcgugcugaccgccgucgugauccccacgaagaaggccgggggcaccaccgagaugcucgcgaaggcccugcgcaaggugccgaccgacaacuacaucacgaccuaccccgggcagggccugaacggguacaccgucgaggaggccaagaccgugcucaagaagugcaaguccgccuucuacauccugcccagcaucaucuccaacgagaagcaggagauccugggcaccgugagcuggaaccuccgggagaugcuggcgcacgccgaggagacgcgcaagcugaugcccgucugcguggagaccaaggccaucguguccaccauccagcggaaguacaagggcaucaagauccaggagggggucguggacuacggcgcccgcuucuacuucuacaccagcaagacgaccguggccucccugaucaacacccucaacgaccugaacgagacccuggucacgaugccgcucggguacgugacccacggccugaaccuggaggaggcggcccgguacaugcgcagccucaaggugcccgccaccgucuccgugagcucccccgacgccgugaccgccuacaacggguaccugacgagcuccagcaagacccccgaggagcacuucaucgagaccaucucccuggcgggcagcuacaaggacuggagcuacuccggccagagcacccagcucgggaucgaguuccugaagcggggcgacaaguccgucuacuacacgagcaacccgaccaccuuccaccuggacggggaggugaucaccuucgacaaccucaagacgcugcugucccuccgcgaggugcggaccaucaaggucuucaccaccguggacaacaucaaccugcacacgcagguggucgacaugagcaugaccuacggccagcaguucggccccaccuaccuggacggggccgacgugaccaagaucaagccccacaacucccacgagggcaagacguucuacgugcucccgaacgacgacacccugcgcgucgaggccuucgaguacuaccacaccaccgaccccagcuuccuggggcgguacauguccgcccucaaccacacgaagaaguggaaguacccccaggugaacggccugaccagcaucaagugggccgacaacaacugcuaccuggcgaccgcccuccugacccugcagcagaucgagcucaaguucaaccccccggcccugcaggacgccuacuaccgcgcgcgggccggggaggccgccaacuucugcgcccugauccucgcguacugcaacaagacggugggcgagcugggcgacguccgcgagaccauguccuaccuguuccagcacgccaaccucgacagcugcaagcgggugcugaacgucgugugcaagaccugcgggcagcagcagaccacccugaagggcguggaggccgucauguacauggggacgcucuccuacgagcaguucaagaagggcgugcagauccccugcaccugcgggaagcaggccaccaaguaccuggugcagcaggagagccccuucgucaugauguccgcccccccggcgcaguacgagcugaagcacggcaccuucacgugcgccagcgaguacaccggcaacuaccagugcgggcacuacaagcacaucaccuccaaggagacccucuacugcaucgacggcgcccugcugacgaagagcagcgaguacaaggggcccaucaccgacguguucuacaaggagaacuccuacaccaccacgaucaagcccgugaccuacaagcucgacggcgucgugugcaccgagaucgaccccaagcuggacaacuacuacaagaaggacaacagcuacuucaccgagcagccgaucgaccuggugcccaaccagcccuaccccaacgccuccuucgacaacuucaaguucgucugcgacaacaucaaguucgccgacgaccucaaccagcugacgggguacaagaagccggcgagccgcgagcugaaggugaccuucuuccccgaccucaacggcgacguggucgccaucgacuacaagcacuacacccccuccuucaagaagggcgccaagcugcugcacaagcccaucguguggcacgugaacaacgccaccaacaaggcgacguacaagccgaacaccuggugcauccggugccucuggagcaccaagcccgucgagaccuccaacagcuucgacgugcugaaguccgaggacgcccaggggauggacaaccuggccugcgaggaccucaagcccgugagcgaggaggucguggagaaccccacgauccagaaggacgugcuggagugcaacgucaagaccaccgagguggugggcgacaucauccugaagccggccaacaacucccucaagaucaccgaggaggucgggcacacggaccugauggccgcguacguggacaacagcucccugaccaucaagaagcccaacgagcucagccgcgugcugggccugaagacccucgccacccacgggcuggccgccgucaacuccgugcccugggacacgaucgccaacuacgcgaagccguuccugaacaagguggucagcaccaccaccaacaucgugacgcgcugccucaaccgggugugcaccaacuacaugcccuacuucuucacccugcugcuccagcugugcaccuucacccgcuccacgaacagccggaucaaggccuccaugcccaccaccaucgccaagaacaccgucaagagcgugggcaaguucugccuggaggccagcuucaacuaccucaagucccccaacuucagcaagcugaucaacaucaucaucugguuccugcuccuguccgugugccugggcagccucaucuacuccacggccgcgcuggggguccugaugagcaaccucggcaugccguccuacugcaccggguaccgcgagggcuaccugaacagcaccaacgugaccaucgccacguacugcaccggcuccauccccugcagcgugugccuguccgggcucgacagccuggacaccuaccccucccuggagaccauccagaucacgaucagcuccuucaagugggaccucaccgccuucggccuggucgccgagugguuccuggccuacauccucuucacccgguucuucuacgugcuggggcuggcggccaucaugcagcucuucuucagcuacuucgccgugcacuucaucuccaacagcuggcugauguggcugaucaucaaccugguccagauggcccccaucuccgcgauggugcgcauguacaucuucuucgccagcuucuacuacguguggaagagcuacguccacgugguggacggcugcaacuccagcaccugcaugaugugcuacaagcggaaccgcgccacgcgggucgagugcaccaccaucgugaacgggguccgccgguccuucuacguguacgccaacggcggcaagggguucugcaagcuccacaacuggaacugcgugaacugcgacaccuucugcgccggcagcacguucaucuccgacgaggucgcgcgcgaccugagccugcaguucaagcggccgaucaaccccaccgaccaguccagcuacaucguggacuccgugaccgucaagaacgggagcauccaccucuacuucgacaaggccggccagaagaccuacgagcgccacucccugagccacuucgugaaccuggacaaccuccgggccaacaacacgaaggggucccugcccaucaacgugaucgucuucgacggcaagagcaagugcgaggaguccagcgccaaguccgccagcguguacuacucccagcugaugugccagcccauccuccugcuggaccaggcgcucgugagcgacgucggcgacagcgccgagguggccgugaagauguucgacgccuacgucaacaccuucuccagcaccuucaacgugccgauggagaagcugaagacccugguggccacggcggaggccgagcucgccaagaacgucucccuggacaacgugcugagcaccuucaucuccgccgcgcgccagggguucguggacagcgacgucgagaccaaggacgugguggagugccucaagcugucccaccagagcgacaucgaggucaccggcgacuccugcaacaacuacaugcugacguacaacaagguggagaacauggccccccgggaccucggggccugcaucgacugcagcgcccgccacaucaacgcccagguggcgaagucccacaacaucgcccugaucuggaacgucaaggacuucaugagccuguccgagcagcuccggaagcagauccgcagcgccgccaagaagaacaaccugcccuucaagcugaccugcgccaccacccgccagguggugaacgucgugacgaccaagaucgcgcucaagggcgggugaggacuagucccuguucccagagcccacuuuuuuuucuuuuuuugaaauaaaauagccugucuuucagaucucaaaggcucuuuucagagccaccaaaaaaaaaaaaaaaaaaaaaaaaaaaaaaaaaaaaaaaaaaaaaaaaaaaaaaaaaaaaaaaaaaaaaaaaaaaaaaaaaaaaaaaaaaaaaaaaaaaaa

SEQ ID NO: 19840 - RNA, 6113 nt, Artificial Sequence
  SARS-CoV-2__MT757085.1__non-structural protein 3 (NSP3) mRNA gc
aggagagucccgcagucggcguccagcggcucugcuuguucgugugugugucguugcaggccuuauucaagcuuaccauggcccccaccaaggugaccuucggcgacgacacggucaucgaggugcagggguacaagagcgugaacaucaccuucgagcuggacgagcgcaucgacaagguccucaacgagaagugcuccgccuacaccguggagcugggcaccgaggugaacgaguucgcgugcgucguggccgacgccgugaucaagacgcugcagccggucagcgagcuccugaccccccuggggaucgaccucgacgagugguccauggccaccuacuaccuguucgacgagagcggcgaguucaagcuggccucccacauguacugcagcuucuacccccccgacgaggacgaggaggagggggacugcgaggaggaggaguucgagccguccacccaguacgaguacggcacggaggacgacuaccagggcaagccccucgaguucggggcgaccagcgccgcccugcagcccgaggaggagcaggaggaggacuggcuggacgacgacucccagcagaccgugggccagcaggacgggagcgaggacaaccagaccacgaccauccagaccaucguggagguccagccccagcucgagauggagcugaccccgguggugcagacgaucgaggucaacuccuucagcggcuaccugaagcucaccgacaacguguacaucaagaacgccgacaucguggaggaggcgaagaaggucaagcccaccgugguggucaacgccgccaacguguaccugaagcacgggggcggcguggccggggcccugaacaaggcgaccaacaacgccaugcaggucgaguccgacgacuacaucgccacgaacggcccccucaagguggggggcagcugcguccuguccggccacaaccuggccaagcacugccuccacgugguggggcccaacgucaacaagggcgaggacauccagcugcugaagagcgccuacgagaacuucaaccagcacgaggugcuccuggcgccgcugcucuccgccgggaucuucggcgccgaccccauccacagccugcgggugugcgucgacaccgugcgcaccaacguguaccuggccgucuucgacaagaaccucuacgacaagcugguguccagcuuccuggagaugaagagcgagaagcagguggagcagaagaucgccgagauccccaaggaggaggucaagcccuucaucaccgaguccaagccgagcguggagcagcggaagcaggacgacaagaagaucaaggcgugcguggaggaggucacgaccacccucgaggagaccaaguuccugacggagaaccugcuccuguacaucgacaucaacgggaaccugcaccccgacuccgccacccucgugagcgacaucgacaucaccuuccugaagaaggacgcccccuacaucgugggcgacgucgugcaggagggcgugcugaccgccgucgugauccccacgaagaaggccgggggcaccaccgagaugcucgcgaaggcccugcgcaaggugccgaccgacaacuacaucacgaccuaccccgggcagggccugaacggguacaccgucgaggaggccaagaccgugcucaagaagugcaaguccgccuucuacauccugcccagcaucaucuccaacgagaagcaggagauccugggcaccgugagcuggaaccuccgggagaugcuggcgcacgccgaggagacgcgcaagcugaugcccgucugcguggagaccaaggccaucguguccaccauccagcggaaguacaagggcaucaagauccaggagggggucguggacuacggcgcccgcuucuacuucuacaccagcaagaucacgguggccucccugaucaacacccucaacgaccugaacgagacccuggucaccaugccgcucggguacgugacgcacggccugaaccuggaggaggcggcccgguacaugcgcagccucaaggugcccgccaccgucuccgugagcucccccgacgccgugaccgccuacaacggguaccugaccagcuccagcaagacgcccgaggagcacuucaucgagaccaucucccuggcgggcagcuacaaggacuggagcuacuccggccagagcacccagcucgggaucgaguuccugaagcggggcgacaaguccgucuacuacaccagcaacccgacgaccuuccaccuggacggggaggugaucaccuucgacaaccucaagacccugcugucccuccgcgaggugcggacgaucaaggucuucaccaccguggacaacaucaaccugcacacccagguggucgacaugagcaugacguacggccagcaguucggccccaccuaccuggacggggccgacgugaccaagaucaagccccacaacucccacgagggcaagaccuucuacgugcucccgaacgacgacacgcugcgcgucgaggccuucgaguacuaccacaccaccgaccccagcuuccuggggcgguacauguccgcccucaaccacaccaagaaguggaaguacccccaggugaacggccugacgagcaucaagugggccgacaacaacugcuaccuggcgaccgcccuccugacccugcagcagaucgagcucaaguucaaccccccggcccugcaggacgccuacuaccgcgcgcgggccggggaggccgccaacuucugcgcccugauccucgcguacugcaacaagaccgugggcgagcugggcgacguccgcgagacgauguccuaccuguuccagcacgccaaccucgacagcugcaagcgggugcugaacgucgugugcaagaccugcgggcagcagcagaccacccugaagggcguggaggccgucauguacauggggacccucuccuacgagcaguucaagaagggcgugcagauccccugcacgugcgggaagcaggccaccaaguaccuggugcagcaggagagccccuucgucaugauguccgcccccccggcgcaguacgagcugaagcacggcaccuucaccugcgccagcgaguacacgggcaacuaccagugcgggcacuacaagcacaucaccuccaaggagacccucuacugcaucgacggcgcccugcugaccaagagcagcgaguacaaggggcccaucacggacguguucuacaaggagaacuccuacaccaccaccaucaagcccgugacguacaagcucgacggcgucgugugcaccgagaucgaccccaagcuggacaacuacuacaagaaggacaacagcuacuucaccgagcagccgaucgaccuggugcccaaccagcccuaccccaacgccuccuucgacaacuucaaguucgucugcgacaacaucaaguucgccgacgaccucaaccagcugaccggguacaagaagccggcgagccgcgagcugaaggugacguucuuccccgaccucaacggcgacguggucgccaucgacuacaagcacuacacccccuccuucaagaagggcgccaagcugcugcacaagcccaucguguggcacgugaacaacgccaccaacaaggcgaccuacaagccgaacacguggugcauccggugccucuggagcaccaagcccgucgagaccuccaacagcuucgacgugcugaaguccgaggacgcccaggggauggacaaccuggccugcgaggaccucaagcccgugagcgaggaggucguggagaaccccaccauccagaaggacgugcuggagugcaacgucaagacgaccgagguggugggcgacaucauccugaagccggccaacaacucccucaagaucaccgaggaggucgggcacaccgaccugauggccgcguacguggacaacagcucccugacgaucaagaagcccaacgagcucagccgcgugcugggccugaagacccucgccacccacgggcuggccgccgucaacuccgugcccugggacaccaucgccaacuacgcgaagccguuccugaacaagguggucagcacgaccaccaacaucgugacccgcugccucaaccgggugugcacgaacuacaugcccuacuucuucacccugcugcuccagcugugcaccuucacccgcuccaccaacagccggaucaaggccuccaugcccacgaccaucgccaagaacaccgucaagagcgugggcaaguucugccuggaggccagcuucaacuaccucaagucccccaacuucagcaagcugaucaacaucaucaucugguuccugcuccuguccgugugccugggcagccucaucuacuccaccgccgcgcuggggguccugaugagcaaccucggcaugccguccuacugcacgggguaccgcgagggcuaccugaacagcaccaacgugaccaucgccaccuacugcacgggcuccauccccugcagcgugugccuguccgggcucgacagccuggacaccuaccccucccuggagaccauccagaucaccaucagcuccuucaagugggaccucacggccuucggccuggucgccgagugguuccuggccuacauccucuucacccgguucuucuacgugcuggggcuggcggccaucaugcagcucuucuucagcuacuucgccgugcacuucaucuccaacagcuggcugauguggcugaucaucaaccugguccagauggcccccaucuccgcgauggugcgcauguacaucuucuucgccagcuucuacuacguguggaagagcuacguccacgugguggacggcugcaacuccagcaccugcaugaugugcuacaagcggaaccgcgccacccgggucgagugcacgaccaucgugaacgggguccgccgguccuucuacguguacgccaacggcggcaagggguucugcaagcuccacaacuggaacugcgugaacugcgacaccuucugcgccggcagcaccuucaucuccgacgaggucgcgcgcgaccugagccugcaguucaagcggccgaucaaccccacggaccaguccagcuacaucguggacuccgugaccgucaagaacgggagcauccaccucuacuucgacaaggccggccagaagaccuacgagcgccacucccugagccacuucgugaaccuggacaaccuccgggccaacaacaccaaggggucccugcccaucaacgugaucgucuucgacggcaagagcaagugcgaggaguccagcgccaaguccgccagcguguacuacucccagcugaugugccagcccauccuccugcuggaccaggcgcucgugagcgacgucggcgacagcgccgagguggccgugaagauguucgacgccuacgucaacacguucuccagcaccuucaacgugccgauggagaagcugaagacccugguggccaccgcggaggccgagcucgccaagaacgucucccuggacaacgugcugagcacguucaucuccgccgcgcgccagggguucguggacagcgacgucgagaccaaggacgugguggagugccucaagcugucccaccagagcgacaucgaggucaccggcgacuccugcaacaacuacaugcugaccuacaacaagguggagaacaugacgccccgggaccucggggccugcaucgacugcagcgcccgccacaucaacgcccagguggccaagucccacaacaucgcgcugaucuggaacgucaaggacuucaugagccuguccgagcagcuccggaagcagauccgcagcgccgccaagaagaacaaccugcccuucaagcugaccugcgccaccacccgccagguggugaacgucgugacgaccaagaucgcccucaagggcgggugaggacuagucccuguucccagagcccacuuuuuuuucuuuuuuugaaauaaaauagccugucuuucagaucucaaaggcucuuuucagagccaccaaaaaaaaaaaaaaaaaaaaaaaaaaaaaaaaaaaaaaaaaaaaaaaaaaaaaaaaaaaaaaaaaaaaaaaaaaaaaaaaaaaaaaaaaaaaaaaaaaaaa

SEQ ID NO: 19841 - RNA, 6113 nt, Artificial Sequence
  SARS-CoV-2__MT757105.1__non-structural protein 3 (NSP3) mRNA gc
aggagagucccgcagucggcguccagcggcucugcuuguucgugugugugucguugcaggccuuauucaagcuuaccauggcccccaccaaggugaccuucggcgacgacacggucaucgaggugcagggguacaagagcgugaacaucaccuucgagcuggacgagcgcaucgacaagguccucaacgagaagugcuccgccuacaccguggagcugggcaccgaggugaacgaguucgcgugcgucguggccgacgccgugaucaagacgcugcagccggucagcgagcuccugaccccccuggggaucgaccucgacgagugguccauggccaccuacuaccuguucgacgagagcggcgaguucaagcuggccucccacauguacugcagcuucuacccccccgacgaggacgaggaggagggggacugcgaggaggaggaguucgagccguccacccaguacgaguacggcacggaggacgacuaccagggcaagccccucgaguucggggcgaccagcgccgcccugcagcccgaggaggagcaggaggaggacuggcuggacgacgacucccagcagaccgugggccagcaggacgggagcgaggacaaccagaccacgaccauccagaccaucguggagguccagccccagcucgagauggagcugaccccgguggugcagacgaucgaggucaacuccuucagcggcuaccugaagcucaccgacaacguguacaucaagaacgccgacaucguggaggaggcgaagaaggucaagcccaccgugguggucaacgccgccaacguguaccugaagcacgggggcggcguggccggggcccugaacaaggcgaccaacaacgccaugcaggucgaguccgacgacuacaucgccacgaacggcccccucaagguggggggcagcugcguccuguccggccacaaccuggccaagcacugccuccacgugguggggcccaacgucaacaagggcgaggacauccagcugcugaagagcgccuacgagaacuucaaccagcacgaggugcuccuggcgccgcugcucuccgccgggaucuucggcgccgaccccauccacagccugcgggugugcgucgacaccgugcgcaccaacguguaccuggccgucuucgacaagaaccucuacgacaagcugguguccagcuuccuggagaugaagagcgagaagcagguggagcagaagaucgccgagauccccaaggaggaggucaagcccuucaucaccgaguccaagccgagcguggagcagcggaagcaggacgacaagaagaucaaggcgugcguggaggaggucacgaccacccucgaggagaccaaguuccugacggagaaccugcuccuguacaucgacaucaacgggaaccugcaccccgacuccgccacccucgugagcgacaucgacaucaccuuccugaagaaggacgcccccuacaucgugggcgacgucgugcaggagggcgugcugaccgccgucgugauccccacgaagaaggccgggggcaccaccgagaugcucgcgaaggcccugcgcaaggugccgaccgacaacuacaucacgaccuaccccgggcagggccugaacggguacaccgucgaggaggccaagaccgugcucaagaagugcaaguccgccuucuacauccugcccagcaucaucuccaacgagaagcaggagauccugggcaccgugagcuggucccuccgggagaugcuggcgcacgccgaggagacgcgcaagcugaugcccgucugcguggagaccaaggccaucgugagcaccauccagcggaaguacaagggcaucaagauccaggagggggucguggacuacggcgcccgcuucuacuucuacaccuccaagacgaccguggccagccugaucaacacccucaacgaccugaacgagacccuggucacgaugccgcucggguacgugacccacggccugaaccuggaggaggcggcccgguacaugcgcucccucaaggugcccgccaccgucagcguguccagccccgacgccgugaccgccuacaacggguaccugacguccagcuccaagacccccgaggagcacuucaucgagaccaucagccuggcgggcagcuacaaggacugguccuacagcggccaguccacccagcucgggaucgaguuccugaagcggggcgacaagagcgucuacuacacguccaacccgaccaccuuccaccuggacggggaggugaucaccuucgacaaccucaagacgcugcugagccuccgcgaggugcggaccaucaaggucuucaccaccguggacaacaucaaccugcacacgcagguggucgacauguccaugaccuacggccagcaguucggccccaccuaccuggacggggccgacgugaccaagaucaagccccacaacagccacgagggcaagacguucuacgugcucccgaacgacgacacccugcgcgucgaggccuucgaguacuaccacaccaccgaccccuccuuccuggggcgguacaugagcgcccucaaccacacgaagaaguggaaguacccccaggugaacggccugaccuccaucaagugggccgacaacaacugcuaccuggcgaccgcccuccugacccugcagcagaucgagcucaaguucaaccccccggcccugcaggacgccuacuaccgcgcgcgggccggggaggccgccaacuucugcgcccugauccucgcguacugcaacaagacggugggcgagcugggcgacguccgcgagaccaugagcuaccuguuccagcacgccaaccucgacuccugcaagcgggugcugaacgucgugugcaagaccugcgggcagcagcagaccacccugaagggcguggaggccgucauguacauggggacgcucagcuacgagcaguucaagaagggcgugcagauccccugcaccugcgggaagcaggccaccaaguaccuggugcagcaggagucccccuucgucaugaugagcgcccccccggcgcaguacgagcugaagcacggcaccuucacgugcgccuccgaguacaccggcaacuaccagugcgggcacuacaagcacaucaccagcaaggagacccucuacugcaucgacggcgcccugcugacgaagagcuccgaguacaaggggcccaucaccgacguguucuacaaggagaacagcuacaccaccacgaucaagcccgugaccuacaagcucgacggcgucgugugcaccgagaucgaccccaagcuggacaacuacuacaagaaggacaacuccuacuucaccgagcagccgaucgaccuggugcccaaccagcccuaccccaacgccagcuucgacaacuucaaguucgucugcgacaacaucaaguucgccgacgaccucaaccagcugacgggguacaagaagccggcgucccgcgagcugaaggugaccuucuuccccgaccucaacggcgacguggucgccaucgacuacaagcacuacacccccagcuucaagaagggcgccaagcugcugcacaagcccaucguguggcacgugaacaacgccaccaacaaggcgacguacaagccgaacaccuggugcauccggugccucugguccaccaagcccgucgagaccagcaacuccuucgacgugcugaagagcgaggacgcccaggggauggacaaccuggccugcgaggaccucaagcccguguccgaggaggucguggagaaccccacgauccagaaggacgugcuggagugcaacgucaagaccaccgagguggugggcgacaucauccugaagccggccaacaacagccucaagaucaccgaggaggucgggcacacggaccugauggccgcguacguggacaacuccagccugaccaucaagaagcccaacgagcucucccgcgugcugggccugaagacccucgccacccacgggcuggccgccgucaacagcgugcccugggacacgaucgccaacuacgcgaagccguuccugaacaagguggucuccaccaccaccaacaucgugacgcgcugccucaaccgggugugcaccaacuacaugcccuacuucuucacccugcugcuccagcugugcaccuucacccgcagcacgaacucccggaucaaggccagcaugcccaccaccaucgccaagaacaccgucaagagcgugggcaaguucugccuggaggccuccuucaacuaccucaagagccccaacuucuccaagcugaucaacaucaucaucugguuccugcuccugagcgugugccugggcucccucaucuacagcacggccgcgcuggggguccugauguccaaccucggcaugccgagcuacugcaccggguaccgcgagggcuaccugaacuccaccaacgugaccaucgccacguacugcaccggcagcauccccugcuccgugugccugagcgggcucgacucccuggacaccuaccccagccuggagaccauccagaucacgaucuccagcuucaagugggaccucaccgccuucggccuggucgccgagugguuccuggccuacauccucuucacccgguucuucuacgugcuggggcuggcggccaucaugcagcucuucuucuccuacuucgccgugcacuucaucagcaacuccuggcugauguggcugaucaucaaccugguccagauggcccccaucagcgcgauggugcgcauguacaucuucuucgccagcuucuacuacguguggaaguccuacguccacgugguggacggcugcaacagcuccaccugcaugaugugcuacaagcggaaccgcgccacgcgggucgagugcaccaccaucgugaacgggguccgccggagcuucuacguguacgccaacggcggcaagggguucugcaagcuccacaacuggaacugcgugaacugcgacaccuucugcgccggcuccacguucaucagcgacgaggucgcgcgcgaccugucccugcaguucaagcggccgaucaaccccaccgaccagagcuccuacaucguggacagcgugaccgucaagaacggguccauccaccucuacuucgacaaggccggccagaagaccuacgagcgccacagccugucccacuucgugaaccuggacaaccuccgggccaacaacacgaaggggagccugcccaucaacgugaucgucuucgacggcaaguccaagugcgaggagagcuccgccaagagcgccuccguguacuacagccagcugaugugccagcccauccuccugcuggaccaggcgcucgugagcgacgucggcgacuccgccgagguggccgugaagauguucgacgccuacgucaacaccuucagcuccaccuucaacgugccgauggagaagcugaagacccugguggccacggcggaggccgagcucgccaagaacgucagccuggacaacgugcuguccaccuucaucagcgccgcgcgccagggguucguggacuccgacgucgagaccaaggacgugguggagugccucaagcugagccaccaguccgacaucgaggucaccggcgacagcugcaacaacuacaugcugacguacaacaagguggagaacaugaccccccgggaccucggggccugcaucgacugcuccgcccgccacaucaacgcccagguggccaagagccacaacaucgcgcugaucuggaacgucaaggacuucaugucccugagcgagcagcuccggaagcagauccgcuccgccgccaagaagaacaaccugcccuucaagcugaccugcgccaccacgcgccagguggugaacgucgugaccaccaagaucgcccucaagggcgggugaggacuagucccuguucccagagcccacuuuuuuuucuuuuuuugaaauaaaauagccugucuuucagaucucaaaggcucuuuucagagccaccaaaaaaaaaaaaaaaaaaaaaaaaaaaaaaaaaaaaaaaaaaaaaaaaaaaaaaaaaaaaaaaaaaaaaaaaaaaaaaaaaaaaaaaaaaaaaaaaaaaaa

SEQ ID NO: 19842 - RNA, 6113 nt, Artificial Sequence
  SARS-CoV-2__MT745584.1__non-structural protein 3 (NSP3) mRNA gc
aggagagucccgcagucggcguccagcggcucugcuuguucgugugugugucguugcaggccuuauucaagcuuaccauggcccccaccaaggugaccuucggcgacgacacggucaucgaggugcagggguacaagagcgugaacaucaccuucgagcuggacgagcgcaucgacaagguccucaacgagaagugcuccgccuacaccguggagcugggcaccgaggugaacgaguucgcgugcgucguggccgacgccgugaucaagacgcugcagccggucagcgagcuccugaucccccuggggaucgaccucgacgagugguccauggccaccuacuaccuguucgacgagagcggcgaguucaagcuggccucccacauguacugcagcuucuacccccccgacgaggacgaggaggagggggacugcgaggaggaggaguucgagccguccacccaguacgaguacggcaccgaggacgacuaccagggcaagccccucgaguucggggcgacgagcgccgcccugcagcccgaggaggagcaggaggaggacuggcuggacgacgacucccagcagaccgugggccagcaggacgggagcgaggacaaccagaccaccacgauccagaccaucguggagguccagccccagcucgagauggagcugaccccgguggugcagaccaucgaggucaacuccuucagcggcuaccugaagcucacggacaacguguacaucaagaacgccgacaucguggaggaggcgaagaaggucaagcccaccgugguggucaacgccgccaacguguaccugaagcacgggggcggcguggccggggcccugaacaaggcgaccaacaacgccaugcaggucgaguccgacgacuacaucgccaccaacggcccccucaagguggggggcagcugcguccuguccggccacaaccuggccaagcacugccuccacgugguggggcccaacgucaacaagggcgaggacauccagcugcugaagagcgccuacgagaacuucaaccagcacgaggugcuccuggcgccgcugcucuccgccgggaucuucggcgccgaccccauccacagccugcgggugugcgucgacacggugcgcaccaacguguaccuggccgucuucgacaagaaccucuacgacaagcugguguccagcuuccuggagaugaagagcgagaagcagguggagcagaagaucgccgagauccccaaggaggaggucaagcccuucaucaccgaguccaagccgagcguggagcagcggaagcaggacgacaagaagaucaaggcgugcguggaggaggucaccacgacccucgaggagaccaaguuccugaccgagaaccugcuccuguacaucgacaucaacgggaaccugcaccccgacuccgccacgcucgugagcgacaucgacaucaccuuccugaagaaggacgcccccuacaucgugggcgacgucgugcaggagggcgugcugaccgccgucgugauccccaccaagaaggccgggggcacgaccgagaugcucgcgaaggcccugcgcaaggugccgaccgacaacuacaucaccacguaccccgggcagggccugaacggguacaccgucgaggaggccaagaccgugcucaagaagugcaaguccgccuucuacauccugcccagcaucaucuccaacgagaagcaggagauccugggcaccgugagcuggaaccuccgggagaugcuggcgcacgccgaggagacccgcaagcugaugcccgucugcguggagacgaaggccaucguguccaccauccagcggaaguacaagggcaucaagauccaggagggggucguggacuacggcgcccgcuucuacuucuacaccagcaagaccacgguggccucccugaucaacacccucaacgaccugaacgagacccuggucaccaugccgcucggguacgugacgcacggccugaaccuggaggaggcggcccgguacaugcgcagccucaaggugcccgccaccgucuccgugagcucccccgacgccgugaccgccuacaacggguaccugaccagcuccagcaagacgcccgaggagcacuucaucgagaccaucucccuggcgggcagcuacaaggacuggagcuacuccggccagagcacccagcucgggaucgaguuccugaagcggggcgacaaguccgucuacuacaccagcaacccgacgaccuuccaccuggacggggaggugaucaccuucgacaaccucaagacccugcugucccuccgcgaggugcggacgaucaaggucuucaccaccguggacaacaucaaccugcacacccagguggucgacaugagcaugacguacggccagcaguucggccccaccuaccuggacggggccgacgugaccaagaucaagccccacaacucccacgagggcaagaccuucuacgugcucccgaacgacgacacgcugcgcgucgaggccuucgaguacuaccacaccaccgaccccagcuuccuggggcgguacauguccgcccucaaccacaccaagaaguggaaguacccccaggugaacggccugacgagcaucaagugggccgacaacaacugcuaccuggcgaccgcccuccugacccugcagcagaucgagcucaaguucaaccccccggcccugcaggacgccuacuaccgcgcgcgggccggggaggccgccaacuucugcgcccugauccucgcguacugcaacaagaccgugggcgagcugggcgacguccgcgagacgauguccuaccuguuccagcacgccaaccucgacagcugcaagcgggugcugaacgucgugugcaagaccugcgggcagcagcagaccacccugaagggcguggaggccgucauguacauggggacccucuccuacgagcaguucaagaagggcgugcagauccccugcacgugcgggaagcaggccaccaaguaccuggugcagcaggagagccccuucgucaugauguccgcccccccggcgcaguacgagcugaagcacggcaccuucaccugcgccagcgaguacacgggcaacuaccagugcgggcacuacaagcacaucaccuccaaggagacccucuacugcaucgacggcgcccugcugaccaagagcagcgaguacaaggggcccaucacggacguguucuacaaggagaacuccuacaccaccaccaucaagcccgugacguacaagcucgacggcgucgugugcaccgagaucgaccccaagcuggacaacuacuacaagaaggacaacagcuacuucaccgagcagccgaucgaccuggugcccaaccagcccuaccccaacgccuccuucgacaacuucaaguucgucugcgacaacaucaaguucgccgacgaccucaaccagcugaccggguacaagaagccggcgagccgcgagcugaaggugacguucuuccccgaccucaacggcgacguggucgccaucgacuacaagcacuacacccccuccuucaagaagggcgccaagcugcugcacaagcccaucguguggcacgugaacaacgccaccaacaaggcgaccuacaagccgaacacguggugcauccggugccucuggagcaccaagcccgucgagaccuccaacagcuucgacgugcugaaguccgaggacgcccaggggauggacaaccuggccugcgaggaccucaagcccgugagcgaggaggucguggagaaccccaccauccagaaggacgugcuggagugcaacgucaagacgaccgagguggugggcgacaucauccugaagccggccaacaacucccucaagaucaccgaggaggucgggcacaccgaccugauggccgcguacguggacaacagcucccugacgaucaagaagcccaacgagcucagccgcgugcugggccugaagacccucgccacccacgggcuggccgccgucaacuccgugcccugggacaccaucgccaacuacgcgaagccguuccugaacaagguggucagcacgaccaccaacaucgugacccgcugccucaaccgggugugcacgaacuacaugcccuacuucuucacccugcugcuccagcugugcaccuucacccgcuccaccaacagccggaucaaggccuccaugcccacgaccaucgccaagaacaccgucaagagcgugggcaaguucugccuggaggccagcuucaacuaccucaagucccccaacuucagcaagcugaucaacaucaucaucugguuccugcuccuguccgugugccugggcagccucaucuacuccaccgccgcgcuggggguccugaugagcaaccucggcaugccguccuacugcacgggguaccgcgagggcuaccugaacagcaccaacgugaccaucgccaccuacugcacgggcuccauccccugcagcgugugccuguccgggcucgacagccuggacaccuaccccucccuggagaccauccagaucaccaucagcuccuucaagugggaccucacggccuucggccuggucgccgagugguuccuggccuacauccucuucacccgguucuucuacgugcuggggcuggcggccaucaugcagcucuucuucagcuacuucgccgugcacuucaucuccaacagcuggcugauguggcugaucaucaaccugguccagauggcccccaucuccgcgauggugcgcauguacaucuucuucgccagcuucuacuacguguggaagagcuacguccacgugguggacggcugcaacuccagcaccugcaugaugugcuacaagcggaaccgcgccacccgggucgagugcacgaccaucgugaacgggguccgccgguccuucuacguguacgccaacggcggcaagggguucugcaagcuccacaacuggaacugcgugaacugcgacaccuucugcgccggcagcaccuucaucuccgacgaggucgcgcgcgaccugagccugcaguucaagcggccgaucaaccccacggaccaguccagcuacaucguggacuccgugaccgucaagaacgggagcauccaccucuacuucgacaaggccggccagaagaccuacgagcgccacucccugagccacuucgugaaccuggacaaccuccgggccaacaacaccaaggggucccugcccaucaacgugaucgucuucgacggcaagagcaagugcgaggaguccagcgccaaguccgccagcguguacuacucccagcugaugugccagcccauccuccugcuggaccaggcgcucgugagcgacgucggcgacagcgccgagguggccgugaagauguucgacgccuacgucaacacguucuccagcaccuucaacgugccgauggagaagcugaagacccugguggccaccgcggaggccgagcucgccaagaacgucucccuggacaacgugcugagcacguucaucuccgccgcgcgccagggguucguggacagcgacgucgagaccaaggacgugguggagugccucaagcugucccaccagagcgacaucgaggucaccggcgacuccugcaacaacuacaugcugaccuacaacaagguggagaacaugacgccccgggaccucggggccugcaucgacugcagcgcccgccacaucaacgcccacguggccaagucccacaacaucgcgcugaucuggaacgucaaggacuucaugagccuguccgagcagcuccggaagcagauccgcagcgccgccaagaagaacaaccugcccuucaagcugaccugcgccaccacccgccagguggugaacgucgugacgaccaagaucgcccucaagggcgggugaggacuagucccuguucccagagcccacuuuuuuuucuuuuuuugaaauaaaauagccugucuuucagaucucaaaggcucuuuucagagccaccaaaaaaaaaaaaaaaaaaaaaaaaaaaaaaaaaaaaaaaaaaaaaaaaaaaaaaaaaaaaaaaaaaaaaaaaaaaaaaaaaaaaaaaaaaaaaaaaaaaaa

SEQ ID NO: 19843 - RNA, 6113 nt, Artificial Sequence
  SARS-CoV-2__MT745648.1__non-structural protein 3 (NSP3) mRNA gc
aggagagucccgcagucggcguccagcggcucugcuuguucgugugugugucguugcaggccuuauucaagcuuaccauggcccccaccaaggugaccuucggcgacgacacggucaucgaggugcagggguacaagagcgugaacaucaccuucgagcuggacgagcgcaucgacaagguccucaacgagaagugcuccgccuacaccguggagcugggcaccgaggugaacgaguucgcgugcgucguggccgacgccgugaucaagacgcugcagccggucagcgagcuccugaccccccuggggaucgaccucgacgagugguccauggccaccuacuaccuguucgacgagagcggcgaguucaagcuggccucccacauguacugcagcuucuacccccccgacgaggacgaggaggagggggacugcgaggaggaggaguucgagccguccacccaguacgaguacggcacggaggacgacuaccagggcaagccccucgaguucggggcgaccagcgccgcccugcagcccgaggaggagcaggaggaggacuggcuggacgacgacucccagcagaccgugggccagcaggacgggagcgaggacaaccagaccacgaccauccagaccaucguggagguccagccccagcucgagauggagcugaccccgguggugcagacgaucgaggucaacuccuucagcggcuaccugaagcucaccgacaacguguacaucaagaacgccgacaucguggaggaggcgaagaaggucaagcccaccgugguggucaacgccgccaacguguaccugaagcacgggggcggcguggccggggcccugaacaaggcgaccaacaacgccaugcaggucgaguccgacgacuacaucgccacgaacggcccccucaagguggggggcagcugcguccuguccggccacaaccuggccaagcacugccuccacgugguggggcccaacgucaacaagggcgaggacauccagcugcugaagagcgccuacgagaacuucaaccagcacgaggugcuccuggcgccgcugcucuccgccgggaucuucggcgccgaccccauccacagccugcgggugugcgucgacaccgugcgcaccaacguguaccuggccgucuucgacaagaaccucuacgacaagcugguguccagcuuccuggagaugaagagcgagaagcagguggagcagaagaucgccgagauccccaaggaggaggucaagcccuucaucaccgaguccaagccgagcguggagcagcggaagcaggacgacaacaagaucaaggcgugcguggaggaggucacgaccacccucgaggagaucaaguuccugaccgagaaccugcuccuguacaucgacaucaacgggaaccugcaccccgacuccgccacgcucgugagcgacaucgacaucaccuuccugaagaaggacgcccccuacaucgugggcgacgucgugcaggagggcgugcugaccgccgucgugauccccaccaagaaggccgggggcacgaccgagaugcucgcgaaggcccugcgcaaggugccgaccgacaacuacaucaccacguaccccgggcagggccugaacggguacaccgucgaggaggccaagaccgugcucaagaagugcaaguccgccuucuacauccugcccagcaucaucuccaacgagaagcaggagauccugggcaccgugagcuggaaccuccgggagaugcuggcgcacgccgaggagacccgcaagcugaugcccgucugcguggagacgaaggccaucguguccaccauccagcggaaguacaagggcaucaagauccaggagggggucguggacuacggcgcccgcuucuacuucuacaccagcaagaccacgguggccucccugaucaacacccucaacgaccugaacgagacccuggucaccaugccgcucggguacgugacgcacggccugaaccuggaggaggcggcccgguacaugcgcagccucaaggugcccgccaccgucuccgugagcucccccgacgccgugaccgccuacaacggguaccugaccagcuccagcaagacgcccgaggagcacuucaucgagaccaucucccuggcgggcagcuacaaggacuggagcuacuccggccagagcacccagcucgggaucgaguuccugaagcggggcgacaaguccgucuacuacaccagcaacccgacgaccuuccaccuggacggggaggugaucaccuucgacaaccucaagacccugcugucccuccgcgaggugcggacgaucaaggucuucaccaccguggacaacaucaaccugcacacccagguggucgacaugagcaugacguacggccagcaguucggccccaccuaccuggacggggccgacgugaccaagaucaagccccacaacucccacgagggcaagaccuucuacgugcucccgaacgacgacacgcugcgcgucgaggccuucgaguacuaccacaccaccgaccccagcuuccuggggcgguacauguccgcccucaaccacaccaagaaguggaaguacccccaggugaacggccugacgagcaucaagugggccgacaacaacugcuaccuggcgaccgcccuccugacccugcagcagaucgagcucaaguucaaccccccggcccugcaggacgccuacuaccgcgcgcgggccggggaggccgccaacuucugcgcccugauccucgcguacugcaacaagaccgugggcgagcugggcgacguccgcgagacgauguccuaccuguuccagcacgccaaccucgacagcugcaagcgggugcugaacgucgugugcaagaccugcgggcagcagcagaccacccugaagggcguggaggccgucauguacauggggacccucuccuacgagcaguucaagaagggcgugcagauccccugcacgugcgggaagcaggccaccaaguaccuggugcagcaggagagccccuucgucaugauguccgcccccccggcgcaguacgagcugaagcacggcaccuucaccugcgccagcgaguacacgggcaacuaccagugcgggcacuacaagcacaucaccuccaaggagacccucuacugcaucgacggcgcccugcugaccaagagcagcgaguacaaggggcccaucacggacguguucuacaaggagaacuccuacaccaccaccaucaagcccgugacguacaagcucgacggcgucgugugcaccgagaucgaccccaagcuggacaacuacuacaagaaggacaacagcuacuucaccgagcagccgaucgaccuggugcccaaccagcccuaccccaacgccuccuucgacaacuucaaguucgucugcgacaacaucaaguucgccgacgaccucaaccagcugaccggguacaagaagccggcgagccgcgagcugaaggugacguucuuccccgaccucaacggcgacguggucgccaucgacuacaagcacuacacccccuccuucaagaagggcgccaagcugcugcacaagcccaucguguggcacgugaacaacgccaccaacaaggcgaccuacaagccgaacacguggugcauccggugccucuggagcaccaagcccgucgagaccuccaacagcuucgacgugcugaaguccgaggacgcccaggggauggacaaccuggccugcgaggaccucaagcccgugagcgaggaggucguggagaaccccaccauccagaaggacgugcuggagugcaacgucaagacgaccgagguggugggcgacaucauccugaagccggccaacaacucccucaagaucaccgaggaggucgggcacaccgaccugauggccgcguacguggacaacagcucccugacgaucaagaagcccaacgagcucagccgcgugcugggccugaagacccucgccacccacgggcuggccgccgucaacuccgugcccugggacaccaucgccaacuacgcgaagccguuccugaacaagguggucagcacgaccaccaacaucgugacccgcugccucaaccgggugugcacgaacuacaugcccuacuucuucacccugcugcuccagcugugcaccuucacccgcuccaccaacagccggaucaaggccuccaugcccacgaccaucgccaagaacaccgucaagagcgugggcaaguucugccuggaggccagcuucaacuaccucaagucccccaacuucagcaagcugaucaacaucaucaucugguuccugcuccuguccgugugccugggcagccucaucuacuccaccgccgcgcuggggguccugaugagcaaccucggcaugccguccuacugcacgggguaccgcgagggcuaccugaacagcaccaacgugaccaucgccaccuacugcacgggcuccauccccugcagcgugugccuguccgggcucgacagccuggacaccuaccccucccuggagaccauccagaucaccaucagcuccuucaagugggaccucacggccuucggccuggucgccgagugguuccuggccuacauccucuucacccgguucuucuacgugcuggggcuggcggccaucaugcagcucuucuucagcuacuucgccgugcacuucaucuccaacagcuggcugauguggcugaucaucaaccugguccagauggcccccaucuccgcgauggugcgcauguacaucuucuucgccagcuucuacuacguguggaagagcuacguccacgugguggacggcugcaacuccagcaccugcaugaugugcuacaagcggaaccgcgccacccgggucgagugcacgaccaucgugaacgggguccgccgguccuucuacguguacgccaacggcggcaagggguucugcaagcuccacaacuggaacugcgugaacugcgacaccuucugcgccggcagcaccuucaucuccgacgaggucgcgcgcgaccugagccugcaguucaagcggccgaucaaccccacggaccaguccagcuacaucguggacuccgugaccgucaagaacgggagcauccaccucuacuucgacaaggccggccagaagaccuacgagcgccacucccugagccacuucgugaaccuggacaaccuccgggccaacaacaccaaggggucccugcccaucaacgugaucgucuucgacggcaagagcaagugcgaggaguccagcgccaaguccgccagcguguacuacucccagcugaugugccagcccauccuccugcuggaccaggcgcucgugagcgacgucggcgacagcgccgagguggccgugaagauguucgacgccuacgucaacacguucuccagcaccuucaacgugccgauggagaagcugaagacccugguggccaccgcggaggccgagcucgccaagaacgucucccuggacaacgugcugagcacguucaucuccgccgcgcgccagggguucguggacagcgacgucgagaccaaggacgugguggagugccucaagcugucccaccagagcgacaucgaggucaccggcgacuccugcaacaacuacaugcugaccuacaacaagguggagaacaugacgccccgggaccucggggccugcaucgacugcagcgcccgccacaucaacgcccagguggccaagucccacaacaucgcgcugaucuggaacgucaaggacuucaugagccuguccgagcagcuccggaagcagauccgcagcgccgccaagaagaacaaccugcccuucaagcugaccugcgccaccacccgccagguggugaacgucgugacgaccaagaucgcccucaagggcgggugaggacuagucccuguucccagagcccacuuuuuuuucuuuuuuugaaauaaaauagccugucuuucagaucucaaaggcucuuuucagagccaccaaaaaaaaaaaaaaaaaaaaaaaaaaaaaaaaaaaaaaaaaaaaaaaaaaaaaaaaaaaaaaaaaaaaaaaaaaaaaaaaaaaaaaaaaaaaaaaaaaaaa

SEQ ID NO: 19844 - RNA, 6113 nt, Artificial Sequence
  SARS-CoV-2__MT745658.1__non-structural protein 3 (NSP3) mRNA gc
aggagagucccgcagucggcguccagcggcucugcuuguucgugugugugucguugcaggccuuauucaagcuuaccauggcccccaccaaggugaccuucggcgacgacacggucaucgaggugcagggguacaagagcgugaacaucaccuucgagcuggacgagcgcaucgacaagguccucaacgagaagugcuccgccuacaccguggagcugggcaccgaggugaacgaguucgcgugcgucguggccgacgccgugaucaagacgcugcagccggucagcgagcuccugaccccccuggggaucgaccucgacgagugguccauggccaccuacuaccuguucgacgagagcggcgaguucaagcuggccucccacauguacugcagcuucuacccccccgacgaggacgaggaggagggggacugcgaggaggaggaguucgagccguccacccaguacgaguacggcacggaggacgacuaccagggcaagccccucgaguucggggcgaccagcgccgcccugcagcccgaggaggagcaggaggaggacuggcuggacgacgacucccagcagaccgugggccagcaggacgggagcgacgacaaccagaccacgaccauccagaccaucguggagguccagccccagcucgagauggagcugaccccgguggugcagacgaucgaggucaacuccuucagcggcuaccugaagcucaccgacaacguguacaucaagaacgccgacaucguggaggaggcgaagaaggucaagcccaccgugguggucaacgccgccaacguguaccugaagcacgggggcggcguggccggggcccugaacaaggcgaccaacaacgccaugcaggucgaguccgacgacuacaucgccacgaacggcccccucaagguggggggcagcugcguccuguccggccacaaccuggccaagcacugccuccacgugguggggcccaacgucaacaagggcgaggacauccagcugcugaagagcgccuacgagaacuucaaccagcacgaggugcuccuggcgccgcugcucuccgccgggaucuucggcgccgaccccauccacagccugcgggugugcgucgacaccgugcgcaccaacguguaccuggccgucuucgacaagaaccucuacgacaagcugguguccagcuuccuggagaugaagagcgagaagcagguggagcagaagaucgccgagauccccaaggaggaggucaagcccuucaucaccgaguccaagccgagcguggagcagcggaagcaggacgacaagaagaucaaggcgugcguggaggaggucacgaccacccucgaggagaccaaguuccugacggagaaccugcuccuguacaucgacaucaacgggaaccugcaccccgacuccgccacccucgugagcgacaucgacaucaccuuccugaagaaggacgcccccuacaucgugggcgacgucgugcaggagggcgugcugaccgccgucgugauccccacgaagaaggccgggggcaccaccgagaugcucgcgaaggcccugcgcaaggugccgaccgacaacuacaucacgaccuaccccgggcagggccugaacggguacaccgucgaggaggccaagaccgugcucaagaagugcaaguccgccuucuacauccugcccagcaucaucuccaacgagaagcaggagauccugggcaccgugagcuggaaccuccgggagaugcuggcgcacgccgaggagacgcgcaagcugaugcccgucugcguggagaccaaggccaucguguccaccauccagcggaaguacaagggcaucaagauccaggagggggucguggacuacggcgcccgcuucuacuucuacaccagcaagacgaccguggccucccugaucaacacccucaacgaccugaacgagacccuggucacgaugccgcucggguacgugacccacggccugaaccuggaggaggcggcccgguacaugcgcagccucaaggugcccgccaccgucuccgugagcucccccgacgccgugaccgccuacaacggguaccugacgagcuccagcaagacccccgaggagcacuucaucgagaccaucucccuggcgggcagcuacaaggacuggagcuacuccggccagagcacccagcucgggaucgaguuccugaagcggggcgacaaguccgucuacuacacgagcaacccgaccaccuuccaccuggacggggaggugaucaccuucgacaaccucaagacgcugcugucccuccgcgaggugcggaccaucaaggucuucaccaccguggacaacaucaaccugcacacgcagguggucgacaugagcaugaccuacggccagcaguucggccccaccuaccuggacggggccgacgugaccaagaucaagccccacaacucccacgagggcaagacguucuacgugcucccgaacgacgacacccugcgcgucgaggccuucgaguacuaccacaccaccgaccccagcuuccuggggcgguacauguccgcccucaaccacacgaagaaguggaaguacccccaggugaacggccugaccagcaucaagugggccgacaacaacugcuaccuggcgaccgugcuccugacccugcagcagaucgagcucaaguucaaccccccggcccugcaggacgccuacuaccgcgcccgggcgggggaggccgccaacuucugcgcccugauccucgccuacugcaacaagacggucggcgagcugggcgacgugcgcgagaccauguccuaccuguuccagcacgcgaaccucgacagcugcaagcggguccugaacguggugugcaagaccugcgggcagcagcagaccacccugaagggcgucgaggccgugauguacauggggacgcucuccuacgagcaguucaagaagggcgugcagauccccugcaccugcgggaagcaggccaccaaguaccugguccagcaggagagccccuucgugaugauguccgcccccccggcccaguacgagcugaagcacggcaccuucacgugcgcgagcgaguacaccggcaacuaccagugcgggcacuacaagcacaucaccuccaaggagacccucuacugcaucgacggcgcccugcugacgaagagcagcgaguacaaggggcccaucaccgacguguucuacaaggagaacuccuacaccaccacgaucaagcccgucaccuacaagcucgacggcguggugugcaccgagaucgaccccaagcuggacaacuacuacaagaaggacaacagcuacuucaccgagcagccgaucgaccugguccccaaccagcccuaccccaacgccuccuucgacaacuucaaguucgugugcgacaacaucaaguucgccgacgaccucaaccagcugacgggguacaagaagccggccagccgcgagcugaaggugaccuucuuccccgaccucaacggcgacgucguggcgaucgacuacaagcacuacacccccuccuucaagaagggcgccaagcugcugcacaagcccaucguguggcacgucaacaacgccaccaacaaggccacguacaagccgaacaccuggugcauccggugccucuggagcaccaagcccguggagaccuccaacagcuucgacgugcugaaguccgaggacgcgcaggggauggacaaccuggccugcgaggaccucaagcccgucagcgaggaggugguggagaaccccacgauccagaaggacguccuggagugcaacgugaagaccaccgagguggucggcgacaucauccugaagccggccaacaacucccucaagaucaccgaggagguggggcacacggaccugauggccgccuacguggacaacagcucccugaccaucaagaagcccaacgagcucagccgcguccugggccugaagacccucgcgacccacgggcuggccgccgugaacuccgugcccugggacacgaucgccaacuacgccaagccguuccugaacaaggucgugagcaccaccaccaacaucgugacgcgcugccucaaccgggucugcaccaacuacaugcccuacuucuucacccugcugcuccagcugugcaccuucacccgcuccacgaacagccggaucaaggcguccaugcccaccaccaucgccaagaacaccgugaagagcgugggcaaguucugccuggaggccagcuucaacuaccucaagucccccaacuucagcaagcugaucaacaucaucaucugguuccugcuccuguccgucugccugggcagccucaucuacuccacggccgcccugggggugcugaugagcaaccucggcaugccguccuacugcaccggguaccgcgagggcuaccugaacagcaccaacgugaccaucgcgacguacugcaccggcuccauccccugcagcgucugccuguccgggcucgacagccuggacaccuaccccucccuggagaccauccagaucacgaucagcuccuucaagugggaccucaccgccuucggccugguggccgagugguuccuggccuacauccucuucacccgguucuucuacgugcuggggcuggccgcgaucaugcagcucuucuucagcuacuucgccguccacuucaucuccaacagcuggcugauguggcugaucaucaaccuggugcagauggcccccaucuccgccauggugcgcauguacaucuucuucgcgagcuucuacuacgucuggaagagcuacgugcacguggucgacggcugcaacuccagcaccugcaugaugugcuacaagcggaaccgcgccacgcggguggagugcaccaccaucgucaacggggugcgccgguccuucuacguguacgccaacggcggcaagggguucugcaagcuccacaacuggaacugcgucaacugcgacaccuucugcgccggcagcacguucaucuccgacgagguggcccgcgaccugagccugcaguucaagcggccgaucaaccccaccgaccaguccagcuacaucguggacuccgucaccgugaagaacgggagcauccaccucuacuucgacaaggcgggccagaagaccuacgagcgccacucccugagccacuucgugaaccuggacaaccuccgggccaacaacacgaaggggucccugcccaucaacgucaucguguucgacggcaagagcaagugcgaggaguccagcgccaaguccgccagcguguacuacucccagcugaugugccagcccauccuccugcuggaccaggcccucgucagcgacgugggcgacagcgcggagguggccgucaagauguucgacgccuacgugaacaccuucuccagcaccuucaacgugccgauggagaagcugaagacccuggucgccacggccgaggcggagcucgccaagaacgugucccuggacaacgugcugagcaccuucaucuccgccgcccgccagggguucgucgacagcgacguggagaccaaggacguggucgagugccucaagcugucccaccagagcgacaucgaggugaccggcgacuccugcaacaacuacaugcugacguacaacaagguggagaacaugaccccccgggaccucggggcgugcaucgacugcagcgcccgccacaucaacgcccaggucgccaagucccacaacaucgcccugaucuggaacgugaaggacuucaugagccuguccgagcagcuccggaagcagauccgcagcgcggccaagaagaacaaccugcccuucaagcugaccugcgccaccacgcgccagguggucaacguggugaccaccaagaucgcccucaagggcgggugaggacuagucccuguucccagagcccacuuuuuuuucuuuuuuugaaauaaaauagccugucuuucagaucucaaaggcucuuuucagagccaccaaaaaaaaaaaaaaaaaaaaaaaaaaaaaaaaaaaaaaaaaaaaaaaaaaaaaaaaaaaaaaaaaaaaaaaaaaaaaaaaaaaaaaaaaaaaaaaaaaaaa

SEQ ID NO: 19845 - RNA, 6113 nt, Artificial Sequence
  SARS-CoV-2__MT745659.1__non-structural protein 3 (NSP3) mRNA gc
aggagagucccgcagucggcguccagcggcucugcuuguucgugugugugucguugcaggccuuauucaagcuuaccauggcccccaccaaggugaccuucggcgacgacacggucaucgaggugcagggguacaagagcgugaacaucaccuucgagcuggacgagcgcaucgacaagguccucaacgagaagugcuccgccuacaccguggagcugggcaccgaggugaacgaguucgcgugcgucguggccgacgccgugaucaagacgcugcagccggucagcgagcuccugaccccccuggggaucgaccucgacgagugguccauggccaccuacuaccuguucgacgagagcggcgaguucaagcuggccucccacauguacugcagcuucuacccccccgacgaggacgaggaggagggggacugcgaggaggaggaguucgagccguccacccaguacgaguacggcacggaggacgacuaccagggcaagccccucgaguucggggcgaccagcgccgcccugcagcccgaggaggagcaggaggaggacuggcuggacgacgacucccagcagaccgugggccagcaggacgggagcgaggacaaccagaccacgaccauccagaccaucguggagguccagccccagcucgagauggagcugaccccgguggugcagacgaucgaggucaacuccuucagcggcuaccugaagcucaccgacaacguguacaucaagaacgccgacaucguggaggaggcgaagaaggucaagcccaccgugguggucaacgccgccaacguguaccugaagcacgggggcggcguggccggggcccugaacaaggcgaccaacaacgccaugcaggucgaguccgacgacuacaucgccacgaacggcccccucaagguggggggcagcugcguccuguccggccacaaccuggccaagcacugccuccacgugguggggcccaacgucaacaagggcgaggacauccagcugcugaagagcgccuacgagaacuucaaccagcacgaggugcuccuggcgccgcugcucuccgccgggaucuucggcgccgaccccauccacagccugcgggugugcgucgacaccgugcgcaccaacguguaccuggccgucuucgacaagaaccucuacgacaagcugguguccagcuuccuggagaugaagagcgagaagcagguggagcagaagaucgccgagauccccaaggaggaggucaagcccuucaucaccgaguccaagccgagcguggagcagcggaagcaggacgacaagaagaucaaggcgugcguggaggaggucacgaccacccucgaggagaucaaguuccugaccgagaaccugcuccuguacaucgacaucaacgggaaccugcaccccgacuccgccacgcucgugagcgacaucgacaucaccuuccugaagaaggacgcccccuacaucgugggcgacgucgugcaggagggcgugcugaccgccgucgugauccccaccaagaaggccgggggcacgaccgagaugcucgugaaggcgcugcgcaaggucccgaccgacaacuacaucaccacguaccccgggcagggccugaacggguacaccguggaggaggccaagaccgugcucaagaagugcaaguccgccuucuacauccugcccagcaucaucuccaacgagaagcaggagauccugggcaccgucagcuggaaccuccgggagaugcuggcccacgcggaggagacccgcaagcugaugcccgugugcguggagacgaaggccaucgucuccaccauccagcggaaguacaagggcaucaagauccaggagggggugguggacuacggcgcccgcuucuacuucuacaccagcaagaccacggucgccucccugaucaacacccucaacgaccugaacgagacccuggugaccaugccgcucggguacgugacgcacggccugaaccuggaggaggccgcgcgguacaugcgcagccucaagguccccgccaccguguccgugagcucccccgacgccgucaccgccuacaacggguaccugaccagcuccagcaagacgcccgaggagcacuucaucgagaccaucucccuggccggcagcuacaaggacuggagcuacuccggccagagcacccagcucgggaucgaguuccugaagcggggcgacaaguccguguacuacaccagcaacccgacgaccuuccaccuggacggggaggugaucaccuucgacaaccucaagacccugcugucccuccgcgagguccggacgaucaagguguucaccaccguggacaacaucaaccugcacacccaggucguggacaugagcaugacguacggccagcaguucggccccaccuaccuggacggggcggacgugaccaagaucaagccccacaacucccacgagggcaagaccuucuacguccucccgaacgacgacacgcugcgcguggaggccuucgaguacuaccacaccaccgaccccagcuuccuggggcgguacauguccgcccucaaccacaccaagaaguggaaguacccccaggugaacggccugacgagcaucaagugggccgacaacaacugcuaccuggccaccgcgcuccugacccugcagcagaucgagcucaaguucaaccccccggcccugcaggacgccuacuaccgcgcccgggcgggggaggccgccaacuucugcgcccugauccucgccuacugcaacaagaccgucggcgagcugggcgacgugcgcgagacgauguccuaccuguuccagcacgcgaaccucgacagcugcaagcggguccugaacguggugugcaagaccugcgggcagcagcagaccacccugaagggcgucgaggccgugauguacauggggacccucuccuacgagcaguucaagaagggcgugcagauccccugcacgugcgggaagcaggccaccaaguaccugguccagcaggagagccccuucgugaugauguccgcccccccggcccaguacgagcugaagcacggcaccuucaccugcgcgagcgaguacacgggcaacuaccagugcgggcacuacaagcacaucaccuccaaggagacccucuacugcaucgacggcgcccugcugaccaagagcagcgaguacaaggggcccaucacggacguguucuacaaggagaacuccuacaccaccaccaucaagcccgucacguacaagcucgacggcguggugugcaccgagaucgaccccaagcuggacaacuacuacaagaaggacaacagcuacuucaccgagcagccgaucgaccugguccccaaccagcccuaccccaacgccuccuucgacaacuucaaguucgugugcgacaacaucaaguucgccgacgaccucaaccagcugaccggguacaagaagccggccagccgcgagcugaaggugacguucuuccccgaccucaacggcgacgucguggcgaucgacuacaagcacuacacccccuccuucaagaagggcgccaagcugcugcacaagcccaucguguggcacgucaacaacgccaccaacaaggccaccuacaagccgaacacguggugcauccggugccucuggagcaccaagcccguggagaccuccaacagcuucgacgugcugaaguccgaggacgcgcaggggauggacaaccuggccugcgaggaccucaagcccgucagcgaggaggugguggagaaccccaccauccagaaggacguccuggagugcaacgugaagacgaccgagguggucggcgacaucauccugaagccggccaacaacucccucaagaucaccgaggagguggggcacaccgaccugauggccgccuacguggacaacagcucccugacgaucaagaagcccaacgagcucagccgcguccugggccugaagacccucgcgacccacgggcuggccgccgugaacuccgugcccugggacaccaucgccaacuacgccaagccguuccugaacaaggucgugagcacgaccaccaacaucgugacccgcugccucaaccgggucugcacgaacuacaugcccuacuucuucacccugcugcuccagcugugcaccuucacccgcuccaccaacagccggaucaaggcguccaugcccacgaccaucgccaagaacaccgugaagagcgugggcaaguucugccuggaggccagcuucaacuaccucaagucccccaacuucagcaagcugaucaacaucaucaucugguuccugcuccuguccgucugccugggcagccucaucuacuccaccgccgcccugggggugcugaugagcaaccucggcaugccguccuacugcacgggguaccgcgagggcuaccugaacagcaccaacgugaccaucgcgaccuacugcacgggcuccauccccugcagcgucugccuguccgggcucgacagccuggacaccuaccccucccuggagaccauccagaucaccaucagcuccuucaagugggaccucacggccuucggccugguggccgagugguuccuggccuacauccucuucacccgguucuucuacgugcuggggcuggccgcgaucaugcagcucuucuucagcuacuucgccguccacuucaucuccaacagcuggcugauguggcugaucaucaaccuggugcagauggcccccaucuccgccauggugcgcauguacaucuucuucgcgagcuucuacuacgucuggaagagcuacgugcacguggucgacggcugcaacuccagcaccugcaugaugugcuacaagcggaaccgcgccacccggguggagugcacgaccaucgucaacggggugcgccgguccuucuacguguacgccaacggcggcaagggguucugcaagcuccacaacuggaacugcgucaacugcgacaccuucugcgccggcagcaccuucaucuccgacgagguggcccgcgaccugagccugcaguucaagcggccgaucaaccccacggaccaguccagcuacaucguggacuccgucaccgugaagaacgggagcauccaccucuacuucgacaaggcgggccagaagaccuacgagcgccacucccugagccacuucgugaaccuggacaaccuccgggccaacaacaccaaggggucccugcccaucaacgucaucguguucgacggcaagagcaagugcgaggaguccagcgccaaguccgccagcguguacuacucccagcugaugugccagcccauccuccugcuggaccaggcccucgucagcgacgugggcgacagcgcggagguggccgucaagauguucgacgccuacgugaacacguucuccagcaccuucaacgugccgauggagaagcugaagacccuggucgccaccgccgaggcggagcucgccaagaacgugucccuggacaacgugcugagcacguucaucuccgccgcccgccagggguucgucgacagcgacguggagaccaaggacguggucgagugccucaagcugucccaccagagcgacaucgaggugaccggcgacuccugcaacaacuacaugcugaccuacaacaagguggagaacaugacgccccgggaccucggggcgugcaucgacugcagcgcccgccacaucaacgcccaggucgccaagucccacaacaucgcccugaucuggaacgugaaggacuucaugagccuguccgagcagcuccggaagcagauccgcagcgcggccaagaagaacaaccugcccuucaagcugaccugcgccaccacccgccagguggucaacguggugacgaccaagaucgcccucaagggcgggugaggacuagucccuguucccagagcccacuuuuuuuucuuuuuuugaaauaaaauagccugucuuucagaucucaaaggcucuuuucagagccaccaaaaaaaaaaaaaaaaaaaaaaaaaaaaaaaaaaaaaaaaaaaaaaaaaaaaaaaaaaaaaaaaaaaaaaaaaaaaaaaaaaaaaaaaaaaaaaaaaaaaa

SEQ ID NO: 19846 - RNA, 6113 nt, Artificial Sequence
  SARS-CoV-2__MT745676.1__non-structural protein 3 (NSP3) mRNA gc
aggagagucccgcagucggcguccagcggcucugcuuguucgugugugugucguugcaggccuuauucaagcuuaccauggcccccaccaaggugaccuucggcgacgacacggucaucgaggugcagggguacaagagcgugaacaucaccuucgagcuggacgagcgcaucgacaagguccucaacgagaagugcuccgccuacaccguggagcugggcaccgaggugaacgaguucgcgugcgucguggccgacgccgugaucaagacgcugcagccggucagcgagcuccugaccccccuggggaucgaccucgacgagugguccauggccaccuacuaccuguucgacgagagcggcgaguucaagcuggccucccacauguacugcagcuucuacccccccgacgaggacgaggaggagggggacugcgaggaggaggaguucgagccguccacccaguacgaguacggcacggaggacgacuaccagggcaagccccucgaguucggggcgaccagcgccgcccugcagcccgaggaggagcaggaggaggacuggcuggacgacgacucccagcagaccgugggccagcaggacgggagcgaggacaaccagaccacgaccauccagaccaucguggagguccagccccagcucgagauggagcugaccccgguggugcagacgaucgaggucaacuccuucagcggcuaccugaagcucaccgacaacguguacaucaagaacgccgacaucguggaggaggcgaagaaggucaagcccaccgugguggucaacgccgccaacguguaccugaagcacgggggcggcguggccggggcccugaacaaggcgaccaacaacgccaugcaggucgaguccgacgacuacaucgccacgaacggcccccucaagguggggggcagcugcguccuguccggccacaaccuggccaagcacugccuccacgugguggggcccaacgucaacaagggcgaggacauccagcugcugaagagcgccuacgagaacuucaaccagcacgaggugcuccuggcgccgcugcucuccgccgggaucuucggcgccgaccccauccacagccugcgggugugcgucgacaccgugcgcaccaacguguaccuggccgucuucgacaagaaccucuacgacaagcugguguccagcuuccuggagaugaagagcgagaagcagguggagcagaagaucgccgagauccccaaggaggaggucaagcccuucaucaccgaguccaagccgagcguggagcagcggaagcaggacgacaagaagaucaaggcgugcguggaggaggucacgaccacccucgaggagaccaaguuccugacggagaaccugcuccuguacaucgacaucaacgggaaccugcaccccgacuccgccacccucgugagcgacaucgacaucaccuuccugaagaaggacgcccccuacaucgugggcgacgucgugcaggagggcgugcugaccgccgucgugauccccacgaagaaggccgggggcaccaccgagaugcucgcgaaggcccugcgcaaggugccgaccgacaacuacaucacgaccuaccccgggcagggccugaacggguacaccgucgaggaggccaagaccgugcucaagaagugcaaguccgccuucuacauccugcccagcaucaucuccaacgagaagcaggagauccugggcaccgugagcuggaaccuccgggagaugcuggcgcacgccgaggagacgcgcaagcugaugcccgucugcguggagaccaaggccaucguguccaccauccagcggaaguacaagggcaucaagauccaggagggggucguggacuacggcgcccgcuucuacuucuacaccagcaagacgaccguggccucccugaucaacacccucaacgaccugaacgagacccuggucacgaugccgcucggguacgugacccacggccugaaccuggaggaggcggcccgguacaugcgcagccucaaggugcccgccaccgucuccgugagcucccccgacgccgugaccgccuacaacggguaccugacgagcuccagcaagacccccgaggagcacuucaucgagaccaucucccuggcgggcagcuacaaggacuggagcuacuccggccagagcacccagcucgggaucgaguuccugaagcggggcgacaaguccgucuacuacacgagcaacccgaccaccuuccaccuggacggggaggugaucaccuucgacaaccucaagacgcugcugucccuccgcgaggugcggaccaucaaggucuucaccaccguggacaacaucaaccugcacacgcagguggucgacaugagcaugaccuacggccagcaguucggccccaccuaccuggacggggccgacgugaccaagaucaagccccacaacucccacgagggcaagacguucuacgugcucccgaacgacgacacccugcgcgucgaggccuucgaguacuaccacaccaccgaccccagcuuccuggggcgguacauguccgcccucaaccacacgaagaaguggaaguacccccaggugaacggccugaccagcaucaagugggccgacaacaacugcuaccuggcgaccgcccuccugacccugcagcagaucgagcucaaguucaaccccccggcccugcaggacgccuacuaccgcgcgcgggccggggaggccgccaacuucugcgcccugauccucgcguacugcaacaagacggugggcgagcugggcgacguccgcgagaccauguccuaccuguuccagcacgccaaccucgacagcugcaagcgggugcugaacgucgugugcaagaccugcgggcagcagcagaccacccugaagggcguggaggccgucauguacauggggacgcucuccuacgagcaguucaagaagggcgugcagauccccugcaccugcgggaagcaggccaccaaguaccuggugcagcaggagagccccuucgucaugauguccgcccccccggcgcaguacgagcugaagcacggcaccuucacgugcgccagcgaguacaccggcaacuaccagugcgggcacuacaagcacaucaccuccaaggagacccucuacugcaucgacggcgcccugcugacgaagagcagcgaguacaaggggcccaucaccgacguguucuacaaggagaacuccuacaccaccacgaucaagcccgugaccuacaagcucgacggcgucgugugcaccgagaucgaccccaagcuggacaacuacuacaagaaggacaacagcuacuucaccgagcagccgaucgaccuggugcccaaccagcccuaccccaacgccuccuucgacaacuucaaguucgucugcgacaacaucaaguucgccgacgaccucaaccagcugacgggguacaagaagccggcgagccgcgagcugaaggugaccuucuuccccgaccucaacggcgacguggucgccaucgacuacaagcacuacacccccuccuucaagaagggcgccaagcugcugcacaagcccaucguguggcacgugaacaacgccaccaacaaggcgacguacaagccgaacaccuggugcauccggugccucuggagcaagaagcccgucgagaccuccaacagcuucgacgugcugaaguccgaggacgcccaggggauggacaaccuggccugcgaggaccucaagcccgugagcgaggaggucguggagaaccccaccauccagaaggacgugcuggagugcaacgucaagacgaccgagguggugggcgacaucauccugaagccggccaacaacucccucaagaucaccgaggaggucgggcacaccgaccugauggccgcguacguggacaacagcucccugacgaucaagaagcccaacgagcucagccgcgugcugggccugaagacccucgccacccacgggcuggccgccgucaacuccgugcccugggacaccaucgccaacuacgcgaagccguuccugaacaagguggucagcacgaccaccaacaucgugacccgcugccucaaccgggugugcacgaacuacaugcccuacuucuucacccugcugcuccagcugugcaccuucacccgcuccaccaacagccggaucaaggccuccaugcccacgaccaucgccaagaacaccgucaagagcgugggcaaguucugccuggaggccagcuucaacuaccucaagucccccaacuucagcaagcugaucaacaucaucaucugguuccugcuccuguccgugugccugggcagccucaucuacuccaccgccgcgcuggggguccugaugagcaaccucggcaugccguccuacugcacgggguaccgcgagggcuaccugaacagcaccaacgugaccaucgccaccuacugcacgggcuccauccccugcagcgugugccuguccgggcucgacagccuggacaccuaccccucccuggagaccauccagaucaccaucagcuccuucaagugggaccucacggccuucggccuggucgccgagugguuccuggccuacauccucuucacccgguucuucuacgugcuggggcuggcggccaucaugcagcucuucuucagcuacuucgccgugcacuucaucuccaacagcuggcugauguggcugaucaucaaccugguccagauggcccccaucuccgcgauggugcgcauguacaucuucuucgccagcuucuacuacguguggaagagcuacguccacgugguggacggcugcaacuccagcaccugcaugaugugcuacaagcggaaccgcgccacccgggucgagugcacgaccaucgugaacgggguccgccgguccuucuacguguacgccaacggcggcaagggguucugcaagcuccacaacuggaacugcgugaacugcgacaccuucugcgccggcagcaccuucaucuccgacgaggucgcgcgcgaccugagccugcaguucaagcggccgaucaaccccacggaccaguccagcuacaucguggacuccgugaccgucaagaacgggagcauccaccucuacuucgacaaggccggccagaagaccuacgagcgccacucccugagccacuucgugaaccuggacaaccuccgggccaacaacaccaaggggucccugcccaucaacgugaucgucuucgacggcaagagcaagugcgaggaguccagcgccaaguccgccagcguguacuacucccagcugaugugccagcccauccuccugcuggaccaggcgcucgugagcgacgucggcgacagcgccgagguggccgugaagauguucgacgccuacgucaacacguucuccagcaccuucaacgugccgauggagaagcugaagacccugguggccaccgcggaggccgagcucgccaagaacgucucccuggacaacgugcugagcacguucaucuccgccgcgcgccagggguucguggacagcgacgucgagaccaaggacgugguggagugccucaagcugucccaccagagcgacaucgaggucaccggcgacuccugcaacaacuacauccugaccuacaacaagguggagaacaugacgccccgggaccucggggccugcaucgacugcagcgcccgccacaucaacgcccagguggccaagucccacaacaucgcgcugaucuggaacgucaaggacuucaugagccuguccgagcagcuccggaagcagauccgcagcgccgccaagaagaacaaccugcccuucaagcugaccugcgccaccacccgccagguggugaacgucgugacgaccaagaucgcccucaagggcgggugaggacuagucccuguucccagagcccacuuuuuuuucuuuuuuugaaauaaaauagccugucuuucagaucucaaaggcucuuuucagagccaccaaaaaaaaaaaaaaaaaaaaaaaaaaaaaaaaaaaaaaaaaaaaaaaaaaaaaaaaaaaaaaaaaaaaaaaaaaaaaaaaaaaaaaaaaaaaaaaaaaaaa

SEQ ID NO: 19847 - RNA, 6113 nt, Artificial Sequence
  SARS-CoV-2__MT745677.1__non-structural protein 3 (NSP3) mRNA gc
aggagagucccgcagucggcguccagcggcucugcuuguucgugugugugucguugcaggccuuauucaagcuuaccauggcccccaccaaggugaccuucggcgacgacacggucaucgaggugcagggguacaagagcgugaacaucaccuucgagcuggacgagcgcaucgacaagguccucaacgagaagugcuccgccuacaccguggagcugggcaccgaggugaacgaguucgcgugcgucguggccgacgccgugaucaagacgcugcagccggucagcgagcuccugaccccccuggggaucgaccucgacgagugguccauggccaccuacuaccuguucgacgagagcggcgaguucaagcuggccucccacauguacugcagcuucuacccccccgacgaggacgaggaggagggggacugcgaggaggaggaguucgagccguccacccaguacgaguacggcacggaggacgacuaccagggcaagccccucgaguucggggcgaccagcgccgcccugcagcccgaggaggagcaggaggaggacuggcuggacgacgacucccagcagaccgugggccagcaggacgggagcgaggacaaccagaccacgaccauccagaccaucguggagguccagccccagcucgagauggagcugaccccgguggugcagacgaucgaggucaacuccuucagcggcuaccugaagcucaccgacaacguguacaucaagaacgccgacaucguggaggaggcgaagaaggucaagcccaccgugguggucaacgccgccaacguguaccugaagcacgggggcggcguggccggggcccugaacaaggcgaccaacaacgccaugcaggucgaguccgacgacuacaucgccacgaacggcccccucaagguggggggcagcugcguccuguccggccacaaccuggccaagcacugccuccacgugguggggcccaacgucaacaagggcgaggacauccagcugcugaagagcgccuacgagaacuucaaccagcacgaggugcuccuggcgccgcugcucuccgccgggaucuucggcgccgaccccauccacagccugcgggugugcgucgacaccgugcgcaccaacguguaccuggccgucuucgacaagaaccucuacgacaagcugguguccagcuuccuggagaugaagagcgagaagcagguggagcagaagaucgccgagauccccaaggaggaggucaagcccuucaucaccgaguccaagccgagcguggagcagcggaagcaggacgacaagaagaucaaggcgugcguggaggaggucacgaccacccucgaggagaccaaguuccugacggagaaccugcuccuguacaucgacaucaacgggaaccugcaccccgacuccgccacccucgugagcgacaucgacaucaccuuccugaagaaggacgcccccuacaucgugggcgacgucgugcaggagggcgugcugaccgccgucgugauccccacgaagaaggccgggggcaccaccgagaugcucgcgaaggcccugcgcaaggugccgaccgacaacuacaucacgaccuaccccgggcagggccugaacggguacaccgucgaggaggccaagaccgugcucaagaagugcaaguccgccuucuacauccugcccagcaucaucuccaacgagaagcaggagauccugggcaccgugagcuggaaccuccgggagaugcuggcgcacgccgaggagacgcgcaagcugaugcccgucugcguggagaccaaggccaucguguccaccauccagcggaaguacaagggcaucaagauccaggagggggucguggacuacggcgcccgcuucuacuucuacaccagcaagacgaccguggccucccugaucaacacccucaacgaccugaacgagacccuggucacgaugccgcucggguacgugacccacggccugaaccuggaggaggcggcccgguacaugcgcagccucaaggugcccgccaccgucuccgugagcucccccgacgccgugaccgccuacaacggguaccugacgagcuccagcaagacccccgaggagcacuucaucgagaccaucucccuggcgggcagcuacaaggacuggagcuacuccggccagagcacccagcucgggaucgaguuccugaagcggggcgacaaguccgucuacuacacgagcaacccgaccaccuuccaccuggacggggaggugaucaccuucgacaaccucaagacgcugcugucccuccgcgaggugcggaucaucaaggucuucaccaccguggacaacaucaaccugcacacccagguggucgacaugagcaugacguacggccagcaguucggccccaccuaccuggacggggccgacgugaccaagaucaagccccacaacucccacgagggcaagaccuucuacgugcucccgaacgacgacacgcugcgcgucgaggccuucgaguacuaccacaccaccgaccccagcuuccuggggcgguacauguccgcccucaaccacaccaagaaguggaaguacccccaggugaacggccugacgagcaucaagugggccgacaacaacugcuaccuggcgaccgcccuccugacccugcagcagaucgagcucaaguucaaccccccggcccugcaggacgccuacuaccgcgcgcgggccggggaggccgccaacuucugcgcccugauccucgcguacugcaacaagaccgugggcgagcugggcgacguccgcgagacgauguccuaccuguuccagcacgccaaccucgacagcugcaagcgggugcugaacgucgugugcaagaccugcgggcagcagcagaccacccugaagggcguggaggccgucauguacauggggacccucuccuacgagcaguucaagaagggcgugcagauccccugcacgugcgggaagcaggccaccaaguaccuggugcagcaggagagccccuucgucaugauguccgcccccccggcgcaguacgagcugaagcacggcaccuucaccugcgccagcgaguacacgggcaacuaccagugcgggcacuacaagcacaucaccuccaaggagacccucuacugcaucgacggcgcccugcugaccaagagcagcgaguacaaggggcccaucacggacguguucuacaaggagaacuccuacaccaccaccaucaagcccgugacguacaagcucgacggcgucgugugcaccgagaucgaccccaagcuggacaacuacuacaagaaggacaacagcuacuucaccgagcagccgaucgaccuggugcccaaccagcccuaccccaacgccuccuucgacaacuucaaguucgucugcgacaacaucaaguucgccgacgaccucaaccagcugaccggguacaagaagccggcgagccgcgagcugaaggugacguucuuccccgaccucaacggcgacguggucgccaucgacuacaagcacuacacccccuccuucaagaagggcgccaagcugcugcacaagcccaucguguggcacgugaacaacgccaccaacaaggcgaccuacaagccgaacacguggugcauccggugccucuggagcaccaagcccgucgagaccuccaacagcuucgacgugcugaaguccgaggacgcccaggggauggacaaccuggccugcgaggaccucaagcccgugagcgaggaggucguggagaaccccaccauccagaaggacgugcuggagugcaacgucaagacgaccgagguggugggcgacaucauccugaagccggccaacaacucccucaagaucaccgaggaggucgggcacaccgaccugauggccgcguacguggacaacagcucccugacgaucaagaagcccaacgagcucagccgcgugcugggccugaagacccucgccacccacgggcuggccgccgucaacuccgugcccugggacaccaucgccaacuacgcgaagccguuccugaacaagguggucagcacgaccaccaacaucgugacccgcugccucaaccgggugugcacgaacuacaugcccuacuucuucacccugcugcuccagcugugcaccuucacccgcuccaccaacagccggaucaaggccuccaugcccacgaccaucgccaagaacaccgucaagagcgugggcaaguucugccuggaggccagcuucaacuaccucaagucccccaacuucagcaagcugaucaacaucaucaucugguuccugcuccuguccgugugccugggcagccucaucuacuccaccgccgcgcuggggguccugaugagcaaccucggcaugccguccuacugcacgggguaccgcgagggcuaccugaacagcaccaacgugaccaucgccaccuacugcacgggcuccauccccugcagcgugugccuguccgggcucgacagccuggacaccuaccccucccuggagaccauccagaucaccaucagcuccuucaagugggaccucacggccuucggccuggucgccgagugguuccuggccuacauccucuucacccgguucuucuacgugcuggggcuggcggccaucaugcagcucuucuucagcuacuucgccgugcacuucaucuccaacagcuggcugauguggcugaucaucaaccugguccagauggcccccaucuccgcgauggugcgcauguacaucuucuucgccagcuucuacuacguguggaagagcuacguccacgugguggacggcugcaacuccagcaccugcaugaugugcuacaagcggaaccgcgccacccgggucgagugcacgaccaucgugaacgggguccgccgguccuucuacguguacgccaacggcggcaagggguucugcaagcuccacaacuggaacugcgugaacugcgacaccuucugcgccggcagcaccuucaucuccgacgaggucgcgcgcgaccugagccugcaguucaagcggccgaucaaccccacggaccaguccagcuacaucguggacuccgugaccgucaagaacgggagcauccaccucuacuucgacaaggccggccagaagaccuacgagcgccacucccugagccacuucgugaaccuggacaaccuccgggccaacaacaccaaggggucccugcccaucaacgugaucgucuucgacggcaagagcaagugcgaggaguccagcgccaaguccgccagcguguacuacucccagcugaugugccagcccauccuccugcuggaccaggcgcucgugagcgacgucggcgacagcgccgagguggccgugaagauguucgacgccuacgucaacacguucuccagcaccuucgacgugccgauggagaagcugaagacccugguggccaccgcggaggccgagcucgccaagaacgucucccuggacaacgugcugagcacguucaucuccgccgcgcgccagggguucguggacagcgacgucgagaccaaggacgugguggagugccucaagcugucccaccagagcgacaucgaggucaccggcgacuccugcaacaacuacaugcugaccuacaacaagguggagaacaugacgccccgggaccucggggccugcaucgacugcagcgcccgccacaucaacgcccagguggccaagucccacaacaucgcgcugaucuggaacgucaaggacuucaugagccuguccgagcagcuccggaagcagauccgcagcgccgccaagaagaacaaccugcccuucaagcugaccugcgccaccacccgccagguggugaacgucgugacgaccaagaucgcccucaagggcgggugaggacuagucccuguucccagagcccacuuuuuuuucuuuuuuugaaauaaaauagccugucuuucagaucucaaaggcucuuuucagagccaccaaaaaaaaaaaaaaaaaaaaaaaaaaaaaaaaaaaaaaaaaaaaaaaaaaaaaaaaaaaaaaaaaaaaaaaaaaaaaaaaaaaaaaaaaaaaaaaaaaaaa

SEQ ID NO: 19848 - RNA, 6113 nt, Artificial Sequence
  SARS-CoV-2__MT745688.1__non-structural protein 3 (NSP3) mRNA gc
aggagagucccgcagucggcguccagcggcucugcuuguucgugugugugucguugcaggccuuauucaagcuuaccauggcccccaccaaggugaccuucggcgacgacacggucaucgaggugcagggguacaagagcgugaacaucaccuucgagcuggacgagcgcaucgacaagguccucaacgagaagugcuccgccuacaccguggagcugggcaccgaggugaacgaguucgcgugcgucguggccgacgccgugaucaagacgcugcagccggucagcgagcuccugaccccccuggggaucgaccucgacgagugguccauggccaccuacuaccuguucgacgagagcggcgaguucaagcuggccucccacauguacugcagcuucuacccccccgacgaggacgaggaggagggggacugcgaggaggaggaguucgagccguccacccaguacgaguacggcacggaggacgacuaccagggcaagccccucgaguucggggcgaccagcgccgcccugcagcccgaggaggagcaggaggaggacuggcuggacgacgacucccagcagaccgugggccagcaggacgggagcgacgacaaccagaccacgaccauccagaccaucguggagguccagccccagcucgagauggagcugaccccgguggugcagacgaucgaggucaacuccuucagcggcuaccugaagcucaccgacaacguguacaucaagaacgccgacaucguggaggaggcgaagaaggucaagcccaccgugguggucaacgccgccaacguguaccugaagcacgggggcggcguggccggggcccugaacaaggcgaccaacaacgccaugcaggucgaguccgacgacuacaucgccacgaacggcccccucaagguggggggcagcugcguccuguccggccacaaccuggccaagcacugccuccacgugguggggcccaacgucaacaagggcgaggacauccagcugcugaagagcgccuacgagaacuucaaccagcacgaggugcuccuggcgccgcugcucuccgccgggaucuucugcgccgaccccauccacagccugcgggugugcgucgacaccgugcgcaccaacguguaccuggccgucuucgacaagaaccucuacgacaagcugguguccagcuuccuggagaugaagagcgagaagcagguggagcagaagaucgccgagauccccaaggaggaggucaagcccuucaucaccgaguccaagccgagcguggagcagcggaagcaggacgacaagaagaucaaggcgugcguggaggaggucacgaccacccucgaggagaccaaguuccugacggagaaccugcuccuguacaucgacaucaacggcaaccugcaccccgacuccgccacccucgugagcgacaucgacaucaccuuccugaagaaggacgcccccuacaucgugggggacgucgugcaggagggcgugcugaccgccgucgugauccccacgaagaaggccggcgggaccaccgagaugcucgcgaaggcccugcgcaaggugccgaccgacaacuacaucacgaccuaccccggccaggggcugaacggcuacaccgucgaggaggccaagaccgugcucaagaagugcaaguccgccuucuacauccugcccagcaucaucuccaacgagaagcaggagauccuggggaccgugagcuggaaccuccgggagaugcuggcgcacgccgaggagacgcgcaagcugaugcccgucugcguggagaccaaggccaucguguccaccauccagcggaaguacaagggcaucaagauccaggagggcgucguggacuacggggcccgcuucuacuucuacaccagcaagacgaccguggccucccugaucaacacccucaacgaccugaacgagacccuggucacgaugccgcucggcuacgugacccacgggcugaaccuggaggaggcggcccgguacaugcgcagccucaaggugcccgccaccgucuccgugagcucccccgacgccgugaccgccuacaacggcuaccugacgagcuccagcaagacccccgaggagcacuucaucgagaccaucucccuggcggggagcuacaaggacuggagcuacuccggccagagcacccagcucggcaucgaguuccugaagcggggggacaaguccgucuacuacacgagcaacccgaccaccuuccaccuggacggcgaggugaucaccuucgacaaccucaagacgcugcugucccuccgcgaggugcggaccaucaaggucuucaccaccguggacaacaucaaccugcacacgcagguggucgacaugagcaugaccuacgggcagcaguucggccccaccuaccuggacggcgccgacgugaccaagaucaagccccacaacucccacgaggggaagacguucuacgugcucccgaacgacgacacccugcgcgucgaggccuucgaguacuaccacaccaccgaccccagcuuccugggccgguacauguccgcccucaaccacacgaagaaguggaaguacccccaggugaacgggcugaccagcaucaagugggccgacaacaacugcuaccuggcgaccgugcuccugacccugcagcagaucgagcucaaguucaaccccccggcccugcaggacgccuacuaccgcgcccgggcgggcgaggccgccaacuucugcgcccugauccucgccuacugcaacaagacggucggggagcugggcgacgugcgcgagaccauguccuaccuguuccagcacgcgaaccucgacagcugcaagcggguccugaacguggugugcaagaccugcggccagcagcagaccacccugaagggggucgaggccgugauguacaugggcacgcucuccuacgagcaguucaagaagggggugcagauccccugcaccugcggcaagcaggccaccaaguaccugguccagcaggagagccccuucgugaugauguccgcccccccggcccaguacgagcugaagcacgggaccuucacgugcgcgagcgaguacaccggcaacuaccagugcggccacuacaagcacaucaccuccaaggagacccucuacugcaucgacggggcccugcugacgaagagcagcgaguacaagggccccaucaccgacguguucuacaaggagaacuccuacaccaccacgaucaagcccgucaccuacaagcucgacgggguggugugcaccgagaucgaccccaagcuggacaacuacuacaagaaggacaacagcuacuucaccgagcagccgaucgaccugguccccaaccagcccuaccccaacgccuccuucgacaacuucaaguucgugugcgacaacaucaaguucgccgacgaccucaaccagcugacgggcuacaagaagccggccagccgcgagcugaaggugaccuucuuccccgaccucaacggggacgucguggcgaucgacuacaagcacuacacccccuccuucaagaagggcgccaagcugcugcacaagcccaucguguggcacgucaacaacgccaccaacaaggccacguacaagccgaacaccuggugcauccggugccucuggagcaccaagcccguggagaccuccaacagcuucgacgugcugaaguccgaggacgcgcagggcauggacaaccuggccugcgaggaccucaagcccgucagcgaggaggugguggagaaccccacgauccagaaggacguccuggagugcaacgugaagaccaccgagguggucggggacaucauccugaagccggccaacaacucccucaagaucaccgaggaggugggccacacggaccugauggccgccuacguggacaacagcucccugaccaucaagaagcccaacgagcucagccgcguccuggggcugaagacccucgcgacccacggccuggccgccgugaacuccgugcccugggacacgaucgccaacuacgccaagccguuccugaacaaggucgugagcaccaccaccaacaucgugacgcgcugccucaaccgggucugcaccaacuacaugcccuacuucuucacccugcugcuccagcugugcaccuucacccgcuccacgaacagccggaucaaggcguccaugcccaccaccaucgccaagaacaccgugaagagcguggggaaguucugccuggaggccagcuucaacuaccucaagucccccaacuucagcaagcugaucaacaucaucaucugguuccugcuccuguccgucugccugggcagccucaucuacuccacggccgcccugggcgugcugaugagcaaccucgggaugccguccuacugcaccggcuaccgcgagggguaccugaacagcaccaacgugaccaucgcgacguacugcaccggcuccauccccugcagcgucugccuguccggccucgacagccuggacaccuaccccucccuggagaccauccagaucacgaucagcuccuucaagugggaccucaccgccuucgggcugguggccgagugguuccuggccuacauccucuucacccgguucuucuacgugcugggccuggccgcgaucaugcagcucuucuucagcuacuucgccguccacuucaucuccaacagcuggcugauguggcugaucaucaaccuggugcagauggcccccaucuccgccauggugcgcauguacaucuucuucgcgagcuucuacuacgucuggaagagcuacgugcacguggucgacgggugcaacuccagcaccugcaugaugugcuacaagcggaaccgcgccacgcggguggagugcaccaccaucgucaacggcgugcgccgguccuucuacguguacgccaacgggggcaagggcuucugcaagcuccacaacuggaacugcgucaacugcgacaccuucugcgccgggagcacguucaucuccgacgagguggcccgcgaccugagccugcaguucaagcggccgaucaaccccaccgaccaguccagcuacaucguggacuccgucaccgugaagaacggcagcauccaccucuacuucgacaaggcggggcagaagaccuacgagcgccacucccugagccacuucgugaaccuggacaaccuccgggccaacaacacgaagggcucccugcccaucaacgucaucguguucgacgggaagagcaagugcgaggaguccagcgccaaguccgccagcguguacuacucccagcugaugugccagcccauccuccugcuggaccaggcccucgucagcgacgugggcgacagcgcggagguggccgucaagauguucgacgccuacgugaacaccuucuccagcaccuucaacgugccgauggagaagcugaagacccuggucgccacggccgaggcggagcucgccaagaacgugucccuggacaacgugcugagcaccuucaucuccgccgcccgccagggcuucgucgacagcgacguggagaccaaggacguggucgagugccucaagcugucccaccagagcgacaucgaggugaccggggacuccugcaacaacuacaugcugacguacaacaagguggagaacaugaccccccgggaccucggcgcgugcaucgacugcagcgcccgccacaucaacgcccaggucgccaagucccacaacaucgcccugaucuggaacgugaaggacuucaugagccuguccgagcagcuccggaagcagauccgcagcgcggccaagaagaacaaccugcccuucaagcugaccugcgccaccacgcgccagguggucaacguggugaccaccaagaucgcccucaaggggggcugaggacuagucccuguucccagagcccacuuuuuuuucuuuuuuugaaauaaaauagccugucuuucagaucucaaaggcucuuuucagagccaccaaaaaaaaaaaaaaaaaaaaaaaaaaaaaaaaaaaaaaaaaaaaaaaaaaaaaaaaaaaaaaaaaaaaaaaaaaaaaaaaaaaaaaaaaaaaaaaaaaaaa

SEQ ID NO: 19849 - RNA, 6113 nt, Artificial Sequence
  SARS-CoV-2__MT745694.1__non-structural protein 3 (NSP3) mRNA gc
aggagagucccgcagucggcguccagcggcucugcuuguucgugugugugucguugcaggccuuauucaagcuuaccauggcccccaccaaggugaccuucggcgacgacacggucaucgaggugcagggguacaagagcgugaacaucaccuucgagcuggacgagcgcaucgacaagguccucaacgagaagugcuccgccuacaccguggagcugggcaccgaggugaacgaguucgcgugcgucguggccgacgccgugaucaagacgcugcagccggucagcgagcuccugaccccccuggggaucgaccucgacgagugguccauggccaccuacuaccuguucgacgagagcggcgaguucaagcuggccucccacauguacugcagcuucuacccccccgacgaggacgaggaggagggggacugcgaggaggaggaguucgagccguccacccaguacgaguacggcacggaggacgacuaccagggcaagccccucgaguucggggcgaccagcgccgcccugcagcccgaggaggagcaggaggaggacuggcuggacgacgacucccagcagaccgugggccagcaggacgggagcgaggacaaccagaccacgaccauccagaccaucguggagguccagccccagcucgagauggagcugaccccgguggugcagacgaucgaggucaacuccuucagcggcuaccugaagcucaccgacaacguguacaucaagaacgccgacaucguggaggaggcgaagaaggucaagcccaccgugguggucaacgccgccaacguguaccugaagcacgggggcggcguggccggggcccugaacaaggcgaccaacaacgccaugcaggucgaguccgacgacuacaucgccacgaacggcccccucaagguggggggcagcugcguccuguccggccacaaccuggccaagcacugccuccacgugguggggcccaacgucaacaagggcgaggacauccagcugcugaagagcgccuacgagaacuucaaccagcacgaggugcuccuggcgccgcugcucuccgccgggaucuucggcgccgaccccauccacagccugcgggugugcgucgacaccgugcgcaccaacguguaccuggccgucuucgacaagaaccucuacgacaagcugguguccagcuuccuggagaugaagagcgagaagcagguggagcagaagaucgccgagauccccaaggaggaggucaagcccuucaucaccgaguccaagccgagcguggagcagcggaagcaggacgacaagaagaucaaggcgugcguggaggaggucacgaccacccucgaggagaccaaguuccugacggagaaccugcuccuguacaucgacaucaacgggaaccugcaccccgacuccgccacccucgugagcgacaucgacaucaccuuccugaagaaggacgcccccuacaucgugggcgacgucgugcaggagggcgugcugaccgccgucgugauccccacgaagaaggccgggggcaccaccgagaugcucgcgaaggcccugcgcaaggugccgaccgacaacuacaucacgaccuaccccgggcagggccugaacggguacaccgucgaggaggccaagaccgugcucaagaagugcaaguccgccuucuacauccugcccagcaucaucuccaacgagaagcaggagauccugggcaccgugagcuggaaccuccgggagaugcuggcgcacgccgaggagacgcgcaagcugaugcccgucugcguggagaccaaggccaucguguccaccauccagcggaaguacaagggcaucaagauccaggagggggucguggacuacggcgcccgcuucuacuucuacaccagcaagacgaccguggccucccugaucaacacccucaacgaccugaacgagacccuggucacgaugccgcucggguacgugacccacggccugaaccuggaggaggcggcccgguacaugcgcagccucaaggugcccgccaccgucuccgugagcucccccgacgccgugaccgccuacaacggguaccugacgagcuccagcaagacccccgaggagcacuucaucgagaccaucucccuggcgggcagcuacaaggacuggagcuacuccggccagagcacccagcucgggaucgaguuccugaagcggggcgacaaguccgucuacuacacgagcaacccgaccaccuuccaccuggacggggaggugaucaccuucgacaaccucaagacgcugcugucccuccgcgaggugcggaccaucaaggucuucaccaccguggacaacaucaaccugcacacgcagguggucgacaugagcaugaccuacggccagcaguucggccccaccuaccuggacggggccgacgugaccaagaucaagccccacaacucccacgagggcaagacguucuacgugcucccgaacgacgacacccugcgcgucgaggccuucgaguacuaccacaccaccgaccccagcuuccuggggcgguacauguccgcccucaaccacacgaagaaguggaaguacccccaggugaacggccugaccagcaucaagugggccgacaacaacugcuaccuggcgaccgcccuccugacccugcagcagaucgagcucaaguucaaccccccggcccugcaggacgccuacuaccgcgcgcgggccggggaggccgccaacuucugcgcccugauccucgcguacugcaacaagacggugggcgagcugggcgacguccgcgagaccauguccuaccuguuccagcacgccaaccucgacagcugcaagcgggugcugaacgucgugugcaagaccugcgggcagcagcagaccacccugaagggcguggaggccgucauguacauggggacgcucuccuacgagcaguucaagaagggcgugcagauccccugcaccugcgggaagcaggccaccaaguaccuggugcagcaggagagccccuucgucaugauguccgcccccccggcgcaguacgagcugaagcacggcaccuucacgugcgccagcgaguacaccggcaacuaccagugcgggcacuacaagcacaucaccuccaaggagacccucuacugcaucgacggcgcccugcugacgaagagcagcgaguacaaggggcccaucaccgacguguucuacaaggagaacuccuacaccaccacgaucaagcccgugaccuacaagcucgacggcgucgugugcaccgagaucgaccccaagcuggacaacuacuacaagaaggacaacagcuacuucaccgagcagccgaucgaccuggugcccaaccagcccuaccccaacgccuccuucgacaacuucaaguucgucugcgacaacaucaaguucgccgacgaccucaaccagcugacgggguacaagaagccggcgagccgcgagcugaaggugaccuucuuccccgaccucaacggcgacguggucgccaucgacuacaagcacuacacccccuccuucaagaagggcgccaagcugcugcacaagcccaucguguggcacgugaacaacgccaccaacaaggcgacguacaagccgaacaccuggugcauccggugccucuggagcaccaagcccgucgagaccuccaacagcuucgacgugcugaaguccgaggacgcccaggggauggacaaccuggccugcgaggaccucaagcccgugagcgaggaggucguggagaaccccacgauccagaaggacgugcuggagugcaacgucaagaccaccgagguggugggcgacaucauccugaagccggccaacaacucccucaagaucaccgaggaggucgggcacacggaccugauggccgcguacguggacaacagcucccugaccaucaagaagcccaacgagcucagccgcgugcugggccugaagacccucgccacccacgggcuggccgccgucaacuccgugcccugggacacgaucgccaacuacgcgaagccguuccugaacaagguggucagcaccaccaccaacaucgugacgcgcugccucaaccgggugugcaccaacuacaugcccuacuucuucacccugcugcuccagcugugcaccuucacccgcuccacgaacagccggaucaaggucuccaugcccaccaccaucgccaagaacaccgugaagagcgugggcaaguucugccuggaggccagcuucaacuaccucaagucccccaacuucagcaagcugaucaacaucaucaucugguuccugcuccuguccgucugccugggcagccucaucuacuccacggccgcccugggggugcugaugagcaaccucggcaugccguccuacugcaccggguaccgcgagggcuaccugaacagcaccaacgugaccaucgcgacguacugcaccggcuccauccccugcagcgucugccuguccgggcucgacagccuggacaccuaccccucccuggagaccauccagaucacgaucagcuccuucaagugggaccucaccgccuucggccugguggccgagugguuccuggccuacauccucuucacccgguucuucuacgugcuggggcuggccgcgaucaugcagcucuucuucagcuacuucgccguccacuucaucuccaacagcuggcugauguggcugaucaucaaccuggugcagauggcccccaucuccgccauggugcgcauguacaucuucuucgcgagcuucuacuacgucuggaagagcuacgugcacguggucgacggcugcaacuccagcaccugcaugaugugcuacaagcggaaccgcgccacgcggguggagugcaccaccaucgucaacggggugcgccgguccuucuacguguacgccaacggcggcaagggguucugcaagcuccacaacuggaacugcgucaacugcgacaccuucugcgccggcagcacguucaucuccgacgagguggcccgcgaccugagccugcaguucaagcggccgaucaaccccaccgaccaguccagcuacaucguggacuccgucaccgugaagaacgggagcauccaccucuacuucgacaaggcgggccagaagaccuacgagcgccacucccugagccacuucgugaaccuggacaaccuccgggccaacaacacgaaggggucccugcccaucaacgucaucguguucgacggcaagagcaagugcgaggaguccagcgccaaguccgccagcguguacuacucccagcugaugugccagcccauccuccugcuggaccaggcccucgucagcgacgugggcgacagcgcggagguggccgucaagauguucgacgccuacgugaacaccuucuccagcaccuucaacgugccgauggagaagcugaagacccuggucgccacggccgaggcggagcucgccaagaacgugucccuggacaacgugcugagcaccuucaucuccgccgcccgccagggguucgucgacagcgacguggagaccaaggacguggucgagugccucaagcugucccaccagagcgacaucgaggugaccggcgacuccugcaacaacuacaugcugacguacaacaagguggagaacaugaccccccgggaccucggggcgugcaucgacugcagcgcccgccacaucaacgcccaggucgccaagucccacaacaucgcccugaucuggaacgugaaggacuucaugagccuguccgagcagcuccggaagcagauccgcagcgcggccaagaagaacaaccugcccuucaagcugaccugcgccaccacgcgccagguggucaacguggugaccaccaagaucgcccucaagggcgggugaggacuagucccuguucccagagcccacuuuuuuuucuuuuuuugaaauaaaauagccugucuuucagaucucaaaggcucuuuucagagccaccaaaaaaaaaaaaaaaaaaaaaaaaaaaaaaaaaaaaaaaaaaaaaaaaaaaaaaaaaaaaaaaaaaaaaaaaaaaaaaaaaaaaaaaaaaaaaaaaaaaaa

SEQ ID NO: 19850 - RNA, 6113 nt, Artificial Sequence
  SARS-CoV-2__MT745711.1__non-structural protein 3 (NSP3) mRNA gc
aggagagucccgcagucggcguccagcggcucugcuuguucgugugugugucguugcaggccuuauucaagcuuaccauggcccccaccaaggugaccuucggcgacgacacggucaucgaggugcagggguacaagagcgugaacaucaccuucgagcuggacgagcgcaucgacaagguccucaacgagaagugcuccgccuacaccguggagcugggcaccgaggugaacgaguucgcgugcgucguggccgacgccgugaucaagacgcugcagccggucagcgagcuccugaccccccuggggaucgaccucgacgagugguccauggccaccuacuaccuguucgacgagagcggcgaguucaagcuggccucccacauguacugcagcuucuacccccccgacgaggacgaggaggagggggacugcgaggaggaggaguucgagccguccacccaguacgaguacggcacggaggacgacuaccagggcaagccccucgaguucggggcgaccagcgccgcccugcagcccgaggaggagcaggaggaggacuggcuggacgacgacucccagcagaccgugggccagcaggacgggagcgaggacaaccagaccacgaccauccagaccaucguggagguccagccccagcucgagauggagcugaccccgguggugcagacgaucgaggucaacuccuucagcggcuaccugaagcucaccgacaacguguacaucaagaacgccgacaucguggaggaggcgaagaaggucaagcccaccgugguggucaacgccgccaacguguaccugaagcacgggggcggcguggccggggcccugaacaaggcgaccaacaacgccaugcaggucgaguccgacgacuacaucgccacgaacggcccccucaagguggggggcagcugcguccuguccggccacaaccuggccaagcacugccuccacgugguggggcccaacgucaacaagggcgaggacauccagcugcugaagagcgccuacgagaacuucaaccagcacgaggugcuccuggcgccgcugcucuccgccgggaucuucggcgccgaccccauccacagccugcgggugugcgucgacaccgugcgcaccaacguguaccuggccgucuucgacaagaaccucuacgacaagcugguguccagcuuccuggagaugaagagcgagaagcagguggagcagaagaucgccgagauccccaaggaggaggucaagcccuucaucaccgaguccaagccgagcguggagcagcggaagcaggacgacaagaagaucaaggcgugcguggaggaggucacgaccacccucgaggagaccaaguuccugacggagaaccugcuccuguacaucgacaucaacgggaaccugcaccccgacuccgccacccucgugagcgacaucgacaucaccuuccugaagaaggacgcccccuacaucgugggcgacgucgugcaggagggcgugcugaccgccgucgugauccccacgaagaaggccgggggcaccaccgagaugcucgcgaaggcccugcgcaaggugccgaccgacaacuacaucacgaccuaccccgggcagggccugaacggguacaccgucgaggaggccaagaccgugcucaagaagugcaaguccgccuucuacauccugcccagcaucaucuccaacgagaagcaggagauccugggcaccgugagcuggaaccuccgggagaugcuggcgcacgccgaggagacgcgcaagcugaugcccgucugcguggagaccaaggccaucguguccaccauccagcggaaguacaagggcaucaagauccaggagggggucguggacuacggcgcccgcuucuacuucuacaccagcaagacgaccguggccucccugaucaacacccucaacgaccugaacgagacccuggucacgaugccgcucggguacgugacccacggccugaaccuggaggaggcggcccgguacaugcgcagccucaaggugcccgccaccgucuccgugagcucccccgacgccgugaccgccuacaacggguaccugacgagcuccagcaagacccccgaggagcacuucaucgagaccaucucccuggcgggcagcuacaaggacuggagcuacuccggccagagcacccagcucgggaucgaguuccugaagcggggcgacaaguccgucuacuacacgagcaacccgaccaccuuccaccuggacggggaggugaucaccuucgacaaccucaagacgcugcugucccuccgcgaggugcggaccaucaaggucuucaccaccguggacaacaucaaccugcacacgcagguggucgacaugagcaugaccuacggccagcaguucggccccaccuaccuggacggggccgacgugaccaagaucaagccccacaacucccacgagggcaagacguucuacgugcucccgaacgacgacacccugcgcgucgaggccuucgaguacuaccacaccaccgaccccagcuuccuggggcgguacauguccgcccucaaccacacgaagaaguggaaguacccccaggugaacggccugaccagcaucaagugggccgacaacaacugcuaccuggcgaccgcccuccugacccugcagcagaucgagcucaaguucaaccccccggcccugcaggacgccuacuaccgcgcgcgggccggggaggccgccaacuucugcgcccugauccucgcguacugcaacaagacggugggcgagcugggcgacguccgcgagaccauguccuaccuguuccagcacgccaaccucgacagcugcaagcgggugcugaacgucgugugcaagaccugcgggcagcagcagaccacccugaagggcguggaggccgucauguacauggggacgcucuccuacgagcaguucaagaagggcgugcagauccccugcaccugcgggaagcaggccaccaaguaccuggugcagcaggagagccccuucgucaugauguccgcccccccggcgcaguacgagcugaagcacggcaccuucacgugcgccagcgaguacaccggcaacuaccagugcgggcacuacaagcacaucaccuccaaggagacccucuacugcaucgacggcgcccugcugacgaagagcagcgaguacaaggggcccaucaccgacguguucuacaaggagaacuccuacaccaccacgaucaagcccgugaccuacaagcucgacggcgucgugugcaccgagaucgaccccaagcuggacaacuacuacaagaaggacaacagcuacuucaccgagcagccgaucgaccuggugcccaaccagcccuaccccaacgccuccuucgacaacuucaaguucgucugcgacaacaucaaguucgccgacgaccucaaccagcugacgggguacaagaagccggcgagccgcgagcugaaggugaccuucuuccccgaccucaacggcgacguggucgccaucgacuacaagcacuacacccccuccuucaagaagggcgccaagcugcugcacaagcccaucguguggcacgugaacaacgccaccaacaaggcgacguacaagccgaacaccuggugcauccggugccucuggagcaccaagcccgucgagaccuccaacagcuucgacgugcugaaguccgaggacgcccaggggauggacaaccuggccugcgaggaccucaagcccgugagcgaggaggucguggagaaccccacgauccagaaggacuuccuggagugcaacgugaagaccaccgaggucgugggcgacaucauccugaagccggccaacaacucccucaagaucaccgaggagguggggcacacggaccugauggccgcguacgucgacaacagcucccugaccaucaagaagcccaacgagcucagccgcgugcugggccugaagacccucgccacccacgggcuggccgccgugaacuccguccccugggacacgaucgccaacuacgcgaagccguuccugaacaagguggugagcaccaccaccaacaucgucacgcgcugccucaaccgggugugcaccaacuacaugcccuacuucuucacccugcugcuccagcugugcaccuucacccgcuccacgaacagccggaucaaggccuccaugcccaccaccaucgccaagaacaccgugaagagcgucggcaaguucugccuggaggccagcuucaacuaccucaagucccccaacuucagcaagcugaucaacaucaucaucugguuccugcuccuguccgugugccugggcagccucaucuacuccacggccgcgcugggggugcugaugagcaaccucggcaugccguccuacugcaccggguaccgcgagggcuaccugaacagcaccaacgucaccaucgccacguacugcaccggcuccauccccugcagcgugugccuguccgggcucgacagccuggacaccuaccccucccuggagaccauccagaucacgaucagcuccuucaagugggaccucaccgccuucggccugguggccgagugguuccuggccuacauccucuucacccgguucuucuacguccuggggcuggcggccaucaugcagcucuucuucagcuacuucgccgugcacuucaucuccaacagcuggcugauguggcugaucaucaaccuggugcagauggcccccaucuccgcgaugguccgcauguacaucuucuucgccagcuucuacuacguguggaagagcuacgugcacgucguggacggcugcaacuccagcaccugcaugaugugcuacaagcggaaccgcgccacgcggguggagugcaccaccaucgucaacggggugcgccgguccuucuacgucuacgccaacggcggcaagggguucugcaagcuccacaacuggaacugcgugaacugcgacaccuucugcgccggcagcacguucaucuccgacgagguggcgcgcgaccugagccugcaguucaagcggccgaucaaccccaccgaccaguccagcuacaucgucgacuccgugaccgugaagaacgggagcauccaccucuacuucgacaaggccggccagaagaccuacgagcgccacucccugagccacuucgucaaccuggacaaccuccgggccaacaacacgaaggggucccugcccaucaacgugaucguguucgacggcaagagcaagugcgaggaguccagcgccaaguccgccagcgucuacuacucccagcugaugugccagcccauccuccugcuggaccaggcgcucgugagcgacgugggcgacagcgccgaggucgccgugaagauguucgacgccuacgugaacaccuucuccagcaccuucaacgucccgauggagaagcugaagacccugguggccacggcggaggccgagcucgccaagaacgugucccuggacaacguccugagcaccuucaucuccgccgcgcgccagggguucguggacagcgacguggagaccaaggacgucguggagugccucaagcugucccaccagagcgacaucgaggugaccggcgacuccugcaacaacuacaugcugacguacaacaaggucgagaacaugaccccccgggaccucggggccugcaucgacugcagcgcccgccacaucaacgcccagguggccaagucccacaacaucgcgcugaucuggaacgugaaggacuucaugagccuguccgagcagcuccggaagcagauccgcagcgccgccaagaagaacaaccugcccuucaagcugaccugcgccaccacgcgccaggucgugaacguggucaccaccaagaucgcccucaagggcgggugaggacuagucccuguucccagagcccacuuuuuuuucuuuuuuugaaauaaaauagccugucuuucagaucucaaaggcucuuuucagagccaccaaaaaaaaaaaaaaaaaaaaaaaaaaaaaaaaaaaaaaaaaaaaaaaaaaaaaaaaaaaaaaaaaaaaaaaaaaaaaaaaaaaaaaaaaaaaaaaaaaaaa

SEQ ID NO: 19851 - RNA, 6113 nt, Artificial Sequence
  SARS-CoV-2__MT745715.1__non-structural protein 3 (NSP3) mRNA gc
aggagagucccgcagucggcguccagcggcucugcuuguucgugugugugucguugcaggccuuauucaagcuuaccauggcccccaccaaggugaccuucggcgacgacacggucaucgaggugcagggguacaagagcgugaacaucaccuucgagcuggacgagcgcaucgacaagguccucaacgagaagugcuccgccuacaccguggagcugggcaccgaggugaacgaguucgcgugcgucguggccgacgccgugaucaagacgcugcagccggucagcgagcuccugaccccccuggggaucgaccucgacgagugguccauggccaccuacuaccuguucgacgagagcggcgaguucaagcuggccucccacauguacugcagcuucuacccccccgacgaggacgaggaggagggggacugcgaggaggaggaguucgagccguccacccaguacgaguacggcacggaggacgacuaccagggcaagccccucgaguucggggcgaccagcgccgcccugcagcccgaggaggagcaggaggaggacuggcuggacgacgacucccagcagaccgugggccagcaggacgggagcgaggacaaccagaccacgaccauccagaccaucguggagguccagccccagcucgagauggagcugaccccgguggugcagacgaucgaggucaacuccuucagcggcuaccugaagcucaccgacaacguguacaucaagaacgccgacaucguggaggaggcgaagaaggucaagcccaccgugguggucaacgccgccaacguguaccugaagcacgggggcggcguggccggggcccugaacaaggcgaccaacaacgccaugcaggucgaguccgacgacuacaucgccacgaacggcccccucaagguggggggcagcugcguccuguccggccacaaccuggccaagcacugccuccacgugguggggcccaacgucaacaagggcgaggacauccagcugcugaagagcgccuacgagaacuucaaccagcacgaggugcuccuggcgccgcugcucuccgccgggaucuucggcgccgaccccauccacagccugcgggugugcgucgacaccgugcgcaccaacguguaccuggccgucuucgacaagaaccucuacgacaagcugguguccagcuuccuggagaugaagagcgagaagcagguggagcagaagaucgccgagauccccaaggaggaggucaagcccuucaucaccgaguccaagccgagcguggagcagcggaagcaggacgacaagaagaucaaggcgugcguggaggaggucacgaccacccucgaggagaccaaguuccugacggagaaccugcuccuguacaucgacaucaacgggaaccugcaccccgacuccgccacccucgugagcgacaucgacaucaccuuccugaagaaggacgcccccuacaucgugggcgacgucgugcaggagggcgugcugaccgccgucgugauccccacgaagaaggccgggggcaccaccgagaugcucgcgaaggcccugcgcaaggugccgaccgacaacuacaucacgaccuaccccgggcagggccugaacggguacaccgucgaggaggccaagaccgugcucaagaagugcaaguccgccuucuacauccugcccagcaucaucuccaacgagaagcaggagauccugggcaccgugagcuggaaccuccgggagaugcuggcgcacgccgaggagacgcgcaagcugaugcccgucugcguggagaccaaggccaucguguccaccauccagcggaaguacaagggcaucaagauccaggagggggucguggacuacggcgcccgcuucuacuucuacaccagcaagacgaccguggccucccugaucaacacccucaacgaccugaacgagacccuggucacgaugccgcucggguacgugacccacggccugaaccuggaggaggcggcccgguacaugcgcagccucaaggugcccgccaccgucuccgugagcucccccgacgccgugaccgccuacaacggguaccugacgagcuccagcaagacccccgaggagcacuucaucgagaccaucucccuggcgggcagcuacaaggacuggagcuacuccggccagagcacccagcucgggaucgaguuccugaagcggggcgacaaguccgucuacuacacgagcaacccgaccaccuuccaccuggacggggaggugaucaccuucgacaaccucaagacgcugcugucccuccgcgaggugcggaccaucaaggucuucaccaccguggacaacaucaaccugcacacgcagguggucgacaugagcaugaccuacggccagcaguucggccccaccuaccuggacggggccgacgugaccaagaucaagccccacaacucccacgagggcaagacguucuacgugcucccgaacgacgacacccugcgcgucgaggccuucgaguacuaccacaccaccgaccccagcuuccuggggcgguacauguccgcccucaaccacacgaagaaguggaaguacccccaggugaacggccugaccagcaucaagugggccgacaacaacugcuaccuggcgaccgcccuccugacccugcagcagaucgagcucaaguucaaccccccggcccugcaggacgccuacuaccgcgcgcgggccggggaggccgccaacuucugcgcccugauccucgcguacugcaacaagacggugggcgagcugggcgacguccgcgagaccauguccuaccuguuccagcacgccaaccucgacagcugcaagcgggugcugaacgucgugugcaagaccugcgggcagcagcagaccacccugaagggcguggaggccgucauguacauggggacgcucuccuacgagcaguucaagaagggcgugcagauccccugcaccugcgggaagcaggccaccaaguaccuggugcagcaggagagccccuucgucaugauguccgcccccccggcgcaguacgagcugaagcacggcaccuucacgugcgccagcgaguacaccggcaacuaccagugcgggcacuacaagcacaucaccuccaaggagacccucuacugcaucgacggcgcccugcugacgaagagcagcgaguacaaggggcccaucaccgacguguucuacaaggagaacuccuacaucaccaccaucaagcccgugacguacaagcucgacggcgucgugugcaccgagaucgaccccaagcuggacaacuacuacaagaaggacaacagcuacuucaccgagcagccgaucgaccuggugcccaaccagcccuaccccaacgccuccuucgacaacuucaaguucgucugcgacaacaucaaguucgccgacgaccucaaccagcugaccggguacaagaagccggcgagccgcgagcugaaggugacguucuuccccgaccucaacggcgacguggucgccaucgacuacaagcacuacacccccuccuucaagaagggcgccaagcugcugcacaagcccaucguguggcacgugaacaacgccaccaacaaggcgaccuacaagccgaacacguggugcauccggugccucuggagcaccaagcccgucgagaccuccaacagcuucgacgugcugaaguccgaggacgcccaggggauggacaaccuggccugcgaggaccucaagcccgugagcgaggaggucguggagaaccccaccauccagaaggacgugcuggagugcaacgucaagacgaccgagguggugggcgacaucauccugaagccggccaacaacucccucaagaucaccgaggaggucgggcacaccgaccugauggccgcguacguggacaacagcucccugacgaucaagaagcccaacgagcucagccgcgugcugggccugaagacccucgccacccacgggcuggccgucgugaacuccgugcccugggacaccaucgccaacuacgccaagccguuccugaacaaggucgugagcacgaccaccaacaucgugacccgcugccucaaccgggucugcacgaacuacaugcccuacuucuucacccugcugcuccagcugugcaccuucacccgcuccaccaacagccggaucaaggcguccaugcccacgaccaucgccaagaacaccgugaagagcgugggcaaguucugccuggaggccagcuucaacuaccucaagucccccaacuucagcaagcugaucaacaucaucaucugguuccugcuccuguccgucugccugggcagccucaucuacuccaccgccgcccugggggugcugaugagcaaccucggcaugccguccuacugcacgggguaccgcgagggcuaccugaacagcaccaacgugaccaucgcgaccuacugcacgggcuccauccccugcagcgucugccuguccgggcucgacagccuggacaccuaccccucccuggagaccauccagaucaccaucagcuccuucaagugggaccucacggccuucggccugguggccgagugguuccuggccuacauccucuucacccgguucuucuacgugcuggggcuggccgcgaucaugcagcucuucuucagcuacuucgccguccacuucaucuccaacagcuggcugauguggcugaucaucaaccuggugcagauggcccccaucuccgccauggugcgcauguacaucuucuucgcgagcuucuacuacgucuggaagagcuacgugcacguggucgacggcugcaacuccagcaccugcaugaugugcuacaagcggaaccgcgccacccggguggagugcacgaccaucgucaacggggugcgccgguccuucuacguguacgccaacggcggcaagggguucugcaagcuccacaacuggaacugcgucaacugcgacaccuucugcgccggcagcaccuucaucuccgacgagguggcccgcgaccugagccugcaguucaagcggccgaucaaccccacggaccaguccagcuacaucguggacuccgucaccgugaagaacgggagcauccaccucuacuucgacaaggcgggccagaagaccuacgagcgccacucccugagccacuucgugaaccuggacaaccuccgggccaacaacaccaaggggucccugcccaucaacgucaucguguucgacggcaagagcaagugcgaggaguccagcgccaaguccgccagcguguacuacucccagcugaugugccagcccauccuccugcuggaccaggcccucgucagcgacgugggcgacagcgcggagguggccgucaagauguucgacgccuacgugaacacguucuccagcaccuucaacgugccgauggagaagcugaagacccuggucgccaccgccgaggcggagcucgccaagaacgugucccuggacaacgugcugagcacguucaucuccgccgcccgccagggguucgucgacagcgacguggagaccaaggacguggucgagugccucaagcugucccaccagagcgacaucgaggugaccggcgacuccugcaacaacuacaugcugaccuacaacaagguggagaacaugacgccccgggaccucggggcgugcaucgacugcagcgcccgccacaucaacgcccaggucgccaagucccacaacaucgcccugaucuggaacgugaaggacuucaugagccuguccgagcagcuccggaagcagauccgcagcgcggccaagaagaacaaccugcccuucaagcugaccugcgccaccacccgccagguggucaacguggugacgaccaagaucgcccucaagggcgggugaggacuagucccuguucccagagcccacuuuuuuuucuuuuuuugaaauaaaauagccugucuuucagaucucaaaggcucuuuucagagccaccaaaaaaaaaaaaaaaaaaaaaaaaaaaaaaaaaaaaaaaaaaaaaaaaaaaaaaaaaaaaaaaaaaaaaaaaaaaaaaaaaaaaaaaaaaaaaaaaaaaaa

SEQ ID NO: 19852 - RNA, 6113 nt, Artificial Sequence
  SARS-CoV-2__MT750044.1__non-structural protein 3 (NSP3) mRNA gc
aggagagucccgcagucggcguccagcggcucugcuuguucgugugugugucguugcaggccuuauucaagcuuaccauggcccccaccaaggugaccuucggcgacgacacggucaucgaggugcagggguacaagagcgugaacaucaccuucgagcuggacgagcgcaucgacaagguccucaacgagaagugcuccgccuacaccguggagcugggcaccgaggugaacgaguucgcgugcgucguggccgacgccgugaucaagacgcugcagccggucagcgagcuccugaccccccuggggaucgaccucgacgagugguccauggccaccuacuaccuguucgacgagagcggcgaguucaagcuggccucccacauguacugcagcuucuacccccccgacgaggacgaggaggagggggacugcgaggaggaggaguucgagccguccacccaguacgaguacggcacggaggacgacuaccagggcaagccccucgaguucggggcgaccagcgccgcccugcagcccgaggaggagcaggaggaggacuggcuggacgacgacucccagcagaccgugggccagcaggacgggagcgaggacaaccagaccacgaccauccagaccaucguggagguccagccccagcucgagauggagcugaccccgguggugcagacgaucgaggucaacuccuucagcggcuaccugaagcucaccgacaacguguacaucaagaacgccgacaucguggaggaggcgaagaaggucaagcccaccgugguggucaacgccgccaacguguaccugaagcacgggggcggcguggccggggcccugaacaaggcgaccaacaacgccaugcaggucgaguccgacgacuacaucgccacgaacggcccccucaagguggggggcagcugcguccuguccggccacaaccuggccaagcacugccuccacgugguggggcccaacgucaacaagggcgaggacauccagcugcugaagagcgccuacgagaacuucaaccagcacgaggugcuccuggcgccgcugcucuccgccgggaucuucggcgccgaccccauccacagccugcgggugugcgucgacaccgugcgcaccaacguguaccuggccgucuucgacaagaaccucuacgacaagcugguguccagcuuccuggagaugaagagcgagaagcagguggagcagaacaucgccgagauccccaaggaggaggucaagcccuucaucaccgaguccaagccgagcguggagcagcggaagcaggacgacaagaagaucaaggcgugcguggaggaggucacgaccacccucgaggagaccaaguuccugacggagaaccugcuccuguacaucgacaucaacgggaaccugcaccccgacuccgccacccucgugagcgacaucgacaucaccuuccugaagaaggacgcccccuacaucgugggcgacgucgugcaggagggcgugcugaccgccgucgugauccccacgaagaaggccgggggcaccaccgagaugcucgcgaaggcccugcgcaaggugccgaccgacaacuacaucacgaccuaccccgggcagggccugaacggguacaccgucgaggaggccaagaccgugcucaagaagugcaaguccgccuucuacauccugcccagcaucaucuccaacgagaagcaggagauccugggcaccgugagcuggaaccuccgggagaugcuggcgcacgccgaggagacgcgcaagcugaugcccgucugcguggagaccaaggccaucguguccaccauccagcggaaguacaagggcaucaagauccaggagggggucguggacuacggcgcccgcuucuacuucuacaccagcaagacgaccguggccucccugaucaacacccucaacgaccugaacgagacccuggucacgaugccgcucggguacgugacccacggccugaaccuggaggaggcggcccgguacaugcgcagccucaaggugcccgccaccgucuccgugagcucccccgacgccgugaccgccuacaacggguaccugacgagcuccagcaagacccccgaggagcacuucaucgagaccaucucccuggcgggcagcuacaaggacuggagcuacuccggccagagcacccagcucgggaucgaguuccugaagcggggcgacaaguccgucuacuacacgagcaacccgaccaccuuccaccuggacggggaggugaucaccuucgacaaccucaagacgcugcugucccuccgcgaggugcggaccaucaaggucuucaccaccguggacaacaucaaccugcacacgcagguggucgacaugagcaugaccuacggccagcaguucggccccaccuaccuggacggggccgacgugaccaagaucaagccccacaacucccacgagggcaagacguucuacgugcucccgaacgacgacacccugcgcgucgaggccuucgaguacuaccacaccaccgaccccagcuuccuggggcgguacauguccgcccucaaccacacgaagaaguggaaguacccccaggugaacggccugaccagcaucaagugggccgacaacaacugcuaccuggcgaccgcccuccugacccugcagcagaucgagcucaaguucaaccccccggcccugcaggacgccuacuaccgcgcgcgggccggggaggccgccaacuucugcgcccugauccucgcguacugcaacaagacggugggcgagcugggcgacguccgcgagaccauguccuaccuguuccagcacgccaaccucgacagcugcaagcgggugcugaacgucgugugcaagaccugcgggcagcagcagaccacccugaagggcguggaggccgucauguacauggggacgcucuccuacgagcaguucaagaagggcgugcagauccccugcaccugcgggaagcaggccaccaaguaccuggugcagcaggagagccccuucgucaugauguccgcccccccggcgcaguacgagcugaagcacggcaccuucacgugcgccagcgaguacaccggcaacuaccagugcgggcacuacaagcacaucaccuccaaggagacccucuacugcaucgacggcgcccugcugacgaagagcagcgaguacaaggggcccaucaccgacguguucuacaaggagaacuccuacaccaccacgaucaagcccgugaccuacaagcucgacggcgucgugugcaccgagaucgaccccaagcuggacaacuacuacaagaaggacaacagcuacuucaccgagcagccgaucgaccuggugcccaaccagcccuaccccaacgccuccuucgacaacuucaaguucgucugcgacaacaucaaguucgccgacgaccucaaccagcugacgggguacaagaagccggcgagccgcgagcugaaggugaccuucuuccccgaccucaacggcgacguggucgccaucgacuacaagcacuacacccccuccuucaagaagggcgccaagcugcugcacaagcccaucguguggcacgugaacaacgccaccaacaaggcgacguacaagccgaacaccuggugcauccggugccucuggagcaccaagcccgucgagaccuccaacagcuucgacgugcugaaguccgaggacgcccaggggauggacaaccuggccugcgaggaccucaagcccgugagcgaggaggucguggagaaccccacgauccagaaggacgugcuggagugcaacgucaagaccaccgagguggugggcgacaucauccugaagccggccaacaacucccucaagaucaccgaggaggucgggcacacggaccugauggccgcguacguggacaacagcucccugaccaucaagaagcccaacgagcucagccgcgugcugggccugaagacccucgccacccacgggcuggccgccgucaacuccgugcccugggacacgaucgccaacuacgcgaagccguuccugaacaagguggucagcaccaccaccaacaucgugacgcgcugccucaaccgggugugcaccaacuacaugcccuacuucuucacccugcugcuccagcugugcaccuucacccgcuccacgaacagccggaucaaggccuccaugcccaccaccaucgccaagaacaccgucaagagcgugggcaaguucugccuggaggcccucuucaacuaccugaagagccccaacuucuccaagcugaucaacaucaucaucugguuccuccugcugagcgugugccucggcucccugaucuacagcacggccgcgcuggggguccucauguccaaccugggcaugccgagcuacugcaccggguaccgcgagggcuaccugaacuccaccaacgugaccaucgccacguacugcaccggcagcauccccugcuccgugugccucagcgggcuggacucccuggacaccuaccccagccucgagaccauccagaucacgaucuccagcuucaagugggaccugaccgccuucggccuggucgccgagugguuccucgccuacauccuguucacccgguucuucuacgugcuggggcucgcggccaucaugcagcuguucuucuccuacuucgccgugcacuucaucagcaacuccuggcugauguggcugaucaucaaccucguccagauggcccccaucagcgcgauggugcgcauguacaucuucuucgccuccuucuacuacguguggaagagcuacguccacgugguggacggcugcaacagcuccaccugcaugaugugcuacaagcggaaccgcgccacgcgggucgagugcaccaccaucgugaacgggguccgccggagcuucuacguguacgccaacggcggcaagggguucugcaagcugcacaacuggaacugcgugaacugcgacaccuucugcgccggcuccacguucaucagcgacgaggucgcgcgcgaccugucccuccaguucaagcggccgaucaaccccaccgaccagagcuccuacaucguggacagcgugaccgucaagaacggguccauccaccuguacuucgacaaggccggccagaagaccuacgagcgccacagccugucccacuucgugaaccucgacaaccugcgggccaacaacacgaaggggagccugcccaucaacgugaucgucuucgacggcaaguccaagugcgaggagagcuccgccaagagcgccuccguguacuacagccagcucaugugccagcccauccugcugcucgaccaggcgcugguguccgacgucggcgacagcgccgagguggccgugaagauguucgacgccuacgucaacaccuucagcuccaccuucaacgugccgauggagaagcugaagacccucguggccacggcggaggccgagcuggccaagaacgucagccuggacaacgugcucuccaccuucaucagcgccgcgcgccagggguucguggacuccgacgucgagaccaaggacgugguggagugccugaagcugagccaccaguccgacaucgaggucaccggcgacagcugcaacaacuacaugcucacguacaacaagguggagaacaugaccccccgggaccugggggccugcaucgacugcuccgcccgccacaucaacgcccagguggccaagagccacaacgucgcgcugaucuggaacgugaaggacuucaugucccucagcgagcagcugcggaagcagauccgcuccgccgccaagaagaacaaccugcccuucaagcucaccugcgccaccacgcgccagguggucaacguggugaccaccaagaucgcccugaagggcgggugaggacuagucccuguucccagagcccacuuuuuuuucuuuuuuugaaauaaaauagccugucuuucagaucucaaaggcucuuuucagagccaccaaaaaaaaaaaaaaaaaaaaaaaaaaaaaaaaaaaaaaaaaaaaaaaaaaaaaaaaaaaaaaaaaaaaaaaaaaaaaaaaaaaaaaaaaaaaaaaaaaaaa

SEQ ID NO: 19853 - RNA, 6113 nt, Artificial Sequence
  SARS-CoV-2__MT750049.1__non-structural protein 3 (NSP3) mRNA gc
aggagagucccgcagucggcguccagcggcucugcuuguucgugugugugucguugcaggccuuauucaagcuuaccauggcccccaccaaggugaccuucggcgacgacacggucaucgaggugcagggguacaagagcgugaacaucaccuucgagcuggacgagcgcaucgacaagguccucaacgagaagugcuccgccuacaccguggagcugggcaccgaggugaacgaguucgcgugcgucguggccgacgccgugaucaagacgcugcagccggucagcgagcuccugaccccccuggggaucgaccucgacgagugguccauggccaccuacuaccuguucgacgagagcggcgaguucaagcuggccucccacauguacugcagcuucuacccccccgacgaggacgaggaggagggggacugcgaggaggaggaguucgagccguccacccaguacgaguacggcacggaggacgacuaccagggcaagccccucgaguucggggcgaccagcgccgcccugcagcccgaggaggagcaggaggaggacuggcuggacgacgacucccagcagaccgugggccagcaggacgggagcgaggacaaccagaccacgaccauccagaccaucguggagguccagccccagcucgagauggagcugaccccgguggugcagacgaucgaggucaacuccuucagcggcuaccugaagcucaccgacaacguguacaucaagaacgccgacaucguggaggaggcgaagaaggucaagcccaccgugguggucaacgccgccaacguguaccugaagcacgggggcggcguggccggggcccugaacaaggcgaccaacaacgccaugcaggucgaguccgacgacuacaucgccacgaacggcccccucaagguggggggcagcugcguccuguccggccacaaccuggccaagcacugccuccacgugguggggcccaacgucaacaagggcgaggacauccagcugcugaagagcgccuacgagaacuucaaccagcacgaggugcuccuggcgccgcugcucuccgccgggaucuucggcgccgaccccauccacagccugcgggugugcgucgacaccgugcgcaccaacguguaccuggccgucuucgacaagaaccucuacgacaagcugguguccagcuuccuggagaugaagagcgagaagcagguggagcagaacaucgccgagauccccaaggaggaggucaagcccuucaucaccgaguccaagccgagcguggagcagcggaagcaggacgacaagaagaucaaggcgugcguggaggaggucacgaccacccucgaggagaccaaguuccugacggagaaccugcuccuguacaucgacaucaacgggaaccugcaccccgacuccgccacccucgugagcgacaucgacaucaccuuccugaagaaggacgcccccuacaucgugggcgacgucgugcaggagggcgugcugaccgccgucgugauccccacgaagaaggccgggggcaccaccgagaugcucgcgaaggcccugcgcaagguguccaccgacaacuacaucacgaccuacccggggcagggccugaacggguacaccgucgaggaggccaagaccgugcucaagaagugcaagagcgccuucuacauccugcccuccaucaucagcaacgagaagcaggagauccugggcaccguguccuggaaccuccgggagaugcuggcgcacgccgaggagacgcgcaagcugaugcccgucugcguggagaccaaggccaucgugagcaccauccagcggaaguacaagggcaucaagauccaggagggggucguggacuacggcgcccgcuucuacuucuacaccuccaagacgaccguggccagccugaucaacacccucaacgaccugaacgagacccuggucacgaugccccucggguacgugacccacggccugaaccuggaggaggcggcccgguacaugcgcucccucaaggugccggccaccgucagcguguccagccccgacgccgugaccgccuacaacggguaccugacguccagcuccaagacccccgaggagcacuucaucgagaccaucagccuggcgggcagcuacaaggacugguccuacagcggccaguccacccagcucgggaucgaguuccugaagcggggcgacaagagcgucuacuacacguccaaccccaccaccuuccaccuggacggggaggugaucaccuucgacaaccucaagacgcugcugagccuccgcgaggugcggaccaucaaggucuucaccaccguggacaacaucaaccugcacacgcagguggucgacauguccaugaccuacggccagcaguucggcccgaccuaccuggacggggccgacgugaccaagaucaagccccacaacagccacgagggcaagacguucuacgugcuccccaacgacgacacccugcgcgucgaggccuucgaguacuaccacaccaccgacccguccuuccuggggcgguacaugagcgcccucaaccacacgaagaaguggaaguacccccaggugaacggccugaccuccaucaagugggccgacaacaacugcuaccuggcgaccgcccuccugacccugcagcagaucgagcucaaguucaacccccccgcccugcaggacgccuacuaccgcgcgcgggccggggaggccgccaacuucugcgcccugauccucgcguacugcaacaagacggugggcgagcugggcgacguccgcgagaccaugagcuaccuguuccagcacgccaaccucgacuccugcaagcgggugcugaacgucgugugcaagaccugcgggcagcagcagaccacccugaagggcguggaggccgucauguacauggggacgcucagcuacgagcaguucaagaagggcgugcagaucccgugcaccugcgggaagcaggccaccaaguaccuggugcagcaggaguccagcuucgucaugauguccgccccccccgcgcaguacgagcugaagcacggcaccuucacgugcgccagcgaguacaccggcaacuaccagugcgggcacuacaagcacaucaccagcaaggagacccucuacugcaucgacggcgcccugcugacgaaguccagcgaguacaaggggcccaucaccgacguguucuacaaggagaacuccuacaccaccacgaucaagccggugaccuacaagcucgacggcgucgugugcaccgagaucgaccccaagcuggacaacuacuacaagaaggacaacagcuacuucaccgagcagcccaucgaccuggugcccaaccagccguaccccaacgccuccuucgacaacuucaaguucgucugcgacaacaucaaguucgccgacgaccucaaccagcugacgggguacaagaagcccgcgagccgcgagcugaaggugaccuucuuccccgaccucaacggcgacguggucgccaucgacuacaagcacuacaccccguccuucaagaagggcgccaagcugcugcacaagcccaucguguggcacgugaacaacgccaccaacaaggcgacguacaagcccaacaccuggugcauccggugccucuggagcaccaagcccgucgagaccuccaacagcuucgacgugcugaaguccgaggacgcccaggggauggacaaccuggccugcgaggaccucaagccggugagcgaggaggucguggagaaccccacgauccagaaggacgugcuggagugcaacgucaagaccaccgagguggugggcgacaucauccugaagcccgccaacaacucccucaagaucaccgaggaggucgggcacacggaccugauggccgcguacguggacaacagcucccugaccaucaagaagcccaacgagcucagccgcgugcugggccugaagacccucgccacccacgggcuggccgccgucaacuccgugccgugggacacgaucgccaacuacgcgaagcccuuccugaacaagguggucagcaccaccaccaacaucgugacgcgcugccucaaccgggugugcaccaacuacaugcccuacuucuucacccugcugcuccagcugugcaccuucacccgcuccacgaacagccggaucaaggccagcaugccgaccaccaucgccaagaacaccgucaaguccgugggcaaguucugccuggaggccagcuucaacuaccucaagucccccaacuucagcaagcugaucaacaucaucaucugguuccugcuccuguccgugugccugggcagccucaucuacuccacggccgcgcuggggguccugaugagcaaccucggcaugcccuccuacugcaccggguaccgcgagggcuaccugaacagcaccaacgugaccaucgccacguacugcaccggcuccauccccugcagcgugugccuguccagccucgacucccuggacaccuacccgagccuggagaccauccagaucacgaucuccagcuucaagugggaccucaccgccuucgggcuggucgccgagugguuccuggccuacauccucuucacccgguucuucuacgugcugggccuggcggccaucaugcagcucuucuucuccuacuucgccgugcacuucaucagcaacagcuggcugauguggcugaucaucaaccugguccagauggcccccaucuccgcgauggugcgcauguacaucuucuucgccagcuucuacuacguguggaaguccuacguccacgugguggacgggugcaacagcuccaccugcaugaugugcuacaagcggaaccgcgccacgcgggucgagugcaccaccaucgugaacggcguccgccggagcuucuacguguacgccaacgggggcaagggcuucugcaagcuccacaacuggaacugcgugaacugcgacaccuucugcgccggguccacguucaucagcgacgaggucgcgcgcgaccugucccugcaguucaagcggcccaucaaccccaccgaccagagcuccuacaucguggacagcgugaccgucaagaacggcuccauccaccucuacuucgacaaggccgggcagaagaccuacgagcgccacagccugucccacuucgugaacuucgacaaccugcgggccaacaacacgaagggcagccucccgaucaacgugaucgucuucgacgggaaguccaagugcgaggagagcuccgccaagagcgccagcguguacuacucccagcugaugugccagcccauccugcuccuggaccaggcgcuggugagcgacgucggcgacuccgccgagguggccgugaagauguucgacgccuacgucaacaccuucagcuccaccuucaacgugcccauggagaagcucaagacccugguggccacggcggaggccgagcuggccaagaacgucagccucgacaacgugcuguccaccuucaucagcgccgcgcgccagggcuucguggacuccgacgucgagaccaaggacgugguggagugccugaagcucagccaccaguccgacaucgaggucaccggggacagcugcaacaacuacaugcugacguacaacaagguggagaacaugaccccccgggaccugggcgccugcaucgacugcuccgcccgccacaucaacgcccagguggccaagagccacaacaucgcgcucaucuggaacgucaaggacuucaugucccugagcgagcagcugcggaagcagauccgcuccgccgccaagaagaacaaccucccguucaagcugaccugcgccaccacgcgccagguggugaacgucgugaccaccaagaucgcccugaaggggggcugaggacuagucccuguucccagagcccacuuuuuuuucuuuuuuugaaauaaaauagccugucuuucagaucucaaaggcucuuuucagagccaccaaaaaaaaaaaaaaaaaaaaaaaaaaaaaaaaaaaaaaaaaaaaaaaaaaaaaaaaaaaaaaaaaaaaaaaaaaaaaaaaaaaaaaaaaaaaaaaaaaaaa

SEQ ID NO: 19854 - RNA, 6113 nt, Artificial Sequence
  SARS-CoV-2__MT750056.1__non-structural protein 3 (NSP3) mRNA gc
aggagagucccgcagucggcguccagcggcucugcuuguucgugugugugucguugcaggccuuauucaagcuuaccauggcccccaccaaggugaccuucggcgacgacacggucaucgaggugcagggguacaagagcgugaacaucaccuucgagcuggacgagcgcaucgacaagguccucaacgagaagugcuccgccuacaccguggagcugggcaccgaggugaacgaguucgcgugcgucguggccgacgccgugaucaagacgcugcagccggucagcgagcuccugaccccccuggggaucgaccucgacgagugguccauggccaccuacuaccuguucgacgagagcggcgaguucaagcuggccucccacauguacugcagcuucuacccccccgacgaggacgaggaggagggggacugcgaggaggaggaguucgagccguccacccaguacgaguacggcacggaggacgacuaccagggcaagccccucgaguucggggcgaccagcgccgcccugcagcccgaggaggagcaggaggaggacuggcuggacgacgacucccagcagaccgugggccagcaggacgggagcgaggacaaccagaccacgaccauccagaccaucguggagguccagccccagcucgagauggagcugaccccgguggugcagacgaucgaggucaacuccuucagcggcuaccugaagcucaccgacaacguguacaucaagaacgccgacaucguggaggaggcgaagaaggucaagcccaccgugguggucaacgccgccaacguguaccugaagcacgggggcggcguggccggggcccugaacaaggcgaccaacaacgccaugcaggucgaguccgacgacuacaucgccacgaacggcccccucaagguggggggcagcugcguccuguccggccacaaccuggccaagcacugccuccacgugguggggcccaacgucaacaagggcgaggacauccagcugcugaagagcgccuacgagaacuucaaccagcacgaggugcuccuggcgccgcugcucuccgccgggaucuucggcgccgaccccauccacagccugcgggugugcgucgacaccgugcgcaccaacguguaccuggccgucuucgacaagaaccucuacgacaagcugguguccagcuuccuggagaugaagagcgagaagcagguggagcagaacaucgccgagauccccaaggaggaggucaagcccuucaucaccgaguccaagccgagcguggagcagcggaagcaggacgacaagaagaucaaggcgugcguggaggaggucacgaccacccucgaggagaccaaguuccugacggagaaccugcuccuguacaucgacaucaacgggaaccugcaccccgacuccgccacccucgugagcgacaucgacaucaccuuccugaagaaggacgcccccuacaucgugggcgacgucgugcaggagggcgugcugaccgccgucgugauccccacgaagaaggccgggggcaccaccgagaugcucgcgaaggcccugcgcaaggugccgaccgacaacuacaucacgaccuaccccgggcagggccugaacggguacaccgucgaggaggccaagaccgugcucaagaagugcaaguccgccuucuacauccugcccagcaucaucuccaacgagaagcaggagauccugggcaccgugagcuggaaccuccgggagaugcuggcgcacgccgaggagacgcgcaagcugaugcccgucugcguggagaccaaggccaucguguccaccauccagcggaaguacaagggcaucaagauccaggagggggucguggacuacggcgcccgcuucuacuucuacaccagcaagacgaccguggccucccugaucaacacccucaacgaccugaacgagacccuggucacgaugccgcucggguacgugacccacggccugaaccuggaggaggcggcccgguacaugcgcagccucaaggugcccgccaccgucuccgugagcucccccgacgccgugaccgccuacaacggguaccugacgagcuccagcaagacccccgaggagcacuucaucgagaccaucucccuggcgggcagcuacaaggacuggagcuacuccggccagagcacccagcucgggaucgaguuccugaagcggggcgacaaguccgucuacuacacgagcaacccgaccaccuuccaccuggacggggaggugaucaccuucgacaaccucaagacgcugcugucccuccgcgaggugcggaccaucaaggucuucaccaccguggacaacaucaaccugcacacgcagguggucgacaugagcaugaccuacggccagcaguucggccccaccuaccuggacggggccgacgugaccaagaucaagccccacaacucccacgagggcaagacguucuacgugcucccgaacgacgacacccugcgcgucgaggccuucgaguacuaccacaccaccgaccccagcuuccuggggcgguacauguccgcccucaaccacacgaagaaguggaaguacccccaggugaacggccugaccagcaucaagugggccgacaacaacugcuaccuggcgaccgcccuccugacccugcagcagaucgagcucaaguucaaccccccggcccugcaggacgccuacuaccgcgcgcgggccggggaggccgccaacuucugcgcccugauccucgcguacugcaacaagacggugggcgagcugggcgacguccgcgagaccauguccuaccuguuccagcacgccaaccucgacagcugcaagcgggugcugaacgucgugugcaagaccugcgggcagcagcagaccacccugaagggcguggaggccgucauguacauggggacgcucuccuacgagcaguucaagaagggcgugcagauccccugcaccugcgggaagcaggccaccaaguaccuggugcagcaggagagccccuucgucaugauguccgcccccccggcgcaguacgagcugaagcacggcaccuucacgugcgccagcgaguacaccggcaacuaccagugcgggcacuacaagcacaucaccuccaaggagacccucuacugcaucgacggcgcccugcugacgaagagcagcgaguacaaggggcccaucaccgacguguucuacaaggagaacuccuacaccaccacgaucaagcccgugaccuacaagcucgacggcgucgugugcaccgagaucgaccccaagcuggacaacuacuacaagaaggacaacagcuacuucaccgagcagccgaucgaccuggugcccaaccagcccuaccccaacgccuccuucgacaacuucaaguucgucugcgacaacaucaaguucgccgacgaccucaaccagcugacgggguacaagaagccggcgagccgcgagcugaaggugaccuucuuccccgaccucaacggcgacguggucgccaucgacuacaagcacuacacccccuccuucaagaagggcgccaagcugcugcacaagcccaucguguggcacgugaacaacgccaccaacaaggcgacguacaagccgaacaccuggugcauccggugccucuggagcaccaagcccgucgagaccuccaacagcuucgacgugcugaaguccgaggacgcccaggggauggacaaccuggccugcgaggaccucaagcccgugagcgaggaggucguggagaaccccacgauccagaaggacgugcuggagugcaacgucaagaccaccgagguggugggcgacaucauccugaagccggccaacaacucccucaagaucaccgaggaggucgggcacacggaccugauggccgcguacguggacaacagcucccugaccaucaagaagcccaacgagcucagccgcgugcugggccugaagacccucgccacccacgggcuggccgccgucaacuccgugcccugggacacgaucgccaacuacgcgaagccguuccugaacaagguggucagcaccaccaccaacaucgugacgcgcugccucaaccgggugugcaccaacuacaugcccuacuucuucacccugcugcuccagcugugcaccuucacccgcuccacgaacagccggaucaaggccuccaugcccaccaccaucgccaagaacaccgucaagagcgugggcaaguucugccuggaggccagcuucaacuaccucaagucccccaacuucagcaagcugaucaacaucaucaucugguuccugcuccuguccgugugccugggcagccucaucuacuccacggccgcgcuggggguccugaugagcaaccucggcaugccguccuacugcaccggguaccgcgagggcuaccugaacagcaccaacgugaccaucgccacguacugcaccggcuccauccccugcagcgugugccuguccgggcucgacagccuggacaccuaccccucccuggagaccauccagaucacgaucagcuccuucaagugggaccucaccgccuucggccuggucgccgagugguuccuggccuacauccucuucacccgguucuucuacgugcuggggcuggcggccaucaugcagcucuucuucagcuacuucgccgugcacuucaucuccaacagcuggcugauguggcugaucaucaaccugguccagauggcccccaucuccgcgauggugcgcauguacaucuucuucgccagcuucuacuacguguggaagagcuacguccacgugguggacggcugcaacuccagcaccugcaugaugugcuacaagcggaaccgcgccacgcgggucgagugcaccaccaucgugaacgggguccgccgguccuucuacguguacgccaacggcggcaagggguucugcaagcuccacaacuggaacugcgugaacugcgacaccuucugcgccggcagcacguucaucuccgacgaggucgcgcgcgaccugagccugcaguucaagcggccgaucaaccccaccgaccaguccagcuacaucguggacuccgugaccgucaagaacgggagcauccaccucuacuucgacaaggccggccagaagaccuacgagcgccacucccugagccacuucgugaaccuggacaaccuccgggccaacaacacgaaguccagccugcccaucaacgugaucgucuucgacgggaaguccaagugcgaggagagcuccgccaagagcgccuccguguacuacagccagcugaugugccagcccauccuccugcuggaccaggcgcucgugagcgacgucggcgacuccgccgagguggccgugaagauguucgacgccuacgucaacaccuucagcuccaccuucaacgugccgauggagaagcugaagacccugguggccacggcggaggccgagcucgccaagaacgucagccuggacaacgugcuguccaccuucaucagcgccgcgcgccagggcuucguggacuccgacgucgagaccaaggacgugguggagugccucaagcugagccaccaguccgacaucgaggucaccggggacagcugcaacaacuacaugcugacguacaacaagguggagaacaugaccccccgggaccucggcgccugcaucgacugcuccgcccgccacaucaacgcccagguggccaagagccacaacaucgcgcugaucuggaacgucaaggacuucaugucccugagcgagcagcuccggaagcagauccgcuccgccgccaagaagaacaaccugcccuucaagcugaccugcgccaccacgcgccagguggugaacgucgugaccaccaagaucgcccucaaggggggcugaggacuagucccuguucccagagcccacuuuuuuuucuuuuuuugaaauaaaauagccugucuuucagaucucaaaggcucuuuucagagccaccaaaaaaaaaaaaaaaaaaaaaaaaaaaaaaaaaaaaaaaaaaaaaaaaaaaaaaaaaaaaaaaaaaaaaaaaaaaaaaaaaaaaaaaaaaaaaaaaaaaaa

SEQ ID NO: 19855 - RNA, 6113 nt, Artificial Sequence
  SARS-CoV-2__MT750087.1__non-structural protein 3 (NSP3) mRNA gc
aggagagucccgcagucggcguccagcggcucugcuuguucgugugugugucguugcaggccuuauucaagcuuaccauggcccccaccaaggugaccuucggcgacgacacggucaucgaggugcagggguacaagagcgugaacaucaccuucgagcuggacgagcgcaucgacaagguccucaacgagaagugcuccgccuacaccguggagcugggcaccgaggugaacgaguucgcgugcgucguggccgacgccgugaucaagacgcugcagccggucagcgagcuccugaccccccuggggaucgaccucgacgagugguccauggccaccuacuaccuguucgacgagagcggcgaguucaagcuggccucccacauguacugcagcuucuacccccccgacgaggacgaggaggagggggacugcgaggaggaggaguucgagccguccacccaguacgaguacggcacggaggacgacuaccagggcaagccccucgaguucggggcgaccagcgccgcccugcagcccgaggaggagcaggaggaggacuggcuggacgacgacucccagcagaccgugggccagcaggacgggagcgaggacaaccagaccacgaccauccagaccaucguggagguccagccccagcucgagauggagcugaccccgguggugcagacgaucgaggucaacuccuucagcggcuaccugaagcucaccgacaacguguacaucaagaacgccgacaucguggaggaggcgaagaaggucaagcccaccgugguggucaacgccgccaacguguaccugaagcacgggggcggcguggccggggcccugaacaaggcgaccaacaacgccaugcaggucgaguccgacgacuacaucgccacgaacggcccccucaagguggggggcagcugcguccuguccggccacaaccuggccaagcacugccuccacgugguggggcccaacgucaacaagggcgaggacauccagcugcugaagagcgccuacgagaacuucaaccagcacgaggugcuccuggcgccgcugcucuccgccgggaucuucggcgccgaccccauccacagccugcgggugugcgucgacaccgugcgcaccaacguguaccuggccgucuucgacaagaaccucuacgacaagcugguguccagcuuccuggagaugaagagcgagaagcagguggagcagaagaucgccgagauccccaaggaggaggucaagcccuucaucaccgaguccaagccgagcguggagcagcggaagcaggacgacaagaagaucaaggcgugcguggaggaggucacgaccacccucgaggagaccaaguuccugacggagaaccugcuccuguacaucgacaucaacgggaaccugcaccccgacuccgccacccucgugagcgacaucgacaucaccuuccugaagaaggacgcccccuacaucgugggcgacgucgugcaggagggcgugcugaccgccgucgugauccccacgaagaaggccgggggcaccaccgagaugcucgcgaaggcccugcgcaaggugccgaccgacaacuacaucacgaccuaccccgggcagggccugaacggguacaccgucgaggaggccaagaccgugcucaagaagugcaaguccgccuucuacauccugcccagcaucaucuccaacgagaagcaggagauccugggcaccgugagcuggaaccuccgggagaugcuggcgcacgccgaggagacgcgcaagcugaugcccgucugcguggagaccaaggccaucguguccaucauccagcggaaguacaagggcaucaagauccaggagggggucguggacuacggcgcccgcuucuacuucuacaccagcaagaccacgguggccucccugaucaacacccucaacgaccugaacgagacccuggucaccaugccgcucggguacgugacgcacggccugaaccuggaggaggcggcccgguacaugcgcagccucaaggugcccgccaccgucuccgugagcucccccgacgccgugaccgccuacaacggguaccugaccagcuccagcaagacgcccgaggagcacuucaucgagaccaucucccuggcgggcagcuacaaggacuggagcuacuccggccagagcacccagcucgggaucgaguuccugaagcggggcgacaaguccgucuacuacaccagcaacccgacgaccuuccaccuggacggggaggugaucaccuucgacaaccucaagacccugcugucccuccgcgaggugcggacgaucaaggucuucaccaccguggacaacaucaaccugcacacccagguggucgacaugagcaugacguacggccagcaguucggccccaccuaccuggacggggccgacgugaccaagaucaagccccacaacucccacgagggcaagaccuucuacgugcucccgaacgacgacacgcugcgcgucgaggccuucgaguacuaccacaccaccgaccccagcuuccuggggcgguacauguccgcccucaaccacaccaagaaguggaaguacccccaggugaacggccugacgagcaucaagugggccgacaacaacugcuaccuggcgaccgcccuccugacccugcagcagaucgagcucaaguucaaccccccggcccugcaggacgccuacuaccgcgcgcgggccggggaggccgccaacuucugcgcccugauccucgcguacugcaacaagaccgugggcgagcugggcgacguccgcgagacgauguccuaccuguuccagcacgccaaccucgacagcugcaagcgggugcugaacgucgugugcaagaccugcgggcagcagcagaccacccugaagggcguggaggccgucauguacauggggacccucuccuacgagcaguucaagaagggcgugcagauccccugcacgugcgggaagcaggccaccaaguaccuggugcagcaggagagccccuucgucaugauguccgcccccccggcgcaguacgagcugaagcacggcaccuucaccugcgccagcgaguacacgggcaacuaccagugcgggcacuacaagcacaucaccuccaaggagacccucuacugcaucgacggcgcccugcugaccaagagcagcgaguacaaggggcccaucacggacguguucuacaaggagaacuccuacaccaccaccaucaagcccgugacguacaagcucgacggcgucgugugcaccgagaucgaccccaagcuggacaacuacuacaagaaggacaacagcuacuucaccgagcagccgaucgaccuggugcccaaccagcccuaccccaacgccuccuucgacaacuucaaguucgucugcgacaacaucaaguucgccgacgaccucaaccagcugaccggguacaagaagccggcgagccgcgagcugaaggugacguucuuccccgaccucaacggcgacguggucgccaucgacuacaagcacuacacccccuccuucaagaagggcgccaagcugcugcacaagcccaucguguggcacgugaacaacgccaccaacaaggcgaccuacaagccgaacacguggugcauccggugccucuggagcaccaagcccgucgagaccuccaacagcuucgacgugcugaaguccgaggacgcccaggggauggacaaccuggccugcgaggaccucaagcccgugagcgaggaggucguggagaaccccaccauccagaaggacgugcuggagugcaacgucaagacgaccgagguggugggcgacaucauccugaagccggccaacaacucccucaagaucaccgaggaggucgggcacaccgaccugauggccgcguacguggacaacagcucccugacgaucaagaagcccaacgagcucagccgcgugcugggccugaagacccucgccacccacgggcuggccgccgucaacuccgugcccugggacaccaucgccaacuacgcgaagccguuccugaacaagguggucagcacgaccaccaacaucgugacccgcugccucaaccgggugugcacgaacuacaugcccuacuucuucacccugcugcuccagcugugcaccuucacccgcuccaccaacagccggaucaaggccuccaugcccacgaccaucgccaagaacaccgucaagagcgugggcaaguucugccuggaggccagcuucaacuaccucaagucccccaacuucagcaagcugaucaacaucaucaucugguuccugcuccuguccgugugccugggcagccucaucuacuccaccgccgcgcuggggguccugaugagcaaccucggcaugccguccuacugcacgggguaccgcgagggcuaccugaacagcaccaacgugaccaucgccaccuacugcacgggcuccauccccugcagcgugugccuguccgggcucgacagccuggacaccuaccccucccuggagaccauccagaucaccaucagcuccuucaagugggaccucacggccuucggccuggucgccgagugguuccuggccuacauccucuucacccgguucuucuacgugcuggggcuggcggccaucaugcagcucuucuucagcuacuucgccgugcacuucaucuccaacagcuggcugauguggcugaucaucaaccugguccagauggcccccaucuccgcgauggugcgcauguacaucuucuucgccagcuucuacuacguguggaagagcuacguccacgugguggacggcugcaacuccagcaccugcaugaugugcuacaagcggaaccgcgccacccgggucgagugcacgaccaucgugaacgggguccgccgguccuucuacguguacgccaacggcggcaagggguucugcaagcuccacaacuggaacugcgugaacugcgacaccuucugcgccggcagcaccuucaucuccgacgaggucgcgcgcgaccugagccugcaguucaagcggccgaucaaccccacggaccaguccagcuacaucguggacuccgugaccgucaagaacgggagcauccaccucuacuucgacaaggccggccagaagaccuacgagcgccacucccugagccacuucgugaaccuggacaaccuccgggccaacaacaccaaggggucccugcccaucaacgugaucgucuucgacggcaagagcaagugcgaggaguccagcgccaaguccgccagcguguacuacucccagcugaugugccagcccauccuccugcuggaccaggcgcucgugagcgacgucggcgacagcgccgagguggccgugaagauguucgacgccuacgucaacacguucuccagcaccuucaacgugccgauggagaagcugaagacccugguggccaccgcggaggccgagcucgccaagaacgucucccuggacaacgugcugagcacguucaucuccgccgcgcgccagggguucguggacagcgacgucgagaccaaggacgugguggagugccucaagcugucccaccagagcgacaucgaggucaccggcgacuccugcaacaacuacaugcugaccuacaacaagguggagaacaugacgccccgggaccucggggccugcaucgacugcagcgcccgccacaucaacgcccagguggccaagucccacaacaucgcgcugaucuggaacgucaaggacuucaugagccuguccgagcagcuccggaagcagauccgcagcgccgccaagaagaacaaccugcccuucaagcugaccugcgccaccacccgccagguggugaacgucgugacgaccaagaucgcccucaagggcgggugaggacuagucccuguucccagagcccacuuuuuuuucuuuuuuugaaauaaaauagccugucuuucagaucucaaaggcucuuuucagagccaccaaaaaaaaaaaaaaaaaaaaaaaaaaaaaaaaaaaaaaaaaaaaaaaaaaaaaaaaaaaaaaaaaaaaaaaaaaaaaaaaaaaaaaaaaaaaaaaaaaaaa

SEQ ID NO: 19856 - RNA, 6113 nt, Artificial Sequence
  SARS-CoV-2__MT750365.1__non-structural protein 3 (NSP3) mRNA gc
aggagagucccgcagucggcguccagcggcucugcuuguucgugugugugucguugcaggccuuauucaagcuuaccauggcccccaccaaggugaccuucggcgacgacacggucaucgaggugcagggguacaagagcgugaacaucaccuucgagcuggacgagcgcaucgacaagguccucaacgagaagugcuccgccuacaccguggagcugggcaccgaggugaacgaguucgcgugcgucguggccgacgccgugaucaagacgcugcagccggucagcgagcuccugaccccccuggggaucgaccucgacgagugguccauggccaccuacuaccuguucgacgagagcggcgaguucaagcuggccucccacauguacugcagcuucuacccccccgacgaggacgaggaggagggggacugcgaggaggaggaguucgagccguccacccaguacgaguacggcacggaggacgacuaccagggcaagccccucgaguucggggcgaccagcgccgcccugcagcccgaggaggagcaggaggaggacuggcuggacgacgacucccagcagaccgugggccagcaggacgggagcgaggacaaccagaccacgaccauccagaccaucguggagguccagccccagcucgagauggagcugaccccgguggugcagacgaucgaggucaacuccuucagcggcuaccugaagcucaccgacaacguguacaucaagaacgccgacaucguggaggaggcgaagaaggucaagcccaccgugguggucaacgccgccaacguguaccugaagcacgggggcggcguggccggggcccugaacaaggcgaccaacaacgccaugcaggucgaguccgacgacuacaucgccacgaacggcccccucaagguggggggcagcugcguccuguccggccacaaccuggccaagcacugccuccacgugguggggcccaacgucaacaagggcgaggacauccagcugcugaagagcgccuacgagaacuucaaccagcacgaggugcuccuggcgccgcugcucuccgccgggaucuucggcgccgaccccauccacagccugcgggugugcgucgacaccgugcgcaccaacguguaccuggccgucuucgacaagaaccucuacgacaagcugguguccagcuuccuggagaugaagagcgagaagcagguggagcagaagaucgccgagauccccaaggaggaggucaagcccuucaucaccgaguccaagccgagcguggagcagcggaagcaggacgacaagaagaucaaggcgugcguggaggaggucacgaccacccucgaggagaccaaguuccugacggagaaccugcuccuguacaucgacaucaacgggaaccugcaccccgacuccgccacccucgugagcgacaucgacaucaccuuccugaagaaggacgcccccuacaucgugggcgacgucgugcaggagggcgugcugaccgccgucgugauccccacgaagaaggccgggggcaccaccgagaugcucgcgaaggcccugcgcaaggugccgaccgacaacuacaucacgaccuaccccgggcagggccugaacggguacaccgucgaggaggccaagaccgugcucaagaagugcaaguccgccuucuacauccugcccagcaucaucuccaacgagaagcaggagauccugggcaccgugagcuggaaccuccgggagaugcuggcgcacgccgaggagacgcgcaagcugaugcccgucugcguggagaccaaggccaucguguccaccauccagcggaaguacaagggcaucaagauccaggagggggucguggacuacggcgcccgcuucuacuucuacaccagcaagacgaccguggccucccugaucaacacccucaacgaccugaacgagacccuggucacgaugccgcucggguacgugacccacggccugaaccuggaggaggcggcccgguacaugcgcagccucaaggugcccgccaccgucuccgugagcucccccgacgccgugaccgccuacaacggguaccugacgagcuccagcaagacccccgaggagcacuucaucgagaccaucucccuggcgggcagcuacaaggacuggagcuacuccggccagagcacccagcucgggaucgaguuccugaagcggggcgacaaguccgucuacuacacgagcaacccgaccaccuuccaccuggacggggaggugaucaccuucgacaaccucaagacgcugcugucccuccgcgaggugcggaccaucaaggucuucaccaccguggacaacaucaaccugcacacgcagguggucgacaugagcaugaccuacggccagcaguucggccccaccuaccuggacggggccgacgugaccaagaucaagccccacaacucccacgagggcaagacguucuacgugcucccgaacgacgacacccugcgcgucgaggccuucgaguacuaccacaccaccgaccccagcuuccuggggcgguacauguccgcccucaaccacacgaagaaguggaaguacccccaggugaacggccugaccagcaucaagugggccgacaacaacugcuaccuggcgaccgcccuccugacccugcagcagaucgagcucaaguucaaccccccggcccugcaggacgccuacuaccgcgcgcgggccggggaggccgccaacuucugcgcccugauccucgcguacugcaacaagacggugggcgagcugggcgacguccgcgagaccauguccuaccuguuccagcacgccaaccucgacagcugcaagcgggugcugaacgucgugugcaagaccugcgggcagcagcagaccacccugaagggcguggaggccgucauguacauggggacgcucuccuacgagcaguucaagaagggcgugcagauccccugcaccugcgggaagcaggccaccaaguaccuggugcagcaggagagccccuucgucaugauguccgcccccccggcgcaguacgagcugaagcacggcaccuucacgugcgccagcgaguacaccggcaacuaccagugcgggcacuacaagcacaucaccuccaaggagacccucuacugcaucgacggcgcccugcugacgaagagcagcgaguacaaggggcccaucaccgacguguucuacaaggagaacuccuacaccaccacgaucaagcccgugaccuacaagcucgacggcgucgugugcaccgagaucgaccccaagcuggacaacuacuacaagaaggacaacagcuacuucaccgagcagccgaucgaccuggugcccaaccagcccuaccccaacgccuccuucgacaacuucaaguucgucugcgacaacaucaaguucgccgacgaccucaaccagcugacgggguacaagaagccggcgagccgcgagcugaaggugaccuucuuccccgaccucaacggcgacguggucgccaucgacuacaagcacuacacccccuccuucaagaagggcgccaagcugcugcacaagcccaucguguggcacgugaacaacgccaccaacaaggcgacguacaagccgaacaccuggugcauccggugccucuggagcaccaagcccgucgagaccuccaacagcuucgacgugcugaaguccgaggacgcccaggggauggacaaccuggccugcgaggaccucaagcccgugagcgaggaggucguggagaaccccacgauccagaaggacgugcuggagugcaacgucaagaccaccgagguggugggcgacaucauccugaagccggccaacaacucccucaagaucaccgaggacgucgggcacacggaccugauggccgcguacguggacaacagcucccugaccaucaagaagcccaacgagcucagccgcgugcugggccugaagacccucgccacccacgggcuggccgccgucaacuccgugcccugggacacgaucgccaacuacgcgaagccguuccugaacaagguggucagcaccaccaccaacaucgugacgcgcugccucaaccgggugugcaccaacuacaugcccuacuucuucacccugcugcuccagcugugcaccuucacccgcuccacgaacagccggaucaaggccuccaugcccaccaccaucgccaagaacaccgucaagagcgugggcaaguucugccuggaggccagcuucaacuaccucaagucccccaacuucagcaagcugaucaacaucaucaucugguuccugcuccuguccgugugccugggcagccucaucuacuccacggccgcgcuggggguccugaugagcaaccucggcaugccguccuacugcaccggguaccgcgagggcuaccugaacagcaccaacgugaccaucgccacguacugcaccggcuccauccccugcagcgugugccuguccgggcucgacagccuggacaccuaccccucccuggagaccauccagaucacgaucagcuccuucaagugggaccucaccgccuucggccuggucgccgagugguuccuggccuacauccucuucacccgguucuucuacgugcuggggcuggcggccaucaugcagcucuucuucagcuacuucgccgugcacuucaucuccaacagcuggcugauguggcugaucaucaaccugguccagauggcccccaucuccgcgauggugcgcauguacaucuucuucgccagcuucuacuacguguggaagagcuacguccacgugguggacggcugcaacuccagcaccugcaugaugugcuacaagcggaaccgcgccacgcgggucgagugcaccaccaucgugaacgggguccgccgguccuucuacguguacgccaacggcggcaagggguucugcaagcuccacaacuggaacugcgugaacugcgacaccuucugcgccggcagcacguucaucuccgacgaggucgcgcgcgaccugagccugcaguucaagcggccgaucaaccccaccgaccaguccagcuacaucguggacuccgugaccgucaagaacgggagcauccaccucuacuucgacaaggccggccagaagaccuacgagcgccacucccugagccacuucgugaaccuggacaaccuccgggccaacaacacgaaggggucccugcccaucaacgugaucgucuucgacggcaagagcaagugcgaggaguccagcgccaaguccgccagcguguacuacucccagcugaugugccagcccauccuccugcuggaccaggcgcucgugagcgacgucggcgacagcgccgagguggccgugaagauguucgacgccuacgucaacaccuucuccagcaccuucaacgugccgauggagaagcugaagacccugguggccacggcggaggccgagcucgccaagaacgucucccuggacaacgugcugagcaccuucaucuccgccgcgcgccagggguucguggacagcgacgucgagaccaaggacgugguggagugccucaagcugucccaccagagcgacaucgaggucaccggcgacuccugcaacaacuacaugcugacguacaacaagguggagaacaugaccccccgggaccucggggccugcaucgacugcagcgcccgccacaucaacgcccagguggccaagucccacaacaucgcgcugaucuggaacgucaaggacuucaugagccuguccgagcagcuccggaagcagauccgcagcgccgccaagaagaacaaccugcccuucaagcugaccugcgccaccacgcgccagguggugaacgucgugaccaccaagaucgcccucaagggcgggugaggacuagucccuguucccagagcccacuuuuuuuucuuuuuuugaaauaaaauagccugucuuucagaucucaaaggcucuuuucagagccaccaaaaaaaaaaaaaaaaaaaaaaaaaaaaaaaaaaaaaaaaaaaaaaaaaaaaaaaaaaaaaaaaaaaaaaaaaaaaaaaaaaaaaaaaaaaaaaaaaaaaa

SEQ ID NO: 19857 - RNA, 6113 nt, Artificial Sequence
  SARS-CoV-2__MT750410.1__non-structural protein 3 (NSP3) mRNA gc
aggagagucccgcagucggcguccagcggcucugcuuguucgugugugugucguugcaggccuuauucaagcuuaccauggcccccaccaaggugaccuucggcgacgacacggucaucgaggugcagggguacaagagcgugaacaucaccuucgagcuggacgagcgcaucgacaagguccucaacgagaagugcuccgccuacaccguggagcugggcaccgaggugaacgaguucgcgugcgucguggccgacgccgugaucaagacgcugcagccggucagcgagcuccugaccccccuggggaucgaccucgacgagugguccauggccaccuacuaccuguucgacgagagcggcgaguucaagcuggccucccacauguacugcagcuucuacccccccgacgaggacgaggaggagggggacugcgaggaggaggaguucgagccguccacccaguacgaguacggcacggaggacgacuaccagggcaagccccucgaguucggggcgaccagcgccgcccugcagcccgaggaggagcaggaggaggacuggcuggacgacgacucccagcagaccgugggccagcaggacgggagcgaggacaaccagaccacgaccauccagaccaucgugggcguccagccccagcucgagauggagcugaccccgguggugcagacgaucgaggucaacuccuucagcggguaccugaagcucaccgacaacguguacaucaagaacgccgacaucguggaggaggcgaagaaggucaagcccaccgugguggucaacgccgccaacguguaccugaagcacggcggcgggguggccggcgcccugaacaaggcgaccaacaacgccaugcaggucgaguccgacgacuacaucgccacgaacgggccccucaaggugggcggcagcugcguccuguccgggcacaaccuggccaagcacugccuccacguggugggccccaacgucaacaagggggaggacauccagcugcugaagagcgccuacgagaacuucaaccagcacgaggugcuccuggcgccgcugcucuccgccggcaucuucggggccgaccccauccacagccugcgggugugcgucgacaccgugcgcaccaacguguaccuggccgucuucgacaagaaccucuacgacaagcugguguccagcuuccuggagaugaagagcgagaagcagguggagcagaagaucgccgagauccccaaggaggaggucaagcccuucaucaccgaguccaagccgagcguggagcagcggaagcaggacgacaagaagaucaaggcgugcguggaggaggucacgaccacccucgaggagaccaaguuccugacggagaaccugcuccuguacaucgacaucaacggcaaccugcaccccgacuccgccacccucgugagcgacaucgacaucaccuuccugaagaaggacgcccccuacaucgugggcgacgucgugcaggagggggugcugaccgccgucgugauccccacgaagaaggccggcgggaccaccgagaugcucgcgaaggcccugcgcaaggugccgaccgacaacuacaucacgaccuaccccggccaggggcugaacggcuacaccgucgaggaggccaagaccgugcucaagaagugcaaguccgccuucuacauccugcccagcaucaucuccaacgagaagcaggagauccugggcaccgugagcuggaaccuccgggagaugcuggcgcacgccgaggagacgcgcaagcugaugcccgucugcguggagaccaaggccaucguguccaccauccagcggaaguacaaggggaucaagauccaggagggcgucguggacuacggggcccgcuucuacuucuacaccagcaagacgaccguggccucccugaucaacacccucaacgaccugaacgagacccuggucacgaugccgcucggcuacgugacccacgggcugaaccuggaggaggcggcccgguacaugcgcagccucaaggugcccgccaccgucuccgugagcucccccgacgccgugaccgccuacaacggcuaccugacgagcuccagcaagacccccgaggagcacuucaucgagaccaucucccuggcgggcagcuacaaggacuggagcuacuccgggcagagcacccagcucggcaucgaguuccugaagcggggggacaaguccgucuacuacacgagcaacccgaccaccuuccaccuggacggcgaggugaucaccuucgacaaccucaagacgcugcugucccuccgcgaggugcggaccaucaaggucuucaccaccguggacaacaucaaccugcacacgcagguggucgacaugagcaugaccuacggccagcaguucgggcccaccuaccuggacggcgccgacgugaccaagaucaagccccacaacucccacgaggggaagacguucuacgugcucccgaacgacgacacccugcgcgucgaggccuucgaguacuaccacaccaccgaccccagcuuccugggccgguacauguccgcccucaaccacacgaagaaguggaaguacccccaggugaacgggcugaccagcaucaagugggccgacaacaacugcuaccuggcgaccgcccuccugacccugcagcagaucgagcucaaguucaaccccccggcccugcaggacgccuacuaccgcgcgcgggccggcgaggccgccaacuucugcgcccugauccucgcguacugcaacaagacggugggcgagcugggggacguccgcgagaccauguccuaccuguuccagcacgccaaccucgacagcugcaagcgggugcugaacgucgugugcaagaccugcggccagcagcagaccacccugaaggggguggaggccgucauguacaugggcacgcucuccuacgagcaguucaagaagggggugcagauccccugcaccugcggcaagcaggccaccaaguaccuggugcagcaggagagccccuucgucaugauguccgcccccccggcgcaguacgagcugaagcacggcaccuucacgugcgccagcgaguacaccgggaacuaccagugcggccacuacaagcacaucaccuccaaggagacccucuacugcaucgacggggcccugcugacgaagagcagcgaguacaagggccccaucaccgacguguucuacaaggagaacuccuacaccaccacgaucaagcccgugaccuacaagcucgacggggucgugugcaccgagaucgaccccaagcuggacaacuacuacaagaaggacaacagcuacuucaccgagcagccgaucgaccuggugcccaaccagcccuaccccaacgccuccuucgacaacuucaaguucgucugcgacaacaucaaguucgccgacgaccucaaccagcugacgggcuacaagaagccggcgagccgcgagcugaaggugaccuucuuccccgaccucaacggcgacguggucgccaucgacuacaagcacuacacccccuccuucaagaagggggccaagcugcugcacaagcccaucguguggcacgugaacaacgccaccaacaaggcgacguacaagccgaacaccuggugcauccggugccucuggagcaccaagcccgucgagaccuccaacagcuucgacgugcugaaguccgaggacgcccagggcauggacaaccuggccugcgaggaccucaagcccgugagcgaggaggucguggagaaccccacgauccagaaggacgugcuggagugcaacgucaagaccaccgagguggugggggacaucauccugaagccggccaacaacucccucaagaucaccgaggaggucggccacacggaccugauggccgcguacguggacaacagcucccugaccaucaagaagcccaacgagcucagccgcgugcuggggcugaagacccucgccacccacggccuggccgccgucaacuccgugcccugggacacgaucgccaacuacgcgaagccguuccugaacaagguggucagcaccaccaccaacaucgugacgcgcugccucaaccgggugugcaccaacuacaugcccuacuucuucacccugcugcuccagcugugcaccuucacccgcuccacgaacagccggaucaaggccuccaugcccaccaccaucgccaagaacaccgucaagagcgugggcaaguucugccuggaggccagcuucaacuaccucaagucccccaacuucagcaagcugaucaacaucaucaucugguuccugcuccuguccgugugccuggggagccucaucuacuccacggccgcgcugggcguccugaugagcaaccucgggaugccguccuacugcaccggcuaccgcgagggcuaccugaacagcaccaacgugaccaucgccacguacugcaccggguccauccccugcagcgugugccuguccggccucgacagccuggacaccuaccccucccuggagaccauccagaucacgaucagcuccuucaagugggaccucaccgccuucgggcuggucgccgagugguuccuggccuacauccucuucacccgguucuucuacgugcugggccuggcggccaucaugcagcucuucuucagcuacuucgccgugcacuucaucuccaacagcuggcugauguggcugaucaucaaccugguccagauggcccccaucuccgcgauggugcgcauguacaucuucuucgccagcuucuacuacguguggaagagcuacguccacgugguggacgggugcaacuccagcaccugcaugaugugcuacaagcggaaccgcgccacgcgggucgagugcaccaccaucgugaacggcguccgccgguccuucuacguguacgccaacggcgggaagggcuucugcaagcuccacaacuggaacugcgugaacugcgacaccuucugcgccgggagcacguucaucuccgacgaggucgcgcgcgaccugagccugcaguucaagcggccgaucaaccccaccgaccaguccagcuacaucguggacuccgugaccgucaagaacggcagcauccaccucuacuucgacaaggccgggcagaagaccuacgagcgccacucccugagccacuucgugaaccuggacaaccuccgggccaacaacacgaagggcucccugcccaucaacgugaucgucuucgacggcaagagcaagugcgaggaguccagcgccaaguccgccagcguguacuacucccagcugaugugccagcccauccuccugcuggaccaggcgcucgugagcgacgucggggacagcgccgagguggccgugaagauguucgacgccuacgucaacaccuucuccagcaccuucaacgugccgauggagaagcugaagacccugguggccacggcggaggccgagcucgccaagaacgucucccuggacaacgugcugagcaccuucaucuccgccgcgcgccagggcuucguggacagcgacgucgagaccaaggacgugguggagugccucaagcugucccaccagagcgacaucgaggucaccggggacuccugcaacaacuacaugcugacguacaacaagguggagaacaugaccccccgggaccucggcgccugcaucgacugcagcgcccgccacaucaacgcccagguggccaagucccacaacaucgcgcugaucuggaacgucaaggacuucaugagccuguccgagcagcuccggaagcagauccgcagcgccgccaagaagaacaaccugcccuucaagcugaccugcgccaccacgcgccagguggugaacgucgugaccaccaagaucgcccucaaggggggcugaggacuagucccuguucccagagcccacuuuuuuuucuuuuuuugaaauaaaauagccugucuuucagaucucaaaggcucuuuucagagccaccaaaaaaaaaaaaaaaaaaaaaaaaaaaaaaaaaaaaaaaaaaaaaaaaaaaaaaaaaaaaaaaaaaaaaaaaaaaaaaaaaaaaaaaaaaaaaaaaaaaaa

SEQ ID NO: 19858 - RNA, 6113 nt, Artificial Sequence
  SARS-CoV-2__MT750418.1__non-structural protein 3 (NSP3) mRNA gc
aggagagucccgcagucggcguccagcggcucugcuuguucgugugugugucguugcaggccuuauucaagcuuaccauggcccccaccaaggugaccuucggcgacgacacggucaucgaggugcagggguacaagagcgugaacaucaccuucgagcuggacgagcgcaucgacaagguccucaacgagaagugcuccgccuacaccguggagcugggcaccgaggugaacgaguucgcgugcgucguggccgacgccgugaucaagacgcugcagccggucagcgagcuccugaccccccuggggaucgaccucgacgagugguccauggccaccuacuaccuguucgacgagagcggcgaguucaagcuggccucccacauguacugcagcuucuacccccccgacgaggacgaggaggagggggacugcgaggaggaggaguucgagccguccacccaguacgaguacggcacggaggacgacuaccagggcaagccccucgaguucggggcgaccagcgccgcccugcagcccgaggaggagcaggaggaggacuggcuggacgacgacucccagcagaccgugggccagcaggacgggagcgaggacaaccagaccacgaccauccagaccaucguggagguccagccccagcucgagauggagcugaccccgguggugcagacgaucgaggucaacuccuucagcggcuaccugaagcucaccgacaacguguacaucaagaacgccgacaucguggaggaggcgaagaaggucaagcccaccgugguggucaacgccgccaacguguaccugaagcacgggggcggcguggccggggcccugaacaaggcgaccaacaacgccaugcaggucgaguccgacgacuacaucgccacgaacggcccccucaagguggggggcagcugcguccuguccggccacaaccuggccaagcacugccuccacgugguggggcccaacgucaacaagggcgaggacauccagcugcugaagagcgccuacgagaacuucaaccagcacgaggugcuccuggcgccgcugcucuccgccgggaucuucggcgccgaccccauccacagccugcgggugugcgucgacaccgugcgcaccaacguguaccuggccgucuucgacaagaaccucuacgacaagcugguguccagcuuccuggagaugaagagcgagaagcagguggagcagaagaucgccgagauccccaaggaggaggucaagcccuucaucaccgaguccaagccgagcguggagcagcggaagcaggacgacaagaagaucaaggcgugcguggaggaggucacgaccacccucgaggagaccaaguuccugacggagaaccugcuccuguacaucgacaucaacgggaaccugcaccccgacuccgccacccucgugagcgacaucgacaucaccuuccugaagaaggacgcccccuacaucgugggcgacgucgugcaggagggcgugcugaccgccgucgugauccccacgaagaaggccgggggcaccaccgagaugcucgcgaaggcccugcgcaaggugccgaccgacaacuacaucacgaccuaccccgggcagggccugaacggguacaccgucgaggaggccaagaccgugcucaagaagugcaaguccgccuucuacauccugcccagcaucaucuccaacgagaagcaggagauccugggcaccgugagcuggaaccuccgggagaugcuggcgcacgccgaggagacgcgcaagcugaugcccgucugcguggagaccaaggccaucguguccaccauccagcggaaguacaagggcaucaagauccaggagggggucguggacuacggcgcccgcuucuacuucuacaccagcaagacgaccguggccucccugaucaacacccucaacgaccugaacgagacccuggucacgaugccgcucggguacgugacccacggccugaaccuggaggaggcggcccgguacaugcgcagccucaaggugcccgccaccgucuccgugagcucccccgacgccgugaccgccuacaacggguaccugacgagcuccagcaagacccccgaggagcacuucaucgagaccaucucccuggcgggcagcuacaaggacuggagcuacuccggccagagcacccagcucgggaucgaguuccugaagcggggcgacaaguccgucuacuacacgagcaacccgaccaccuuccaccuggacggggaggugaucaccuucgacaaccucaagacgcugcugucccuccgcgaggugcggaccaucaaggucuucaccaccguggacaacaucaaccugcacacgcagguggucgacaugagcaugaccuacggccagcaguucggccccaccuaccuggacggggccgacgugaccaagaucaagccccacaacucccacgagggcaagacguucuacgugcucccgaacgacgacacccugcgcgucgaggccuucgaguacuaccacaccaccgaccccagcuuccuggggcgguacauguccgcccucaaccacacgaagaaguggaaguacccccaggugaacggccugaccagcaucaagugggccgacaacaacugcuaccuggcgaccgcccuccugacccugcagcagaucgagcucaaguucaaccccccggcccugcaggacgccuacuaccgcgcgcgggccggggaggccgccaacuucugcgcccugauccucgcguacugcaacaagacggugggcgagcugggcgacguccgcgagaccauguccuaccuguuccagcacgccaaccucgacagcugcaagcgggugcugaacgucgugugcaagaccugcgggcagcagcagaccacccugaagggcguggaggccgucauguacauggggacgcucuccuacgagcaguucaagaagggcgugcagauccccugcaccugcgggaagcaggccaccaaguaccuggugcagcaggagagccccuucgucaugauguccgcccccccggcgcaguacgagcugaagcacggcaccuucacgugcgccagcgaguacaccggcaacuaccagugcgggcacuacaagcacaucaccuccaaggagacccucuacugcaucgacggcgcccugcugacgaagagcagcgaguacaaggggcccaucaccgacguguucuacaaggagaacuccuacaccaccacgaucaagcccgugaccuacaagcucgacggcgucgugugcaccgagaucgaccccaagcuggacaacuacuacaagaaggacaacagcuacuucaccgagcagccgaucgaccuggugcccaaccagcccuaccccaacgccuccuucgacaacuucaaguucgucugcgacaacaucaaguucgccgacgaccucaaccagcugacgggguacaagaagccggcgagccgcgagcugaaggugaccuucuuccccgaccucaacggcgacguggucgccaucgacuacaagcacuacacccccuccuucaagaagggcgccaagcugcugcacaagcccaucguguggcacgugaacaacgccaccaacaaggcgacguacaagccgaacaccuggugcauccggugccucuggagcaccaagcccgucgagaccuccaacagcuucgacgugcugaaguccgaggacgcccaggggauggacaaccuggccugcgaggaccucaagcccgugagcgaggaggucguggagaaccccacgauccagaaggacgugcuggagugcaacgucaagaccaccgagguggugggcgacaucauccugaagccggccaacaacucccucaagaucaccgaggaggucgggcacacggaccugauggccgcguacguggacaacagcucccugaccaucaagaagcccaacgagcucagccgcgugcugggccugaagacccucgccacccacgggcuggccgccgucaacuccgugcccugggacacgaucgccaacuacgcgaagccguuccugaacaagguggucagcaccaccaccaacaucgugacgcgcugccucaaccgggugugcaccaacuacaugcccuacuucuucacccugcugcuccagcugugcaccuucacccgcuccacgaacagccggaucaaggccuccaugcccaccaccaucgccaagaacaccgucaagagcgugggcaaguucugccuggaggccagcuucaacuaccucaagucccccaacuucagcaagcugaucaacaucaucaucugguuccugcuccuguccgugugccugggcagccucaucuacuccacggccgcgcuggggguccugaugagcaaccucggcaugccguccuacugcaccggguaccgcgagggcuaccugaacagcaccaacgugaccaucgccacguacugcaccggcuccauccccugcagcgugugccuguccgggcucgacagccuggacaccuaccccucccuggagaccauccagaucacgaucagcuccuucaagugggaccucaccgccuucggccuggucgccgagugguuccuggccuacauccucuucacccgguucuucuacgugcuggggcuggcggccaucaugcagcucuucuucagcuacuucgccgugcacuucaucuccaacagcuggcugauguggcugaucaucaaccugguccagauggcccccaucuccgcgauggugcgcauguacaucuucuucgccagcuucuacuacguguggaagagcuacguccacgugguggacggcugcaacuccagcaccugcaugaugugcuacaagcggaaccgcgccacgcgggucgagugcaccaccaucgugaacgggguccgccgguccuucuacguguacgccaacggcggcaagggguucugcaagcuccacaacuggaacugcgugaacugcgacaccuucugcgccggcagcacguucaucuccgacgaggucgcgcgcgaccugagccugcaguucaagcggccgaucaaccccaccgaccaguccagcuacaucguggacuccgugaccgucaagaacgggagcauccaccucuacuucgacaaggccggccagaagaccuacgagcgccacucccugagccacuucgugaaccuggacaaccuccgggccaacaacacgaaggggucccugcccaucaacgugaucgucuucgacggcaagagcaagugcgaggaguccagcgccaaguccgccagcguguacuacucccagcugaugugccagcccauccuccugcuggaccaggcgcucgugagcgacgucggcgacagcgccgaggccgccgugaagauguucgacgccuacgugaacaccuucuccagcaccuucaacgucccgauggagaagcugaagacccugguggcgacggccgaggccgagcucgccaagaacgugucccuggacaacguccugagcaccuucaucuccgcggcccgccagggguucguggacagcgacguggagaccaaggacgucguggagugccucaagcugucccaccagagcgacaucgaggugaccggcgacuccugcaacaacuacaugcugacguacaacaaggucgagaacaugaccccccgggaccucggggccugcaucgacugcagcgcccgccacaucaacgcccagguggcgaagucccacaacaucgcccugaucuggaacgugaaggacuucaugagccuguccgagcagcuccggaagcagauccgcagcgccgccaagaagaacaaccugcccuucaagcugaccugcgccaccacgcgccaggucgugaacguggucaccaccaagaucgcgcucaagggcgggugaggacuagucccuguucccagagcccacuuuuuuuucuuuuuuugaaauaaaauagccugucuuucagaucucaaaggcucuuuucagagccaccaaaaaaaaaaaaaaaaaaaaaaaaaaaaaaaaaaaaaaaaaaaaaaaaaaaaaaaaaaaaaaaaaaaaaaaaaaaaaaaaaaaaaaaaaaaaaaaaaaaaa

SEQ ID NO: 19859 - RNA, 6113 nt, Artificial Sequence
  SARS-CoV-2__MT750436.1__non-structural protein 3 (NSP3) mRNA gc
aggagagucccgcagucggcguccagcggcucugcuuguucgugugugugucguugcaggccuuauucaagcuuaccauggcccccaccaaggugaccuucggcgacgacacggucaucgaggugcagggguacaagagcgugaacaucaccuucgagcuggacgagcgcaucgacaagguccucaacgagaagugcuccgccuacaccguggagcugggcaccgaggugaacgaguucgcgugcgucguggccgacgccgugaucaagacgcugcagccggucagcgagcuccugaccccccuggggaucgaccucgacgagugguccauggccaccuacuaccuguucgacgagagcggcgaguucaagcuggccucccacauguacugcagcuucuacccccccgacgaggacgaggaggagggggacugcgaggaggaggaguucgagccguccacccaguacgaguacggcacggaggacgacuaccagggcaagccccucgaguucggggcgaccagcgccgcccugcagcccgaggaggagcaggaggaggacuggcuggacgacgacucccagcagaccgugggccagcaggacgggagcgaggacaaccagaccacgaccauccagaccaucguggagguccagccccagcucgacauggagcugaccccgguggugcagacgaucgaggucaacuccuucagcggcuaccugaagcucaccgacaacguguacaucaagaacgccgacaucguggaggaggcgaagaaggucaagcccaccgugguggucaacgccgccaacguguaccugaagcacgggggcggcguggccggggcccugaacaaggcgaccaacaacgccaugcaggucgaguccgacgacuacaucgccacgaacggcccccucaagguggggggcagcugcguccuguccggccacaaccuggccaagcacugccuccacgugguggggcccaacgucaacaagggcgaggacauccagcugcugaagagcgccuacgagaacuucaaccagcacgaggugcuccuggcgccgcugcucuccgccgggaucuucggcgccgaccccauccacagccugcgggugugcgucgacaccgugcgcaccaacguguaccuggccgucuucgacaagaaccucuacgacaagcugguguccagcuuccuggagaugaagagcgagaagcagguggagcagaagaucgccgagauccccaaggaggaggucaagcccuucaucaccgaguccaagccgagcguggagcagcggaagcaggacgacaagaagaucaaggcgugcguggaggaggucacgaccacccucgaggagaccaaguuccugacggagaaccugcuccuguacaucgacaucaacgggaaccugcaccccgacuccgccacccucgugagcgacaucgacaucaccuuccugaagaaggacgcccccuacaucgugggcgacgucgugcaggagggcgugcugaccgccgucgugauccccacgaagaaggccgggggcaccaccgagaugcucgcgaaggcccugcgcaaggugccgaccgacaacuacaucacgaccuaccccgggcagggccugaacggguacaccgucgaggaggccaagaccgugcucaagaagugcaaguccgccuucuacauccugcccagcaucaucuccaacgagaagcaggagauccugggcaccgugagcuggaaccuccgggagaugcuggcgcacgccgaggagacgcgcaagcugaugcccgucugcguggagaccaaggccaucguguccaccauccagcggaaguacaagggcaucaagauccaggagggggucguggacuacggcgcccgcuucuacuucuacaccagcaagacgaccguggccucccugaucaacacccucaacgaccugaacgagacccuggucacgaugccgcucggguacgugacccacggccugaaccuggaggaggcggcccgguacaugcgcagccucaaggugcccgccaccgucuccgugagcucccccgacgccgugaccgccuacaacggguaccugacgagcuccagcaagacccccgaggagcacuucaucgagaccaucucccuggcgggcagcuacaaggacuggagcuacuccggccagagcacccagcucgggaucgaguuccugaagcggggcgacaaguccgucuacuacacgagcaacccgaccaccuuccaccuggacggggaggugaucaccuucgacaaccucaagacgcugcugucccuccgcgaggugcggaccaucaaggucuucaccaccguggacaacaucaaccugcacacgcagguggucgacaugagcaugaccuacggccagcaguucggccccaccuaccuggacggggccgacgugaccaagaucaagccccacaacucccacgagggcaagacguucuacgugcucccgaacgacgacacccugcgcgucgaggccuucgaguacuaccacaccaccgaccccagcuuccuggggcgguacauguccgcccucaaccacacgaagaaguggaaguacccccaggugaacggccugaccagcaucaagugggccgacaacaacugcuaccuggcgaccgcccuccugacccugcagcagaucgagcucaaguucaaccccccggcccugcaggacgccuacuaccgcgcgcgggccggggaggccgccaacuucugcgcccugauccucgcguacugcaacaagacggugggcgagcugggcgacguccgcgagaccauguccuaccuguuccagcacgccaaccucgacagcugcaagcgggugcugaacgucgugugcaagaccugcgggcagcagcagaccacccugaagggcguggaggccgucauguacauggggacgcucuccuacgagcaguucaagaagggcgugcagauccccugcaccugcgggaagcaggccaccaaguaccuggugcagcaggagagccccuucgucaugauguccgcccccccggcgcaguacgagcugaagcacggcaccuucacgugcgccagcgaguacaccggcaacuaccagugcgggcacuacaagcacaucaccuccaaggagacccucuacugcaucgacggcgcccugcugacgaagagcagcgaguacaaggggcccaucaccgacguguucuacaaggagaacuccuacaccaccacgaucaagcccgugaccuacaagcucgacggcgucgugugcaccgagaucgaccccaagcuggacaacuacuacaagaaggacaacagcuacuucaccgagcagccgaucgaccuggugcccaaccagcccuaccccaacgccuccuucgacaacuucaaguucgucugcgacaacaucaaguucgccgacgaccucaaccagcugacgggguacaagaagccggcgagccgcgagcugaaggugaccuucuuccccgaccucaacggcgacguggucgccaucgacuacaagcacuacacccccuccuucaagaagggcgccaagcugcugcacaagcccaucguguggcacgugaacaacgccaccaacaaggcgacguacaagccgaacaccuggugcauccggugccucuggagcaccaagcccgucgagaccuccaacagcuucgacgugcugaaguccgaggacgcccaggggauggacaaccuggccugcgaggaccucaagcccgugagcgaggaggucguggagaaccccacgauccagaaggacgugcuggagugcaacgucaagaccaccgagguggugggcgacaucauccugaagccggccaacaacucccucaagaucaccgaggaggucgggcacacggaccugauggccgcguacguggacaacagcucccugaccaucaagaagcccaacgagcucagccgcgugcugggccugaagacccucgccacccacgggcuggccgccgucaacuccgugcccugggacacgaucgccaacuacgcgaagccguuccugaacaagguggucagcaccaccaccaacaucgugacgcgcugccucaaccgggugugcaccaacuacaugcccuacuucuucacccugcugcuccagcugugcaccuucacccgcuccacgaacagccggaucaaggccuccaugcccaccaccaucgccaagaacaccgucaagagcgugggcaaguucugccuggaggccagcuucaacuaccucaagucccccaacuucagcaagcugaucaacaucaucaucugguuccugcuccuguccgugugccugggcagccucaucuacuccacggccgcgcuggggguccugaugagcaaccucggcaugccguccuacugcaccggguaccgcgagggcuaccugaacagcaccaacgugaccaucgccacguacugcaccggcuccauccccugcagcgugugccuguccgggcucgacagccuggacaccuaccccucccuggagaccauccagaucacgaucagcuccuucaagugggaccucaccgccuucggccuggucgccgagugguuccuggccuacauccucuucacccgguucuucuacgugcuggggcuggcggccaucaugcagcucuucuucagcuacuucgccgugcacuucaucuccaacagcuggcugauguggcugaucaucaaccugguccagauggcccccaucuccgcgauggugcgcauguacaucuucuucgccagcuucuacuacguguggaagagcuacguccacgugguggacggcugcaacuccagcaccugcaugaugugcuacaagcggaaccgcgccacgcgggucgagugcaccaccaucgugaacgggguccgccgguccuucuacguguacgccaacggcggcaagggguucugcaagcuccacaacuggaacugcgugaacugcgacaccuucugcgccggcagcacguucaucuccgacgaggucgcgcgcgaccugagccugcaguucaagcggccgaucaaccccaccgaccaguccagcuacaucguggacuccgugaccgucaagaacgggagcauccaccucuacuucgacaaggccggccagaagaccuacgagcgccacucccugagccacuucgugaaccuggacaaccuccgggccaacaacacgaaggggucccugcccaucaacgugaucgucuucgacggcaagagcaagugcgaggaguccagcgccaaguccgccagcguguacuacucccagcugaugugccagcccauccuccugcuggaccaggcgcucgugagcgacgucggcgacagcgccgagguggccgugaagauguucgacgccuacgucaacaccuucuccagcaccuucaacgugccgauggagaagcugaagacccugguggccacggcggaggccgagcucgccaagaacgucucccuggacaacgugcugagcaccuucaucuccgccgcgcgccagggguucguggacagcgacgucgagaccaaggacgugguggagugccucaagcugucccaccagagcgacaucgaggucaccggcgacuccugcaacaacuacaugcugacguacaacaagguggagaacaugaccccccgggaccucggggccugcaucgacugcagcgcccgccacaucaacgcccagguggccaagucccacaacaucgcgcugaucuggaacgucaaggacuucaugagccuguccgagcagcuccggaagcagauccgcagcgccgccaagaagaacaaccugcccuucaagcugaccugcgccaccacgcgccagguggugaacgucgugaccaccaagaucgcccucaagggcgggugaggacuagucccuguucccagagcccacuuuuuuuucuuuuuuugaaauaaaauagccugucuuucagaucucaaaggcucuuuucagagccaccaaaaaaaaaaaaaaaaaaaaaaaaaaaaaaaaaaaaaaaaaaaaaaaaaaaaaaaaaaaaaaaaaaaaaaaaaaaaaaaaaaaaaaaaaaaaaaaaaaaaa

SEQ ID NO: 19860 - RNA, 6113 nt, Artificial Sequence
  SARS-CoV-2__MT742784.1__non-structural protein 3 (NSP3) mRNA gc
aggagagucccgcagucggcguccagcggcucugcuuguucgugugugugucguugcaggccuuauucaagcuuaccauggcccccaccaaggugaccuucggcgacgacacggucaucgaggugcagggguacaagagcgugaacaucaccuucgagcuggacgagcgcaucgacaagguccucaacgagaagugcuccgccuacaccguggagcugggcaccgaggugaacgaguucgcgugcgucguggccgacgccgugaucaagacgcugcagccggucagcgagcuccugaccccccuggggaucgaccucgacgagugguccauggccaccuacuaccuguucgacgagagcggcgaguucaagcuggccucccacauguacugcagcuucuacccccucgacgaggacgaggaggagggggacugcgaggaggaggaguucgagcccuccacccaguacgaguacggcacggaggacgacuaccagggcaagccgcuggaguucggggcgaccagcgccgcccugcagcccgaggaggagcaggaggaggacuggcucgacgacgacucccagcagaccgugggccagcaggacgggagcgaggacaaccagaccacgaccauccagaccaucguggagguccagccccagcuggagauggagcugacccccguggugcagacgaucgaggucaacuccuucagcggcuaccucaagcugaccgacaacguguacaucaagaacgccgacaucguggaggaggcgaagaaggucaagccgaccgugguggucaacgccgccaacguguaccugaagcacgggggcggcguggccggggcccucaacaaggcgaccaacaacgccaugcaggucgaguccgacgacuacaucgccacgaacggcccccugaagguggggggcagcugcguccuguccggccacaaccucgccaagcacugccugcacgugguggggcccaacgucaacaagggcgaggacauccagcugcucaagagcgccuacgagaacuucaaccagcacgaggugcugcuggcgccccuccuguccgccgggaucuucggcgccgacccgauccacagccugcgggugugcgucgacaccgugcgcaccaacguguaccucgccgucuucgacaagaaccuguacgacaagcugguguccagcuuccucgagaugaagagcgagaagcagguggagcagaagaucgccgagauccccaaggaggaggucaagcccuucaucaccgaguccaagcccagcguggagcagcggaagcaggacgacaagaagaucaaggcgugcguggaggaggucacgaccacccuggaggagaccaaguuccugacggagaaccuccugcuguacaucgacaucaacgggaaccuccacccggacuccgccacccuggugagcgacaucgacaucaccuuccugaagaaggacgcccccuacaucgugggcgacgucgugcaggagggcgugcucaccgccgucgugauccccacgaagaaggccgggggcaccaccgagaugcuggcgaaggcccugcgcaaggugcccaccgacaacuacaucacgaccuacccggggcagggccucaacggguacaccgucgaggaggccaagaccgugcugaagaagugcaaguccgccuucuacauccugcccagcaucaucuccaacgagaagcaggagauccucggcaccgugagcuggaaccugcgggagaugcuggcgcacgccgaggagacgcgcaagcugaugcccgucugcguggagaccaaggccaucguguccaccauccagcggaaguacaagggcaucaagauccaggagggggucguggacuacggcgcccgcuucuacuucuacaccagcaagacgaccguggccucccucaucaacacccugaacgaccugaacgagacccucgucacgaugccccugggguacgugacccacggccugaaccucgaggaggcggcccgguacaugcgcagccugaaggugccggccaccgucuccgugagcucccccgacgccgugaccgccuacaacggguaccugacgagcuccagcaagacccccgaggagcacuucaucgagaccaucucccucgcgggcagcuacaaggacuggagcuacuccggccagagcacccagcuggggaucgaguuccugaagcggggcgacaaguccgucuacuacacgagcaaccccaccaccuuccaccucgacggggaggugaucaccuucgacaaccugaagacgcugcucucccugcgcgaggugcggaccaucaaggucuucaccaccguggacaacaucaaccugcacacgcagguggucgacaugagcaugaccuacggccagcaguucggcccgaccuaccucgacggggccgacgugaccaagaucaagccccacaacucccacgagggcaagacguucuacgugcugcccaacgacgacacccugcgcgucgaggccuucgaguacuaccacaccaccgacccgagcuuccucgggcgguacauguccgcccugaaccacacgaagaaguggaaguacccccaggugaacggccugaccagcaucaagugggccgacaacaacugcuaccucgcgaccgcccugcugacccuccagcagaucgagcugaaguucaacccccccgcccugcaggacgccuacuaccgcgcgcgggccggggaggccgccaacuucugcgcccucauccuggcguacugcaacaagacggugggcgagcugggcgacguccgcgagaccauguccuaccucuuccagcacgccaaccuggacagcugcaagcgggugcugaacgucgugugcaagaccugcgggcagcagcagaccacccucaagggcguggaggccgucauguacauggggacgcuguccuacgagcaguucaagaagggcgugcagaucccgugcaccugcgggaagcaggccaccaaguaccuggugcagcaggagagccccuucgucaugauguccgccccccccgaccaguacgagcucaagcacggcaccuucacgugcgcgagcgaguacaccggcaacuaccagugcgggcacuacaagcacaucaccuccaaggagacccuguacugcaucgacggcgcccugcucacgaagagcagcgaguacaaggggccgaucaccgacguguucuacaaggagaacuccuacaccaccacgaucaagcccgugaccuacaagcuggacggcgucgugugcaccgagaucgaccccaagcuggacaacuacuacaagaaggacaacagcuacuucaccgagcagcccaucgaccucgugccgaaccagcccuaccccaacgccuccuucgacaacuucaaguucgucugcgacaacaucaaguucgccgacgaccugaaccagcugacgggguacaagaagcccgccagccgcgagcucaaggugaccuucuucccggaccugaacggcgacguggucgcgaucgacuacaagcacuacacccccuccuucaagaagggcgccaagcugcuccacaagcccaucguguggcacgugaacaacgccaccaacaaggccacguacaagcccaacaccuggugcauccggugccuguggagcaccaagccggucgagaccuccaacagcuucgacgugcugaaguccgaggacgcgcaggggauggacaaccucgccugcgaggaccugaagcccgugagcgaggaggucguggagaaccccacgauccagaaggacgugcuggagugcaacgucaagaccaccgagguggugggcgacaucauccucaagcccgccaacaacucccugaagaucaccgaggaggucgggcacacggaccugauggccgccuacguggacaacagcucccucaccaucaagaagccgaacgagcugagccgcgugcugggccucaagacccuggcgacccacgggcuggccgccgucaacuccgugcccugggacacgaucgccaacuacgccaagcccuuccucaacaagguggucagcaccaccaccaacaucgugacgcgcugccugaaccgggugugcaccaacuacaugccguacuucuucacccugcuccugcagcugugcaccuucacccgcuccacgaacagccggaucaaggcguccaugcccaccaccaucgccaagaacaccgucaagagcgugggcaaguucugccucgaggccagcuucaacuaccugaagucccccaacuucagcaagcugaucaacaucaucaucugguuccuccugcuguccgugugccucggcagccugaucuacuccacggccgcccuggggguccucaugagcaaccugggcaugcccuccuacugcaccggguaccgcgagggcuaccugaacagcaccaacgugaccaucgcgacguacugcaccggcuccaucccgugcagcgugugccucuccgggcuggacagccuggacaccuaccccucccucgagaccauccagaucacgaucagcuccuucaagugggaccugaccgccuucggccuggucgccgagugguuccucgccuacauccuguucacccgguucuucuacgugcuggggcucgccgcgaucaugcagcuguucuucagcuacuucgccgugcacuucaucuccaacagcuggcugauguggcugaucaucaaccucguccagauggcccccaucuccgccauggugcgcauguacaucuucuucgcgagcuucuacuacguguggaagagcuacguccacgugguggacggcugcaacuccagcaccugcaugaugugcuacaagcggaaccgcgccacgcgggucgagugcaccaccaucgugaacgggguccgccgguccuucuacguguacgccaacggcggcaagggguucugcaagcugcacaacuggaacugcgugaacugcgacaccuucugcgccggcagcacguucaucuccgacgaggucgcccgcgaccugagccuccaguucaagcggcccaucaacccgaccgaccaguccagcuacaucguggacuccgugaccgucaagaacgggagcauccaccuguacuucgacaaggcgggccagaagaccuacgagcgccacucccugagccacuucgugaaccucgacaaccugcgggccaacaacacgaaggggucccugcccaucaacgugaucgucuucgacggcaagagcaagugcgaggaguccagcgccaaguccgccagcguguacuacucccagcucaugugccagcccauccugcugcucgaccaggcccuggugagcgacgucggcgacagcgcggagguggccgugaagauguucgacgccuacgucaacaccuucuccagcaccuucaacgugcccauggagaagcugaagacccucguggccacggccgaggcggagcuggccaagaacgucucccuggacaacgugcucagcaccuucaucuccgccgcccgccagggguucguggacagcgacgucgagaccaaggacgugguggagugccugaagcugucccaccagagcgacaucgaggucaccggcgacuccugcaacaacuacaugcucacguacaacaagguggagaacaugaccccgcgggaccugggggcgugcaucgacugcagcgcccgccacaucaacgcccagguggccaagucccacaacaucgcccugaucuggaacgucaaggacuucaugagccucuccgagcagcugcggaagcagauccgcagcgcggccaagaagaacaaccugcccuucaagcucaccugcgccaccacgcgccagguggugaacgucgugaccaccaagaucgcccugaagggcgggugaggacuagucccuguucccagagcccacuuuuuuuucuuuuuuugaaauaaaauagccugucuuucagaucucaaaggcucuuuucagagccaccaaaaaaaaaaaaaaaaaaaaaaaaaaaaaaaaaaaaaaaaaaaaaaaaaaaaaaaaaaaaaaaaaaaaaaaaaaaaaaaaaaaaaaaaaaaaaaaaaaaaa

SEQ ID NO: 19861 - RNA, 6113 nt, Artificial Sequence
  SARS-CoV-2__MT740392.1__non-structural protein 3 (NSP3) mRNA gc
aggagagucccgcagucggcguccagcggcucugcuuguucgugugugugucguugcaggccuuauucaagcuuaccauggcccccaccaaggugaccuucggcgacgacacggucaucgaggugcagggguacaagagcgugaacaucaccuucgagcuggacgagcgcaucgacaagguccucaacgagaagugcuccgccuacaccguggagcugggcaccgaggugaacgaguucgcgugcgucguggccgacgccgugaucaagacgcugcagccggucagcgagcuccugaccccccuggggaucgaccucgacgagugguccauggccaccuacuaccuguucgacgagagcggcgaguucaagcuggccucccacauguacugcagcuucuacccccccgacgaggacgaggaggagggggacugcgaggaggaggaguucgagccguccacccaguacgaguacggcacggaggacgacuaccagggcaagccccucgaguucggggcgaccagcgccgcccugcagcccgaggaggagcaggaggaggacuggcuggacgacgacucccagcagaccgugggccagcaggacgggagcgacgacaaccagaccacgaccauccagaccaucguggagguccagccccagcucgagauggagcugaccccgguggugcagacgaucgaggucaacuccuucagcggcuaccugaagcucaccgacaacguguacaucaagaacgccgacaucguggaggaggcgaagaaggucaagcccaccgugguggucaacgccgccaacguguaccugaagcacgggggcggcguggccggggcccugaacaaggcgaccaacaacgccaugcaggucgaguccgacgacuacaucgccacgaacggcccccucaagguggggggcagcugcguccuguccggccacaaccuggccaagcacugccuccacgugguggggcccaacgucaacaagggcgaggacauccagcugcugaagagcgccuacgagaacuucaaccagcacgaggugcuccuggcgccgcugcucuccgccgggaucuucggcgccgaccccauccacagccugcgggugugcgucgacaccgugcgcaccaacguguaccuggccgucuucgacaagaaccucuacgacaagcugguguccagcuuccuggagaugaagagcgagaagcagguggagcagaagaucgccgagauccccaaggaggaggucaagcccuucaucaccgaguccaagccgagcguggagcagcggaagcaggacgacaagaagaucaaggcgugcguggaggaggucacgaccacccucgaggagaccaaguuccugacggagaaccugcuccuguacaucgacaucaacgggaaccugcaccccgacuccgccacccucgugagcgacaucgacaucaccuuccugaagaaggacgcccccuacaucgugggcgacgucgugcaggagggcgugcugaccgccgucgugauccccacgaagaaggccgggggcaccaccgagaugcucgcgaaggcccugcgcaaggugccgaccgacaacuacaucacgaccuaccccgggcagggccugaacggguacaccgucgaggaggccaagaccgugcucaagaagugcaaguccgccuucuacauccugcccagcaucaucuccaacgagaagcaggagauccugggcaccgugagcuggaaccuccgggagaugcuggcgcacgccgaggagacgcgcaagcugaugcccgucugcguggagaccaaggccaucguguccaccauccagcggaaguacaagggcaucaagauccaggagggggucguggacuacggcgcccgcuucuacuucuacaccagcaagacgaccguggccucccugaucaacacccucaacgaccugaacgagacccuggucacgaugccgcucggguacgugacccacggccugaaccuggaggaggcggcccgguacaugcgcagccucaaggugcccgccaccgucuccgugagcucccccgacgccgugaccgccuacaacggguaccugacgagcuccagcaagacccccgaggagcacuucaucgagaccaucucccuggcgggcagcuacaaggacuggagcuacuccggccagagcacccagcucgggaucgaguuccugaagcggggcgacaaguccgucuacuacacgagcaacccgaccaccuuccaccuggacggggaggugaucaccuucgacaaccucaagacgcugcugucccuccgcgaggugcggaccaucaaggucuucaccaccguggacaacaucaaccugcacacgcagguggucgacaugagcaugaccuacggccagcaguucggccccaccuaccuggacggggccgacgugaccaagaucaagccccacaacucccacgagggcaagacguucuacgugcucccgaacgacgacacccugcgcgucgaggccuucgaguacuaccacaccaccgaccccagcuuccuggggcgguacauguccgcccucaaccacacgaagaaguggaaguacccccaggugaacggccugaccagcaucaagugggccgacaacaacugcuaccuggcgaccgcccuccugacccugcagcagaucgagcucaaguucaaccccccggcccugcaggacgccuacuaccgcgcgcgggccggggaggccgccaacuucugcgcccugauccucgcguacugcaacaagacggugggcgagcugggcgacguccgcgagaccauguccuaccuguuccagcacgccaaccucgacagcugcaagcgggugcugaacgucgugugcaagaccugcgggcagcagcagaccacccugaagggcguggaggccgucauguacauggggacgcucuccuacgagcaguucaagaagggcgugcagauccccugcaccugcgggaagcaggccaccaaguaccuggugcagcaggagagccccuucgucaugauguccgcccccccggcgcaguacgagcugaagcacggcaccuucacgugcgccagcgaguacaccggcaacuaccagugcgggcacuacaagcacaucaccuccaaggagacccucuacugcaucgacggcgcccugcugacgaagagcagcgaguacaaggggcccaucaccgacguguucuacaaggagaacuccuacaccaccacgaucaagcccgugaccuacaagcucgacggcgucgugugcaccgagaucgaccccaagcuggacaacuacuacaagaaggacaacagcuacuucaccgagcagccgaucgaccuggugcccaaccagcccuaccccaacgccuccuucgacaacuucaaguucgucugcgacaacaucaaguucgccgacgaccucaaccagcugacgggguacaagaagccggcgagccgcgagcugaaggugaccuucuuccccgaccucaacggcgacguggucgccaucgacuacaagcacuacacccccuccuucaagaagggcgccaagcugcugcacaagcccaucguguggcacgugaacaacgccaccaacaaggcgacguacaagccgaacaccuggugcauccggugccucuggagcaccaagcccgucgagaccuccaacagcuucgacgugcugaaguccgaggacgcccaggggauggacaaccuggccugcgaggaccucaagcccgugagcgaggaggucguggagaaccccacgauccagaaggacgugcuggagugcaacgucaagaccaccgagguggugggcgacaucauccugaagccggccaacaacucccucaagaucaccgaggaggucgggcacacggaccugauggccgcguacguggacaacagcucccugaccaucaagaagcccaacgagcucagccgcgugcugggccugaagacccucgccacccacgggcuggccgccgucaacuccgugcccugggacacgaucgccaacuacgcgaagccguuccugaacaagguggucagcaccaccaccaacaucgugacgcgcugccucaaccgggugugcaccaacuacaugcccuacuucuucacccugcugcuccagcugugcaccuucacccgcuccacgaacagccggaucaaggccuccaugcccaccaccaucgccaagaacaccgucaagagcgugggcaaguucugccuggaggccagcuucaacuaccucaagucccccaacuucagcaagcugaucaacaucaucaucugguuccugcuccuguccgugugccugggcagccucaucuacuccacggccgcgcuggggguccugaugagcaaccucggcaugccguccuacugcaccggguaccgcgagggcuaccugaacagcaccaacgugaccaucgccacguacugcaccggcuccauccccugcagcgugugccuguccgggcucgacagccuggacaccuaccccucccuggagaccauccagaucacgaucagcuccuucaagugggaccucaccgccuucggccuggucgccgagugguuccuggccuacauccucuucacccgguucuucuacgugcuggggcuggcggccaucaugcagcucuucuucagcuacuucgccgugcacuucaucuccaacagcuggcugauguggcugaucaucaaccugguccagauggcccccaucuccgcgauggugcgcauguacaucuucuucgccagcuucuacuacguguggaagagcuacguccacgugguggacggcugcaacuccagcaccugcaugaugugcuacaagcggaaccgcgccacgcgggucgagugcaccaccaucgugaacgggguccgccgguccuucuacguguacgccaacggcggcaagggguucugcaagcuccacaacuggaacugcgugaacugcgacaccuucugcgccggcagcacguucaucuccgacgaggucgcgcgcgaccugagccugcaguucaagcggccgaucaaccccaccgaccaguccagcuacaucguggacuccgugaccgucaagaacgggagcauccaccucuacuucgacaaggccggccagaagaccuacgagcgccacucccugagccacuucgugaaccuggacaaccuccgggccaacaacacgaaggggucccugcccaucaacgugaucgucuucgacggcaagagcaagugcgaggaguccagcgccaaguccgccagcguguacuacucccagcugaugugccagcccauccuccugcuggaccaggcgcucgugagcgacgucggcgacagcgccgagguggccgugaagauguucgacgccuacgucaacaccuucuccagcaccuucaacgugccgauggagaagcugaagacccugguggccacggcggaggccgagcucgccaagaacgucucccuggacaacgugcugagcaccuucaucuccgccgcgcgccagggguucguggacagcgacgucgagaccaaggacgugguggagugccucaagcugucccaccagagcgacaucgaggucaccggcgacuccugcaacaacuacaugcugacguacaacaagguggagaacaugaccccccgggaccucggggccugcaucgacugcagcgcccgccacaucaacgcccagguggccaagucccacaacaucgcgcugaucuggaacgucaaggacuucaugagccuguccgagcagcuccggaagcagauccgcagcgccgccaagaagaacaaccugcccuucaagcugaccugcgccaccacgcgccagguggugaacgucgugaccaccaagaucgcccucaagggcgggugaggacuagucccuguucccagagcccacuuuuuuuucuuuuuuugaaauaaaauagccugucuuucagaucucaaaggcucuuuucagagccaccaaaaaaaaaaaaaaaaaaaaaaaaaaaaaaaaaaaaaaaaaaaaaaaaaaaaaaaaaaaaaaaaaaaaaaaaaaaaaaaaaaaaaaaaaaaaaaaaaaaaa

SEQ ID NO: 19862 - RNA, 6113 nt, Artificial Sequence
  SARS-CoV-2__MT740401.1__non-structural protein 3 (NSP3) mRNA gc
aggagagucccgcagucggcguccagcggcucugcuuguucgugugugugucguugcaggccuuauucaagcuuaccauggcccccaccaaggugaccuucggcgacgacacggucaucgaggugcagggguacaagagcgugaacaucaccuucgagcuggacgagcgcaucgacaagguccucaacgagaagugcuccgccuacaccguggagcugggcaccgaggugaacgaguucgcgugcgucguggccgacgccgugaucaagacgcugcagccggucagcgagcuccugaccccccuggggaucgaccucgacgagugguccauggccaccuacuaccuguucgacgagagcggcgaguucaagcuggccucccacauguacugcagcuucuacccccccgacgaggacgaggaggagggggacugcgaggaggaggaguucgagccguccacccaguacgaguacggcacggaggacgacuaccagggcaagccccucgaguucggggcgaccagcgccgcccugcagcccgaggaggagcaggaggaggacuggcuggacgacgacucccagcagaccgugggccagcaggacgggagcgaggacaaccagaccacgaccauccagaccaucguggagguccagccccagcucgagauggagcugaccccgguggugcagacgaucgaggucaacuccuucagcggcuaccugaagcucaccgacaacguguacaucaagaacgccgacaucguggaggaggcgaagaaggucaagcccaccgugguggucaacgccgccaacgugugccugaagcacgggggcggcguggccggggcccugaacaaggcgaccaacaacgccaugcaggucgaguccgacgacuacaucgccacgaacggcccccucaagguggggggcagcugcguccuguccggccacaaccuggccaagcacugccuccacgugguggggcccaacgucaacaagggcgaggacauccagcugcugaagagcgccuacgagaacuucaaccagcacgaggugcuccuggcgccgcugcucuccgccgggaucuucggcgccgaccccauccacagccugcgggugugcgucgacaccgugcgcaccaacguguaccuggccgucuucgacaagaaccucuacgacaagcugguguccagcuuccuggagaugaagagcgagaagcagguggagcagaagaucgccgagauccccaaggaggaggucaagcccuucaucaccgaguccaagccgagcguggagcagcggaagcaggacgacaagaagaucaaggcgugcguggaggaggucacgaccacccucgaggagaccaaguuccugacggagaaccugcuccuguacaucgacaucaacgggaaccugcaccccgacuccgccacccucgugagcgacaucgacaucaccuuccugaagaaggacgcccccuacaucgugggcgacgucgugcaggagggcgugcugaccgccgucgugauccccacgaagaaggccgggggcaccaccgagaugcucgcgaaggcccugcgcaaggugccgaccgacaacuacaucacgaccuaccccgggcagggccugaacggguacaccgucgaggaggccaagaccgugcucaagaagugcaaguccgccuucuacauccugcccagcaucaucuccaacgagaagcaggagauccugggcaccgugagcuggaaccuccgggagaugcuggcgcacgccgaggagacgcgcaagcugaugcccgucugcguggagaccaaggccaucguguccaccauccagcggaaguacaagggcaucaagauccaggagggggucguggacuacggcgcccgcuucuacuucuacaccagcaagacgaccguggccucccugaucaacacccucaacgaccugaacgagacccuggucacgaugccgcucggguacgugacccacggccugaaccuggaggaggcggcccgguacaugcgcagccucaaggugcccgccaccgucuccgugagcucccccgacgccgugaccgccuacaacggguaccugacgagcuccagcaagacccccgaggagcacuucaucgagaccaucucccuggcgggcagcuacaaggacuggagcuacuccggccagagcacccagcucgggaucgaguuccugaagcggggcgacaaguccgucuacuacacgagcaacccgaccaccuuccaccuggacggggaggugaucaccuucgacaaccucaagacgcugcugucccuccgcgaggugcggaccaucaaggucuucaccaccguggacaacaucaaccugcacacgcagguggucgacaugagcaugaccuacggccagcaguucggccccaccuaccuggacggggccgacgugaccaagaucaagccccacaacucccacgagggcaagacguucuacgugcucccgaacgacgacacccugcgcgucgaggccuucgaguacuaccacaccaccgaccccagcuuccuggggcgguacauguccgcccucaaccacacgaagaaguggaaguacccccaggugaacggccugaccagcaucaagugggccgacaacaacugcuaccuggcgaccgcccuccugacccugcagcagaucgagcucaaguucaaccccccggcccugcaggacgccuacuaccgcgcgcgggccggggaggccgccaacuucugcgcccugauccucgcguacugcaacaagacggugggcgagcugggcgacguccgcgagaccauguccuaccuguuccagcacgccaaccucgacagcugcaagcgggugcugaacgucgugugcaagaccugcgggcagcagcagaccacccugaagggcguggaggccgucauguacauggggacgcucuccuacgagcaguucaagaagggcgugcagauccccugcaccugcgggaagcaggccaccaaguaccuggugcagcaggagagccccuucgucaugauguccgcccccccggcgcaguacgagcugaagcacggcaccuucacgugcgccagcgaguacaccggcaacuaccagugcgggcacuacaagcacaucaccuccaaggagacccucuacugcaucgacggcgcccugcugacgaagagcagcgaguacaaggggcccaucaccgacguguucuacaaggagaacuccuacaccaccacgaucaagcccgugaccuacaagcucgacggcgucgugugcaccgagaucgaccccaagcuggacaacuacuacaagaaggacaacagcuacuucaccgagcagccgaucgaccuggugcccaaccagcccuaccccaacgccuccuucgacaacuucaaguucgucugcgacaacaucaaguucgccgacgaccucaaccagcugacgggguacaagaagccggcgagccgcgagcugaaggugaccuucuuccccgaccucaacggcgacguggucgccaucgacuacaagcacuacacccccuccuucaagaagggcgccaagcugcugcacaagcccaucguguggcacgugaacaacgccaccaacaaggcgacguacaagccgaacaccuggugcauccggugccucuggagcaccaagcccgucgagaccuccaacagcuucgacgugcugaaguccgaggacgcccaggggauggacaaccuggccugcgaggaccucaagcccgugagcgaggaggucguggagaaccccacgauccagaaggacgugcuggagugcaacgucaagaccaccgagguggugggcgacaucauccugaagccggccaacaacucccucaagaucaccgaggaggucgggcacacggaccugauggccgcguacguggacaacagcucccugaccaucaagaagcccaacgagcucagccgcgugcugggccugaagacccucgccacccacgggcuggccgccgucaacuccgugcccugggacacgaucgccaacuacgcgaagccguuccugaacaagguggucagcaccaccaccaacaucgugacgcgcugccucaaccgggugugcaccaacuacaugcccuacuucuucacccugcugcuccagcugugcaccuucacccgcuccacgaacagccggaucaaggccuccaugcccaccaccaucgccaagaacaccgucaagagcgugggcaaguucugccuggaggccagcuucaacuaccucaagucccccaacuucagcaagcugaucaacaucaucaucugguuccugcuccuguccgugugccugggcagccucaucuacuccacggccgcgcuggggguccugaugagcaaccucggcaugccguccuacugcaccggguaccgcgagggcuaccugaacagcaccaacgugaccaucgccacguacugcaccggcuccauccccugcagcgugugccuguccgggcucgacagccuggacaccuaccccucccuggagaccauccagaucacgaucagcuccuucaagugggaccucaccgccuucggccuggucgccgagugguuccuggccuacauccucuucacccgguucuucuacgugcuggggcuggcggccaucaugcagcucuucuucagcuacuucgccgugcacuucaucuccaacagcuggcugauguggcugaucaucaaccugguccagauggcccccaucuccgcgauggugcgcauguacaucuucuucgccagcuucuacuacguguggaagagcuacguccacgugguggacggcugcaacuccagcaccugcaugaugugcuacaagcggaaccgcgccacgcgggucgagugcaccaccaucgugaacgggguccgccgguccuucuacguguacgccaacggcggcaagggguucugcaagcuccacaacuggaacugcgugaacugcgacaccuucugcgccggcagcacguucaucuccgacgaggucgcgcgcgaccugagccugcaguucaagcggccgaucaaccccaccgaccaguccagcuacaucguggacuccgugaccgucaagaacgggagcauccaccucuacuucgacaaggccggccagaagaccuacgagcgccacucccugagccacuucgugaaccuggacaaccuccgggccaacaacacgaaggggucccugcccaucaacgugaucgucuucgacggcaagagcaagugcgaggaguccagcgccaaguccgccagcguguacuacucccagcugaugugccagcccauccuccugcuggaccaggcgcucgugagcgacgucggcgacagcgccgagguggccgugaagauguucgacgccuacgucaacaccuucuccagcaccuucaacgugccgauggagaagcugaagacccugguggccacggcggaggccgagcucgccaagaacgucucccuggacaacgugcugagcaccuucaucuccgccgcgcgccagggguucguggacagcgacgucgagaccaaggacgugguggagugccucaagcugucccaccagagcgacaucgaggucaccggcgacuccugcaacaacuacaugcugacguacaacaagguggagaacaugaccccccgggaccucggggccugcaucgacugcagcgcccgccacaucaacgcccagguggccaagucccacaacaucgcgcugaucuggaacgucaaggacuucaugagccuguccgagcagcuccggaagcagauccgcagcgccgccaagaagaacaaccugcccuucaagcugaccugcgccaccacgcgccagguggugaacgucgugaccaccaagaucgcccucaagggcgggugaggacuagucccuguucccagagcccacuuuuuuuucuuuuuuugaaauaaaauagccugucuuucagaucucaaaggcucuuuucagagccaccaaaaaaaaaaaaaaaaaaaaaaaaaaaaaaaaaaaaaaaaaaaaaaaaaaaaaaaaaaaaaaaaaaaaaaaaaaaaaaaaaaaaaaaaaaaaaaaaaaaaa

SEQ ID NO: 19863 - RNA, 6113 nt, Artificial Sequence
  SARS-CoV-2__MT740435.1__non-structural protein 3 (NSP3) mRNA gc
aggagagucccgcagucggcguccagcggcucugcuuguucgugugugugucguugcaggccuuauucaagcuuaccauggcccccaccaaggugaccuucggcgacgacacggucaucgaggugcagggguacaagagcgugaacaucaccuucgagcuggacgagcgcaucgacaagguccucaacgagaagugcuccgccuacaccguggagcugggcaccgaggugaacgaguucgcgugcgucguggccgacgccgugaucaagacgcugcagccggucagcgagcuccugaccccccuggggaucgaccucgacgagugguccauggccaccuacuaccuguucgacgagagcggcgaguucaagcuggccucccacauguacugcagcuucuacccccccgacgaggacgaggaggagggggacugcgaggaggaggaguucgagccguccacccaguacgaguacggcacggaggacgacuaccagggcaagccccucgaguucggggcgaccagcgccgcccugcagcccgaggaggagcaggaggaggacuggcuggacgacgacucccagcagaccgugggccagcaggacgggagcgaggacaaccagaccacgaccauccagaccaucguggagguccagccccagcucgagauggagcugaccccgguggugcagacgaucgaggucaacuccuucagcggcuaccugaagcucaccgacaacguguacaucaagaacgccgacaucguggaggaggcgaagaaggucaagcccaccgugguggucaacgccgccaacguguaccugaagcacgggggcggcguggccggggcccugaacaaggcgaccaacaacgccaugcaggucgaguccgacgacuacaucgccacgaacggcccccucaagguggggggcagcugcguccuguccggccacaaccuggccaagcacugccuccacgugguggggcccaacgucaacaagggcgaggacauccagcugcugaagagcgccuacgagaacuucaaccagcacgaggugcuccuggcgccgcugcucuccgccgggaucuucggcgccgaccccauccacagccugcgggugugcgucgacaccgugcgcaccaacguguaccuggccgucuucgacaagaaccucuacgacaagcugguguccagcuuccuggagaugaagagcgagaagcagguggagcagaagaucgccgagauccccaaggaggaggucaagcccuucaucaccgaguccaagccgagcguggagcagcggaagcaggacgacaagaagaucaaggcgugcguggaggaggucacgaccacccucgaggagaccaaguuccugacggagaaccugcuccuguacaucgacaucaacgggaaccugcaccccgacuccgccacccucgugagcgacaucgacaucaccuuccugaagaaggacgcccccuacaucgugggcgacgucgugcaggagggcgugcugaccgccgucgugauccccacgaagaaggccgggggcaccaccgagaugcucgcgaaggcccugcgcaaggugccgaccgacaacuacaucacgaccuaccccgggcagggccugaacggguacaccgucgaggaggccaagaccgugcucaagaagugcaaguccgccuucuacauccugcccagcaucaucuccaacgagaagcaggagauccugggcaccgugagcuggaaccuccgggagaugcuggcgcacgccgaggagacgcgcaagcugaugcccgucugcguggagaccaaggccaucguguccaccauccagcggaaguacaagggcaucaagauccaggagggggucguggacuacggcgcccgcuucuacuucuacaccagcaagacgaccguggccucccugaucaacacccucaacgaccugaacgagacccuggucacgaugccgcucggguacgugacccacggccugaaccuggaggaggcggcccgguacaugcgcagccucaaggugcccgccaccgucuccgugagcucccccgacgccgugaccgccuacaacggguaccugacgagcuccagcaagacccccgaggagcacuucaucgagaccaucucccuggcgggcagcuacaaggacuggagcuacuccggccagagcacccagcucgggaucgaguuccugaagcggggcgacaaguccgucuacuacacgagcaacccgaccaccuuccaccuggacggggaggugaucaccuucgacaaccucaagacgcugcugucccuccgcgaggugcggaccaucaaggucuucaccaccguggacaacaucaaccugcacacgcagguggucgacaugagcaugaccuacggccagcaguucggccccaccuaccuggacggggccgacgugaccaagaucaagccccacaacucccacgagggcaagacguucuacgugcucccgaacgacgacacccugcgcgucgaggccuucgaguacuaccacaccaccgaccccagcuuccuggggcgguacauguccgcccucaaccacacgaagaaguggaaguacccccaggugaacggccugaccagcaucaagugggccgacaacaacugcuaccuggcgaccgcccuccugacccugcagcagaucgagcucaaguucaaccccccggcccugcaggacgccuacuaccgcgcgcgggccggggaggccgccaacuucugcgcccugauccucgcguacugcaacaagacggugggcgagcugggcgacguccgcgagaccauguccuaccuguuccagcacgccaaccucgacagcugcaagcgggugcugaacgucgugugcaagaccugcgggcagcagcagaccacccugaagggcguggaggccgucauguacauggggacgcucuccuacgagcaguucaagaagggcgugcagauccccugcaccugcgggaagcaggccaccaaguaccuggugcagcaggagagccccuucgucaugauguccgcccccccggcgcaguacgagcugaagcacggcaccuucacgugcgccagcgaguacaccggcaacuaccagugcgggcacuacaagcacaucaccuccaaggagacccucuacugcaucgacggcgcccugcugacgaagagcagcgaguacaaggggcccaucaccgacguguucuacaaggagaacuccuacaccaccacgaucaagcccgugaccuacaagcucgacggcgucgugugcaccgagaucgaccccaagcuggacaacuacuacaagaaggacaacagcuacuucaccgagcagccgaucgaccuggugcccaaccagcccuaccccaacgccuccuucgacaacuucaaguucgucugcgacaacaucaaguucgccgacgaccucaaccagcugacgggguacaagaagccggcgagccgcgagcugaaggugaccuucuuccccgaccucaacggcgacguggucgccaucgacuacaagcacuacacccccuccuucaagaagggcgccaagcugcugcacaagcccaucguguggcacgugaacaacgccaccaacaaggcgacguacaagccgaacaccuggugcauccggugccucuggagcaccaagcccgucgagaccuccaacagcuucgacgugcugaaguccgaggacgcccaggggauggacaaccuggccugcgaggaccucaagcccgugagcgaggaggucguggagaaccccacgauccagaaggacgugcuggagugcaacgucaagaccaccgagguggugggcgacaucauccugaagccggccaacaacucccucaagaucaccgaggaggucgggcacacggaccugauggccgcguacguggacaacagcucccugaccaucaagaagcccaacgagcucagccgcgugcugggccugaagacccucgccacccacgggcuggccgccgucaacuccgugcccugggacacgaucgccaacuacgcgaagccguuccugaacaagguggucagcaccaccaccaacaucgugacgcgcugccucaaccgggugugcaccaacuacaugcccuacuucuucacccugcugcuccagcugugcaccuucacccgcuccacgaacagccggaucaaggccuccaugcccaccaccaucgccaagaacaccgucaagagcgugggcaaguucugccuggaggccagcuucaacuaccucaagucccccaacuucagcaagcugaucaacaucaucaucugguuccugcuccuguccgugugccugggcagccucaucuacuccacggccgcgcuggggguccugaugagcaaccucggcaugccguccuacugcaccggguaccgcgagggcuaccugaacagcaccaacgugaccaucgccacguacugcaccggcuccauccccugcagcgugugccuguccgggcucgacagccuggacaccuaccccucccuggagaccauccagaucacgaucagcuccuucaagugggaccucaccgccuucggccuggucgccgagugguuccuggccuacauccucuucacccgguucuucuacgugcuggggcuggcggccaucaugcagcucuucuucagcuacuucgccgugcacuucaucuccaacagcuggcugauguggcugaucaucaaccugguccagauggcccccaucuccgcgauggugcgcauguacaucuucuucgccagcuucuacuacguguggaagagcuacguccacgugguggacggcugcaacuccagcaccugcaugaugugcuacaagcggaaccgcgccacgcgggucgagugcaccaccaucgugaacgggguccgccgguccuucuacguguacgccaacggcggcaagggguucugcaagcuccacaacuggaacugcgugaacugcgacaccuucugcgccggcagcacguucaucuccgacgaggucgcgcgcgaccugagccugcaguucaagcggccgaucaaccccaccgaccaguccagcuacaucguggacuccgugaccgucaagaacgggagcauccaccucuacuucgacaaggccggccagaagaccuacgagcgccacucccugagccacuucgugaaccuggacaaccuccgggccaacaacacgaaggggucccugcccaucaacgugaucgucuucgacggcaagagcaagugcgaggaguccagcgccaaguccgccagcguguacuacucccagcugaugugccagcccauccuccugcuggaccaggcgcucgugagcgacgucggcgacagcgccgagguggccgugaagauguucgacgccuacgucaacaccuucuccagcaccuucaacgugccgauggagaagcugaagacccugguggccacggcggaggccgagcucgccaagaacgucucccuggacaacgugcugagcaccuucaucuccgccagccgccagggguucguggacuccgacgucgagaccaaggacgugguggagugccucaagcugagccaccaguccgacaucgaggucaccggcgacagcugcaacaacuacaugcugacguacaacaagguggagaacaugaccccccgggaccucggggcgugcaucgacugcuccgcccgccacaucaacgcccagguggccaagagccacaacaucgcccugaucuggaacgucaaggacuucaugucccugagcgagcagcuccggaagcagauccgcuccgcggccaagaagaacaaccugcccuucaagcugaccugcgccaccacgcgccagguggugaacgucgugaccaccaagaucgcccucaagggcgggugaggacuagucccuguucccagagcccacuuuuuuuucuuuuuuugaaauaaaauagccugucuuucagaucucaaaggcucuuuucagagccaccaaaaaaaaaaaaaaaaaaaaaaaaaaaaaaaaaaaaaaaaaaaaaaaaaaaaaaaaaaaaaaaaaaaaaaaaaaaaaaaaaaaaaaaaaaaaaaaaaaaaa

SEQ ID NO: 19864 - RNA, 6113 nt, Artificial Sequence
  SARS-CoV-2__MT740441.1__non-structural protein 3 (NSP3) mRNA gc
aggagagucccgcagucggcguccagcggcucugcuuguucgugugugugucguugcaggccuuauucaagcuuaccauggcccccaccaaggugaccuucggcgacgacacggucaucgaggugcagggguacaagagcgugaacaucaccuucgagcuggacgagcgcaucgacaagguccucaacgagaagugcuccgccuacaccguggagcugggcaccgaggugaacgaguucgcgugcgucguggccgacgccgugaucaagacgcugcagccggucagcgagcuccugaccccccuggggaucgaccucgacgagugguccauggccaccuacuaccuguucgacgagagcggcgaguucaagcuggccucccacauguacugcagcuucuacccccccgacgaggacgaggaggagggggacugcgaggaggaggaguucgagccguccacccaguacgaguacggcacggaggacgacuaccagggcaagccccucgaguucggggcgaccagcgccgcccugcagcccgaggaggagcaggaggaggacuggcuggacgacgacucccagcagaccgugggccagcaggacgggagcgaggacaaccagaccacgaccauccagaccaucguggagguccagccccagcucgagauggagcugaccccgguggugcagacgaucgaggucaacuccuucagcggcuaccugaagcucaccgacaacguguacaucaagaacgccgacaucguggaggaggcgaagaaggucaagcccaccgugguggucaacgccgccaacguguaccugaagcacgggggcggcguggccggggcccugaacaaggcgaccaacaacgccaugcaggucgaguccgacgacuacaucgccacgaacggcccccucaagguggggggcagcugcguccuguccggccacaaccuggccaagcacugccuccacgugguggggcccaacgucaacaagggcgaggacauccagcugcugaagagcgccuacgagaacuucaaccagcacgaggugcuccuggcgccgcugcucuccgccgggaucuucggcgccgaccccauccacagccugcgggugugcgucgacaccgugcgcaccaacguguaccuggccgucuucgacaagaaccucuacgacaagcugguguccagcuuccuggagaugaagagcgagaagcagguggagcagaagaucgccgagauccccaaggaggaggucaagcccuucaucaccgaguccaagccgagcguggagcagcggaagcaggacgacaagaagaucaaggcgugcguggaggaggucacgaccacccucgaggagaccaaguuccugacggagaaccugcuccuguacaucgacaucaacgggaaccugcaccccgacuccgccacccucgugagcgacaucgacaucaccuuccugaagaaggacgcccccuacaucgugggcgacgucgugcaggagggcgugcugaccgccgucgugauccccacgaagaaggccgggggcaccaccgagaugcucgcgaaggcccugcgcaaggugccgaccgacaacuacaucacgaccuaccccgggcagggccugaacggguacaccgucgaggaggccaagaccgugcucaagaagugcaaguccgccuucuacauccugcccagcaucaucuccaacgagaagcaggagauccugggcaccgugagcuggaaccuccgggagaugcuggcgcacgccgaggagacgcgcaagcugaugcccgucugcguggagaccaaggccaucguguccaccauccagcggaaguacaagggcaucaagauccaggagggggucguggacuacggcgcccgcuucuacuucuacaccagcaagacgaccguggccucccugaucaacacccucaacgaccugaacgagacccuggucacgaugccgcucggguacgugacccacggccugaaccuggaggaggcggcccgguacaugcgcagccucaaggugcccgccaccgucuccgugagcucccccgacgccgugaccgccuacaacggguaccugacgagcuccagcaagacccccgaggagcacuucaucgagaccaucucccuggcgggcagcuacaaggacuggagcuacuccggccagagcacccagcucgggaucgaguuccugaagcggggcgacaaguccgucuacuacacgagcaacccgaccaccuuccaccuggacggggaggugaucaccuucgacaaccucaagacgcugcugucccuccgcgaggugcggaccaucaaggucuucaccaccguggacaacaucaaccugcacacgcagguggucgacaugagcaugaccuacggccagcaguucggccccaccuaccuggacggggccgacgugaccaagaucaagccccacaacucccacgagggcaagacguucuacgugcucccgaacgacgacacccugcgcgucgaggccuucgaguacuaccacaccaccgaccccagcuuccuggggcgguacauguccgcccucaaccacacgaagaaguggaaguacccccaggugaacggccugaccagcaucaagugggccgacaacaacugcuaccuggcgaccgcccuccugacccugcagcagaucgagcucaaguucaaccccccggcccugcaggacgccuacuaccgcgcgcgggccggggaggccgccaacuucugcgcccugauccucgcguacugcaacaagacggugggcgagcugggcgacguccgcgagaccauguccuaccuguuccagcacgccaaccucgacagcugcaagcgggugcugaacgucgugugcaagaccugcgggcagcagcagaccacccugaagggcguggaggccgucauguacauggggacgcucuccuacgagcaguucaagaagggcgugcagauccccugcaccugcgggaagcaggccaccaaguaccuggugcagcaggagagccccuucgucaugauguccgcccccccggcgcaguacgagcugaagcacggcaccuucacgugcgccagcgaguacaccggcaacuaccagugcgggcacuacaagcacaucaccuccaaggagacccucuacugcaucgacggcgcccugcugacgaagagcagcgaguacaaggggcccaucaccgacguguucuacaaggagaacuccuacaccaccacgaucaagcccgugaccuacaagcucgacggcgucgugugcaccgagaucgaccccaagcuggacaacuacuacaagaaggacaacagcuacuucaccgagcagccgaucgaccuggugcccaaccagcccuaccccaacgccuccuucgacaacuucaaguucgucugcgacaacaucaaguucgccgacuaccucaaccagcugacgggguacaagaagccggcgagccgcgagcugaaggugaccuucuuccccgaccucaacggcgacguggucgccaucgacuacaagcacuacacccccuccuucaagaagggcgccaagcugcugcacaagcccaucguguggcacgugaacaacgccaccaacaaggcgacguacaagccgaacaccuggugcauccggugccucuggagcaccaagcccgucgagaccuccaacagcuucgacgugcugaaguccgaggacgcccaggggauggacaaccuggccugcgaggaccucaagcccgugagcgaggaggucguggagaaccccacgauccagaaggacgugcuggagugcaacgucaagaccaccgagguggugggcgacaucauccugaagccggccaacaacucccucaagaucaccgaggaggucgggcacacggaccugauggccgcguacguggacaacagcucccugaccaucaagaagcccaacgagcucagccgcgugcugggccugaagacccucgccacccacgggcuggccgccgucaacuccgugcccugggacacgaucgccaacuacgcgaagccguuccugaacaagguggucagcaccaccaccaacaucgugacgcgcugccucaaccgggugugcaccaacuacaugcccuacuucuucacccugcugcuccagcugugcaccuucacccgcuccacgaacagccggaucaaggccuccaugcccaccaccaucgccaagaacaccgucaagagcgugggcaaguucugccuggaggccagcuucaacuaccucaagucccccaacuucagcaagcugaucaacaucaucaucugguuccugcuccuguccgugugccugggcagccucaucuacuccacggccgcgcuggggguccugaugagcaaccucggcaugccguccuacugcaccggguaccgcgagggcuaccugaacagcaccaacgugaccaucgccacguacugcaccggcuccauccccugcagcgugugccuguccgggcucgacagccuggacaccuaccccucccuggagaccauccagaucacgaucagcuccuucaagugggaccucaccgccuucggccuggucgccgagugguuccuggccuacauccucuucacccgguucuucuacgugcuggggcuggcggccaucaugcagcucuucuucagcuacuucgccgugcacuucaucuccaacagcuggcugauguggcugaucaucaaccugguccagauggcccccaucuccgcgauggugcgcauguacaucuucuucgccagcuucuacuacguguggaagagcuacguccacgugguggacggcugcaacuccagcaccugcaugaugugcuacaagcggaaccgcgccacgcgggucgagugcaccaccaucgugaacgggguccgccgguccuucuacguguacgccaacggcggcaagggguucugcaagcuccacaacuggaacugcgugaacugcgacaccuucugcgccggcagcacguucaucuccgacgaggucgcgcgcgaccugagccugcaguucaagcggccgaucaaccccaccgaccaguccagcuacaucguggacuccgugaccgucaagaacgggagcauccaccucuacuucgacaaggccggccagaagaccuacgagcgccacucccugagccacuucgugaaccuggacaaccuccgggccaacaacacgaaggggucccugcccaucaacgugaucgucuucgacggcaagagcaagugcgaggaguccagcgccaaguccgccagcguguacuacucccagcugaugugccagcccauccuccugcuggaccaggcgcucgugagcgacgucggcgacagcgccgagguggccgugaagauguucgacgccuacgucaacaccuucuccagcaccuucaacgugccgauggagaagcugaagacccugguggccacggcggaggccgagcucgccaagaacgucucccuggacaacgugcugagcaccuucaucuccgccgcgcgccagggguucguggacagcgacgucgagaccaaggacgugguggagugccucaagcugucccaccagagcgacaucgaggucaccggcgacuccugcaacaacuacaugcugacguacaacaagguggagaacaugaccccccgggaccucggggccugcaucgacugcagcgcccgccacaucaacgcccagguggccaagucccacaacaucgcgcugaucuggaacgucaaggacuucaugagccuguccgagcagcuccggaagcagauccgcagcgccgccaagaagaacaaccugcccuucaagcugaccugcgccaccacgcgccagguggugaacgucgugaccaccaagaucgcccucaagggcgggugaggacuagucccuguucccagagcccacuuuuuuuucuuuuuuugaaauaaaauagccugucuuucagaucucaaaggcucuuuucagagccaccaaaaaaaaaaaaaaaaaaaaaaaaaaaaaaaaaaaaaaaaaaaaaaaaaaaaaaaaaaaaaaaaaaaaaaaaaaaaaaaaaaaaaaaaaaaaaaaaaaaaa

SEQ ID NO: 19865 - RNA, 6113 nt, Artificial Sequence
  SARS-CoV-2__MT740483.1__non-structural protein 3 (NSP3) mRNA gc
aggagagucccgcagucggcguccagcggcucugcuuguucgugugugugucguugcaggccuuauucaagcuuaccauggcccccaccaaggugaccuucggcgacgacacggucaucgaggugcagggguacaagagcgugaacaucaccuucgagcuggacgagcgcaucgacaagguccucaacgagaagugcuccgccuacaccguggagcugggcaccgaggugaacgaguucgcgugcgucguggccgacgccgugaucaagacgcugcagccggucagcgagcuccugaccccccuggggaucgaccucgacgagugguccauggccaccuacuaccuguucgacgagagcggcgaguucaagcuggccucccacauguacugcagcuucuacccccccgacgaggacgaggaggagggggacugcgaggaggaggaguucgagccguccacccaguacgaguacggcacggaggacgacuaccagggcaagccccucgaguucggggcgaccagcgccgcccugcagcccgaggaggagcaggaggaggacuggcuggacgacgacucccagcagaccgugggccagcaggacgggagcgaggacaaccagaccacgaccauccagaccaucguggagguccagccccagcucgagauggagcugaccccgguggugcagacgaucgaggucaacuccuucagcggcuaccugaagcucaccgacaacguguacaucaagaacgccgacaucguggaggaggcgaagaaggucaagcccaccgugguggucaacgccgccaacguguaccugaagcacgggggcggcguggccggggcccugaacaaggcgaccaacaacgccaugcaggucgaguccgacgacuacaucgccacgaacggcccccucaagguggggggcagcugcguccuguccggccacaaccuggccaagcacugccuccacgugguggggcccaacgucaacaagggcgaggacauccagcugcugaagagcgccuacgagaacuucaaccagcacgaggugcuccuggcgccgcugcucuccgccgggaucuucggcgccgaccccauccacagccugcgggugugcgucgacaccgugcgcaccaacguguaccuggccgucuucgacaagaaccucuacgacaagcugguguccagcuuccuggagaugaagagcgagaagcagguggagcagaagaucgccgagauccccaaggaggaggucaagcccuucaucaccgaguccaagccgagcguggagcagcggaagcaggacgacaagaagaucaaggcgugcguggaggaggucacgaccacccucgaggagaccaaguuccugacggagaaccugcuccuguacaucgacaucaacgggaaccugcaccccgacuccgccacccucgugagcgacaucgacaucaccuuccugaagaaggacgcccccuacaucgugggcgacgucgugcaggagggcgugcugaccgccgucgugauccccacgaagaaggccgggggcaccaccgagaugcucgcgaaggcccugcgcaaggugccgaccgacaacuacaucacgaccuaccccgggcagggccugaacggguacaccgucgaggaggccaagaccgugcucaagaagugcaaguccgccuucuacauccugcccagcaucaucuccaacgagaagcaggagauccugggcaccgugagcuggaaccuccgggagaugcuggcgcacgccgaggagacgcgcaagcugaugcccgucugcguggagaccaaggccaucguguccaccauccagcggaaguacaagggcaucaagauccaggagggggucguggacuacggcgcccgcuucuacuucuacaccagcaagacgaccguggccucccugaucaacacccucaacgaccugaacgagacccuggucacgaugccgcucggguacgugacccacggccugaaccuggaggaggcggcccgguacaugcgcagccucaaggugcccgccaccgucuccgugagcucccccgacgccgugaccgccuacaacggguaccugacgagcuccagcaagacccccgaggagcacuucaucgagaccaucucccuggcgggcagcuacaaggacuggagcuacuccggccagagcacccagcucgggaucgaguuccugaagcggggcgacaaguccgucuacuacacgagcaacccgaccaccuuccaccuggacggggaggugaucaccuucgacaaccucaagacgcugcugucccuccgcgaggugcggaccaucaaggucuucaccaccguggacaacaucaaccugcacacgcagguggucgacaugagcaugaccuacggccagcaguucggccccaccuaccuggacggggccgacgugaccaagaucaagccccacaacucccacgagggcaagacguucuacgugcucccgaacgacgacacccugcgcgucgaggccuucgaguacuaccacaccaccgaccccagcuuccuggggcgguacauguccgcccucaaccacacgaagaaguggaaguacccccaggugaacggccugaccagcaucaagugggccgacaacaacugcuaccuggcgaccgcccuccugacccugcagcagaucgagcucaaguucaaccccccggcccugcaggacgccuacuaccgcgcgcgggccggggaggccgccaacuucugcgcccugauccucgcguacugcaacaagacggugggcgagcugggcgacguccgcgagaccauguccuaccuguuccagcacgccaaccucgacagcugcaagcgggugcugaacgucgugugcaagaccugcgggcagcagcagaccacccugaagggcguggaggccgucauguacauggggacgcucuccuacgagcaguucaagaagggcgugcagauccccugcaccugcgggaagcaggccaccaaguaccuggugcagcaggagagccccuucgucaugauguccgcccccccggcgcaguacgagcugaagcacggcaccuucacgugcgccagcgaguacaccggcaacuaccagugcgggcacuacaagcacaucaccuccaaggagacccucuacugcaucgacggcgcccugcugacgaagagcagcgaguacaaggggcccaucaccgacguguucuacaaggagaacuccuacaccaccacgaucaagcccgugaccuacaagcucgacggcgucgugugcaccgagaucgaccccaagcuggacaacuacuacaagaaggacaacagcuacuucaccgagcagccgaucgaccuggugcccaaccagcccuaccccaacgccuccuucgacaacuucaaguucgucugcgacaacaucaaguucgccgacgaccucaaccaccugacgggguacaagaagccggcgagccgcgagcugaaggugaccuucuuccccgaccucaacggcgacguggucgccaucgacuacaagcacuacacccccuccuucaagaagggcgccaagcugcugcacaagcccaucguguggcacgugaacaacgccaccaacaaggcgacguacaagccgaacaccuggugcauccggugccucuggagcaccaagcccgucgagaccuccaacagcuucgacgugcugaaguccgaggacgcccaggggauggacaaccuggccugcgaggaccucaagcccgugagcgaggaggucguggagaaccccacgauccagaaggacgugcuggagugcaacgucaagaccaccgagguggugggcgacaucauccugaagccggccaacaacucccucaagaucaccgaggaggucgggcacacggaccugauggccgcguacguggacaacagcucccugaccaucaagaagcccaacgagcucagccgcgugcugggccugaagacccucgccacccacgggcuggccgccgucaacuccgugcccugggacacgaucgccaacuacgcgaagccguuccugaacaagguggucagcaccaccaccaacaucgugacgcgcugccucaaccgggugugcaccaacuacaugcccuacuucuucacccugcugcuccagcugugcaccuucacccgcuccacgaacagccggaucaaggccuccaugcccaccaccaucgccaagaacaccgucaagagcgugggcaaguucugccuggaggccagcuucaacuaccucaagucccccaacuucagcaagcugaucaacaucaucaucugguuccugcuccuguccgugugccugggcagccucaucuacuccacggccgcgcuggggguccugaugagcaaccucggcaugccguccuacugcaccggguaccgcgagggcuaccugaacagcaccaacgugaccaucgccacguacugcaccggcuccauccccugcagcgugugccuguccgggcucgacagccuggacaccuaccccucccuggagaccauccagaucacgaucagcuccuucaagugggaccucaccgccuucggccuggucgccgagugguuccuggccuacauccucuucacccgguucuucuacgugcuggggcuggcggccaucaugcagcucuucuucagcuacuucgccgugcacuucaucuccaacagcuggcugauguggcugaucaucaaccugguccagauggcccccaucuccgcgauggugcgcauguacaucuucuucgccagcuucuacuacguguggaagagcuacguccacgugguggacggcugcaacuccagcaccugcaugaugugcuacaagcggaaccgcgccacgcgggucgagugcaccaccaucgugaacgggguccgccgguccuucuacguguacgccaacggcggcaagggguucugcaagcuccacaacuggaacugcgugaacugcgacaccuucugcgccggcagcacguucaucuccgacgaggucgcgcgcgaccugagccugcaguucaagcggccgaucaaccccaccgaccaguccagcuacaucguggacuccgugaccgucaagaacgggagcauccaccucuacuucgacaaggccggccagaagaccuacgagcgccacucccugagccacuucgugaaccuggacaaccuccgggccaacaacacgaaggggucccugcccaucaacgugaucgucuucgacggcaagagcaagugcgaggaguccagcgccaaguccgccagcguguacuacucccagcugaugugccagcccauccuccugcuggaccaggcgcucgugagcgacgucggcgacagcgccgagguggccgugaagauguucgacgccuacgucaacaccuucuccagcaccuucaacgugccgauggagaagcugaagacccugguggccacggcggaggccgagcucgccaagaacgucucccuggacaacgugcugagcaccuucaucuccgccgcgcgccagggguucguggacagcgacgucgagaccaaggacgugguggagugccucaagcugucccaccagagcgacaucgaggucaccggcgacuccugcaacaacuacaugcugacguacaacaagguggagaacaugaccccccgggaccucggggccugcaucgacugcagcgcccgccacaucaacgcccagguggccaagucccacaacaucgcgcugaucuggaacgucaaggacuucaugagccuguccgagcagcuccggaagcagauccgcagcgccgccaagaagaacaaccugcccuucaagcugaccugcgccaccacgcgccagguggugaacgucgugaccaccaagaucgcccucaagggcgggugaggacuagucccuguucccagagcccacuuuuuuuucuuuuuuugaaauaaaauagccugucuuucagaucucaaaggcucuuuucagagccaccaaaaaaaaaaaaaaaaaaaaaaaaaaaaaaaaaaaaaaaaaaaaaaaaaaaaaaaaaaaaaaaaaaaaaaaaaaaaaaaaaaaaaaaaaaaaaaaaaaaaa

SEQ ID NO: 19866 - RNA, 6113 nt, Artificial Sequence
  SARS-CoV-2__MT742091.1__non-structural protein 3 (NSP3) mRNA gc
aggagagucccgcagucggcguccagcggcucugcuuguucgugugugugucguugcaggccuuauucaagcuuaccauggcccccaccaaggugaccuucggcgacgacacggucaucgaggugcagggguacaagagcgugaacaucaccuucgagcuggacgagcgcaucgacaagguccucaacgagaagugcuccgccuacaccguggagcugggcaccgaggugaacgaguucgcgugcgucguggccgacgccgugaucaagacgcugcagccggucagcgagcuccugaccccccuggggaucgaccucgacgagugguccauggccaccuacuaccuguucgacgagagcggcgaguucaagcuggccucccacauguacugcagcuucuacccccccgacgaggacgaggaggagggggacugcgaggaggaggaguucgagccguccacccaguacgaguacggcacggaggacgacuaccagggcaagccccucgaguucggggcgaccagcgccgcccugcagcccgaggaggagcaggaggaggacuggcuggacgacgacucccagcagaccgugggccagcaggacgggagcgaggacaaccagaccacgaccauccagaccaucguggagguccagccccagcucgagauggagcugaccccgguggugcagacgaucgaggucaacuccuucagcggcuaccugaagcucaccgacaacguguacaucaagaacgccgacaucguggaggaggcgaagaaggucaagcccaccgugguggucaacgccgccaacguguaccugaagcacgggggcggcguggccggggcccugaacaaggcgaccaacaacgccaugcaggucgaguccgacgacuacaucgccacgaacggcccccucaagguggggggcagcugcguccuguccggccacaaccuggccaagcacugccuccacgugguggggcccaacgucaacaagggcgaggacauccagcugcugaagagcgccuacgagaacuucaaccagcacgaggugcuccuggcgccgcugcucuccgccgggaucuucggcgccgaccccauccacagccugcgggugugcgucgacaccgugcgcaccaacguguaccuggccgucuucgacaagaaccucuacgacaagcugguguccagcuuccuggagaugaagagcgagaagcagguggagcagaagaucgccgagauccccaaggaggaggucaagcccuucaucaccgaguccaagccgagcguggagcagcggaagcaggacgacaagaagaucaaggcgugcguggaggaggucacgaccacccucgaggagaccaaguuccugacggagaaccugcuccuguacaucgacaucaacgggaaccugcaccccgacuccgccacccucgugagcgacaucgacaucaccuuccugaagaaggacgcccccuacaucgugggcgacgucgugcaggagggcgugcugaccgccgucgugauccccacgaagaaggccgggggcaccaccgagaugcucgcgaaggcccugcgcaaggugccgaccgacaacuacaucacgaccuaccccgggcagggccugaacggguacaccgucgaggaggccaagaccgugcucaagaagugcaaguccgccuucuacauccugcccagcaucaucuccaacgagaagcaggagauccugggcaccgugagcuggaaccuccgggagaugcuggcgcacgccgaggagacgcgcaagcugaugcccgucugcguggagaccaaggccaucguguccaccauccagcggaaguacaagggcaucaagauccaggagggggucguggacuacggcgcccgcuucuacuucuacaccagcaagacgaccguggccucccugaucaacacccucaacgaccugaacgagacccuggucacgaugccgcucggguacgugacccacggccugaaccuggaggaggcggcccgguacaugcgcagccucaaggugcccgccaccgucuccgugagcucccccgacgccgugaccgccuacaacggguaccugacgagcuccagcaagacccccgaggagcacuucaucgagaccaucucccuggcgggcagcuacaaggacuggagcuacuccggccagagcacccagcucgggaucgaguuccugaagcggggcgacaaguccgucuacuacacgagcaacccgaccaccuuccaccuggacggggaggugaucaccuucgacaaccucaagacgcugcugucccuccgcgaggugcggaccaucaaggucuucaccaccguggacaacaucaaccugcacacgcagguggucgacaugagcaugaccuacggccagcaguucggccccaccuaccuggacggggccgacgugaccaagaucaagccccacaacucccacgagggcaagacguucuacgugcucccgaacgacgacacccugcgcgucgaggccuucgaguacuaccacaccaccgaccccagcuuccuggggcgguacauguccgcccucaaccacacgaagaaguggaaguacccccaggugaacggccugaccagcaucaagugggccgacaacaacugcuaccuggcgaccgcccuccugacccugcagcagaucgagcucaaguucaaccccccggcccugcaggacgccuacuaccgcgcgcgggccggggaggccgccaacuucugcgcccugauccucgcguacugcaacaagacggugggcgagcugggcgacguccgcgagaccauguccuaccuguuccagcacgccaaccucgacagcugcaagcgggugcugaacgucgugugcaagaccugcgggcagcagcagaccacccugaagggcguggaggccgucauguacauggggacgcucuccuacgagcaguucaagaagggcgugcagauccccugcaccugcgggaagcaggccaccaaguaccuggugcagcaggagagccccuucgucaugauguccgcccccccggcgcaguacgagcugaagcacggcaccuucacgugcgccagcgaguacaccggcaacuaccagugcgggcacuacaagcacaucaccuccaaggagacccucuacugcaucgacggcgcccugcugacgaagagcagcgaguacaaggggcccaucaccgacguguucuacaaggagaacuccuacaccaccacgaucaagcccgugaccuacaagcucgacggcgucgugugcaccgagaucgaccccaagcuggacaacuacuacaagaaggacaacagcuacuucaccgagcagccgaucgaccuggugcccaaccagcccuaccccaacgccuccuucgacaacuucaaguucgucugcgacaacaucaaguucgccgacgaccucaaccagcugacgggguacaagaagccggcgagccgcgagcugaaggugaccuucuuccccgaccucaacggcgacguggucgccaucgacuacaagcacuacacccccuccuucaagaagggcgccaagcugcugcacaagcccaucguguggcacgugaacaacgccaccaacaaggcgacguacaagccgaacaccuggugcauccggugccucuggagcaccaagcccgucgagaccuccaacagcuucgacgugcugaaguccgaggacgcccaggggauggacaaccuggccugcgaggaccucaagcccgugagcgaggaggucguggagaaccccacgauccagaaggacgugcuggagugcaacgucaagaccaccgagguggugggcgacaucauccugaagccggccaacaacucccucaagaucaccgaggaggucgggcacacggaccugauggccgcguacguggacaacagcucccugaccaucaagaagcccaacgagcucagccgcgugcugggccugaagacccucgccacccacgggcuggccgccgucaacuccgugcccugggacacgaucgccaacuacgcgaagccguuccugaacaagguggucagcaccaccaccaacaucgugacgcgcugccucaaccgggugugcaccaacuacaugcccuacuucuucacccugcugcuccagcugugcaccuucacccgcuccacgaacagccggaucaaggccuccaugcccaccaccaucgccaagaacagcgucaagagcgugggcaaguucugccuggaggccuccuucaacuaccucaagagccccaacuucuccaagcugaucaacaucaucaucugguuccugcuccugagcgugugccugggcucccucaucuacagcaccgccgcgcuggggguccugauguccaaccucggcaugccgagcuacugcacgggguaccgcgagggcuaccugaacuccaccaacgugaccaucgccaccuacugcacgggcagcauccccugcuccgugugccugagcgggcucgacucccuggacaccuaccccagccuggagaccauccagaucaccaucuccagcuucaagugggaccucacggccuucggccuggucgccgagugguuccuggccuacauccucuucacccgguucuucuacgugcuggggcuggcggccaucaugcagcucuucuucuccuacuucgccgugcacuucaucagcaacuccuggcugauguggcugaucaucaaccugguccagauggcccccaucagcgcgauggugcgcauguacaucuucuucgccagcuucuacuacguguggaaguccuacguccacgugguggacggcugcaacagcuccaccugcaugaugugcuacaagcggaaccgcgccacccgggucgagugcacgaccaucgugaacgggguccgccggagcuucuacguguacgccaacggcggcaagggguucugcaagcuccacaacuggaacugcgugaacugcgacaccuucugcgccggcuccaccuucaucagcgacgaggucgcgcgcgaccugucccugcaguucaagcggccgaucaaccccacggaccagagcuccuacaucguggacagcgugaccgucaagaacggguccauccaccucuacuucgacaaggccggccagaagaccuacgagcgccacagccugucccacuucgugaaccuggacaaccuccgggccaacaacaccaaggggagccugcccaucaacgugaucgucuucgacggcaaguccaagugcgaggagagcuccgccaagagcgccuccguguacuacagccagcugaugugccagcccauccuccugcuggaccaggcgcucgugagcgacgucggcgacuccgccgagguggccgugaagauguucgacgccuacgucaacacguucagcuccaccuucaacgugccgauggagaagcugaagacccugguggccaccgcggaggccgagcucgccaagaacgucagccuggacaacgugcuguccacguucaucagcgccgcgcgccagggguucguggacuccgacgucgagaccaaggacgugguggagugccucaagcugagccaccaguccgacaucgaggucaccggcgacagcugcaacaacuacaugcugaccuacaacaagguggagaacaugacgccccgggaccucggggccugcaucgacugcuccgcccgccacaucaacgcccagguggccaagagccacaacaucgcgcugaucuggaacgucaaggacuucaugucccugagcgagcagcuccggaagcagauccgcuccgccgccaagaagaacaaccugcccuucaagcugaccugcgccaccacccgccagguggugaacgucgugacgaccaagaucgcccucaagggcgggugaggacuagucccuguucccagagcccacuuuuuuuucuuuuuuugaaauaaaauagccugucuuucagaucucaaaggcucuuuucagagccaccaaaaaaaaaaaaaaaaaaaaaaaaaaaaaaaaaaaaaaaaaaaaaaaaaaaaaaaaaaaaaaaaaaaaaaaaaaaaaaaaaaaaaaaaaaaaaaaaaaaaa

SEQ ID NO: 19867 - RNA, 6113 nt, Artificial Sequence
  SARS-CoV-2__MT734055.1__non-structural protein 3 (NSP3) mRNA gc
aggagagucccgcagucggcguccagcggcucugcuuguucgugugugugucguugcaggccuuauucaagcuuaccauggcccccaccaaggugaccuucggcgacgacacggucaucgaggugcagggguacaagagcgugaacaucaccuucgagcuggacgagcgcaucgacaagguccucaacgagaagugcuccgccuacaccguggagcugggcaccgaggugaacgaguucgcgugcgucguggccgacgccgugaucaagacgcugcagccggucagcgagcuccugaccccccuggggaucgaccucgacgagugguccauggccaccuacuaccuguucgacgagagcggcgaguucaagcuggccucccacauguacugcagcuucuacccccccgacgaggacgaggaggagggggacugcgaggaggaggaguucgagccguccacccaguacgaguacggcacggaggacgacuaccagggcaagccccucgaguucggggcgaccagcgccgcccugcagcccgaggaggagcaggaggaggacuggcuggacgacgacucccagcagaccgugggccagcaggacgggagcgaggacaaccagaccacgaccauccagaccaucguggagguccagccccagcucgagauggagcugaccccgguggugcagacgaucgaggucaacuccuucagcggcuaccugaagcucaccgacaacguguacaucaagaacgccgacaucguggaggaggcgaagaaggucaagcccaccgugguggucaacgccgccaacguguaccugaagcacgggggcggcguggccggggcccugaacaaggcgaccaacaacgccaugcaggucgaguccgacgacuacaucgccacgaacggcccccucaagguggggggcagcugcguccuguccggccacaaccuggccaagcacugccuccacgugguggggcccaacgucaacaagggcgaggacauccagcugcugaagagcgccuacgagaacuucaaccagcacgaggugcuccuggcgccgcugcucuccgccgggaucuucggcgccgaccccauccacagccugcgggugugcgucgacaccgugcgcaccaacguguaccuggccgucuucgacaagaaccucuacgacaagcugguguccagcuuccuggagaugaagagcgagaagcagguggagcagaagaucgccgagauccccaaggaggaggucaagcccuucaucaccgaguccaagccgagcguggagcagcggaagcaggacgacaagaagaucaaggcgugcguggaggaggucacgaccacccucgaggagaccaaguuccugacggagaaccugcuccuguacaucgacaucaacgggaaccugcaccccgacuccgccacccucgugagcgacaucgacaucaccuuccugaagaaggacgcccccuacaucgugggcgacgucgugcaggagggcgugcugaccgccgucgugauccccacgaagaaggccgggggcaccaccgagaugcucgcgaaggcccugcgcaaggugccgaccgacaacuacaucacgaccuaccccgggcagggccugaacggguacaccgucgaggaggccaagaccgugcucaagaagugcaaguccgccuucuacauccugcccagcaucaucuccaacgagaagcaggagauccugggcaccgugagcuggaaccuccgggagaugcuggcgcacgccgaggagacgcgcaagcugaugcccgucugcguggagaccaaggccaucguguccaccauccagcggaaguacaagggcaucaagauccaggagggggucguggacuacggcgcccgcuucuacuucuacaccagcaagacgaccguggccucccugaucaacacccucaacgaccugaacgagacccuggucacgaugccgcucggguacgugacccacggccugaaccuggaggaggcggcccgguacaugcgcagccucaaggugcccgccaccgucuccgugagcucccccgacgccgugaccgccuacaacggguaccugacgagcuccagcaagacccccgaggagcacuucaucgagaccaucucccuggcgggcagcuacaaggacuggagcuacuccggccagagcacccagcucgggaucgaguuccugaagcggggcgacaaguccgucuacuacacgagcaacccgaccaccuuccaccuggacggggaggugaucaccuucgacaaccucaagacgcugcugucccuccgcgaggugcggaccaucaaggucuucaccaccguggacaacaucaaccugcacacgcagguggucgacaugagcaugaccuacggccagcaguucggccccaccuaccuggacggggccgacgugaccaagaucaagccccacaacucccacgagggcaagacguucuacgugcucccgaacgacgacacccugcgcgucgaggccuucgaguacuaccacaccaccgaccccagcuuccuggggcgguacauguccgcccucaaccacacgaagaaguggaaguacccccaggugaacggccugaccagcaucaagugggccgacaacaacugcuaccuggcgaccgcccuccugacccugcagcagaucgagcucaaguucaaccccccggcccugcaggacgccuacuaccgcgcgcgggccggggaggccgccaacuucugcgcccugauccucgcguacugcaacaagacggugggcgagcugggcgacguccgcgagaccauguccuaccuguuccagcacgccaaccucgacagcugcaagcgggugcugaacgucgugugcaagaccugcgggcagcagcagaccacccugaagggcguggaggccgucauguacauggggacgcucuccuacgagcaguucaagaagggcgugcagauccccugcaccugcgggaagcaggccaccaaguaccuggugcagcaggagagccccuucgucaugauguccgcccccccggcgcaguacgagcugaagcacggcaccuucacgugcgccagcgaguacaccggcaacuaccagugcgggcacuacaagcacaucaccuccaaggagacccucuacugcaucgacggcgcccugcugacgaagagcagcgaguacaaggggcccaucaccgacguguucuacaaggagaacuccuacaccaccacgaucaagcccgugaccuacaagcucgacggcgucgugugcaccgagaucgaccccaagcuggacaacuacuacaagaaggacaacagcuacuucaccgagcagccgaucgaccuggugcccaaccagcccuaccccaacgccuccuucgacaacuucaaguucgucugcgacaacaucaaguucgccgacgaccucaaccagcugacgggguacaagaagccggcgagccgcgagcugaaggugaccuucuuccccgaccucaacggcgacguggucgccaucgacuacaagcacuacacccccuccuucaagaagggcgccaagcugcugcacaagcccaucguguggcacgugaacaacgccaccaacaaggcgacguacaagccgaacaccuggugcauccggugccucuggagcaccaagcccgucgagaccuccaacagcuucgacgugcugaaguccgaggacgcccaggggauggacaaccuggccugcgaggaccucaagcccgugagcgaggaggucguggagaaccccacgauccagaaggacgugcuggagugcaacgucaagaccaccgagguggugggcgacaucauccugaagccggccaacaacucccucaagaucaccgaggaggucgggcacacggaccugauggccgcguacguggacaacagcucccugaccaucaagaagcccaacgagcucagccgcgugcugggccugaagacccucgccacccacgggcuggccgccgucaacuccgugcccugggacacgaucgccaacuacgcgaagccguuccugaacaagguggucagcaccaccaccaacaucgugacgcgcugccucaaccgggugugcaccaacuacaugcccuacuucuucacccugcugcuccagcugugcaccuucacccgcuccacgaacagccggaucaaggccuccaugcccaccaccaucgccaagaacaccgucaagagcgugggcaaguucugccuggaggccagcuucaacuaccucaagucccccaacuucagcaagcugaucaacaucaucaucugguuccugcuccuguccgugugccugggcagccucaucuacuccacggccgcgcuggggguccugaugagcaaccucggcaugccguccuacugcaccggguaccgcgagggcuaccugaacagcaccaacgugaccaucgccacguacugcaccggcuccauccccugcagcgugugccuguccgggcucgacagccuggacaccuaccccucccuggagaccauccagaucacgaucagcuccuucaagugggaccucaccgucuucggccugguggccgagugguuccuggccuacauccucuucacccgguucuucuacgugcuggggcuggccgcgaucaugcagcucuucuucagcuacuucgccguccacuucaucuccaacagcuggcugauguggcugaucaucaaccuggugcagauggcccccaucuccgccauggugcgcauguacaucuucuucgcgagcuucuacuacgucuggaagagcuacgugcacguggucgacggcugcaacuccagcaccugcaugaugugcuacaagcggaaccgcgccacgcggguggagugcaccaccaucgucaacggggugcgccgguccuucuacguguacgccaacggcggcaagggguucugcaagcuccacaacuggaacugcgucaacugcgacaccuucugcgccggcagcacguucaucuccgacgagguggcccgcgaccugagccugcaguucaagcggccgaucaaccccaccgaccaguccagcuacaucguggacuccgucaccgugaagaacgggagcauccaccucuacuucgacaaggcgggccagaagaccuacgagcgccacucccugagccacuucgugaaccuggacaaccuccgggccaacaacacgaaggggucccugcccaucaacgucaucguguucgacggcaagagcaagugcgaggaguccagcgccaaguccgccagcguguacuacucccagcugaugugccagcccauccuccugcuggaccaggcccucgucagcgacgugggcgacagcgcggagguggccgucaagauguucgacgccuacgugaacaccuucuccagcaccuucaacgugccgauggagaagcugaagacccuggucgccacggccgaggcggagcucgccaagaacgugucccuggacaacgugcugagcaccuucaucuccgccgcccgccagggguucgucgacagcgacguggagaccaaggacguggucgagugccucaagcugucccaccagagcgacaucgaggugaccggcgacuccugcaacaacuacaugcugacguacaacaagguggagaacaugaccccccgggaccucggggcgugcaucgacugcagcgcccgccacaucaacgcccaggucgccaagucccacaacaucgcccugaucuggaacgugaaggacuucaugagccuguccgagcagcuccggaagcagauccgcagcgcggccaagaagaacaaccugcccuucaagcugaccugcgccaccacgcgccagguggucaacguggugaccaccaagaucgcccucaagggcgggugaggacuagucccuguucccagagcccacuuuuuuuucuuuuuuugaaauaaaauagccugucuuucagaucucaaaggcucuuuucagagccaccaaaaaaaaaaaaaaaaaaaaaaaaaaaaaaaaaaaaaaaaaaaaaaaaaaaaaaaaaaaaaaaaaaaaaaaaaaaaaaaaaaaaaaaaaaaaaaaaaaaaa

SEQ ID NO: 19868 - RNA, 6113 nt, Artificial Sequence
  SARS-CoV-2__MT730002.1__non-structural protein 3 (NSP3) mRNA gc
aggagagucccgcagucggcguccagcggcucugcuuguucgugugugugucguugcaggccuuauucaagcuuaccauggcccccaccaaggugaccuucggcgacgacacggucaucgaggugcagggguacaagagcgugaacaucaccuucgagcuggacgagcgcaucgacaagguccucaacgagaagugcuccgccuacaccguggagcugggcaccgaggugaacgaguucgcgugcgucguggccgacgccgugaucaagacgcugcagccggucagcgagcuccugaccccccuggggaucgaccucgacgagugguccauggccaccuacuaccuguucgacgagagcggcgaguucaagcuggccucccacauguacugcagcuucuacccccccgacgaggacgaggaggagggggacugcgaggaggaggaguucgagccguccacccaguacgaguacggcacggaggacgacuaccagggcaagccccucgaguucggggcgaccagcgccgcccugcagcccgaggaggagcaggaggaggacuggcuggacgacgacucccagcagaccgugggccagcaggacgggagcgaggacaaccagaccacgaccauccagaccaucguggagguccagccccagcucgagauggagcugaccccgguggugcagacgaucgaggucaacuccuucagcggcuaccugaagcucaccgacaacguguacaucaagaacgccgacaucguggaggaggcgaagaaggucaagcccaccgugguggucaacgccgccaacguguaccugaagcacgggggcggcguggccggggcccugaacaaggcgaccaacaacgccaugcaggucgaguccgacgacuacaucgccacgaacggcccccucaagguggggggcagcugcguccuguccggccacaaccuggccaagcacugccuccacgugguggggcccaacgucaacaagggcgaggacauccagcugcugaagagcgccuacgagaacuucaaccagcacgaggugcuccuggcgccgcugcucuccgccgggaucuucggcgccgaccccauccacagccugcgggugugcgucgacaccgugcgcaccaacguguaccuggccgucuucgacaagaaccucuacgacaagcugguguccagcuuccuggagaugaagagcgagaagcagguggagcagaagaucgccgagauccccaaggaggaggucaagcccuucaucaccgaguccaagccgagcguggagcagcggaagcaggacgacaagaagaucaaggcgugcguggaggaggucacgaccacccucgaggagaccaaguuccugacggagaaccugcuccuguacaucgacaucaacgggaaccugcaccccgacuccgccacccucgugagcgacaucgacaucaccuuccugaagaaggacgcccccuacaucgugggcgacgucgugcaggagggcgugcugaccgccgucgugauccccacgaagaaggccgggggcaccaccgagaugcucgcgaaggcccugcgcaaggugccgaccgacaacuacaucacgaccuaccccgggcagggccugaacggguacaccgucgaggaggccaagaccgugcucaagaagugcaaguccgccuucuacauccugcccagcaucaucuccaacgagaagcaggagauccugggcaccgugagcuggaaccuccgggagaugcuggcgcacgccgaggagacgcgcaagcugaugcccgucugcguggagaccaaggccaucguguccaccauccagcggaaguacaagggcaucaagauccaggagggggucguggacuacggcgcccgcuucuacuucuacaccagcaagacgaccguggccucccugaucaacacccucaacgaccugaacgagacccuggucacgaugccgcucggguacgugacccacggccugaaccuggaggaggcggcccgguacaugcgcagccucaaggugcccgccaccgucuccgugagcucccccgacgccgugaccgccuacaacggguaccugacgagcuccagcaagacccccgaggagcacuucaucgagaccaucucccuggcgggcagcuacaaggacuggagcuacuccggccagagcacccagcucgggaucgaguuccugaagcggggcgacaaguccgucuacuacacgagcaacccgaccaccuuccaccuggacggggaggugaucaccuucgacaaccucaagacgcugcugucccuccgcgaggugcggaccaucaaggucuucaccaccguggacaacaucaaccugcacacgcagguggucgacaugagcaugaccuacggccagcaguucggccccaccuaccuggacggggccgacgugaccaagaucaagccccacaacucccacgagggcaagacguucuacgugcucccgaacgacgacacccugcgcgucgaggccuucgaguacuaccacaccaccgaccccagcuuccuggggcgguacauguccgcccucaaccacacgaagaaguggaaguacccccaggugaacggccugaccagcaucaagugggccgacaacaacugcuaccuggcgaccgcccuccugacccugcagcagaucgagcucaaguucaaccccccggcccugcaggacgccuacuaccgcgcgcgggccggggaggccgccaacuucugcgcccugauccucgcguacugcaacaagacggugggcgagcugggcgacguccgcgagaccauguccuaccuguuccagcacgccaaccucgacagcugcaagcgggugcugaacgucgugugcaagaccugcgggcagcagcagaccacccugaagggcguggaggccgucaucuacauggggacgcucuccuacgagcaguucaagaagggcgugcagauccccugcaccugcgggaagcaggccaccaaguaccuggugcagcaggagagccccuucgucaugauguccgcccccccggcgcaguacgagcugaagcacggcaccuucacgugcgccagcgaguacaccggcaacuaccagugcgggcacuacaagcacaucaccuccaaggagacccucuacugcaucgacggcgcccugcugacgaagagcagcgaguacaaggggcccaucaccgacguguucuacaaggagaacuccuacaccaccacgaucaagcccgugaccuacaagcucgacggcgucgugugcaccgagaucgaccccaagcuggacaacuacuacaagaaggacaacagcuacuucaccgagcagccgaucgaccuggugcccaaccagcccuaccccaacgccuccuucgacaacuucaaguucgucugcgacaacaucaaguucgccgacgaccucaaccagcugacgggguacaagaagccggcgagccgcgagcugaaggugaccuucuuccccgaccucaacggcgacguggucgccaucgacuacaagcacuacacccccuccuucaagaagggcgccaagcugcugcacaagcccaucguguggcacgugaacaacgccaccaacaaggcgacguacaagccgaacaccuggugcauccggugccucuggagcaccaagcccgucgagaccuccaacagcuucgacgugcugaaguccgaggacgcccaggggauggacaaccuggccugcgaggaccucaagcccgugagcgaggaggucguggagaaccccacgauccagaaggacgugcuggagugcaacgucaagaccaccgagguggugggcgacaucauccugaagccggccaacaacucccucaagaucaccgaggaggucgggcacacggaccugauggccgcguacguggacaacagcucccugaccaucaagaagcccaacgagcucagccgcgugcugggccugaagacccucgccacccacgggcuggccgccgucaacuccgugcccugggacacgaucgccaacuacgcgaagccguuccugaacaagguggucagcaccaccaccaacaucgugacgcgcugccucaaccgggugugcaccaacuacaugcccuacuucuucacccugcugcuccagcugugcaccuucacccgcuccacgaacagccggaucaaggccuccaugcccaccaccaucgccaagaacaccgucaagagcgugggcaaguucugccuggaggccagcuucaacuaccucaagucccccaacuucagcaagcugaucaacaucaucaucugguuccugcuccuguccgugugccugggcagccucaucuacuccacggccgcgcuggggguccugaugagcaaccucggcaugccguccuacugcaccggguaccgcgagggcuaccugaacagcaccaacgugaccaucgccacguacugcaccggcuccauccccugcagcgugugccuguccgggcucgacagccuggacaccuaccccucccuggagaccauccagaucacgaucagcuccuucaagugggaccucaccgccuucggccuggucgccgagugguuccuggccuacauccucuucacccgguucuucuacgugcuggggcuggcggccaucaugcagcucuucuucagcuacuucgccgugcacuucaucuccaacagcuggcugauguggcugaucaucaaccugguccagauggcccccaucuccgcgauggugcgcauguacaucuucuucgccagcuucuacuacguguggaagagcuacguccacgugguggacggcugcaacuccagcaccugcaugaugugcuacaagcggaaccgcgccacgcgggucgagugcaccaccaucgugaacgggguccgccgguccuucuacguguacgccaacggcggcaagggguucugcaagcuccacaacuggaacugcgugaacugcgacaccuucugcgccggcagcacguucaucuccgacgaggucgcgcgcgaccugagccugcaguucaagcggccgaucaaccccaccgaccaguccagcuacaucguggacuccgugaccgucaagaacgggagcauccaccucuacuucgacaaggccggccagaagaccuacgagcgccacucccugagccacuucgugaaccuggacaaccuccgggccaacaacacgaaggggucccugcccaucaacgugaucgucuucgacggcaagagcaagugcgaggaguccagcgccaaguccgccagcguguacuacucccagcugaugugccagcccauccuccugcuggaccaggcgcucgugagcgacgucggcgacagcgccgagguggccgugaagauguucgacgccuacgucaacaccuucuccagcaccuucaacgugccgauggagaagcugaagacccugguggccacggcggaggccgagcucgccaagaacgucucccuggacaacgugcugagcaccuucaucuccgccgcgcgccagggguucguggacagcgacgucgagaccaaggacgugguggagugccucaagcugucccaccagagcgacaucgaggucaccggcgacuccugcaacaacuacaugcugacguacaacaagguggagaacaugaccccccgggaccucggggccugcaucgacugcagcgcccgccacaucaacgcccagguggccaagucccacaacaucgcgcugaucuggaacgucaaggacuucaugagccuguccgagcagcuccggaagcagauccgcagcgccgccaagaagaacaaccugcccuucaagcugaccugcgccaccacgcgccagguggugaacgucgugaccaccaagaucgcccucaagggcgggugaggacuagucccuguucccagagcccacuuuuuuuucuuuuuuugaaauaaaauagccugucuuucagaucucaaaggcucuuuucagagccaccaaaaaaaaaaaaaaaaaaaaaaaaaaaaaaaaaaaaaaaaaaaaaaaaaaaaaaaaaaaaaaaaaaaaaaaaaaaaaaaaaaaaaaaaaaaaaaaaaaaaa

SEQ ID NO: 19869 - RNA, 6113 nt, Artificial Sequence
  SARS-CoV-2__MT731327.1__non-structural protein 3 (NSP3) mRNA gc
aggagagucccgcagucggcguccagcggcucugcuuguucgugugugugucguugcaggccuuauucaagcuuaccauggcccccaccaaggugaccuucggcgacgacacggucaucgaggugcagggguacaagagcgugaacaucaccuucgagcuggacgagcgcaucgacaagguccucaacgagaagugcuccgccuacaccguggagcugggcaccgaggugaacgaguucgcgugcgucguggccgacgccgugaucaagacgcugcagccggucagcgagcuccugaccccccuggggaucgaccucgacgagugguccauggccaccuacuaccuguucgacgagagcggcgaguucaagcuggccucccacauguacugcagcuucuacccccccgacgaggacgaggaggagggggacugcgaggaggaggaguucgagccguccacccaguacgaguacggcacggaggacgacuaccagggcaagccccucgaguucggggcgaccagcgccgcccugcagcccgaggaggagcaggaggaggacuggcuggacgacgacucccagcagaccgugggccagcaggacgggagcgaggacaaccagaccacgaccauccagaccaucguggagguccagccccagcucgagauggagcugaccccgguggugcagacgaucgaggucaacuccuucagcggcuaccugaagcucaccgacaacguguacaucaagaacgccgacaucguggaggaggcgaagaaggucaagcccaccgugguggucaacgccgccaacguguaccugaagcacgggggcggcguggccggggcccugaacaaggcgaccaacaacgccaugcaggucgaguccgacgacuacaucgccacgaacggcccccucaagguggggggcagcugcguccuguccggccacaaccuggccaagcacugccuccacgugguggggcccaacgucaacaagggcgaggacauccagcugcugaagagcgccuacgagaacuucaaccagcacgaggugcuccuggcgccgcugcucuccgccgggaucuucggcgccgaccccauccacagccugcgggugugcgucgacaccgugcgcaccaacguguaccuggccgucuucgacaagaaccucuacgacaagcugguguccagcuuccuggagaugaagagcgagaagcagguggagcagaagaucgccgagauccccaaggaggaggucaagcccuucaucaccgaguccaagccgagcguggagcagcggaagcaggacgacaagaagaucaaggcgugcguggaggaggucacgaccacccucgaggagaccaaguuccugacggagaaccugcuccuguacaucgacaucaacgggaaccugcaccccgacuccgccacccucgugagcgacaucgacaucaccuuccugaagaaggacgcccccuacaucgugggcgacgucgugcaggagggcgugcugaccgccgucgugauccccacgaagaaggccgggggcaccaccgagaugcucgcgaaggcccugcgcaaggugccgaccgacaacuacaucacgaccuaccccgggcagggccugaacggguacaccgucgaggaggccaagaccgugcucaagaagugcaaguccgccuucuacauccugcccagcaucaucuccaacgagaagcaggagauccugggcaccgugagcuggaaccuccgggagaugcuggcgcacgccgaggagacgcgcaagcugaugcccgucugcguggagaccaaggccaucguguccaccauccagcggaaguacaagggcaucaagauccaggagggggucguggacuacggcgcccgcuucuacuucuacaccagcaagacgaccguggccucccugaucaacacccucaacgaccugaacgagacccuggucacgaugccgcucggguacgugacccacggccugaaccuggaggaggcggcccgguacaugcgcagccucaaggugcccgccaccgucuccgugagcucccccgacgccgugaccgccuacaacggguaccugacgagcuccagcaagacccccgaggagcacuucaucgagaccaucucccuggcgggcagcuacaaggacuggagcuacuccggccagagcacccagcucgggaucgaguuccugaagcggggcgacaaguccgucuacuacacgagcaacccgaccaccuuccaccuggacggggaggugaucaccuucgacaaccucaagacgcugcugucccuccgcgaggugcggaccaucaaggucuucaccaccguggacaacaucaaccugcacacgcagguggucgacaugagcaugaccuacggccagcaguucggccccaccuaccuggacggggccgacgugaccaagaucaagccccacaacucccacgagggcaagacguucuacgugcucccgaacgacgacacccugcgcgucgaggccuucgaguacuaccacaccaccgaccccagcuuccuggggcgguacauguccgcccucaaccacacgaagaaguggaaguacccccaggugaacggccugaccagcaucaagugggccgacaacaacugcuaccuggcgaccgcccuccugacccugcagcagaucgagcucaaguucaaccccccggcccugcaggacgccuacuaccgcgcgcgggccggggaggccgccaacuucugcgcccugauccucgcguacugcaacaagacggugggcgagcugggcgacguccgcgagaccauguccuaccuguuccagcacgccaaccucgacagcugcaagcgggugcugaacgucgugugcaagaccugcgggcagcagcagaccacccugaagggcguggaggccgucauguacauggggacgcucuccuacgagcaguucaagaagggcgugcagauccccugcaccugcgggaagcaggccaccaaguaccuggugcagcaggagagccccuucgucaugauguccgcccccccggcgcaguacgagcugaagcacggcaccuucacgugcgccagcgaguacaccggcaacuaccagugcgggcacuacaagcacaucaccuccaaggagacccucuacugcaucgacggcgcccugcugacgaagagcagcgaguacaaggggcccaucaccgacguguucuacaaggagaacuccuacaccaccacgaucaagcccgugaccuacaagcucgacggcgucgugugcaccgagaucgaccccaagcuggacaacuacuacaagaaggacaacagcuacuucaccgagcagccgaucgaccuggugcccaaccagcccuaccccaacgccuccuucgacaacuucaaguucgucugcgacaacaucaaguucgccgacgaccucaaccagcugacgggguacaagaagccggcgagccgcgagcugaaggugaccuucuuccccgaccucaacggcgacguggucgccaucgacuacaagcacuacacccccuccuucaagaagggcgccaagcugcugcacaagcccaucguguggcacgugaacaacgccaccaacaaggcgacguacaagccgaacaccuggugcauccggugccucuggagcaccaagcccgucgagaccuccaacagcuucgacgugcugaaguccgaggacgcccaggggauggacaaccuggccugcgaggaccucaagcccuucagcgaggagguggucgagaaccccacgauccagaaggacgugcuggagugcaacgugaagaccaccgaggucgugggcgacaucauccugaagccggccaacaacucccucaagaucaccgaggagguggggcacacggaccugauggccgcguacgucgacaacagcucccugaccaucaagaagcccaacgagcucagccgcgugcugggccugaagacccucgccacccacgggcuggccgccgugaacuccguccccugggacacgaucgccaacuacgcgaagccguuccugaacaagguggugagcaccaccaccaacaucgucacgcgcugccucaaccgggugugcaccaacuacaugcccuacuucuucacccugcugcuccagcugugcaccuucacccgcuccacgaacagccggaucaaggccuccaugcccaccaccaucgccaagaacaccgugaagagcgucggcaaguucugccuggaggccagcuucaacuaccucaagucccccaacuucagcaagcugaucaacaucaucaucugguuccugcuccuguccgugugccugggcagccucaucuacuccacggccgcgcugggggugcugaugagcaaccucggcaugccguccuacugcaccggguaccgcgagggcuaccugaacagcaccaacgucaccaucgccacguacugcaccggcuccauccccugcagcgugugccuguccgggcucgacagccuggacaccuaccccucccuggagaccauccagaucacgaucagcuccuucaagugggaccucaccgccuucggccugguggccgagugguuccuggccuacauccucuucacccgguucuucuacguccuggggcuggcggccaucaugcagcucuucuucagcuacuucgccgugcacuucaucuccaacagcuggcugauguggcugaucaucaaccuggugcagauggcccccaucuccgcgaugguccgcauguacaucuucuucgccagcuucuacuacguguggaagagcuacgugcacgucguggacggcugcaacuccagcaccugcaugaugugcuacaagcggaaccgcgccacgcggguggagugcaccaccaucgucaacggggugcgccgguccuucuacgucuacgccaacggcggcaagggguucugcaagcuccacaacuggaacugcgugaacugcgacaccuucugcgccggcagcacguucaucuccgacgagguggcgcgcgaccugagccugcaguucaagcggccgaucaaccccaccgaccaguccagcuacaucgucgacuccgugaccgugaagaacgggagcauccaccucuacuucgacaaggccggccagaagaccuacgagcgccacucccugagccacuucgucaaccuggacaaccuccgggccaacaacacgaaggggucccugcccaucaacgugaucguguucgacggcaagagcaagugcgaggaguccagcgccaaguccgccagcgucuacuacucccagcugaugugccagcccauccuccugcuggaccaggcgcucgugagcgacgugggcgacagcgccgaggucgccgugaagauguucgacgccuacgugaacaccuucuccagcaccuucaacgucccgauggagaagcugaagacccugguggccacggcggaggccgagcucgccaagaacgugucccuggacaacguccugagcaccuucaucuccgccgcgcgccagggguucguggacagcgacguggagaucaaggacgucguggagugccucaagcugucccaccagagcgacaucgaggugaccggcgacuccugcaacaacuacaugcugaccuacaacaaggucgagaacaugacgccccgggaccucggggccugcaucgacugcagcgcccgccacaucaacgcccagguggccaagucccacaacaucgcgcugaucuggaacgugaaggacuucaugagccuguccgagcagcuccggaagcagauccgcagcgccgccaagaagaacaaccugcccuucaagcugaccugcgccaccacccgccaggucgugaacguggucacgaccaagaucgcccucaagggcgggugaggacuagucccuguucccagagcccacuuuuuuuucuuuuuuugaaauaaaauagccugucuuucagaucucaaaggcucuuuucagagccaccaaaaaaaaaaaaaaaaaaaaaaaaaaaaaaaaaaaaaaaaaaaaaaaaaaaaaaaaaaaaaaaaaaaaaaaaaaaaaaaaaaaaaaaaaaaaaaaaaaaaa

SEQ ID NO: 19870 - RNA, 6113 nt, Artificial Sequence
  SARS-CoV-2__MT731656.1__non-structural protein 3 (NSP3) mRNA gc
aggagagucccgcagucggcguccagcggcucugcuuguucgugugugugucguugcaggccuuauucaagcuuaccauggcccccaccaaggugaccuucggcgacgacacggucaucgaggugcagggguacaagagcgugaacaucaccuucgagcuggacgagcgcaucgacaagguccucaacgagaagugcuccgccuacaccguggagcugggcaccgaggugaacgaguucgcgugcgucguggccgacgccgugaucaagacgcugcagccggucagcgagcuccugaccccccuggggaucgaccucgacgagugguccauggccaccuacuaccuguucgacgagagcggcgaguucaagcuggccucccacauguacugcagcuucuacccccccgacgaggacgaggaggagggggacugcgaggaggaggaguucgagccguccacccaguacgaguacggcacggaggacgacuaccagggcaagccccucgaguucggggcgaccagcgccgcccugcagcccgaggaggagcaggaggaggacuggcuggacgacgacucccagcagaccgugggccagcaggacgggagcgaggacaaccagaccacgaccauccagaccaucguggagguccagccccagcucgagauggagcugaccccgguggugcagacgaucgaggucaacuccuucagcggcuaccugaagcucaccgacaacguguacaucaagaacgccgacaucguggaggaggcgaagaaggucaagcccaccgugguggucaacgccgccaacguguaccugaagcacgggggcggcguggccggggcccugaacaaggcgaccaacaacgccaugcaggucgaguccgacgacuacaucgccacgaacggcccccucaagguggggggcagcugcguccuguccggccacaaccuggccaagcacugccuccacgugguggggcccaacgucaacaagggcgaggacauccagcugcugaagagcgccuacgagaacuucaaccagcacgaggugcuccuggcgccgcugcucuccgccgggaucuucggcgccgaccccauccacagccugcgggugugcgucgacaccgugcgcaccaacguguaccuggccgucuucgacaagaaccucuacgacaagcugguguccagcuucauggagaugaagagcgagaagcagguggagcagaagaucgccgagauccccaaggaggaggucaagcccuucaucaccgaguccaagccgagcguggagcagcggaagcaggacgacaagaagaucaaggcgugcguggaggaggucacgaccacccuggaggagaccaaguuccucacggagaaccugcugcucuacaucgacaucaacgggaaccugcaccccgacuccgccacccuggugagcgacaucgacaucaccuuccucaagaaggacgcccccuacaucgugggcgacgucgugcaggagggcgugcugaccgccgucgugauccccacgaagaaggccgggggcaccaccgagaugcuggcgaaggcccuccgcaaggugccgaccgacaacuacaucacgaccuaccccgggcagggccugaacggguacaccgucgaggaggccaagaccgugcugaagaagugcaaguccgccuucuacauccuccccagcaucaucuccaacgagaagcaggagauccugggcaccgugagcuggaaccugcgggagaugcucgcgcacgccgaggagacgcgcaagcugaugcccgucugcguggagaccaaggccaucguguccaccauccagcggaaguacaagggcaucaagauccaggacggggucguggacuacggcgcccgcuucuacuucuacaccagcaagacgaccguggccucccugaucaacacccugaacgaccucaacgagacccuggucacgaugccgcugggguacgugacccacggccucaaccuggaggaggcggcccgguacaugcgcagccugaaggugcccgccaccgucuccgugagcucccccgacgccgugaccgccuacaacggguaccucacgagcuccagcaagacccccgaggagcacuucaucgagaccaucucccuggcgggcagcuacaaggacuggagcuacuccggccagagcacccagcuggggaucgaguuccucaagcggggcgacaaguccgucuacuacacgagcaacccgaccaccuuccaccuggacggggaggugaucaccuucgacaaccugaagacgcuccugucccugcgcgaggugcggaccaucaaggucuucaccaccguggacaacaucaaccuccacacgcagguggucgacaugagcaugaccuacggccagcaguucggccccaccuaccuggacggggccgacgugaccaagaucaagccccacaacucccacgagggcaagacguucuacgugcugccgaacgacgacacccuccgcgucgaggccuucgaguacuaccacaccaccgaccccagcuuccuggggcgguacauguccgcccugaaccacacgaagaaguggaaguacccccaggugaacggccucaccagcaucaagugggccgacaacaacugcuaccuggcgaccgcccugcucacccugcagcagaucgagcugaaguucaaccccccggcccuccaggacgccuacuaccgcgcgcgggccggggaggccgccaacuucugcgcccugauccuggcguacugcaacaagacggugggcgagcucggcgacguccgcgagaccauguccuaccuguuccagcacgccaaccuggacagcugcaagcgggugcucaacgucgugugcaagaccugcgggcagcagcagaccacccugaagggcguggaggccgucauguacauggggacgcuguccuacgagcaguucaagaagggcgugcagauccccugcaccugcgggaagcaggccaccaaguaccucgugcagcaggagagccccuucgucaugauguccgcccccccggcgcaguacgagcugaagcacggcaccuucacgugcgccagcgaguacaccggcaacuaccagugcgggcacuacaagcacaucaccuccaaggagacccuguacugcaucgacggcgcccuccugacgaagagcagcgaguacaaggggcccaucaccgacguguucuacaaggagaacuccuacaccaccacgaucaagcccgugaccuacaagcuggacggcgucgugugcaccgagaucgaccccaagcucgacaacuacuacaagaaggacaacagcuacuucaccgagcagccgaucgaccuggugcccaaccagcccuaccccaacgccuccuucgacaacuucaaguucgucugcgacaacaucaaguucgccgacgaccugaaccagcucacgggguacaagaagccggcgagccgcgagcugaaggugaccuucuuccccgaccugaacggcgacguggucgccaucgacuacaagcacuacacccccuccuucaagaagggcgccaagcuccugcacaagcccaucguguggcacgugaacaacgccaccaacaaggcgacguacaagccgaacaccuggugcauccggugccuguggagcaccaagcccgucgagaccuccaacagcuucgacgugcucaaguccgaggacgcccaggggauggacaaccuggccugcgaggaccugaagcccgugagcgaggaggucguggagaaccccacgauccagaaggacgugcucgagugcaacgucaagaccaccgagguggugggcgacaucauccugaagccggccaacaacucccugaagaucaccgaggaggucgggcacacggaccucauggccgcguacguggacaacagcucccugaccaucaagaagcccaacgagcugagccgcgugcucggccugaagacccuggccacccacgggcucgccgccgucaacuccgugcccugggacacgaucgccaacuacgcgaagccguuccugaacaagguggucagcaccaccaccaacaucgugacgcgcugccugaaccgggugugcaccaacuacaugcccuacuucuucacccuccugcugcagcucugcaccuucacccgcuccacgaacagccggaucaaggccuccaugcccaccaccaucgccaagaacaccgucaagagcgugggcaaguucugccuggaggccagcuucaacuaccugaagucccccaacuucagcaagcucaucaacaucaucaucugguuccugcugcucuccgugugccugggcagccugaucuacuccacggccgcgcucgggguccugaugagcaaccugggcaugccguccuacugcaccggguaccgcgagggcuaccucaacagcaccaacgugaccaucgccacguacugcaccggcuccauccccugcagcgugugccuguccgggcuggacagccucgacaccuaccccucccuggagaccauccagaucacgaucagcuccuucaagugggaccugaccgccuucggccucgucgccgagugguuccuggccuacauccuguucacccgguucuucuacgugcucgggcuggcggccaucaugcagcuguucuucagcuacuucgccgugcacuucaucuccaacagcuggcucauguggcugaucaucaaccugguccagauggcccccaucuccgcgauggugcgcauguacaucuucuucgccagcuucuacuacguguggaagagcuacguccacgugguggacggcugcaacuccagcaccugcaugaugugcuacaagcggaaccgcgccacgcgggucgagugcaccaccaucgugaacgggguccgccgguccuucuacguguacgccaacggcggcaagggguucugcaagcugcacaacuggaacugcgugaacugcgacaccuucugcgccggcagcacguucaucuccgacgaggucgcgcgcgaccucagccugcaguucaagcggccgaucaaccccaccgaccaguccagcuacaucguggacuccgugaccgucaagaacgggagcauccaccuguacuucgacaaggccggccagaagaccuacgagcgccacucccucagccacuucgugaaccuggacaaccugcgggccaacaacacgaaggggucccuccccaucaacgugaucgucuucgacggcaagagcaagugcgaggaguccagcgccaaguccgccagcguguacuacucccagcugaugugccagcccauccugcuccuggaccaggcgcuggugagcgacgucggcgacagcgccgagguggccgugaagauguucgacgccuacgucaacaccuucuccagcaccuucaacgugccgauggagaagcucaagacccugguggccacggcggaggccgagcuggccaagaacgucucccucgacaacgugcugagcaccuucaucuccgccgcgcgccagggguucguggacagcgacgucgagaccaaggacgugguggagugccugaagcucucccaccagagcgacaucgaggucaccggcgacuccugcaacaacuacaugcugacguacaacaagguggagaacaugaccccccgggaccugggggccugcaucgacugcagcgcccgccacaucaacgcccagguggccaagucccacaacaucgcgcucaucuggaacgucaaggacuucaugagccuguccgagcagcugcggaagcagauccgcagcgccgccaagaagaacaaccuccccuucaagcugaccugcgccaccacgcgccagguggugaacgucgugaccaccaagaucgcccugaagggcgggugaggacuagucccuguucccagagcccacuuuuuuuucuuuuuuugaaauaaaauagccugucuuucagaucucaaaggcucuuuucagagccaccaaaaaaaaaaaaaaaaaaaaaaaaaaaaaaaaaaaaaaaaaaaaaaaaaaaaaaaaaaaaaaaaaaaaaaaaaaaaaaaaaaaaaaaaaaaaaaaaaaaaa

SEQ ID NO: 19871 - RNA, 6113 nt, Artificial Sequence
  SARS-CoV-2__MT731938.1__non-structural protein 3 (NSP3) mRNA gc
aggagagucccgcagucggcguccagcggcucugcuuguucgugugugugucguugcaggccuuauucaagcuuaccauggcccccaccaaggugaccuucggcgacgacacggucaucgaggugcagggguacaagagcgugaacaucaccuucgagcuggacgagcgcaucgacaagguccucaacgagaagugcuccgccuacaccguggagcugggcaccgaggugaacgaguucgcgugcgucguggccgacgccgugaucaagacgcugcagccggucagcgagcuccugaccccccuggggaucgaccucgacgagugguccauggccaccuacuaccuguucgacgagagcggcgaguucaagcuggccucccacauguacugcagcuucuacccccccgacgaggacgaggaggagggggacugcgaggaggaggaguucgagccguccacccaguacgaguacggcacggaggacgacuaccagggcaagccccucgaguucggggcgaccagcgccgcccugcagcccgaggaggagcaggaggaggacuggcuggacgacgacucccagcagaccgugggccagcaggacgggagcgaggacaaccagaccacgaccauccagaccaucguggagguccagccccagcucgagauggagcugaccccgguggugcagacgaucgaggucaacuccuucagcggcuaccugaagcucaccgacaacguguacaucaagaacgccgacaucguggaggaggcgaagaaggucaagcccaccgugguggucaacgccgccaacguguaccugaagcacgggggcggcguggccggggcccugaacaaggcgaccaacaacgccaugcaggucgaguccgacgacuacaucgccacgaacggcccccucaagguggggggcagcugcguccuguccggccacaaccuggccaagcacugccuccacgugguggggcccaacgucaacaagggcgaggacauccagcugcugaagagcgccuacgagaacuucaaccagcacgaggugcuccuggcgccgcugcucuccgccgggaucuucggcgccgaccccauccacagccugcgggugugcgucgacaccgugcgcaccaacguguaccuggccgucuucgacaagaaccucuacgacaagcugguguccagcuuccuggagaugaagagcgagaagcagguggagcagaagaucgccgacaucaccgaguccaagcccagcgucgagcagcggaagcaggacgacaagaagaucaaggcgugcguggaggaggugacgaccacccucgaggagaccaaguuccugacggagaaccugcuccuguacaucgacaucaacgggaaccugcaccccgacuccgccacccucgucagcgacaucgacaucaccuuccugaagaaggacgccccguacaucgugggcgacgugguccaggagggcgugcugaccgccguggucauccccacgaagaaggccgggggcaccaccgagaugcucgcgaaggcccugcgcaaggugcccaccgacaacuacaucacgaccuaccccgggcagggccugaacggguacaccguggaggaggccaagaccguccucaagaagugcaaguccgccuucuacauccugccgagcaucaucuccaacgagaagcaggagauccugggcaccgugagcuggaaccuccgggagaugcuggcgcacgccgaggagacgcgcaagcugaugcccgugugcgucgagaccaaggccaucguguccaccauccagcggaaguacaagggcaucaagauccaggaggggguggucgacuacggcgcccgcuucuacuucuacaccagcaagacgaccguggccucccugaucaacacccucaacgaccugaacgagacccuggugacgaugccccucggguacgucacccacggccugaaccuggaggaggcggcccgguacaugcgcagccucaaggugcccgccaccguguccgucagcuccccggacgccgugaccgccuacaacggguaccugacgagcuccagcaagacccccgaggagcacuucaucgagaccaucucccuggcgggcagcuacaaggacuggagcuacuccggccagagcacccagcucgggaucgaguuccugaagcggggcgacaaguccguguacuacacgagcaaccccaccaccuuccaccuggacggggaggucaucaccuucgacaaccucaagacgcugcugucccuccgcgaggugcggaccaucaagguguucaccaccgucgacaacaucaaccugcacacgcaggugguggacaugagcaugaccuacggccagcaguucggccccaccuaccuggacggggccgacgucaccaagaucaagccgcacaacucccacgagggcaagacguucuacgugcuccccaacgacgacacccugcgcguggaggccuucgaguacuaccacaccaccgaccccagcuuccuggggcgguacauguccgcccucaaccacacgaagaaguggaaguacccgcaggucaacggccugaccagcaucaagugggccgacaacaacugcuaccuggcgaccgcccuccugacccugcagcagaucgagcucaaguucaacccccccgcccugcaggacgccuacuaccgcgcgcgggccggggaggccgccaacuucugcgcccugauccucgcguacugcaacaagacggugggcgagcugggcgacgugcgcgagaccauguccuaccuguuccagcacgccaaccucgacagcugcaagcggguccugaacguggucugcaagaccugcgggcagcagcagaccacccugaagggcguggaggccgugauguacauggggacgcucuccuacgagcaguucaagaagggcguccagauccccugcaccugcgggaagcaggccaccaaguaccuggugcagcaggagagcccguucgugaugauguccgccccccccgcgcaguacgagcugaagcacggcaccuucacgugcgccagcgaguacaccggcaacuaccagugcgggcacuacaagcacaucaccuccaaggagacccucuacugcaucgacggcgcccugcugacgaagagcagcgaguacaaggggcccaucaccgacgucuucuacaaggagaacuccuacaccaccacgaucaagccggugaccuacaagcucgacggcguggucugcaccgagaucgaccccaagcuggacaacuacuacaagaaggacaacagcuacuucaccgagcagcccaucgaccuggugcccaaccagccguaccccaacgccuccuucgacaacuucaaguucgugugcgacaacaucaaguucgccgacgaccucaaccagcugacgggguacaagaagcccgcgagccgcgagcugaaggucaccuucuuccccgaccucaacggcgacgugguggccaucgacuacaagcacuacaccccguccuucaagaagggcgccaagcugcugcacaagcccaucgucuggcacgugaacaacgccaccaacaaggcgacguacaagcccaacaccuggugcauccggugccucuggagcaccaagcccguggagaccuccaacagcuucgacguccugaaguccgaggacgcccaggggauggacaaccuggccugcgaggaccucaagccggugagcgaggagguggucgagaaccccacgauccagaaggacgugcuggagugcaacgugaagaccaccgaggucgugggcgacaucauccugaagcccgccaacaacucccucaagaucaccgaggagguggggcacacggaccugauggccgcguacgucgacaacagcucccugaccaucaagaagcccaacgagcucagccgcgugcugggccugaagacccucgccacccacgggcuggccgccgugaacuccgucccgugggacacgaucgccaacuacgcgaagcccuuccugaacaagguggugagcaccaccaccaacaucgucacgcgcugccucaaccgggugugcaccaacuacaugcccuacuucuucacccugcugcuccagcugugcaccuucacccgcuccacgaacagccggaucaaggccuccaugccgaccaccaucgccaagaacaccgugaagagcgucggcaaguucugccuggaggccagcuucaacuaccucaagucccccaacuucagcaagcugaucaacaucaucaucugguuccugcuccuguccgugugccugggcagccucaucuacuccacggccgcgcugggggugcugaugagcaaccucggcaugcccuccuacugcaccggguaccgcgagggcuaccugaacagcaccaacgucaccaucgccacguacugcaccggcuccauccccugcagcgugugccuguccgggcucgacagccuggacaccuacccgucccuggagaccauccagaucacgaucagcuccuucaagugggaccucaccgccuucggccugguggccgagugguuccuggccuacauccucuucacccgguucuucuacguccuggggcuggcggccaucaugcagcucuucuucagcuacuucgccgugcacuucaucuccaacagcuggcugauguggcugaucaucaaccuggugcagauggcccccaucuccgcgaugguccgcauguacaucuucuucgccagcuucuacuacguguggaagagcuacgugcacgucguggacggcugcaacuccagcaccugcaugaugugcuacaagcggaaccgcgccacgcggguggagugcaccaccaucgucaacggggugcgccgguccuucuacgucuacgccaacggcggcaagggguucugcaagcuccacaacuggaacugcgugaacugcgacaccuucugcgccggcagcacguucaucuccgacgagguggcgcgcgaccugagccugcaguucaagcggcccaucaaccccaccgaccaguccagcuacaucgucgacuccgugaccgugaagaacgggagcauccaccucuacuucgacaaggccggccagaagaccuacgagcgccacucccugagccacuucgucaaccuggacaaccuccgggccaacaacacgaaggggucccugccgaucaacgugaucguguucgacggcaagagcaagugcgaggaguccagcgccaaguccgccagcgucuacuacucccagcugaugugccagcccauccuccugcuggaccaggcgcucgugagcgacgugggcgacagcgccgaggucgccgugaagauguucgacgccuacgugaacaccuucuccagcaccuucaacguccccauggagaagcugaagacccugguggccacggcggaggccgagcucgccaagaacgugucccuggacaacguccugagcaccuucaucuccgccgcgcgccagggguucguggacagcgacguggagaccaaggacgucguggagugccucaagcugucccaccagagcgacaucgaggugaccggcgacuccugcaacaacuacaugcugacguacaacaaggucgagaacaugaccccccgggaccucggggccugcaucgacugcagcgcccgccacaucaacgcccagguggccaagucccacaacaucgcgcugaucuggaacgugaaggacuucaugagccuguccgagcagcuccggaagcagauccgcagcgccgccaagaagaacaaccugccguucaagcugaccugcgccaccacgcgccaggucgugaacguggucaccaccaagaucgcccucaagggcgggaagaucgugaacaacuggcugaagcagugaggacuagucccuguucccagagcccacuuuuuuuucuuuuuuugaaauaaaauagccugucuuucagaucucaaaggcucuuuucagagccaccaaaaaaaaaaaaaaaaaaaaaaaaaaaaaaaaaaaaaaaaaaaaaaaaaaaaaaaaaaaaaaaaaaaaaaaaaaaaaaaaaaaaaaaaaaaaaaaaaaaaa

SEQ ID NO: 19872 - RNA, 6113 nt, Artificial Sequence
  SARS-CoV-2__MT712861.1__non-structural protein 3 (NSP3) mRNA gc
aggagagucccgcagucggcguccagcggcucugcuuguucgugugugugucguugcaggccuuauucaagcuuaccauggcccccaccaaggugaccuucggcgacgacacggucaucgaggugcagggguacaagagcgugaacaucaccuucgagcuggacgagcgcaucgacaagguccucaacgagaagugcuccgccuacaccguggagcugggcaccgaggugaacgaguucgcgugcgucguggccgacgccgugaucaagacgcugcagccggucagcgagcuccugaccccccuggggaucgaccucgacgagugguccauggccaccuacuaccuguucgacgagagcggcgaguucaagcuggccucccacauguacugcagcuucuacccccccgacgaggacgaggaggagggggacugcgaggaggaggaguucgagccguccacccaguacgaguacggcacggaggacgacuaccagggcaagccccucgaguucggggcgaccagcgccgcccugcagcccgaggaggagcaggaggaggacuggcuggacgacgacucccagcagaccgugggccagcaggacgggagcgaggacaaccagaccacgaccauccagaccaucguggagguccagccccagcucgagauggagcugaccccgguggugcagacgaucgaggucaacuccuucagcggcuaccugaagcucaccgacaacguguacaucaagaacgccgacaucguggaggaggcgaagaaggucaagcccaccgugguggucaacgccgccaacguguaccugaagcacgggggcggcguggccggggcccugaacaaggcgaccaacaacgccaugcaggucgaguccgacgacuacaucgccacgaacggcccccucaagguggggggcagcugcguccuguccggccacaaccuggccaagcacugccuccacgugguggggcccaacgucaacaagggcgaggacauccagcugcugaagagcgccuacgagaacuucaaccagcacgaggugcuccuggcgccgcugcucuccgccgggaucuucggcgccgaccccauccacagccugcgggugugcgucgacaccgugcgcaccaacguguaccuggccgucuucgacaagaaccucuacgacaagcugguguccagcuuccuggagaugaagagcgagaagcagguggagcagaagaucgccgagauccccaaggaggaggucaagcccuucaucaccgaguccaagccgagcguggagcagcggaagcaggacgacaagaagaucaaggcgugcguggaggaggucacgaccacccucgaggagaccaaguuccugacggagaaccugcuccuguacaucgacaucaacgggaaccugcaccccgacuccgccacccucgugagcgacaucgacaucaccuuccugaagaaggacgcccccuacaucgugggcgacgucgugcaggagggcgugcugaccgccgucgugauccccacgaagaaggccgggggcaccaccgagaugcucgcgaaggcccugcgcaaggugccgaccgacaacuacaucacgaccuaccccgggcagggccugaacggguacaccgucgaggaggccaagaccgugcucaagaagugcaaguccgccuucuacauccugcccagcaucaucuccaacgagaagcaggagauccugggcaccgugagcuggaaccuccgggagaugcuggcgcacgccgaggagacgcgcaagcugaugcccgucugcguggagaccaaggccaucguguccaccauccagcggaaguacaagggcaucaagauccaggagggggucguggacuacggcgcccgcuucuacuucuacaccagcaagacgaccguggccucccugaucaacacccucaacgaccugaacgagacccuggucacgaugccgcucggguacgugacccacggccugaaccuggaggaggcggcccgguacaugcgcagccucaaggugcccgccaccgucuccgugagcucccccgacgccgugaccgccuacaacggguaccugacgagcuccagcaagacccccgaggagcacuucaucgagaccaucucccuggcgggcagcuacaaggacuggagcuacuccggccagagcacccagcucgggaucgaguuccugaagcggggcgacaaguccgucuacuacacgagcaacccgaccaccuuccaccuggacggggaggugaucaccuucgacaaccucaagacgcugcugucccuccgcgaggugcggaccaucaaggucuucaccaccguggacaacaucaaccugcacacgcagguggucgacaugagcaugaccuacggccagcaguucggccccaccuaccuggacggggccgacgugaccaagaucaagccccacaacucccacgagggcaagacguucuacgugcucccgaacgacgacacccugcgcgucgaggccuucgaguacuaccacaccaccgaccccagcuuccuggggcgguacauguccgcccucaaccacacgaagaaguggaaguacccccaggugaacggccugaccagcaucaagugggccgacaacaacugcuaccuggcgaccgcccuccugacccugcagcagaucgagcucaaguucaaccccccggcccugcaggacgccuacuaccgcgcgcgggccggggaggccgccaacuucugcgcccugauccucgcguacugcaacaagacggugggcgagcugggcgacguccgcgagaccauguccuaccuguuccagcacgccaaccucgacagcugcaagcgggugcugaacgucgugugcaagaccugcgggcagcagcagaccacccugaagggcguggaggccgucauguacauggggacgcucuccuacgagcaguucaagaagggcgugcagauccccugcaccugcgggaagcaggccaccaaguaccuggugcagcaggagagccccuucgucaugauguccgcccccccggcgcaguacgagcugaagcacggcaccuucacgugcgccagcgaguacaccggcaacuaccagugcgggcacuacaagcacaucaccuccaaggagacccucuacugcaucgacggcgcccugcugacgaagagcagcgaguacaaggggcccaucaccgacguguucuacaaggagaacuccuacaccaccacgaucaagcccgugaccuacaagcucgacggcgucgugugcaccgagaucgaccccaagcuggacaacuacuacaagaaggacaacagcuacuucaccgagcagccgaucgaccuggugcccaaccagcccuaccccaacgccuccuucgacaacuucaaguucgucugcgacaacaucaaguucgccgacgaccucaaccagcugacgggguacaagaagccggcgagccgcgagcugaaggugaccuucuuccccgaccucaacggcgacguggucgccaucgacuacaagcacuacacccccuccuucaagaagggcgccaagcugcugcacaagcccaucguguggcacgugaacaacgccaccaacaaggcgacguacaagccgaacaccuggugcauccggugccucuggagcaccaagcccgucgagaccuccaacagcuucgacgugcugaaguccgaggacgcccaggggauggacaaccuggccugcgaggaccucaagcccgugagcgaggaggucguggagaaccccacgauccagaaggacuuccuggagugcaacgugaagaccaccgaggucgugggcgacaucauccugaagccggccaacaacucccucaagaucaccgaggagguggggcacacggaccugauggccgcguacgucgacaacagcucccugaccaucaagaagcccaacgagcucagccgcgugcugggccugaagacccucgccacccacgggcuggccgccgugaacuccguccccugggacacgaucgccaacuacgcgaagccguuccugaacaagguggugagcaccaccaccaacaucgucacgcgcugccucaaccgggugugcaccaacuacaugcccuacuucuucacccugcugcuccagcugugcaccuucacccgcuccacgaacagccggaucaaggccuccaugcccaccaccaucgccaagaacaccgugaagagcgucggcaaguucugccuggaggccagcuucaacuaccucaagucccccaacuucagcaagcugaucaacaucaucaucugguuccugcuccuguccgugugccugggcagccucaucuacuccacggccgcgcugggggugcugaugagcaaccucggcaugccguccuacugcaccggguaccgcgagggcuaccugaacagcaccaacgucaccaucgccacguacugcaccggcuccauccccugcagcgugugccuguccgggcucgacagccuggacaccuaccccucccuggagaccauccagaucacgaucagcuccuucaagugggaccucaccgccuucggccugguggccgagugguuccuggccuacauccucuucacccgguucuucuacguccuggggcuggcggccaucaugcagcucuucuucagcuacuucgccgugcacuucaucuccaacagcuggcugauguggcugaucaucaaccuggugcagauggcccccaucuccgcgaugguccgcauguacaucuucuucgccagcuucuacuacguguggaagagcuacgugcacgucguggacggcugcaacuccagcaccugcaugaugugcuacaagcggaaccgcgccacgcggguggagugcaccaccaucgucaacggggugcgccgguccuucuacgucuacgccaacggcggcaagggguucugcaagcuccacaacuggaacugcgugaacugcgacaccuucugcgccggcagcacguucaucuccgacgagguggcgcgcgaccugagccugcaguucaagcggccgaucaaccccaccgaccaguccagcuacaucgucgacuccgugaccgugaagaacgggagcauccaccucuacuucgacaaggccggccagaagaccuacgagcgccacucccugagccacuucgucaaccuggacaaccuccgggccaacaacacgaaggggucccugcccaucaacgugaucguguucgacggcaagagcaagugcgaggaguccagcgccaaguccgccagcgucuacuacucccagcugaugugccagcccauccuccugcuggaccaggcgcucgugagcgacgugggcgacagcgccgaggucgccgugaagauguucgacgccuacgugaacaccuucuccagcaccuucaacgucuccauggagaagcugaagacccugguggccacggcggaggccgagcucgccaagaacgugagccuggacaacguccuguccaccuucaucagcgccgcgcgccagggguucguggacuccgacguggagaccaaggacgucguggagugccucaagcugagccaccaguccgacaucgaggugaccggcgacagcugcaacaacuacaugcugacguacaacaaggucgagaacaugaccccgcgggaccucggggccugcaucgacugcuccgcccgccacaucaacgcccagguggccaagagccacaacaucgcgcugaucuggaacgugaaggacuucaugucccugagcgagcagcuccggaagcagauccgcuccgccgccaagaagaacaaccugcccuucaagcugaccugcgccaccacgcgccaggucgugaacguggucaccaccaagaucgcccucaagggcgggugaggacuagucccuguucccagagcccacuuuuuuuucuuuuuuugaaauaaaauagccugucuuucagaucucaaaggcucuuuucagagccaccaaaaaaaaaaaaaaaaaaaaaaaaaaaaaaaaaaaaaaaaaaaaaaaaaaaaaaaaaaaaaaaaaaaaaaaaaaaaaaaaaaaaaaaaaaaaaaaaaaaaa

SEQ ID NO: 19873 - RNA, 6113 nt, Artificial Sequence
  SARS-CoV-2__MT706162.1__non-structural protein 3 (NSP3) mRNA gc
aggagagucccgcagucggcguccagcggcucugcuuguucgugugugugucguugcaggccuuauucaagcuuaccauggcccccaccaaggugaccuucggcgacgacacggucaucgaggugcagggguacaagagcgugaacaucaccuucgagcuggacgagcgcaucgacaagguccucaacgagaagugcuccgccuacaccguggagcugggcaccgaggugaacgaguucgcgugcgucguggccgacgccgugaucaagacgcugcagccggucagcgagcuccugaccccccuggggaucgaccucgacgagugguccauggccaccuacuaccuguucgacgagagcggcgaguucaagcuggccucccacauguacugcagcuucuacccccccgacgaggacgaggaggagggggacugcgaggaggaggaguucgagccguccacccaguacgaguacggcacggaggacgacuaccagggcaagccccucgaguucggggcgaccagcgccgcccugcagcccgaggaggagcaggaggaggacuggcuggacgacgacucccagcagaccgugggccagcaggacgggagcgaggacaaccagaccacgaccauccagaccaucguggagguccagccccagcucgagauggagcugaccccgguggugcagacgaucgaggucaacuccuucagcggcuaccugaagcucaccgacaacguguacaucaagaacgccgacaucguggaggaggcgaagaaggucaagcccaccgugguggucaacgccgccaacguguaccugaagcacgggggcggcguggccggggcccugaacaaggcgaccaacaacgccaugcaggucgaguccgacgacuacaucgccacgaacggcccccucaagguggggggcagcugcguccuguccggccacaaccuggccaagcacugccuccacgugguggggcccaacgucaacaagggcgaggacauccagcugcugaagagcgccuacgagaacuucaaccagcacgaggugcuccuggcgccgcugcucuccgccgggaucuucggcgccgaccccauccacagccugcgggugugcgucgacaccgugcgcaccaacguguaccuggccgucuucgacaagaaccucuacgacaagcugguguccagcuuccuggagaugaagagcgagaagcagguggagcagaagaucgccgagauccccaaggaggaggucaagcccuucaucaccgaguccaagccgagcguggagcagcggaagcaggacgacaagaagaucaaggcgugcguggaggaggucacgaccacccucgaggagaccaaguuccugacggagaaccugcuccuguacaucgacaucaacgggaaccugcaccccgacuccgccacccucgugagcgacaucgacaucaccuuccugaagaaggacgcccccuacaucgugggcgacgucgugcaggagggcgugcugaccgccgucgugauccccacgaagaaggccgggggcaccaccgagaugcucgcgaaggcccugcgcaaggugccgaccgacaacuacaucacgaccuaccccgggcagggccugaacggguacaccgucgaggaggccaagaccgugcucaagaagugcaaguccgccuucuacauccugcccagcaucaucuccaacgagaagcaggagauccugggcaccgugagcuggaaccuccgggagaugcuggcgcacgccgaggagacgcgcaagcugaugcccgucugcguggagaccaaggccaucguguccaccauccagcggaaguacaagggcaucaagauccaggagggggucguggacuacggcgcccgcuucuacuucuacaccagcaagacgaccguggccucccugaucaacacccucaacgaccugaacgagacccuggucacgaugccgcucggguacgugacccacggccugaaccuggaggaggcggcccgguacaugcgcagccucaaggugcccgccaccgucuccgugagcucccccgacgccgugaccgccuacaacggguaccugacgagcuccagcaagacccccgaggagcacuucaucgagaccaucucccuggcgggcagcuacaaggacuggagcuacuccggccagagcacccagcucgggaucgaguuccugaagcggggcgacaaguccgucuacuacacgagcaacccgaccaccuuccaccuggacggggaggugaucaccuucgacaaccucaagacgcugcugucccuccgcgaggugcggaccaucaaggucuucaccaccguggacaacaucaaccugcacacgcagguggucgacaugagcaugaccuacggccagcaguucggccccaccuaccuggacggggccgacgugaccaagaucaagccccacaacucccacgagggcaagacguucuacgugcucccgaacgacgacacccugcgcgucgaggccuucgaguacuaccacaccaccgaccccagcuuccuggggcgguacauguccgcccucaaccacacgaagaaguggaaguacccccaggugaacggccugaccagcaucaagugggccgacaacaacugcuaccuggcgaccgcccuccugacccugcagcagaucgagcucaaguucaaccccccggcccugcaggacgccuacuaccgcgcgcgggccggggaggccgccaacuucugcgcccugauccucgcguacugcaacaagacggugggcgagcugggcgacguccgcgagaccauguccuaccuguuccagcacgccaaccucgacagcugcaagcgggugcugaacgucgugugcaagaccugcgggcagcagcagaccacccugaagggcguggaggccgucauguacauggggacgcucuccuacgagcaguucaagaagggcgugcagauccccugcaccugcgggaagcaggccaccaaguaccuggugcagcaggagagccccuucgucaugauguccgcccccccggcgcaguacgagcugaagcacggcaccuucacgugcgccagcgaguacaccggcaacuaccagugcgggcacuacaagcacaucaccuccaaggagacccucuacugcaucgacggcgcccugcugacgaagagcagcgaguacaaggggcccaucaccgacguguucuacaaggagaacuccuacaccaccacgaucaagcccgugaccuacaagcucgacggcgucgugugcaccgagaucgaccccaagcuggacaacuacuacaagaaggacaacagcuacuucaccgagcagccgaucgaccuggugcccaaccagcccuaccccaacgccuccuucgacaacuucaaguucgucugcgacaacaucaaguucgccgacgaccucaaccagcugacgggguacaagaagccggcgagccgcgagcugaaggugaccuucuuccccgaccucaacggcgacguggucgccaucgacuacaagcacuacacccccuccuucaagaagggcgccaagcugcugcacaagcccaucguguggcacgugaacaacgccaccaacaaggcgacguacaagccgaacaccuggugcauccggugccucuggagcaccaagcccgucgagaccuccaacagcuucgacgugcugaaguccgaggacgcccaggggauggacaaccuggccugcgaggaccucaagcccgugagcgaggaggucguggagaaccccacgauccagaaggacgugcuggagugcaacgucaagaccaccgagguggugggcgacaucauccugaagccggccaacaacucccucaagaucaccgaggaggucgggcacacggaccugauggccgcguacguggacaacagcucccugaccaucaagaagcccaacgagcucagccgcgugcugggccugaagacccucgccacccacgggcuggccgccgucaacuccgugcccugggacacgaucgccaacuacgcgaagccguuccugaacaagguggucagcaccaccaccaacaucgugacgcgcugccucaaccgggugugcaccaacuacaugcccuacuucuucacccugcugcuccagcugugcaccuucacccgcuccacgaacagccggaucaaggccuccaugcccaccaccaucgccaagaacaccgucaagagcgugugcaaguucugccuggaggccagcuucaacuaccucaagucccccaacuucagcaagcugaucaacaucaucaucugguuccugcuccuguccgugugccugggcagccucaucuacuccacggccgcgcugggcguccugaugagcaaccucgggaugccguccuacugcaccggcuaccgcgagggguaccugaacagcaccaacgugaccaucgccacguacugcaccggcuccauccccugcagcgugugccuguccggccucgacagccuggacaccuaccccucccuggagaccauccagaucacgaucagcuccuucaagugggaccucaccgccuucgggcuggucgccgagugguuccuggccuacauccucuucacccgguucuucuacgugcugggccuggcggccaucaugcagcucuucuucagcuacuucgccgugcacuucaucuccaacagcuggcugauguggcugaucaucaaccugguccagauggcccccaucuccgcgauggugcgcauguacaucuucuucgccagcuucuacuacguguggaagagcuacguccacgugguggacgggugcaacuccagcaccugcaugaugugcuacaagcggaaccgcgccacgcgggucgagugcaccaccaucgugaacggcguccgccgguccuucuacguguacgccaacgggggcaagggcuucugcaagcuccacaacuggaacugcgugaacugcgacaccuucugcgccgggagcacguucaucuccgacgaggucgcgcgcgaccugagccugcaguucaagcggccgaucaaccccaccgaccaguccagcuacaucguggacuccgugaccgucaagaacggcagcauccaccucuacuucgacaaggccgggcagaagaccuacgagcgccacucccugagccacuucgugaaccuggacaaccuccgggccaacaacacgaagggcucccugcccaucaacgugaucgucuucgacgggaagagcaagugcgaggaguccagcgccaaguccgccagcguguacuacucccagcugaugugccagcccauccuccugcuggaccaggcgcucgugagcgacgucggcgacagcgccgagguggccgugaagauguucgacgccuacgucaacaccuucuccagcaccuucaacgugccgauggagaagcugaagacccugguggccacggcggaggccgagcucgccaagaacgucucccuggacaacgugcugagcaccuucaucuccgccgcgcgccagggcuucguggacagcgacgucgagaccaaggacgugguggagugccucaagcugucccaccagagcgacaucgaggucaccggggacuccugcaacaacuacaugcugacguacaacaagguggagaacaugaccccccgggaccucggcgccugcaucgacugcagcgcccgccacaucaacgcccagguggccaagucccacaacaucgcgcugaucuggaacgucaaggacuucaugagccuguccgagcagcuccggaagcagauccgcagcgccgccaagaagaacaaccugcccuucaagcugaccugcgccaccacgcgccagguggugaacgucgugaccaccaagaucgcccucaaggggggcugaggacuagucccuguucccagagcccacuuuuuuuucuuuuuuugaaauaaaauagccugucuuucagaucucaaaggcucuuuucagagccaccaaaaaaaaaaaaaaaaaaaaaaaaaaaaaaaaaaaaaaaaaaaaaaaaaaaaaaaaaaaaaaaaaaaaaaaaaaaaaaaaaaaaaaaaaaaaaaaaaaaaa

SEQ ID NO: 19874 - RNA, 6113 nt, Artificial Sequence
  SARS-CoV-2__MT706200.1__non-structural protein 3 (NSP3) mRNA gc
aggagagucccgcagucggcguccagcggcucugcuuguucgugugugugucguugcaggccuuauucaagcuuaccauggcccccaccaaggugaccuucggcgacgacacggucaucgaggugcagggguacaagagcgugaacaucaccuucgagcuggacgagcgcaucgacaagguccucaacgagaagugcuccgccuacaccguggagcugggcaccgaggugaacgaguucgcgugcgucguggccgacgccgugaucaagacgcugcagccggucagcgagcuccugaccccccuggggaucgaccucgacgagugguccauggccaccuacuaccuguucgacgagagcggcgaguucaagcuggccucccacauguacugcagcuucuacccccccgacgaggacgaggaggagggggacugcgaggaggaggaguucgagccguccacccaguacgaguacggcacggaggacgacuaccagggcaagccccucgaguucggggcgaccagcgccgcccugcagcccgaggaggagcaggaggaggacuggcuggacgacgacucccagcagaccgugggccagcaggacgggagcgaggacaaccagaccacgaccauccagaccaucguggagguccagccccagcucgagauggagcugaccccgguggugcagacgaucgaggucaacuccuucagcggcuaccugaagcucaccgacaacguguacaucaagaacgccgacaucguggaggaggcgaagaaggucaagcccaucgugguggucaacgccgccaacguguaccugaagcacgggggcggcguggccggggcccugaacaaggcgaccaacaacgccaugcaggucgaguccgacgacuacaucgccaccaacggcccccucaagguggggggcagcugcguccuguccggccacaaccuggccaagcacugccuccacgugguggggcccaacgucaacaagggcgaggacauccagcugcugaagagcgccuacgagaacuucaaccagcacgaggugcuccuggcgccgcugcucuccgccgggaucuucggcgccgaccccauccacagccugcgggugugcgucgacacggugcgcaccaacguguaccuggccgucuucgacaagaaccucuacgacaagcugguguccagcuuccuggagaugaagagcgagaagcagguggagcagaagaucgccgagauccccaaggaggaggucaagcccuucaucaccgaguccaagccgagcguggagcagcggaagcaggacgacaagaagaucaaggcgugcguggaggaggucaccacgacccucgaggagaccaaguuccugaccgagaaccugcuccuguacaucgacaucaacgggaaccugcaccccgacuccgccacgcucgugagcgacaucgacaucaccuuccugaagaaggacgcccccuacaucgugggcgacgucgugcaggagggcgugcugaccgccgucgugauccccaccaagaaggccgggggcacgaccgagaugcucgcgaaggcccugcgcaaggugccgaccgacaacuacaucaccacguaccccgggcagggccugaacggguacaccgucgaggaggccaagaccgugcucaagaagugcaaguccgccuucuacauccugcccagcaucaucuccaacgagaagcaggagauccugggcaccgugagcuggaaccuccgggagaugcuggcgcacgccgaggagacccgcaagcugaugcccgucugcguggagacgaaggccaucguguccaccauccagcggaaguacaagggcaucaagauccaggagggggucguggacuacggcgcccgcuucuacuucuacaccagcaagaccacgguggccucccugaucaacacccucaacgaccugaacgagacccuggucaccaugccgcucggguacgugacgcacggccugaaccuggaggaggcggcccgguacaugcgcagccucaaggugcccgccaccgucuccgugagcucccccgacgccgugaccgccuacaacggguaccugaccagcuccagcaagacgcccgaggagcacuucaucgagaccaucucccuggcgggcagcuacaaggacuggagcuacuccggccagagcacccagcucgggaucgaguuccugaagcggggcgacaaguccgucuacuacaccagcaacccgacgaccuuccaccuggacggggaggugaucaccuucgacaaccucaagacccugcugucccuccgcgaggugcggacgaucaaggucuucaccaccguggacaacaucaaccugcacacccagguggucgacaugagcaugacguacggccagcaguucggccccaccuaccuggacggggccgacgugaccaagaucaagccccacaacucccacgagggcaagaccuucuacgugcucccgaacgacgacacgcugcgcgucgaggccuucgaguacuaccacaccaccgaccccagcuuccuggggcgguacauguccgcccucaaccacaccaagaaguggaaguacccccaggugaacggccugacgagcaucaagugggccgacaacaacugcuaccuggcgaccgcccuccugacccugcagcagaucgagcucaaguucaaccccccggcccugcaggacgccuacuaccgcgcgcgggccggggaggccgccaacuucugcgcccugauccucgcguacugcaacaagaccgugggcgagcugggcgacguccgcgagacgauguccuaccuguuccagcacgccaaccucgacagcugcaagcgggugcugaacgucgugugcaagaccugcgggcagcagcagaccacccugaagggcguggaggccgucauguacauggggacccucuccuacgagcaguucaagaagggcgugcagauccccugcacgugcgggaagcaggccaccaaguaccuggugcagcaggagagccccuucgucaugauguccgcccccccggcgcaguacgagcugaagcacggcaccuucaccugcgccagcgaguacacgggcaacuaccagugcgggcacuacaagcacaucaccuccaaggagacccucuacugcaucgacggcgcccugcugaccaagagcagcgaguacaaggggcccaucacggacguguucuacaaggagaacuccuacaccaccaccaucaagcccgugacguacaagcucgacggcgucgugugcaccgagaucgaccccaagcuggacaacuacuacaagaaggacaacagcuacuucaccgagcagccgaucgaccuggugcccaaccagcccuaccccaacgccuccuucgacaacuucaaguucgucugcgacaacaucaaguucgccgacgaccucaaccagcugaccggguacaagaagccggcgagccgcgagcugaaggugacguucuuccccgaccucaacggcgacguggucgccaucgacuacaagcacuacacccccuccuucaagaagggcgccaagcugcugcacaagcccaucguguggcacgugaacaacgccaccaacaaggcgaccuacaagccgaacacguggugcauccggugccucuggagcaccaagcccgucgagaccuccaacagcuucgacgugcugaaguccgaggacgcccaggggauggacaaccuggccugcgaggaccucaagcccgugagcgaggaggucguggagaaccccaccauccagaaggacgugcuggagugcaacgucaagacgaccgagguggugggcgacaucauccugaagccggccaacaacucccucaagaucaccgaggaggucgggcacaccgaccugauggccgcguacguggacaacagcucccugacgaucaagaagcccaacgagcucagccgcgugcugggccugaagacccucgccacccacgggcuggccgccgucaacuccgugcccugggacaccaucgccaacuacgcgaagccguuccugaacaagguggucagcacgaccaccaacaucgugacccgcugccucaaccgggugugcacgaacuacaugcccuacuucuucacccugcugcuccagcugugcaccuucacccgcuccaccaacagccggaucaaggccuccaugcccacgaccaucgccaagaacaccgucaagagcgugggcaaguucugccuggaggccagcuucaacuaccucaagucccccaacuucagcaagcugaucaacaucaucaucugguuccugcuccuguccgugugccugggcagccucaucuacuccaccgccgcgcuggggguccugaugagcaaccucggcaugccguccuacugcacgggguaccgcgagggcuaccugaacagcaccaacgugaccaucgccaccuacugcacgggcuccauccccugcagcgugugccuguccgggcucgacagccuggacaccuaccccucccuggagaccauccagaucaccaucagcuccuucaagugggaccucacggccuucggccuggucgccgagugguuccuggccuacauccucuucacccgguucuucuacgugcuggggcuggcggccaucaugcagcucuucuucagcuacuucgccgugcacuucaucuccaacagcuggcugauguggcugaucaucaaccugguccagauggcccccaucuccgcgauggugcgcauguacaucuucuucgccagcuucuacuacguguggaagagcuacguccacgugguggacggcugcaacuccagcaccugcaugaugugcuacaagcggaaccgcgccacccgggucgagugcacgaccaucgugaacgggguccgccgguccuucuacguguacgccaacggcggcaagggguucugcaagcuccacaacuggaacugcgugaacugcgacaccuucugcgccggcagcaccuucaucuccgacgaggucgcgcgcgaccugagccugcaguucaagcggccgaucaaccccacggaccaguccagcuacaucguggacuccgugaccgucaagaacgggagcauccaccucuacuucgacaaggccggccagaagaccuacgagcgccacucccugagccacuucgugaaccuggacaaccuccgggccaacaacaccaaggggucccugcccaucaacgugaucgucuucgacggcaagagcaagugcgaggaguccagcgccaaguccgccagcguguacuacucccagcugaugugccagcccauccuccugcuggaccaggcgcucgugagcgacgucggcgacagcgccgagguggccgugaagauguucgacgccuacgucaacacguucuccagcaccuucaacgugccgauggagaagcugaagacccugguggccaccgcggaggccgagcucgccaagaacgucucccuggacaacgugcugagcacguucaucuccgccgcgcgccagggguucguggacagcgacgucgagaccaaggacgugguggagugccucaagcugucccaccagagcgacaucgaggucaccggcgacuccugcaacaacuacaugcugaccuacaacaagguggagaacaugacgccccgggaccucggggccugcaucgacugcagcgcccgccacaucaacgcccagguggccaagucccacaacaucgcgcugaucuggaacgucaaggacuucaugagccuguccgagcagcuccggaagcagauccgcagcgccgccaagaagaacaaccugcccuucaagcugaccugcgccaccacccgccagguggugaacgucgugacgaccaagaucgcccucaagggcgggugaggacuagucccuguucccagagcccacuuuuuuuucuuuuuuugaaauaaaauagccugucuuucagaucucaaaggcucuuuucagagccaccaaaaaaaaaaaaaaaaaaaaaaaaaaaaaaaaaaaaaaaaaaaaaaaaaaaaaaaaaaaaaaaaaaaaaaaaaaaaaaaaaaaaaaaaaaaaaaaaaaaaa

SEQ ID NO: 19875 - RNA, 6113 nt, Artificial Sequence
  SARS-CoV-2__MT706216.1__non-structural protein 3 (NSP3) mRNA gc
aggagagucccgcagucggcguccagcggcucugcuuguucgugugugugucguugcaggccuuauucaagcuuaccauggcccccaccaaggugaccuucggcgacgacacggucaucgaggugcagggguacaagagcgugaacaucaccuucgagcuggacgagcgcaucgacaagguccucaacgagaagugcuccgccuacaccguggagcugggcaccgaggugaacgaguucgcgugcgucguggccgacgccgugaucaagacgcugcagccggucagcgagcuccugaccccccuggggaucgaccucgacgagugguccauggccaccuacuaccuguucgacgagagcggcgaguucaagcuggccucccacauguacugcagcuucuacccccccgacgaggacgaggaggagggggacugcgaggaggaggaguucgagccguccacccaguacgaguacggcacggaggacgacuaccagggcaagccccucgaguucggggcgaccagcgccgcccugcagcccgaggaggagcaggaggaggacuggcuggacgacgacucccagcagaccgugggccagcaggacgggagcgaggacaaccagaccacgaccauccagaccaucguggagguccagccccagcucgagauggagcugaccccgguggugcagacgaucgaggucaacuccuucagcggcuaccugaagcucaccgacaacguguacaucaagaacgccgacaucguggaggaggcgaagaaggucaagcccaccgugguggucaacgccgccaacguguaccugaagcacgggggcggcguggccggggcccugaacaaggcgaccaacaacgccaugcaggucgaguccgacgacuacaucgccacgaacggcccccucaagguggggggcagcugcguccuguccggccacaaccuggccaagcacugccuccacgugguggggcccaacgucaacaagggcgaggacauccagcugcugaagagcgccuacgagaacuucaaccagcacgaggugcuccuggcgccgcugcucuccgccgggaucuucggcgccgaccccauccacagccugcgggugugcgucgacaccgugcgcaccaacguguaccuggccgucuucgacaagaaccucuacgacaagcugguguccagcuuccuggagaugaagagcgagaagcagguggagcagaagaucgccgagauccccaaggaggaggucaagcccuucaucaccgaguccaagccgagcguggagcagcggaagcaggacgacaagaagaucaaggcgugcguggaggaggucacgaccacccucgaggagaccaaguuccugacggagaaccugcuccuguacaucgacaucaacgggaaccugcaccccgacuccgccacccucgugagcgacaucgacaucaccuuccugaagaaggacgcccccuacaucgugggcgacgucgugcaggagggcgugcugaccgccgucgugauccccacgaagaaggccgggggcaccaccgagaugcucgcgaaggcccugcgcaaggugccgaccgacaacuacaucacgaccuaccccgggcagggccugaacggguacaccgucgaggaggccaagaccgugcucaagaagugcaaguccgccuucuacauccugcccagcaucaucuccaacgagaagcaggagauccugggcaccgugagcuggaaccuccgggagaugcuggcgcacgccgaggagacgcgcaagcugaugcccgucugcguggagaccaaggccaucguguccaccauccagcggaaguacaagggcaucaagauccaggagggggucguggacuacggcgcccgcuucuacuucuacaccagcaagacgaccguggccucccugaucaacacccucaacgaccugaacgagacccuggucacgaugccgcucggguacgugacccacggccugaaccuggaggaggcggcccgguacaugcgcagccucaaggugcccgccaccgucuccgugagcucccccgacgccgugaccgccuacaacggguaccugacgagcuccagcaagacccccgaggagcacuucaucgagaccaucucccuggcgggcagcuacaaggacuggagcuacuccggccagagcacccagcucgggaucgaguuccugaagcggggcgacaaguccgucuacuacacgagcaacccgaccaccuuccaccuggacggggaggugaucaccuucgacaaccucaagacgcugcugucccuccgcgaggugcggaccaucaaggucuucaccaccguggacaacaucaaccugcacacgcagguggucgacaugagcaugaccuacggccagcaguucggccccaccuaccuggacggggccgacgugaccaagaucaagccccacaacucccacgagggcaagacguucuacgugcucccgaacgacgacacccugcgcgucgaggccuucgaguacuaccacaccaccgaccccagcuuccuggggcgguacauguccgcccucaaccacacgaagaaguggaaguacccccaggugaacggccugaccagcaucaagugggccgacaacaacugcuaccuggcgaccgcccuccugacccugcagcagaucgagcucaaguucaaccccccggcccugcaggacgccuacuaccgcgcgcgggccggggaggccgccaacuucugcgcccugauccucgcguacugcaacaagacggugggcgagcugggcgacguccgcgagaccauguccuaccuguuccagcacgccaaccucgacagcugcaagcgggugcugaacgucgugugcaagaccugcgggcagcagcagaccacccugaagggcguggaggccgucauguacauggggacgcucuccuacgagcaguucaagaagggcgugcagauccccugcaccugcgggaagcaggccaccaaguaccuggugcagcaggagagccccuucgucaugauguccgcccccccggcgcaguacgagcugaagcacggcaccuucacgugcgccagcgaguacaccggcaacuaccagugcgggcacuacaagcacaucaccuccaaggagacccucuacugcaucgacggcgcccugcugacgaagagcagcgaguacaaggggcccaucaccgacguguucuacaaggagaacuccuacaccaccacgaucaagcccgugaccuacaagcucgacggcgucgugugcaccgagaucgaccccaagcuggacaacuacuacaagaaggacaacagcuacuucaccgagcagccgaucgaccuggugcccaaccagcccuaccccaacgccuccuucgacaacuucaaguucgucugcgacaacaucaaguucgccgacgaccucaaccagcugacgggguacaagaagccggcgagccgcgagcugaaggugaccuucuuccccgaccucaacggcgacguggucgccaucgacuacaagcacuacacccccuccuucaagaagggcgccaagcugcugcacaagcccaucguguggcacgugaacaacgccaccaacaaggcgacguacaagccgaacaccuggugcauccggugccucuggagcaccaagcccgucgagaccuccaacagcuucgacgugcugaaguccgaggacgcccaggggauggacaaccuggccugcgaggaccucaagcccgugagcgaggaggucguggagaaccccacgauccagaaggacgugcuggacugcaacgucaagaccaccgagguggugggcgacaucauccugaagccggccaacaacucccucaagaucaccgaggaggucgggcacacggaccugauggccgcguacguggacaacagcucccugaccaucaagaagcccaacgagcucagccgcgugcugggccugaagacccucgccacccacgggcuggccgccgucaacuccgugcccugggacacgaucgccaacuacgcgaagccguuccugaacaagguggucagcaccaccaccaacaucgugacgcgcugccucaaccgggugugcaccaacuacaugcccuacuucuucacccugcugcuccagcugugcaccuucacccgcuccacgaacagccggaucaaggccuccaugcccaccaccaucgccaagaacaccgucaagagcgugggcaaguucugccuggaggccagcuucaacuaccucaagucccccaacuucagcaagcugaucaacaucaucaucugguuccugcuccuguccgugugccugggcagccucaucuacuccacggccgcgcuggggguccugaugagcaaccucggcaugccguccuacugcaccggguaccgcgagggcuaccugaacagcaccaacgugaccaucgccacguacugcaccggcuccauccccugcagcgugugccuguccgggcucgacagccuggacaccuaccccucccuggagaccauccagaucacgaucagcuccuucaagugggaccucaccgccuucggccuggucgccgagugguuccuggccuacauccucuucacccgguucuucuacgugcuggggcuggcggccaucaugcagcucuucuucagcuacuucgccgugcacuucaucuccaacagcuggcugauguggcugaucaucaaccugguccagauggcccccaucuccgcgauggugcgcauguacaucuucuucgccagcuucuacuacguguggaagagcuacguccacgugguggacggcugcaacuccagcaccugcaugaugugcuacaagcggaaccgcgccacgcgggucgagugcaccaccaucgugaacgggguccgccgguccuucuacguguacgccaacggcggcaagggguucugcaagcuccacaacuggaacugcgugaacugcgacaccuucugcgccggcagcacguucaucuccgacgaggucgcgcgcgaccugagccugcaguucaagcggccgaucaaccccaccgaccaguccagcuacaucguggacuccgugaccgucaagaacgggagcauccaccucuacuucgacaaggccggccagaagaccuacgagcgccacucccugagccacuucgugaaccuggacaaccuccgggccaacaacacgaaggggucccugcccaucaacgugaucgucuucgacggcaagagcaagugcgaggaguccagcgccaaguccgccagcguguacuacucccagcugaugugccagcccauccuccugcuggaccaggcgcucgugagcgacgucggcgacagcgccgagguggccgugaagauguucgacgccuacgucaacaccuucuccagcaccuucaacgugccgauggagaagcugaagacccugguggccacggcggaggccgagcucgccaagaacgucucccuggacaacgugcugagcaccuucaucuccgccgcgcgccagggguucguggacagcgacgucgagaccaaggacgugguggagugccucaagcugucccaccagagcgacaucgaggucaccggcgacuccugcaacaacuacaugcugacguacaacaagguggagaacaugaccccccgggaccucggggccugcaucgacugcagcgcccgccacaucaacgcccagguggccaagucccacaacaucgcgcugaucuggaacgucaaggacuucaugagccuguccgagcagcuccggaagcagauccgcagcgccgccaagaagaacaaccugcccuucaagcugaccugcgccaccacgcgccagguggugaacgucgugaccaccaagaucgcccucaagggcgggugaggacuagucccuguucccagagcccacuuuuuuuucuuuuuuugaaauaaaauagccugucuuucagaucucaaaggcucuuuucagagccaccaaaaaaaaaaaaaaaaaaaaaaaaaaaaaaaaaaaaaaaaaaaaaaaaaaaaaaaaaaaaaaaaaaaaaaaaaaaaaaaaaaaaaaaaaaaaaaaaaaaaa

SEQ ID NO: 19876 - RNA, 6113 nt, Artificial Sequence
  SARS-CoV-2__MT706222.1__non-structural protein 3 (NSP3) mRNA gc
aggagagucccgcagucggcguccagcggcucugcuuguucgugugugugucguugcaggccuuauucaagcuuaccauggcccccaccaaggugaccuucggcgacgacacggucaucgaggugcagggguacaagagcgugaacaucaccuucgagcuggacgagcgcaucgacaagguccucaacgagaagugcuccgccuacaccguggagcugggcaccgaggugaacgaguucgcgugcgucguggccgacgccgugaucaagacgcugcagccggucagcgagcuccugaccccccuggggaucgaccucgacgagugguccauggccaccuacuaccuguucgacgagagcggcgaguucaagcuggccucccacauguacugcagcuucuacccccccgacgaggacgaggaggagggggacugcgaggaggaggaguucgagccguccacccaguacgaguacggcacggaggacgacuaccagggcaagccccucgaguucggggcgaccagcgccgcccugcagcccgaggaggagcaggaggaggacuggcuggacgacgacucccagcagaccgugggccagcaggacgggagcgaggacaaccagaccacgaccauccagaccaucguggagguccagccccagcucgagauggagcugaccccgguggugcagacgaucgaggucaacuccuucagcggcuaccugaagcucaccgacaacguguacaucaagaacgccgacaucguggaggaggcgaagaaggucaagcccaccgugguggucaacgccgccaacguguaccugaagcacgggggcggcguggccggggcccugaacaaggcgaccaacaacgccaugcaggucgaguccgacgacuacaucgccacgaacggcccccucaagguggggggcagcugcguccuguccggccacaaccuggccaagcacugccuccacgugguggggcccaacgucaacaagggcgaggacauccagcugcugaagagcgccuacgagaacuucaaccagcacgaggugcuccuggcgccgcugcucuccgccgggaucuucggcgccgaccccauccacagccugcgggugugcgucgacaccgugcgcaccaacguguaccuggccgucuucgacaagaaccucuacgacaagcugguguccagcuuccuggagaugaagagcgagaagcagguggagcagaagaucgccgagauccccaaggaggaggucaagcccuucaucaccgaguccaagccgagcguggagcagcggaagcaggacgacaagaagaucaaggcgugcguggaggaggucacgaccacccucgaggagaccaaguuccugacggagaaccugcuccuguacaucgacaucaacgggaaccugcaccccgacuccgccacccucgugagcgacaucgacaucaccuuccugaagaaggacgcccccuacaucgugggcgacgucgugcaggagggcgugcugaccgccgucgugauccccacgaagaaggccgggggcaccaccgagaugcucgcgaaggcccugcgcaaggugccgaccgacaacuacaucacgaccuaccccgggcagggccugaacggguacaccgucgaggaggccaagaccgugcucaagaagugcaaguccgccuucuacauccugcccagcaucaucuccaacgagaagcaggagauccugggcaccgugagcuggaaccuccgggagaugcuggcgcacgccgaggagacgcgcaagcugaugcccgucugcguggagaccaaggccaucguguccaccauccagcggaaguacaagggcaucaagauccaggagggggucguggacuacggcgcccgcuucuacuucuacaccagcaagacgaccguggccucccugaucaacacccucaacgaccugaacgagacccuggucacgaugccgcucggguacgugacccacggccugaaccuggaggaggcggcccgguacaugcgcagccucaaggugcccgccaccgucuccgugagcucccccgacgccgugaccgccuacaacggguaccugacgagcuccagcaagacccuggaggagcacuucaucgagaccaucucccucgcgggcagcuacaaggacuggagcuacuccggccagagcacccagcuggggaucgaguuccugaagcggggcgacaaguccgucuacuacacgagcaaccccaccaccuuccaccucgacggggaggugaucaccuucgacaaccugaagacgcugcucucccugcgcgaggugcggaccaucaaggucuucaccaccguggacaacaucaaccugcacacgcagguggucgacaugagcaugaccuacggccagcaguucggcccgaccuaccucgacggggccgacgugaccaagaucaagccccacaacucccacgagggcaagacguucuacgugcugcccaacgacgacacccugcgcgucgaggccuucgaguacuaccacaccaccgacccgagcuuccucgggcgguacauguccgcccugaaccacacgaagaaguggaaguacccccaggugaacggccugaccagcaucaagugggccgacaacaacugcuaccucgcgaccgcccugcugacccuccagcagaucgagcugaaguucaacccccccgcccugcaggacgccuacuaccgcgcgcgggccggggaggccgccaacuucugcgcccucauccuggcguacugcaacaagacggugggcgagcugggcgacguccgcgagaccauguccuaccucuuccagcacgccaaccuggacagcugcaagcgggugcugaacgucgugugcaagaccugcgggcagcagcagaccacccucaagggcguggaggccgucauguacauggggacgcuguccuacgagcaguucaagaagggcgugcagaucccgugcaccugcgggaagcaggccaccaaguaccuggugcagcaggagagccccuucgucaugauguccgccccccccgcgcaguacgagcucaagcacggcaccuucacgugcgccagcgaguacaccggcaacuaccagugcgggcacuacaagcacaucaccuccaaggagacccuguacugcaucgacggcgcccugcucacgaagagcagcgaguacaaggggccgaucaccgacguguucuacaaggagaacuccuacaccaccacgaucaagcccgugaccuacaagcuggacggcgucgugugcaccgagaucgaccccaagcuggacaacuacuacaagaaggacaacagcuacuucaccgagcagcccaucgaccucgugccgaaccagcccuaccccaacgccuccuucgacaacuucaaguucgucugcgacaacaucaaguucgccgacgaccugaaccagcugacgggguacaagaagcccgcgagccgcgagcucaaggugaccuucuucccggaccugaacggcgacguggucgccaucgacuacaagcacuacacccccuccuucaagaagggcgccaagcugcuccacaagcccaucguguggcacgugaacaacgccaccaacaaggcgacguacaagcccaacaccuggugcauccggugccuguggagcaccaagccggucgagaccuccaacagcuucgacgugcugaaguccgaggacgcccaggggauggacaaccucgccugcgaggaccugaagcccgugagcgaggaggucguggagaaccccacgauccagaaggacgugcuggagugcaacgucaagaccaccgagguggugggcgacaucauccucaagcccgccaacaacucccugaagaucaccgaggaggucgggcacacggaccugauggccgcguacguggacaacagcucccucaccaucaagaagccgaacgagcugagccgcgugcugggccucaagacccuggccacccacgggcuggccgccgucaacuccgugcccugggacacgaucgccaacuacgcgaagcccuuccucaacaagguggucagcaccaccaccaacaucgugacgcgcugccugaaccgggugugcaccaacuacaugccguacuucuucacccugcuccugcagcugugcaccuucacccgcuccacgaacagccggaucaaggccuccaugcccaccaccaucgccaagaacaccgucaagagcgugggcaaguucugccucgaggccagcuucaacuaccugaagucccccaacuucagcaagcugaucaacaucaucaucugguuccuccugcuguccgugugccucggcagccugaucuacuccacggccgcgcuggggguccucaugagcaaccugggcaugcccuccuacugcaccggguaccgcgagggcuaccugaacagcaccaacgugaccaucgccacguacugcaccggcuccaucccgugcagcgugugccucuccgggcuggacagccuggacaccuaccccucccucgagaccauccagaucacgaucagcuccuucaagugggaccugaccgccuucggccuggucgccgagugguuccucgccuacauccuguucacccgguucuucuacgugcuggggcucgcggccaucaugcagcuguucuucagcuacuucgccgugcacuucaucuccaacagcuggcugauguggcugaucaucaaccucguccagauggcccccaucuccgcgauggugcgcauguacaucuucuucgccagcuucuacuacguguggaagagcuacguccacgugguggacggcugcaacuccagcaccugcaugaugugcuacaagcggaaccgcgccacgcgggucgagugcaccaccaucgugaacgggguccgccgguccuucuacguguacgccaacggcggcaagggguucugcaagcugcacaacuggaacugcgugaacugcgacaccuucugcgccggcagcacguucaucuccgacgaggucgcgcgcgaccugagccuccaguucaagcggcccaucaacccgaccgaccaguccagcuacaucguggacuccgugaccgucaagaacgggagcauccaccuguacuucgacaaggccggccagaagaccuacgagcgccacucccugagccacuucgugaaccucgacaaccugcgggccaacaacacgaaggggucccugcccaucaacgugaucgucuucgacggcaagagcaagugcgaggaguccagcgccaaguccgccagcguguacuacucccagcucaugugccagcccauccugcugcucgaccaggcgcuggugagcgacgucggcgacagcgccgagguggccgugaagauguucgacgccuacgucaacaccuucuccagcaccuucaacgugcccauggagaagcugaagacccucguggccacggcggaggccgagcuggccaagaacgucucccuggacaacgugcucagcaccuucaucuccgccgcgcgccagggguucguggacagcgacgucgagaccaaggacgugguggagugccugaagcugucccaccagagcgacaucgaggucaccggcgacuccugcaacaacuacaugcucacguacaacaagguggagaacaugaucccgcgggaccugggggccugcaucgacugcagcgcccgccacaucaacgcccagguggccaagucccacaacaucgcgcugaucuggaacgucaaggacuucaugagccucuccgagcagcugcggaagcagauccgcagcgccgccaagaagaacaaccugcccuucaagcucaccugcgccaccacccgccagguggugaacgucgugacgaccaagaucgcccugaagggcgggugaggacuagucccuguucccagagcccacuuuuuuuucuuuuuuugaaauaaaauagccugucuuucagaucucaaaggcucuuuucagagccaccaaaaaaaaaaaaaaaaaaaaaaaaaaaaaaaaaaaaaaaaaaaaaaaaaaaaaaaaaaaaaaaaaaaaaaaaaaaaaaaaaaaaaaaaaaaaaaaaaaaaa

SEQ ID NO: 19877 - RNA, 6113 nt, Artificial Sequence
  SARS-CoV-2__MT706287.1__non-structural protein 3 (NSP3) mRNA gc
aggagagucccgcagucggcguccagcggcucugcuuguucgugugugugucguugcaggccuuauucaagcuuaccauggcccccaccaaggugaccuucggcgacgacacggucaucgaggugcagggguacaagagcgugaacaucaccuucgagcuggacgagcgcaucgacaagguccucaacgagaagugcuccgccuacaccguggagcugggcaccgaggugaacgaguucgcgugcgucguggccgacgccgugaucaagacgcugcagccggucagcgagcuccugaccccccuggggaucgaccucgacgagugguccauggccaccuacuaccuguucgacgagagcggcgaguucaagcuggccucccacauguacugcagcuucuacccccccgacgaggacgaggaggagggggacugcgaggaggaggaguucgagccguccacccaguacgaguacggcacggaggacgacuaccagggcaagccccucgaguucggggcgaccagcgccgcccugcagcccgaggaggagcaggaggaggacuggcuggacgacgacucccagcagaccgugggccagcaggacgggagcgaggacaaccagaccacgaccauccagaccaucguggagguccagccccagcucgagauggagcugaccccgguggugcagacgaucgaggucaacuccuucagcggcuaccugaagcucaccgacaacguguacaucaagaacgccgacaucguggaggaggcgaagaaggucaagcccaccgugguggucaacgccgccaacguguaccugaagcacgggggcggcguggccggggcccugaacaaggcgaccaacaacgccaugcaggucgaguccgacgacuacaucgccacgaacggcccccucaagguggggggcagcugcguccuguccggccacaaccuggccaagcacugccuccacgugguggggcccaacgucaacaagggcgaggacauccagcugcugaagagcgccuacgagaacuucaaccagcacgaggugcuccuggcgccgcugcucuccgccgggaucuucggcgccgaccccauccacagccugcgggugugcgucgacaccgugcgcaccaacguguaccuggccgucuucgacaagaaccucuacgacaagcugguguccagcuuccuggagaugaagagcgagaagcagguggagcagaagaucgccgagauccccaaggaggaggucaagcccuucaucaccgaguccaagccgagcguggagcagcggaagcaggacgacaagaagaucaaggcgugcguggaggaggucacgaccacccucgaggagaccaaguuccugacggagaaccugcuccuguacaucgacaucaacgggaaccugcaccccgacuccgccacccucgugagcgacaucgacaucaccuuccugaagaaggacgcccccuacaucgugggcgacgucgugcaggagggcgugcugaccgccgucgugauccccacgaagaaggccgggggcaccaccgagaugcucgcgaaggcccugcgcaaggugccgaccgacaacuacaucacgaccuaccccgggcagggccugaacggguacaccgucgaggaggccaagaccgugcucaagaagugcaaguccgccuucuacauccugcccagcaucaucuccaacgagaagcaggagauccugggcaccgugagcuggaaccuccgggagaugcuggcgcacgccgaggagacgcgcaagcugaugcccgucugcguggagaccaaggccaucguguccaccauccagcggaaguacaagggcaucaagauccaggagggggucguggacuacggcgcccgcuucuacuucuacaccagcaagacgaccguggccucccugaucaacacccucaacgaccugaacgagacccuggucacgaugccgcucggguacgugacccacggccugaaccuggaggaggcggcccgguacaugcgcagccucaaggugcccgccaccgucuccgugagcucccccgacgccgugaccgccuacaacggguaccugacgagcuccagcaagacccccgaggagcacuucaucgagaccaucucccuggcgggcagcuacaaggacuggagcuacuccggccagagcacccagcucgggaucgaguuccugaagcggggcgacaaguccgucuacuacacgagcaacccgaccaccuuccaccuggacggggaggugaucaccuucgacaaccucaagacgcugcugucccuccgcgaggugcggaccaucaaggucuucaccaccguggacaacaucaaccugcacacgcagguggucgacaugagcaugaccuacggccagcaguucggccccaccuaccuggacggggccgacgugaccaagaucaagccccacaacucccacgagggcaagacguucuacgugcucccgaacgacgacacccugcgcgucgaggccuucgaguacuaccacaccaccgaccccagcuuccuggggcgguacauguccgcccucaaccacacgaagaaguggaaguacccccaggugaacggccugaccagcaucaagugggccgacaacaacugcuaccuggcgaccgcccuccugacccugcagcagaucgagcucaaguucaaccccccggcccugcaggacgccuacuaccgcgcgcgggccggggaggccgccaacuucugcgcccugauccucgcguacugcaacaagacggugggcgagcugggcgacguccgcgagaccauguccuaccuguuccagcacgccaaccucgacagcugcaagcgggugcugaacgucgugugcaagaccugcgggcagcagcagaccacccugaagggcguggaggccgucauguacauggggacgcucuccuacgagcaguucaagaagggcgugcagauccccugcaccugcgggaagcaggccaccaaguaccuggugcagcaggagagccccuucgucaugauguccgcccccccggcgcaguacgagcugaagcacggcaccuucacgugcgccagcgaguacaccggcaacuaccagugcgggcacuacaagcacaucaccuccaaggagacccucuacugcaucgacggcgcccugcugacgaagagcagcgaguacaaggggcccaucaccgacguguucuacaaggagaacuccuacaccaccacgaucaagcccgugaccuacaagcucgacggcgucgugugcaccgagaucgaccccaagcuggacaacuacuacaagaaggacaacagcuacuucaccgagcagccgaucgaccuggugcccaaccagcccuaccccaacgccuccuucgacaacuucaaguucgucugcgacaacaucaaguucgccgacgaccucaaccagcugacgggguacaagaagccggcgagccgcgagcugaaggugaccuucuuccccgaccucaacggcgacguggucgccaucgacuacaagcacuacacccccuccuucaagaagggcgccaagcugcugcacaagcccaucguguggcacgugaacaacgccaccaacaaggcgacguacaagccgaacaccuggugcauccggugccucuggagcaccaagcccgucgagaccuccaacagcuucgacgugcugaaguccgaggacgcccaggggauggacaaccuggccugcgaggaccucaagcccgugagcgaggaggucguggagaaccccacgauccagaaggacgugcuggagugcaacgucaagaccaccgagguggugggcgacaucauccugaagccggccaacaacucccucaagaucaccgaggaggucgggcacacggaccugauggccgcguacguggacaacagcucccugaccgugaagaagcccaacgagcucagccgcguccugggccugaagacccucgccacccacgggcuggccgccgugaacuccgugcccugggacacgaucgccaacuacgcgaagccguuccugaacaaggucgugagcaccaccaccaacaucgugacgcgcugccucaaccgggucugcaccaacuacaugcccuacuucuucacccugcugcuccagcugugcaccuucacccgcuccacgaacagccggaucaaggccuccaugcccaccaccaucgccaagaacaccgugaagagcgugggcaaguucugccuggaggccagcuucaacuaccucaagucccccaacuucagcaagcugaucaacaucaucaucugguuccugcuccuguccgucugccugggcagccucaucuacuccacggccgcgcugggggugcugaugagcaaccucggcaugccguccuacugcaccggguaccgcgagggcuaccugaacagcaccaacgugaccaucgccacguacugcaccggcuccauccccugcagcgucugccuguccgggcucgacagccuggacaccuaccccucccuggagaccauccagaucacgaucagcuccuucaagugggaccucaccgccuucggccugguggccgagugguuccuggccuacauccucuucacccgguucuucuacgugcuggggcuggcggccaucaugcagcucuucuucagcuacuucgccguccacuucaucuccaacagcuggcugauguggcugaucaucaaccuggugcagauggcccccaucuccgcgauggugcgcauguacaucuucuucgccagcuucuacuacgucuggaagagcuacgugcacguggucgacggcugcaacuccagcaccugcaugaugugcuacaagcggaaccgcgccacgcggguggagugcaccaccaucgucaacggggugcgccgguccuucuacguguacgccaacggcggcaagggguucugcaagcuccacaacuggaacugcgucaacugcgacaccuucugcgccggcagcacguucaucuccgacgagguggcgcgcgaccugagccugcaguucaagcggccgaucaaccccaccgaccaguccagcuacaucguggacuccgucaccgugaagaacgggagcauccaccucuacuucgacaaggccggccagaagaccuacgagcgccacucccugagccacuucgugaaccuggacaaccuccgggccaacaacacgaaggggucccugcccaucaacgucaucguguucgacggcaagagcaagugcgaggaguccagcgccaaguccgccagcguguacuacucccagcugaugugccagcccauccuccugcuggaccaggcgcucgucagcgacgugggcgacagcgccgagguggccgucaagauguucgacgccuacgugaacaccuucuccagcaccuucaacgugccgauggagaagcugaagacccuggucgccacggcggaggccgagcucgccaagaacgugucccuggacaacgugcugagcaccuucaucuccgccgcgcgccagggguucgucgacagcgacguggagaccaaggacguggucgagugccucaagcugucccaccagagcgacaucgaggugaccggcgacuccugcaacaacuacaugcugacguacaacaagguggagaacaugaccccccgggaccucggggccugcaucgacugcagcgcccgccacaucaacgcccaggucgccaagucccacaacaucgcgcugaucuggaacgugaaggacuucaugagccuguccgagcagcuccggaagcagauccgcagcgccgccaagaagaacaaccugcccuucaagcugaccugcgccaccacgcgccagguggucaacguggugaccaccaagaucgcccucaagggcgggugaggacuagucccuguucccagagcccacuuuuuuuucuuuuuuugaaauaaaauagccugucuuucagaucucaaaggcucuuuucagagccaccaaaaaaaaaaaaaaaaaaaaaaaaaaaaaaaaaaaaaaaaaaaaaaaaaaaaaaaaaaaaaaaaaaaaaaaaaaaaaaaaaaaaaaaaaaaaaaaaaaaaa

SEQ ID NO: 19878 - RNA, 6113 nt, Artificial Sequence
  SARS-CoV-2__MT706289.1__non-structural protein 3 (NSP3) mRNA gc
aggagagucccgcagucggcguccagcggcucugcuuguucgugugugugucguugcaggccuuauucaagcuuaccauggcccccaccaaggugaccuucggcgacgacacggucaucgaggugcagggguacaagagcgugaacaucaccuucgagcuggacgagcgcaucgacaagguccucaacgagaagugcuccgccuacaccguggagcugggcaccgaggugaacgaguucgcgugcgucguggccgacgccgugaucaagacgcugcagccggucagcgagcuccugaccccccuggggaucgaccucgacgagugguccauggccaccuacuaccuguucgacgagagcggcgaguucaagcuggccucccacauguacugcagcuucuacccccccgacgaggacgaggaggagggggacugcgaggaggaggaguucgagccguccacccaguacgaguacggcacggaggacgacuaccagggcaagccccucgaguucggggcgaccagcgccgcccugcagcccgaggaggagcaggaggaggacuggcuggacgacgacucccagcagaccgugggccagcaggacgggagcgaggacaaccagaccacgaccauccagaccaucguggagguccagccccagcucgagauggagcugaccccgguggugcagacgaucgaggucaacuccuucagcggcuaccugaagcucaccgacaacguguacaucaagaacgccgacaucguggaggaggcgaagaaggucaagcccaccgugguggucaacgccgccaacguguaccugaagcacgggggcggcguggccggggcccugaacaaggcgaccaacaacgccaugcaggucgaguccgacgacuacaucgccacgaacggcccccucaagguggggggcagcugcguccuguccggccacaaccuggccaagcacugccuccacgugguggggcccaacgucaacaagggcgaggacauccagcugcugaagagcgccuacgagaacuucaaccagcacgaggugcuccuggcgccgcugcucuccgccgggaucuucggcgccgaccccauccacagccugcgggugugcgucgacaccgugcgcaccaacguguaccuggccgucuucgacaagaaccucuacgacaagcugguguccagcuuccuggagaugaagagcgagaagcagguggagcagaagaucgccgagauccccaaggaggaggucaagcccuucaucaccgaguccaagccgagcguggagcagcggaagcaggacgacaagaagaucaaggcgugcguggaggaggucacgaccacccucgaggagaccaaguuccugacggagaaccugcuccuguacaucgacaucaacgggaaccugcaccccgacuccgccacccucgugagcgacaucgacaucaccuuccugaagaaggacgcccccuacaucgugggcgacgucgugcaggagggcgugcugaccgccgucgugauccccacgaagaaggccgggggcaccaccgagaugcucgcgaaggcccugcgcaaggugccgaccgacaacuacaucacgaccuaccccgggcagggccugaacggguacaccgucgaggaggccaagaccgugcucaagaagugcaaguccgccuucuacauccugcccagcaucaucuccaacgagaagcaggagauccugggcaccgugagcuggaaccuccgggagaugcuggcgcacgccgaggagacgcgcaagcugaugcccgucugcguggagaccaaggccaucguguccaccauccagcggaaguacaagggcaucaagauccaggagggggucguggacuacggcgcccgcuucuacuucuacaccagcaagacgaccguggccucccugaucaacacccucaacgaccugaacgagacccuggucacgaugccgcucggguacgugacccacggccugaaccuggaggaggcggcccgguacaugcgcagccucaaggugcccgccaccgucuccgugagcucccccgacgccgugaccgccuacaacggguaccugacgagcuccagcaagacccccgaggagcacuucaucgagaccaucucccuggcgggcagcuacaaggacuggagcuacuccggccagagcacccagcucgggaucgaguuccugaagcggggcgacaaguccgucuacuacacgagcaacccgaccaccuuccaccuggacggggaggugaucaccuucgacaaccucaagacgcugcugucccuccgcgaggugcggaccaucaaggucuucaccaccguggacaacaucaaccugcacacgcagguggucgacaugagcaugaccuacggccagcaguucggccccaccuaccuggacggggccgacgugaccaagaucaagccccacaacucccacgagggcaagacguucuacgugcucccgaacgacgacacccugcgcgucgaggccuucgaguacuaccacaccaccgaccccagcuuccuggggcgguacauguccgcccucaaccacacgaagaaguggaaguacccccaggugaacggccugaccagcaucaagugggccgacaacaacugcuaccuggcgaccgcccuccugacccugcagcagaucgagcucaaguucaaccccccggcccugcaggacgccuacuaccgcgcgcgggccggggaggccgccaacuucugcgcccugauccucgcguacugcaacaagacggugggcgagcugggcgacguccgcgagaccauguccuaccuguuccagcacgccaaccucgacagcugcaagcgggugcugaacgucgugugcaagaccugcgggcagcagcagaccacccugaagggcguggaggccgucauguacauggggacgcucuccuacgagcaguucaagaagggcgugcagauccccugcaccugcgggaagcaggccaccaaguaccuggugcagcaggagagccccuucgucaugauguccgcccccccggcgcaguacgagcugaagcacggcaccuucacgugcgccagcgaguacaccggcaacuaccagugcgggcacuacaagcacaucaccuccaaggagacccucuacugcaucgacggcgcccugcugacgaagagcagcgaguacaaggggcccaucaccgacguguucuacaaggagaacuccuacaccaccacgaucaagcccgugaccuacaagcucgacggcgucgugugcaccgagaucgaccccaagcuggacaacuacuacaagaaggacaacagcuacuucaccgagcagccgaucgaccuggugcccaaccagcccuaccccaacgccuccuucgacaacuucaaguucgucugcgacaacaucaaguucgccgacgaccucaaccagcugacgggguacaagaagccggcgagccgcgagcugaaggugaccuucuuccccgaccucaacggcgacguggucgccaucgacuacaagcacuacacccccuccuucaagaagggcgccaagcugcugcacaagcccaucguguggcacgugaacaacgccaccaacaaggcgacguacaagccgaacaccuggugcauccggugccucuggagcaccaagcccgucgagaccuccaacagcuucgacgugcugaaguccgaggacgcccaggggauggacaaccuggccugcgaggaccucaagcccgugagcgaggaggucguggagaaccccacgauccagaaggacgugcuggagugcaacgucaagaccaccgagguggugggcgacaucauccugaagccggccaacaacucccucaagaucaccgaggaggucgggcacacggaccugauggccgcguacguggacaacagcucccugaccaucaagaagcccaacgagcucagccgcgugcugggccugaagacccucgccacccacgggcuggccgccgucaacuccgugcccugggacacgaucgccaacuacgcgaagccguuccugaacaagguggucagcaccaccaccaacaucgugacgcgcugccucaaccgggugugcaccaacuacaugcccuacuucuucacccugcugcuccagcugugcaccuucacccgcuccacgaacagccggaucaaggccuccaugcccaccaccaucgccaagaacaccgucaagagcgugggcaaguucuuccuggaggccagcuucaacuaccucaagucccccaacuucagcaagcugaucaacaucaucaucugguuccugcuccuguccgugugccugggcagccucaucuacuccacggccgcgcuggggguccugaugagcaaccucggcaugccguccuacugcaccggguaccgcgagggcuaccugaacagcaccaacgugaccaucgccacguacugcaccggcuccauccccugcagcgugugccuguccgggcucgacagccuggacaccuaccccucccuggagaccauccagaucacgaucagcuccuucaagugggaccucaccgccuucggccuggucgccgagugguuccuggccuacauccucuucacccgguucuucuacgugcuggggcuggcggccaucaugcagcucuucuucagcuacuucgccgugcacuucaucuccaacagcuggcugauguggcugaucaucaaccugguccagauggcccccaucuccgcgauggugcgcauguacaucuucuucgccagcuucuacuacguguggaagagcuacguccacgugguggacggcugcaacuccagcaccugcaugaugugcuacaagcggaaccgcgccacgcgggucgagugcaccaccaucgugaacgggguccgccgguccuucuacguguacgccaacggcggcaagggguucugcaagcuccacaacuggaacugcgugaacugcgacaccuucugcgccggcagcacguucaucuccgacgaggucgcgcgcgaccugagccugcaguucaagcggccgaucaaccccaccgaccaguccagcuacaucguggacuccgugaccgucaagaacgggagcauccaccucuacuucgacaaggccggccagaagaccuacgagcgccacucccugagccacuucgugaaccuggacaaccuccgggccaacaacacgaaggggucccugcccaucaacgugaucgucuucgacggcaagagcaagugcgaggaguccagcgccaaguccgccagcguguacuacucccagcugaugugccagcccauccuccugcuggaccaggcgcucgugagcgacgucggcgacagcgccgagguggccgugaagauguucgacgccuacgucaacaccuucuccagcaccuucaacgugccgauggagaagcugaagacccugguggccacggcggaggccgagcucgccaagaacgucucccuggacaacgugcugagcaccuucaucuccgccgcgcgccagggguucguggacagcgacgucgagaccaaggacgugguggagugccucaagcugucccaccagagcgacaucgaggucaccggcgacuccugcaacaacuacaugcugacguacaacaagguggagaacaugaccccccgggaccucggggccugcaucgacugcagcgcccgccacaucaacgcccagguggccaagucccacaacaucgcgcugaucuggaacgucaaggacuucaugagccuguccgagcagcuccggaagcagauccgcagcgccgccaagaagaacaaccugcccuucaagcugaccugcgccaccacgcgccagguggugaacgucgugaccaccaagaucgcccucaagggcgggugaggacuagucccuguucccagagcccacuuuuuuuucuuuuuuugaaauaaaauagccugucuuucagaucucaaaggcucuuuucagagccaccaaaaaaaaaaaaaaaaaaaaaaaaaaaaaaaaaaaaaaaaaaaaaaaaaaaaaaaaaaaaaaaaaaaaaaaaaaaaaaaaaaaaaaaaaaaaaaaaaaaaa

SEQ ID NO: 19879 - RNA, 6113 nt, Artificial Sequence
  SARS-CoV-2__MT706341.1__non-structural protein 3 (NSP3) mRNA gc
aggagagucccgcagucggcguccagcggcucugcuuguucgugugugugucguugcaggccuuauucaagcuuaccauggcccccaccaaggugaccuucggcgacgacacggucaucgaggugcagggguacaagagcgugaacaucaccuucgagcuggacgagcgcaucgacaagguccucaacgagaagugcuccgccuacaccguggagcugggcaccgaggugaacgaguucgcgugcgucguggccgacgccgugaucaagacgcugcagccggucagcgagcuccugaccccccuggggaucgaccucgacgagugguccauggccaccuacuaccuguucgacgagagcggcgaguucaagcuggccucccacauguacugcagcuucuacccccccgacgaggacgaggaggagggggacugcgaggaggaggaguucgagccguccacccaguacgaguacggcacggaggacgacuaccagggcaagccccucgaguucggggcgaccagcgccgcccugcagcccgaggaggagcaggaggaggacuggcuggacgacgacucccagcagaccgugggccagcaggacgggagcgaggacaaccagaccacgaccauccagaccaucguggagguccagccccagcucgagauggagcugaccccgguggugcagacgaucgaggucaacuccuucagcggcuaccugaagcucaccgacaacguguacaucaagaacgccgacaucguggaggaggcgaagaaggucaagcccaccgugguggucaacgccgccaacguguaccugaagcacgggggcggcguggccggggcccugaacaaggcgaccaacaacgccaugcaggucgaguccgacgacuacaucgccacgaacggcccccucaagguggggggcagcugcguccuguccggccacaaccuggccaagcacugccuccacgugguggggcccaacgucaacaagggcgaggacauccagcugcugaagagcgccuacgagaacuucaaccagcacgaggugcuccuggcgccgcugcucuccgccgggaucuucggcgccgaccccauccacagccugcgggugugcgucgacaccgugcgcaccaacguguaccuggccgucuucgacaagaaccucuacgacaagcugguguccagcuuccuggagaugaagagcgagaagcagguggagcagaagaucgccgagauccccaaggaggaggucaagcccuucaucaccgaguccaagccgagcguggagcagcggaagcaggacgacaagaagaucaaggcgugcguggaggaggucacgaccacccucgaggagaccaaguuccugacggagaaccugcuccuguacaucgacaucaacgggaaccugcaccccgacuccgccacccucgugagcgacaucgacaucaccuuccugaagaaggacgcccccuacaucgugggcgacgucgugcaggagggcgugcugaccgccgucgugauccccacgaagaaggccgggggcaccaccgagaugcucgcgaaggcccugcgcaaggugccgaccgacaacuacaucacgaccuaccccgggcagggccugaacggguacaccgucgaggaggccaagaccgugcucaagaagugcaaguccgccuucuacauccugcccagcaucaucuccaacgagaagcaggagauccugggcaccgugagcuggaaccuccgggagaugcuggcgcacgccgaggagacgcgcaagcugaugcccgucugcguggagaccaaggccaucguguccaccauccagcggaaguacaagggcaucaagauccaggagggggucguggacuacggcgcccgcuucuacuucuacaccagcaagacgaccguggccucccugaucaacacccucaacgaccugaacgagacccuggucacgaugccgcucggguacgugacccacggccugaaccuggaggaggcggcccgguacaugcgcagccucaaggugcccgccaccgucuccgugagcucccccgacgccgugaccgccuacaacggguaccugacgagcuccagcaagacccccgaggagcacuucaucgagaccaucucccuggcgggcagcuacaaggacuggagcuacuccggccagagcacccagcucgggaucgaguuccugaagcggggcgacaaguccgucuacuacacgagcaacccgaccaccuuccaccuggacggggaggugaucaccuucgacaaccucaagacgcugcugucccuccgcgaggugcggaccaucaaggucuucaccaccguggacaacaucaaccugcacacgcagguggucgacaugagcaugaccuacggccagcaguucggccccaccuaccuggacggggccgacgugaccaagaucaagccccacaacucccacgagggcaagacguucuacgugcucccgaacgacgacacccugcgcgucgaggccuucgaguacuaccacaccaccgaccccagcuuccuggggcgguacauguccgcccucaaccacacgaagaaguggaaguacccccaggugaacggccugaccagcaucaagugggccgacaacaacugcuaccuggcgaccgcccuccugacccugcagcagaucgagcucaaguucaaccccccggcccugcaggacgccuacuaccgcgcgcgggccggggaggccgccaacuucugcgcccugauccucgcguacugcaacaagacggugggcgagcugggcgacguccgcgagaccauguccuaccuguuccagcacgccaaccucgacagcugcaagcgggugcugaacgucgugugcaagaccugcgggcagcagcagaccacccugaagggcguggaggccgucauguacauggggacgcucuccuacgagcaguucaagaagggcgugcagauccccugcaccugcgggaagcaggccaccaaguaccuggugcagcaggagagccccuucgucaugauguccgcccccccggcgcaguacgagcugaagcacggcaccuucacgugcgccagcgaguacaccggcaacuaccagugcgggcacuacaagcacaucaccuccaaggagacccucuacugcaucgacggcgcccugcugacgaagagcagcgaguacaaggggcccaucaccgacguguucuacaaggagaacuccuacaccaccacgaucaagcccgugaccuacaagcucgacggcgucgugugcaccgagaucgaccccaagcuggacaacuacuacaagaaggacaacagcuacuucaccgagcagccgaucgaccuggugcccaaccagcccuaccccaacgccuccuucgacaacuucaaguucgucugcgacaacaucaaguucgccgacgaccucaaccagcugacgggguacaagaagccggcgagccgcgagcugaaggugaccuucuuccccgaccucaacggcgacguggucgccaucgacuacaagcacuacacccccuccuucaagaagggcgccaagcugcugcacaagcccaucguguggcacgugaacaacgccaccaacaaggcgacguacaagccgaacaccuggugcauccggugccucuggagcaccaagcccgucgagaccuccaacagcuucaacgugcugaaguccgaggacgcccaggggauggacaaccuggccugcgaggaccucaagcccgugagcgaggaggucguggagaaccccacgauccagaaggacgugcuggagugcaacgucaagaccaccgagguggugggcgacaucauccugaagccggccaacaacucccucaagaucaccgaggaggucgggcacacggaccugauggccgcguacguggacaacagcucccugaccaucaagaagcccaacgagcucagccgcgugcugggccugaagacccucgccacccacgggcuggccgccgucaacuccgugcccugggacacgaucgccaacuacgcgaagccguuccugaacaagguggucagcaccaccaccaacaucgugacgcgcugccucaaccgggugugcaccaacuacaugcccuacuucuucacccugcugcuccagcugugcaccuucacccgcuccacgaacagccggaucaaggccuccaugcccaccaccaucgccaagaacaccgucaagagcgugggcaaguucugccuggaggccagcuucaacuaccucaagucccccaacuucagcaagcugaucaacaucaucaucugguuccugcuccuguccgugugccugggcagccucaucuacuccacggccgcgcuggggguccugaugagcaaccucggcaugccguccuacugcaccggguaccgcgagggcuaccugaacagcaccaacgugaccaucgccacguacugcaccggcuccauccccugcagcgugugccuguccgggcucgacagccuggacaccuaccccucccuggagaccauccagaucacgaucagcuccuucaagugggaccucaccgccuucggccuggucgccgagugguuccuggccuacauccucuucacccgguucuucuacgugcuggggcuggcggccaucaugcagcucuucuucagcuacuucgccgugcacuucaucuccaacagcuggcugauguggcugaucaucaaccugguccagauggcccccaucuccgcgauggugcgcauguacaucuucuucgccagcuucuacuacguguggaagagcuacguccacgugguggacggcugcaacuccagcaccugcaugaugugcuacaagcggaaccgcgccacgcgggucgagugcaccaccaucgugaacgggguccgccgguccuucuacguguacgccaacggcggcaagggguucugcaagcuccacaacuggaacugcgugaacugcgacaccuucugcgccggcagcacguucaucuccgacgaggucgcgcgcgaccugagccugcaguucaagcggccgaucaaccccaccgaccaguccagcuacaucguggacuccgugaccgucaagaacgggagcauccaccucuacuucgacaaggccggccagaagaccuacgagcgccacucccugagccacuucgugaaccuggacaaccuccgggccaacaacacgaaggggucccugcccaucaacgugaucgucuucgacggcaagagcaagugcgaggaguccagcgccaaguccgccagcguguacuacucccagcugaugugccagcccauccuccugcuggaccaggcgcucgugagcgacgucggcgacagcgccgagguggccgugaagauguucgacgccuacgucaacaccuucuccagcaccuucaacgugccgauggagaagcugaagacccugguggccacggcggaggccgagcucgccaagaacgucucccuggacaacgugcugagcaccuucaucuccgccgcgcgccagggguucguggacagcgacgucgagaccaaggacgugguggagugccucaagcugucccaccagagcgacaucgaggucaccggcgacuccugcaacaacuacaugcugacguacaacaagguggagaacaugaccccccgggaccucggggccugcaucgacugcagcgcccgccacaucaacgcccagguggccaagucccacaacaucgcgcugaucuggaacgucaaggacuucaugagccuguccgagcagcuccggaagcagauccgcagcgccgccaagaagaacaaccugcccuucaagcugaccugcgccaccacgcgccagguggugaacgucgugaccaccaagaucgcccucaagggcgggugaggacuagucccuguucccagagcccacuuuuuuuucuuuuuuugaaauaaaauagccugucuuucagaucucaaaggcucuuuucagagccaccaaaaaaaaaaaaaaaaaaaaaaaaaaaaaaaaaaaaaaaaaaaaaaaaaaaaaaaaaaaaaaaaaaaaaaaaaaaaaaaaaaaaaaaaaaaaaaaaaaaaa

SEQ ID NO: 19880 - RNA, 6113 nt, Artificial Sequence
  SARS-CoV-2__MT706356.1__non-structural protein 3 (NSP3) mRNA gc
aggagagucccgcagucggcguccagcggcucugcuuguucgugugugugucguugcaggccuuauucaagcuuaccauggcccccaccaaggugaccuucggcgacgacacggucaucgaggugcagggguacaagagcgugaacaucaccuucgagcuggacgagcgcaucgacaagguccucaacgagaagugcuccgccuacaccguggagcugggcaccgaggugaacgaguucgcgugcgucguggccgacgccgugaucaagacgcugcagccggucagcgagcuccugaccccccuggggaucgaccucgacgagugguccauggccaccuacuaccuguucgacgagagcggcgaguucaagcuggccucccacauguacugcagcuucuacccccccgacgaggacgaggaggagggggacugcgaggaggaggaguucgagccguccacccaguacgaguacggcacggaggacgacuaccagggcaagccccucgaguucggggcgaccagcgccgcccugcagcccgaggaggagcaggaggaggacuggcuggacgacgacucccagcagaccgugggccagcaggacgggagcgaggacaaccagaccacgaccauccagaccaucguggagguccagccccagcucgagauggagcugaccccgguggugcagacgaucgaggucaacuccuucagcggcuaccugaagcucaccgacaacguguacaucaagaacgccgacaucguggaggaggcgaagaaggucaagcccaccgugguggucaacgccgccaacguguaccugaagcacgggggcggcguggccggggcccugaacaaggcgaccaacaacgccaugcaggucgaguccgacgacuacaucgccacgaacggcccccucaagguggggggcagcugcguccuguccggccacaaccuggccaagcacugccuccacgugguggggcccaacgucaacaagggcgaggacauccagcugcugaagagcgccuacgagaacuucaaccagcacgaggugcuccuggcgccgcugcucuccgccgggaucuucggcgccgaccccauccacagccugcgggugugcgucgacaccgugcgcaccaacguguaccuggccgucuucgacaagaaccucuacgacaagcugguguccagcuuccuggagaugaagagcgagaagcagguggagcagaagaucgccgagauccccaaggaggaggucaagcccuucaucaccgaguccaagccgagcguggagcagcggaagcaggacgacaagaagaucaaggcgugcguggaggaggucacgaccacccucgaggagaccaaguuccugacggagaaccugcuccuguacaucgacaucaacgggaaccugcaccccgacuccgccacccucgugagcgacaucgacaucaccuuccugaagaaggacgcccccuacaucgugggcgacgucgugcaggagggcgugcugaccgccgucgugauccccacgaagaaggccgggggcaccaccgagaugcucgcgaaggcccugcgcaaggugccgaccgacaacuacaucacgaccuaccccgggcagggccugaacggguacaccgucgaggaggccaagaccgugcucaagaagugcaaguccgccuucuacauccugcccagcaucaucuccaacgagaagcaggagauccugggcaccgugagcuggaaccuccgggagaugcuggcgcacgccgaggagacgcgcaagcugaugcccgucugcguggagaccaaggccaucguguccaccauccagcggaaguacaagggcaucaagauccaggagggggucguggacuacggcgcccgcuucuacuucuacaccagcaagacgaccguggccucccugaucaacacccucaacgaccugaacgagacccuggucacgaugccgcucggguacgugacccacggccugaaccuggaggaggcggcccgguacaugcgcagccucaaggugcccgccaccgucuccgugagcucccccgacgccgugaccgccuacaacggguaccugacgagcuccagcaagacccccgaggagcacuucaucgagaccaucucccuggcgggcagcuacaaggacuggagcuacuccggccagagcacccagcucgggaucgaguuccugaagcggggcgacaaguccgucuacuacacgagcaacccgaccaccuuccaccuggacggggaggugaucaccuucgacaaccucaagacgcugcugucccuccgcgaggugcggaccaucaaggucuucaccaccguggacaacaucaaccugcacacgcagguggucgacaugagcaugaccuacggccagcaguucggccccaccuaccuggacggggccgacgugaccaagaucaagccccacaacucccacgagggcaagacguucuacgugcucccgaacgacgacacccugcgcgucgaggccuucgaguacuaccacaccaccgaccccagcuuccuggggcgguacauguccgcccucaaccacacgaagaaguggaaguacccccaggugaacggccugaccagcaucaagugggccgacaacaacugcuaccuggcgaccgcccuccugacccugcagcagaucgagcucaaguucaaccccccggcccugcaggacgccuacuaccgcgcgcgggccggggaggccgccaacuucugcgcccugauccucgcguacugcaacaagacggugggcgagcugggcgacguccgcgagaccauguccuaccuguuccagcacgccaaccucgacagcugcaagcgggugcugaacgucgugugcaagaccugcgggcagcagcagaccacccugaagggcguggaggccgucauguacauggggacgcucuccuacgagcaguucaagaagggcgugcagauccccugcaccugcgggaagcaggccaccaaguaccuggugcagcaggagagccccuucgucaugauguccgcccccccggcgcaguacgagcugaagcacggcaccuucacgugcgccagcgaguacaccggcaacuaccagugcgggcacuacaagcacaucaccuccaaggagacccucuacugcaucgacggcgcccugcugacgaagagcagcgaguacaaggggcccaucaccgacguguucuacaaggagaacuccuacaccaccacgaucaagcccgugaccuacaagcucgacggcgucgugugcaccgagaucgaccccaagcuggacaacuacuacaagaaggacaacagcuacuucaccgagcagccgaucgaccuggugcccaaccagcccuaccccaacgccuccuucgacaacuucaaguucgucugcgacaacaucaaguucgccgacgaccucaaccagcugacgggguacaagaagccggcgagccgcgagcugaaggugaccuucuuccccgaccucaacggcgacguggucgccaucgacuacaagcacuacacccccuccuucaagaagggcgccaagcugcugcacaagcccaucguguggcacgugaacaacgccaccaacaaggcgacguacaagccgaacaccuggugcauccggugccucuggagcaccaagcccgucgagaccuccaacagcuucgacgugcugaaguccgaggacgcccaggggauggacaaccuggccugcgaggaccucaagcccgugagcgaggaggucguggagaaccccacgauccagaaggacgugcuggagugcaacgucaagaccaccgagguggugggcgacaucauccugaagccggccaacaacucccucaagaucaccgaggaggucgggcacacggaccugauggccgcguacguggacaacagcucccugaccaucaagaagcccaacgagcucagccgcgugcugggccugaagacccucgccacccacgggcuggccgccgucaacuccgugcccugggacacgaucgccaacuacgcgaagccguuccugaacaagguggucagcaccaccaccaacaucgugacgcgcugccucaaccgggugugcaccaacuacaugcccuacuucuucacccugcugcuccagcugugcaccuucacccgcuccacgaacagccggaucaaggccuccaugcccaccaccaucgccaagaacaccgucaagagcgugggcaaguucugccuggaggccagcuucaacuaccucaagucccccaacuucagcaagcugaucaacaucaucaucugguuccugcuccuguccgugugccugggcagccucaucuacuccacggccgcgcuggggguccugaugagcaaccucggcaugccguccuacugcaccggguaccgcgagggcuaccugaacagcaccaacgugaccaucgccacguacugcaccggcuccauccccugcagcgugugccuguccgggcucgacagccuggacaccuaccccucccuggagaccauccagaucacgaucagcuccuucaagugggaccucaccgccuucggccuggucgccgagugguuccuggccuacauccucuucacccgguucuucuacgugcuggggcuggcggccaucaugcagcucuuccugagcuacuucgccgugcacuucaucuccaacagcuggcugauguggcugaucaucaaccucguccagauggcccccaucuccgcgauggugcgcauguacaucuucuucgccagcuucuacuacguguggaagagcuacguccacgugguggacggcugcaacuccagcaccugcaugaugugcuacaagcggaaccgcgccacgcgggucgagugcaccaccaucgugaacgggguccgccgguccuucuacguguacgccaacggcggcaagggguucugcaagcugcacaacuggaacugcgugaacugcgacaccuucugcgccggcagcacguucaucuccgacgaggucgcgcgcgaccugagccuccaguucaagcggccgaucaaccccaccgaccaguccagcuacaucguggacuccgugaccgucaagaacgggagcauccaccuguacuucgacaaggccggccagaagaccuacgagcgccacucccugagccacuucgugaaccucgacaaccugcgggccaacaacacgaaggggucccugcccaucaacgugaucgucuucgacggcaagagcaagugcgaggaguccagcgccaaguccgccagcguguacuacucccagcucaugugccagcccauccugcugcucgaccaggcgcuggugagcgacgucggcgacagcgccgagguggccgugaagauguucgacgccuacgucaacaccuucuccagcaccuucaacgugccgauggagaagcugaagacccucguggccacggcggaggccgagcuggccaagaacgucucccuggacaacgugcucagcaccuucaucuccgccgcgcgccagggguucguggacagcgacgucgagaccaaggacgugguggagugccugaagcugucccaccagagcgacaucgaggucaccggcgacuccugcaacaacuacaugcucacguacaacaagguggagaacaugaccccccgggaccugggggccugcaucgacugcagcgcccgccacaucaacgcccagguggccaagucccacaacaucgcgcugaucuggaacgucaaggacuucaugagccucuccgagcagcugcggaagcagauccgcagcgccgccaagaagaacaaccugcccuucaagcucaccugcgccaccacgcgccagguggugaacgucgugaccaccaagaucgcccugaagggcgggugaggacuagucccuguucccagagcccacuuuuuuuucuuuuuuugaaauaaaauagccugucuuucagaucucaaaggcucuuuucagagccaccaaaaaaaaaaaaaaaaaaaaaaaaaaaaaaaaaaaaaaaaaaaaaaaaaaaaaaaaaaaaaaaaaaaaaaaaaaaaaaaaaaaaaaaaaaaaaaaaaaaaa

SEQ ID NO: 19881 - RNA, 6113 nt, Artificial Sequence
  SARS-CoV-2__MT706369.1__non-structural protein 3 (NSP3) mRNA gc
aggagagucccgcagucggcguccagcggcucugcuuguucgugugugugucguugcaggccuuauucaagcuuaccauggcccccaccaaggugaccuucggcgacgacacggucaucgaggugcagggguacaagagcgugaacaucaccuucgagcuggacgagcgcaucgacaagguccucaacgagaagugcuccgccuacaccguggagcugggcaccgaggugaacgaguucgcgugcgucguggccgacgccgugaucaagacgcugcagccggucagcgagcuccugaccccccuggggaucgaccucgacgagugguccauggccaccuacuaccuguucgacgagagcggcgaguucaagcuggccucccacauguacugcagcuucuacccccccgacgaggacgaggaggagggggacugcgaggaggcggaguucgagccguccacccaguacgaguacggcacggaggacgacuaccagggcaagccccucgaguucggggccaccagcgccgcccugcagcccgaggaggagcaggaggaggacuggcuggacgacgacucccagcagaccgugggccagcaggacgggagcgaggacaaccagaccacgaccauccagaccaucguggagguccagccccagcucgagauggagcugaccccgguggugcagacgaucgaggucaacuccuucagcggcuaccugaagcucaccgacaacguguacaucaagaacgcggacaucguggaggaggccaagaaggucaagcccaccgugguggucaacgccgccaacguguaccugaagcacgggggcggcguggccggggcgcugaacaaggccaccaacaacgccaugcaggucgaguccgacgacuacaucgccacgaacggcccccucaagguggggggcagcugcguccuguccggccacaaccuggccaagcacugccuccacgugguggggcccaacgucaacaagggcgaggacauccagcugcugaagagcgcguacgagaacuucaaccagcacgaggugcuccuggccccgcugcucuccgccgggaucuucggcgccgaccccauccacagccugcgggugugcgucgacaccgugcgcaccaacguguaccuggccgucuucgacaagaaccucuacgacaagcugguguccagcuuccuggagaugaagagcgagaagcagguggagcagaagaucgcggagauccccaaggaggaggucaagcccuucaucaccgaguccaagccgagcguggagcagcggaagcaggacgacaagaagaucaaggccugcguggaggaggucacgaccacccucgaggagaccaaguuccugacggagaaccugcuccuguacaucgacaucaacgggaaccugcaccccgacuccgccacccucgugagcgacaucgacaucaccuuccugaagaaggacgcccccuacaucgugggcgacgucgugcaggagggcgugcugaccgccgucgugauccccacgaagaaggcggggggcaccaccgagaugcucgccaaggcccugcgcaaggugccgaccgacaacuacaucacgaccuaccccgggcagggccugaacggguacaccgucgaggaggccaagaccgugcucaagaagugcaaguccgcguucuacauccugcccagcaucaucuccaacgagaagcaggagauccugggcaccgugagcuggaaccuccgggagaugcuggcccacgccgaggagacgcgcaagcugaugcccgucugcguggagaccaaggccaucguguccaccauccagcggaaguacaagggcaucaagauccaggagggggucguggacuacggcgcccgcuucuacuucuacaccagcaagacgaccguggcgucccugaucaacacccucaacgaccugaacgagacccuggucacgaugccgcucggguacgugacccacggccugaaccuggaggaggccgcccgguacaugcgcagccucaaggugcccgccaccgucuccgugagcucccccgacgccgugaccgcguacaacggguaccugacgagcuccagcaagacccccgaggagcacuucaucgagaccaucucccuggccggcagcuacaaggacuggagcuacuccggccagagcacccagcucgggaucgaguuccugaagcggggcgacaaguccgucuacuacacgagcaacccgaccaccuuccaccuggacggggaggugaucaccuucgacaaccucaagacgcugcugucccuccgcgaggugcggaccaucaaggucuucaccaccguggacaacaucaaccugcacacgcagguggucgacaugagcaugaccuacggccagcaguucggccccaccuaccuggacggggccgacgugaccaagaucaagccccacaacucccacgagggcaagacguucuacgugcucccgaacgacgacacccugcgcgucgaggccuucgaguacuaccacaccaccgaccccagcuuccuggggcgguacauguccgcccucaaccacacgaagaaguggaaguacccccaggugaacggccugaccagcaucaagugggcggacaacaacugcuaccuggccaccgcccuccugacccugcagcagaucgagcucaaguucaaccccccggcccugcaggacgcguacuaccgcgcccgggccggggaggccgccaacuucugcgcgcugauccucgccuacugcaacaagacggugggcgagcugggcgacguccgcgagaccauguccuaccuguuccagcacgccaaccucgacagcugcaagcgggugcugaacgucgugugcaagaccugcgggcagcagcagaccacccugaagggcguggaggccgucauguacauggggacgcucuccuacgagcaguucaagaagggcgugcagauccccugcaccugcgggaagcaggccaccaaguaccuggugcagcaggagagccccuucgucaugauguccgcgcccccggcccaguacgagcugaagcacggcaccuucacgugcgccagcgaguacaccggcaacuaccagugcgggcacuacaagcacaucaccuccaaggagacccucuacugcaucgacggcgcccugcugacgaagagcagcgaguacaaggggcccaucaccgacguguucuacaaggagaacuccuacaccaccacgaucaagcccgugaccuacaagcucgacggcgucgugugcaccgagaucgaccccaagcuggacaacuacuacaagaaggacaacagcuacuucaccgagcagccgaucgaccuggugcccaaccagcccuaccccaacgccuccuucgacaacuucaaguucgucugcgacaacaucaaguucgcggacgaccucaaccagcugacgggguacaagaagccggccagccgcgagcugaaggugaccuucuuccccgaccucaacggcgacguggucgccaucgacuacaagcacuacacccccuccuucaagaagggcgccaagcugcugcacaagcccaucguguggcacgugaacaacgcgaccaacaaggccacguacaagccgaacaccuggugcauccggugccucuggagcaccaagcccgucgagaccuccaacagcuucgacgugcugaaguccgaggacgcccaggggauggacaaccuggccugcgaggaccucaagcccgugagcgaggaggucguggagaaccccacgauccagaaggacgugcuggagugcaacgucaagaccaccgagguggugggcgacaucauccugaagccggccaacaacucccucaagaucaccgaggaggucgggcacacggaccugauggcggccuacguggacaacagcucccugaccaucaagaagcccaacgagcucagccgcgugcugggccugaagacccucgccacccacgggcuggccgccgucaacuccgugcccugggacacgaucgcgaacuacgccaagccguuccugaacaagguggucagcaccaccaccaacaucgugacgcgcugccucaaccgggugugcaccaacuacaugcccuacuucuucacccugcugcuccagcugugcaccuucacccgcuccacgaacagccggaucaaggccuccaugcccaccaccaucgccaagaacaccgucaagagcgugggcaaguucugccuggaggccagcuucaacuaccucaagucccccaacuucagcaagcugaucaacaucaucaucugguuccugcuccuguccgugugccugggcagccucaucuacuccacggcggcccuggggguccugaugagcaaccucggcaugccguccuacugcaccggguaccgcgagggcuaccugaacagcaccaacgugaccaucgccacguacugcaccggcuccauccccugcagcgugugccuguccgggcucgacagccuggacaccuaccccucccuggagaccauccagaucacgaucagcuccuucaagugggaccucaccgccuucggccuggucgccgagugguuccuggcguacauccucuucacccgguucuucuacgugcuggggcuggccgccaucaugcagcucuucuucagcuacuucgccgugcacuucaucuccaacagcuggcugauguggcugaucaucaaccugguccagauggcgcccaucuccgccauggugcgcauguacaucuucuucgccagcuucuacuacguguggaagagcuacguccacgugguggacggcugcaacuccagcaccugcaugaugugcuacaagcggaaccgcgccacgcgggucgagugcaccaccaucgugaacgggguccgccgguccuucuacguguacgccaacggcggcaagggguucugcaagcuccacaacuggaacugcgugaacugcgacaccuucugcgcgggcagcacguucaucuccgacgaggucgcccgcgaccugagccugcaguucaagcggccgaucaaccccaccgaccaguccagcuacaucguggacuccgugaccgucaagaacgggagcauccaccucuacuucgacaaggccggccagaagaccuacgagcgccacucccugagccacuucgugaaccuggacaaccuccgggccaacaacacgaaggggucccugcccaucaacgugaucgucuucgacggcaagagcaagugcgaggaguccagcgccaaguccgcgagcguguacuacucccagcugaugugccagcccauccuccugcuggaccaggcccucgugagcgacgucggcgacagcgccgagguggccgugaagauguucgacgccuacgucaacaccuucuccagcaccuucaacgugccgauggagaagcugaagacccugguggcgacggccgaggccgagcucgccaagaacgucucccuggacaacgugcugagcaccuucaucuccgcggcccgccagggguucguggacagcgacgucgagaccaaggacgugguggagugccucaagcugucccaccagagcgacaucgaggucaccggcgacuccugcaacaacuacaugcugacguacaacaagguggagaacaugaccccccgggaccucggggccugcaucgacugcagcgcccgccacaucaacgcccagguggcgaagucccacaacaucgcccugaucuggaacgucaaggacuucaugagccuguccgagcagcuccggaagcagauccgcagcgccgccaagaagaacaaccugcccuucaagcugaccugcgccaccacgcgccagguggugaacgucgugaccaccaagaucgcgcucaagggcgggugaggacuagucccuguucccagagcccacuuuuuuuucuuuuuuugaaauaaaauagccugucuuucagaucucaaaggcucuuuucagagccaccaaaaaaaaaaaaaaaaaaaaaaaaaaaaaaaaaaaaaaaaaaaaaaaaaaaaaaaaaaaaaaaaaaaaaaaaaaaaaaaaaaaaaaaaaaaaaaaaaaaaa

SEQ ID NO: 19882 - RNA, 6113 nt, Artificial Sequence
  SARS-CoV-2__MT706386.1__non-structural protein 3 (NSP3) mRNA gc
aggagagucccgcagucggcguccagcggcucugcuuguucgugugugugucguugcaggccuuauucaagcuuaccauggcccccaccaaggugaccuucggcgacgacacggucaucgaggugcagggguacaagagcgugaacaucaccuucgagcuggacgagcgcaucgacaagguccucaacgagaagugcuccgccuacaccguggagcugggcaccgaggugaacgaguucgcgugcgucguggccgacgccgugaucaagacgcugcagccggucagcgagcuccugaccccccuggggaucgaccucgacgagugguccauggccaccuacuaccuguucgacgagagcggcgaguucaagcuggccucccacauguacugcagcuucuacccccccgacgaggacgaggaggagggggacugcgaggaggaggaguucgagccguccacccaguacgaguacggcacggaggacgacuaccagggcaagccccucgaguucggggcgaccagcgccgcccugcagcccgaggaggagcaggaggaggacuggcuggacgacgacucccagcagaccgugggccagcaggacgggagcgaggacaaccagaccacgaccauccagaccaucguggagguccagccccagcucgagauggagcugaccccgguggugcagacgaucgaggucaacuccuucagcggcuaccugaagcucaccgacaacguguacaucaagaacgccgacaucguggaggaggcgaagaaggucaagcccaccgugguggucaacgccgccaacguguaccugaagcacgggggcggcguggccggggcccugaacaaggcgaccaacaacgccaugcaggucgaguccgacgacuacaucgccacgaacggcccccucaagguggggggcagcugcguccuguccggccacaaccuggccaagcacugccuccacgugguggggcccaacgucaacaagggcgaggacauccagcugcugaagagcgccuacgagaacuucaaccagcacgaggugcuccuggcgccgcugcucuccgccgggaucuucggcgccgaccccauccacagccugcgggugugcgucgacaccgugcgcaccaacguguaccuggccgucuucgacaagaaccucuacgacaagcugguguccagcuuccuggagaugaagagcgagaagcagguggagcagaagaucgccgagauccccaaggaggaggucaagcccuucaucaccgaguccaagccgagcguggagcagcggaagcaggacgacaagaagaucaaggcgugcguggaggaggucacgaccacccucgaggagaccaaguuccugacggagaaccugcuccuguacaucgacaucaacgggaaccugcaccccgacuccgccacccucgugagcgacaucgacaucaccuuccugaagaaggacgcccccuacaucgugggcgacgucgugcaggagggcgugcugaccgccgucgugauccccacgaagaaggccgggggcaccaccgagaugcucgcgaaggcccugcgcaaggugccgaccgacaacuacaucacgaccuaccccgggcagggccugaacggguacaccgucgaggaggccaagaccgugcucaagaagugcaaguccgccuucuacauccugcccagcaucaucuccaacgagaagcaggagauccugggcaccgugagcuggaaccuccgggagaugcuggcgcacgccgaggagacgcgcaagcugaugcccgucugcguggagaccaaggccaucguguccaccauccagcggaaguacaagggcaucaagauccaggagggggucguggacuacggcgcccgcuucuacuucuacaccagcaagacgaccguggccucccugaucaacacccucaacgaccugaacgagacccuggucacgaugccgcucggguacgugacccacggccugaaccuggaggaggcggcccgguacaugcgcagccucaaggugcccgccaccgucuccgugagcucccccgacgccgugaccgccuacaacggguaccugacgagcuccagcaagacccccgaggagcacuucaucgagaccaucucccuggcgggcagcuacaaggacuggagcuacuccggccagagcacccagcucggggucgaguuccugaagcggggcgacaaguccguguacuacacgagcaacccgaccaccuuccaccuggacggggaggugaucaccuucgacaaccucaagacgcugcugucccuccgcgagguccggaccaucaagguguucaccaccguggacaacaucaaccugcacacgcaggucguggacaugagcaugaccuacggccagcaguucggccccaccuaccuggacggggccgacgugaccaagaucaagccccacaacucccacgagggcaagacguucuacguccucccgaacgacgacacccugcgcguggaggccuucgaguacuaccacaccaccgaccccagcuuccuggggcgguacauguccgcccucaaccacacgaagaaguggaaguacccccaggugaacggccugaccagcaucaagugggccgacaacaacugcuaccuggcgaccgcccuccugacccugcagcagaucgagcucaaguucaaccccccggcccugcaggacgccuacuaccgcgcgcgggccggggaggccgccaacuucugcgcccugauccucgcguacugcaacaagacggucggcgagcugggcgacgugcgcgagaccauguccuaccuguuccagcacgccaaccucgacagcugcaagcggguccugaacguggugugcaagaccugcgggcagcagcagaccacccugaagggcgucgaggccgugauguacauggggacgcucuccuacgagcaguucaagaagggcgugcagauccccugcaccugcgggaagcaggccaccaaguaccugguccagcaggagagccccuucgugaugauguccgcccccccggcgcaguacgagcugaagcacggcaccuucacgugcgccagcgaguacaccggcaacuaccagugcgggcacuacaagcacaucaccuccaaggagacccucuacugcaucgacggcgcccugcugacgaagagcagcgaguacaaggggcccaucaccgacguguucuacaaggagaacuccuacaccaccacgaucaagcccgucaccuacaagcucgacggcguggugugcaccgagaucgaccccaagcuggacaacuacuacaagaaggacaacagcuacuucaccgagcagccgaucgaccugguccccaaccagcccuaccccaacgccuccuucgacaacuucaaguucgugugcgacaacaucaaguucgccgacgaccucaaccagcugacgggguacaagaagccggcgagccgcgagcugaaggugaccuucuuccccgaccucaacggcgacgucguggccaucgacuacaagcacuacacccccuccuucaagaagggcgccaagcugcugcacaagcccaucguguggcacgucaacaacgccaccaacaaggcgacguacaagccgaacaccuggugcauccggugccucuggagcaccaagcccguggagaccuccaacagcuucgacgugcugaaguccgaggacgcccaggggauggacaaccuggccugcgaggaccucaagcccgucagcgaggaggugguggagaaccccacgauccagaaggacguccuggagugcaacgugaagaccaccgagguggucggcgacaucauccugaagccggccaacaacucccucaagaucaccgaggagguggggcacacggaccugauggccgcguacguggacaacagcucccugaccaucaagaagcccaacgagcucagccgcguccugggccugaagacccucgccacccacgggcuggccgccgugaacuccgugcccugggacacgaucgccaacuacgcgaagccguuccugaacaaggucgugagcaccaccaccaacaucgugacgcgcugccucaaccgggucugcaccaacuacaugcccuacuucuucacccugcugcuccagcugugcaccuucacccgcuccacgaacagccggaucaaggccuccaugcccaccaccaucgccaagaacaccgugaagagcgugggcaaguucugccuggaggccagcuucaacuaccucaagucccccaacuucagcaagcugaucaacaucaucaucugguuccugcuccuguccgucugccugggcagccucaucuacuccacggccgcgcugggggugcugaugagcaaccucggcaugccguccuacugcaccggguaccgcgagggcuaccugaacagcaccaacgugaccaucgccacguacugcaccggcuccauccccugcagcgucugccuguccgggcucgacagccuggacaccuaccccucccuggagaccauccagaucacgaucagcuccuucaagugggaccucaccgccuucggccugguggccgagugguuccuggccuacauccucuucacccgguucuucuacgugcuggggcuggcggccaucaugcagcucuucuucagcuacuucgccguccacuucaucuccaacagcuggcugauguggcugaucaucaaccuggugcagauggcccccaucuccgcgauggugcgcauguacaucuucuucgccagcuucuacuacgucuggaagagcuacgugcacguggucgacggcugcaacuccagcaccugcaugaugugcuacaagcggaaccgcgccacgcggguggagugcaccaccaucgucaacggggugcgccgguccuucuacguguacgccaacggcggcaagggguucugcaagcuccacaacuggaacugcgucaacugcgacaccuucugcgccggcagcacguucaucuccgacgagguggcgcgcgaccugagccugcaguucaagcggccgaucaaccccaccgaccaguccagcuacaucguggacuccgucaccgugaagaacgggagcauccaccucuacuucgacaaggccggccagaagaccuacgagcgccacucccugagccacuucgugaaccuggacaaccuccgggccaacaacacgaaggggucccugcccaucaacgucaucguguucgacggcaagagcaagugcgaggaguccagcgccaaguccgccagcguguacuacucccagcugaugugccagcccauccuccugcuggaccaggcgcucgucagcgacgugggcgacagcgccgagguggccgucaagauguucgacgccuacgugaacaccuucuccagcaccuucaacgugccgauggagaagcugaagacccuggucgccacggcggaggccgagcucgccaagaacgugucccuggacaacgugcugagcaccuucaucuccgccgcgcgccagggguucgucgacagcgacguggagaccaaggacguggucgagugccucaagcugucccaccagagcgacaucgaggugaccggcgacuccugcaacaacuacaugcugacguacaacaagguggagaacaugaccccccgggaccucggggccugcaucgacugcagcgcccgccacaucaacgcccaggucgccaagucccacaacaucgcgcugaucuggaacgugaaggacuucaugagccuguccgagcagcuccggaagcagauccgcagcgccgccaagaagaacaaccugcccuucaagcugaccugcgccaccacgcgccagguggucaacguggugaccaccaagaucgcccucaagggcgggugaggacuagucccuguucccagagcccacuuuuuuuucuuuuuuugaaauaaaauagccugucuuucagaucucaaaggcucuuuucagagccaccaaaaaaaaaaaaaaaaaaaaaaaaaaaaaaaaaaaaaaaaaaaaaaaaaaaaaaaaaaaaaaaaaaaaaaaaaaaaaaaaaaaaaaaaaaaaaaaaaaaaa

SEQ ID NO: 19883 - RNA, 6113 nt, Artificial Sequence
  SARS-CoV-2__MT706389.1__non-structural protein 3 (NSP3) mRNA gc
aggagagucccgcagucggcguccagcggcucugcuuguucgugugugugucguugcaggccuuauucaagcuuaccauggcccccaccaaggugaccuucggcgacgacacggucaucgaggugcagggguacaagagcgugaacaucaccuucgagcuggacgagcgcaucgacaagguccucaacgagaagugcuccgccuacaccguggagcugggcaccgaggugaacgaguucgcgugcgucguggccgacgccgugaucaagacgcugcagccggucagcgagcuccugaccccccuggggaucgaccucgacgagugguccauggccaccuacuaccuguucgacgagagcggcgaguucaagcuggccucccacauguacugcagcuucuacccccccgacgaggacgaggaggagggggacugcgaggaggaggaguucgagccguccacccaguacgaguacggcacggaggacgacuaccagggcaagccccucgaguucggggcgaccagcgccgcccugcagcccgaggaggagcaggaggaggacuggcuggacgacgacucccagcagaccgugggccagcaggacgggagcgaggacaaccagaccacgaccauccagaccaucguggagguccagccccagcucgagauggagcugaccccgguggugcagacgaucgaggucaacuccuucagcggcuaccugaagcucaccgacaacguguacaucaagaacgccgacaucguggaggaggcgaagaaggucaagcccaccgugguggucaacgccgccaacguguaccugaagcacgggggcggcguggccggggcccugaacaaggcgaccaacaacgccaugcaggucgaguccgacgacuacaucgccacgaacggcccccucaagguggggggcagcugcguccuguccggccacaaccuggccaagcacugccuccacgugguggggcccaacgucaacaagggcgaggacauccagcugcugaagagcgccuacgagaacuucaaccagcacgaggugcuccuggcgccgcugcucuccgccgggaucuucggcgccgaccccauccacagccugcgggugugcgucgacaccgugcgcaccaacguguaccuggccgucuucgacaagaaccucuacgacaagcugguguccagcuuccuggagaugaagagcgagaagcagguggagcagaagaucgccgagauccccaaggaggaggucaagcccuucaucaccgaguccaagccgagcguggagcagcggaagcaggacgacaagaagaucaaggcgugcguggaggaggucacgaccacccucgaggagaccaaguuccugacggagaaccugcuccuguacaucgacaucaacgggaaccugcaccccgacuccgccacccucgugagcgacaucgacaucaccuuccugaagaaggacgcccccuacaucgugggcgacgucgugcaggagggcgugcugaccgccgucgugauccccacgaagaaggccgggggcaccaccgagaugcucgcgaaggcccugcgcaaggugccgaccgacaacuacaucacgaccuaccccgggcagggccugaacggguacaccgucgaggaggccaagaccgugcucaagaagugcaaguccgccuucuacauccugcccagcaucaucuccaacgagaagcaggagauccugggcaccgugagcuggaaccuccgggagaugcuggcgcacgccgaggagacgcgcaagcugaugcccgucugcguggagaccaaggccaucguguccaccauccagcggaaguacaagggcaucaagauccaggagggggucguggacuacggcgcccgcuucuacuucuacaccagcaagacgaccguggccucccugaucaacacccucaacgaccugaacgagacccuggucacgaugccgcucggguacgugacccacggccugaaccuggaggaggcggcccgguacaugcgcagccucaaggugcccgccaccgucuccgugagcucccccgacgccgugaccgccuacaacggguaccugacgagcuccagcaagacccccgaggagcacuucaucgagaccaucucccuggcgggcagcuacaaggacuggagcuacuccggccagagcacccagcucggggucgaguuccugaagcggggcgacaaguccguguacuacacgagcaacccgaccaccuuccaccuggacggggaggugaucaccuucgacaaccucaagacgcugcugucccuccgcgagguccggaccaucaagguguucaccaccguggacaacaucaaccugcacacgcaggucguggacaugagcaugaccuacggccagcaguucggccccaccuaccuggacggggccgacgugaccaagaucaagccccacaacucccacgagggcaagacguucuacguccucccgaacgacgacacccugcgcguggaggccuucgaguacuaccacaccaccgaccccagcuuccuggggcgguacauguccgcccucaaccacacgaagaaguggaaguacccccaggugaacggccugaccagcaucaagugggccgacaacaacugcuaccuggcgaccgcccuccugacccugcagcagaucgagcucaaguucaaccccccggcccugcaggacgccuacuaccgcgcgcgggccggggaggccgccaacuucugcgcccugauccucgcguacugcaacaagacggucggcgagcugggcgacgugcgcgagaccauguccuaccuguuccagcacgccaaccucgacagcugcaagcggguccugaacguggugugcaagaccugcgggcagcagcagaccacccugaagggcgucgaggccgugauguacauggggacgcucuccuacgagcaguucaagaagggcgugcagauccccugcaccugcgggaagcaggccaccaaguaccugguccagcaggagagccccuucgugaugauguccgcccccccggcgcaguacgagcugaagcacggcaccuucacgugcgccagcgaguacaccggcaacuaccagugcgggcacuacaagcacaucaccuccaaggagacccucuacugcaucgacggcgcccugcugacgaagagcagcgaguacaaggggcccaucaccgacguguucuacaaggagaacuccuacaccaccacgaucaagcccgucaccuacaagcucgacggcguggugugcaccgagaucgaccccaagcuggacaacuacuacaagaaggacaacagcuacuucaccgagcagccgaucgaccugguccccaaccagcccuaccccaacgccuccuucgacaacuucaaguucgugugcgacaacaucaaguucgccgacgaccucaaccagcugacgggguacaagaagccggcgagccgcgagcugaaggugaccuucuuccccgaccucaacggcgacgucguggccaucgacuacaagcacuacacccccuccuucaagaagggcgccaagcugcugcacaagcccaucguguggcacgucaacaacgccaccaacaaggcgacguacaagccgaacaccuggugcauccggugccucuggagcaccaagcccguggagaccuccaacagcuucgacgugcugaaguccgaggacgcccaggggauggacaaccuggccugcgaggaccucaagcccgucagcgaggaggugguggagaaccccacgauccagaaggacguccuggagugcaacgugaagaccaccgagguggucggcgacaucauccugaagccggccaacaacucccucaagaucaccgaggagguggggcacacggaccugauggccgcguacguggacaacagcucccugaccaucaagaagcccaacgagcucagccgcguccugggccugaagacccucgccacccacgggcuggccgccgugaacuccgugcccugggacacgaucgccaacuacgcgaagccguuccugaacaaggucgugagcaccaccaccaacaucgugacgcgcugccucaaccgggucugcaccaacuacaugcccuacuucuucacccugcugcuccagcugugcaccuucacccgcuccacgaacagccggaucaaggccuccaugcccaccaccaucgccaagaacaccgugaagagcgugggcaaguucugccuggaggccagcuucaacuaccucaagucccccaacuucagcaagcugaucaacaucaucaucugguuccugcuccuguccgucugccugggcagccucaucuacuccacggccgcgcugggggugcugaugagcaaccucggcaugccguccuacugcaccggguaccgcgagggcuaccugaacagcaccaacgugaccaucgccacguacugcaccggcuccauccccugcagcgucugccuguccgggcucgacagccuggacaccuaccccucccuggagaccauccagaucacgaucagcuccuucaagugggaccucaccgccuucggccugguggccgagugguuccuggccuacauccucuucacccgguucuucuacgugcuggggcuggcggccaucaugcagcucuucuucagcuacuucgccguccacuucaucuccaacagcuggcugauguggcugaucaucaaccuggugcagauggcccccaucuccgcgauggugcgcauguacaucuucuucgccagcuucuacuacgucuggaagagcuacgugcacguggucgacggcugcaacuccagcaccugcaugaugugcuacaagcggaaccgcgccacgcggguggagugcaccaccaucgucaacggggugcgccgguccuucuacguguacgccaacggcggcaagggguucugcaagcuccacaacuggaacugcgucaacugcgacaccuucugcgccggcagcacguucaucuccgacgagguggcgcgcgaccugagccugcaguucaagcggccgaucaaccccaccgaccaguccagcuacaucguggacuccgucaccgugaagaacgggagcauccaccucuacuucgacaaggccggccagaagaccuacgagcgccacucccugagccacuucgugaaccuggacaaccuccgggccaacaacacgaaggggucccugcccaucaacgucaucguguucgacggcaagagcaagugcgaggaguccagcgccaaguccgccagcguguacuacucccagcugaugugccagcccauccuccugcuggaccaggcgcucgucagcgacgugggcgacagcgccgagguggccgucaagauguucgacgccuacgugaacaccuucuccagcaccuucaacgugccgauggagaagcugaagacccuggucgccacggcggaggccgagcucgccaagaacgugucccuggacaacgugcugagcaccuucaucuccgccgcgcgccagggguucgucgacagcgacguggagaccaaggacguggucgagugccucaagcugucccaccagagcgacaucgaggugaccggcgacuccugcaacaacuacaugcugacguacaacaagguggagaacaugaccccccgggaccucggggccugcaucgacugcagcgcccgccacaucaacgcccaggucgccaagucccacaacaccgcgcugaucuggaacgugaaggacuucaugagccuguccgagcagcuccggaagcagauccgcagcgccgccaagaagaacaaccugcccuucaagcugaccugcgccacgacccgccagguggucaacguggugaccaccaagaucgcccucaagggcgggugaggacuagucccuguucccagagcccacuuuuuuuucuuuuuuugaaauaaaauagccugucuuucagaucucaaaggcucuuuucagagccaccaaaaaaaaaaaaaaaaaaaaaaaaaaaaaaaaaaaaaaaaaaaaaaaaaaaaaaaaaaaaaaaaaaaaaaaaaaaaaaaaaaaaaaaaaaaaaaaaaaaaa

SEQ ID NO: 19884 - RNA, 6113 nt, Artificial Sequence
  SARS-CoV-2__MT706390.1__non-structural protein 3 (NSP3) mRNA gc
aggagagucccgcagucggcguccagcggcucugcuuguucgugugugugucguugcaggccuuauucaagcuuaccauggcccccaccaaggugaccuucggcgacgacacggucaucgaggugcagggguacaagagcgugaacaucaccuucgagcuggacgagcgcaucgacaagguccucaacgagaagugcuccgccuacaccguggagcugggcaccgaggugaacgaguucgcgugcgucguggccgacgccgugaucaagacgcugcagccggucagcgagcuccugaccccccuggggaucgaccucgacgagugguccauggccaccuacuaccuguucgacgagagcggcgaguucaagcuggccucccacauguacugcagcuucuacccccccgacgaggacgaggaggagggggacugcgaggaggaggaguucgagccguccacccaguacgaguacggcacggaggacgacuaccagggcaagccccucgaguucggggcgaccagcgccgcccugcagcccgaggaggagcaggaggaggacuggcuggacgacgacucccagcagaccgugggccagcaggacgggagcgaggacaaccagaccacgaccauccagaccaucguggagguccagccccagcucgagauggagcugaccccgguggugcagacgaucgaggucaacuccuucagcggcuaccugaagcucaccgacaacguguacaucaagaacgccgacaucguggaggaggcgaagaaggucaagcccaccgugguggucaacgccgccaacguguaccugaagcacgggggcggcguggccggggcccugaacaaggcgaccaacaacgccaugcaggucgaguccgacgacuacaucgccacgaacggcccccucaagguggggggcagcugcguccuguccggccacaaccuggccaagcacugccuccacgugguggggcccaacgucaacaagggcgaggacauccagcugcugaagagcgccuacgagaacuucaaccagcacgaguuccuccuggcgccgcugcucuccgccgggaucuucggcgccgaccccauccacagccugcgggugugcguggacaccguccgcaccaacguguaccuggccguguucgacaagaaccucuacgacaagcuggucuccagcuuccuggagaugaagagcgagaagcagguggagcagaagaucgccgagauccccaaggaggaggugaagcccuucaucaccgaguccaagccgagcgucgagcagcggaagcaggacgacaagaagaucaaggcgugcguggaggaggugacgaccacccucgaggagaccaaguuccugacggagaaccugcuccuguacaucgacaucaacgggaaccugcaccccgacuccgccacccucgucagcgacaucgacaucaccuuccugaagaaggacgcccccuacaucgugggcgacgugguccaggagggcgugcugaccgccguggucauccccacgaagaaggccgggggcaccaccgagaugcucgcgaaggcccugcgcaaggugccgaccgacaacuacaucacgaccuaccccgggcagggccugaacggguacaccguggaggaggccaagaccguccucaagaagugcaaguccgccuucuacauccugcccagcaucaucuccaacgagaagcaggagauccugggcaccgugagcuggaaccuccgggagaugcuggcgcacgccgaggagacgcgcaagcugaugcccgugugcgucgagaccaaggccaucguguccaccauccagcggaaguacaagggcaucaagauccaggaggggguggucgacuacggcgcccgcuucuacuucuacaccagcaagacgaccguggccucccugaucaacacccucaacgaccugaacgagacccuggugacgaugccgcucggguacgucacccacggccugaaccuggaggaggcggcccgguacaugcgcagccucaaggugcccgccaccguguccgucagcucccccgacgccgugaccgccuacaacggguaccugacgagcuccagcaagacccccgaggagcacuucaucgagaccaucucccuggcgggcagcuacaaggacuggagcuacuccggccagagcacccagcucgggguggaguuccugaagcggggcgacaaguccgucuacuacacgagcaacccgaccaccuuccaccuggacggggaggugaucaccuucgacaaccucaagacgcugcugucccuccgcgaggugcggaccaucaaggucuucaccaccguggacaacaucaaccugcacacgcagguggucgacaugagcaugaccuacggccagcaguucggccccaccuaccuggacggggccgacgugaccaagaucaagccccacaacucccacgagggcaagacguucuacgugcucccgaacgacgacacccugcgcgucgaggccuucgaguacuaccacaccaccgaccccagcuuccuggggcgguacauguccgcccucaaccacacgaagaaguggaaguacccccaggugaacggccugaccagcaucaagugggccgacaacaacugcuaccuggcgaccgcccuccugacccugcagcagaucgagcucaaguucaaccccccggcccugcaggacgccuacuaccgcgcgcgggccggggaggccgccaacuucugcgcccugauccucgcguacugcaacaagacggugggcgagcugggcgacguccgcgagaccauguccuaccuguuccagcacgccaaccucgacagcugcaagcgggugcugaacgucgugugcaagaccugcgggcagcagcagaccacccugaagggcguggaggccgucauguacauggggacgcucuccuacgagcaguucaagaagggcgugcagauccccugcaccugcgggaagcaggccaccaaguaccuggugcagcaggagagccccuucgucaugauguccgcccccccggcgcaguacgagcugaagcacggcaccuucacgugcgccagcgaguacaccggcaacuaccagugcgggcacuacaagcacaucaccuccaaggagacccucuacugcaucgacggcgcccugcugacgaagagcagcgaguacaaggggcccaucaccgacguguucuacaaggagaacuccuacaccaccacgaucaagcccgugaccuacaagcucgacggcgucgugugcaccgagaucgaccccaagcuggacaacuacuacaagaaggacaacagcuacuucaccgagcagccgaucgaccuggugcccaaccagcccuaccccaacgccuccuucgacaacuucaaguucgucugcgacaacaucaaguucgccgacgaccucaaccagcugacgggguacaagaagccggcgagccgcgagcugaaggugaccuucuuccccgaccucaacggcgacguggucgccaucgacuacaagcacuacacccccuccuucaagaagggcgccaagcugcugcacaagcccaucguguggcacgugaacaacgccaccaacaaggcgacguacaagccgaacaccuggugcauccggugccucuggagcaccaagcccgucgagaccuccaacagcuucgacgugcugaaguccgaggacgcccaggggauggacaaccuggccugcgaggaccucaagcccgugagcgaggaggucguggagaaccccacgauccagaaggacgugcuggagugcaacgucaagaccaccgagguggugggcgacaucauccugaagccggccaacaacucccucaagaucaccgaggaggucgggcacacggaccugauggccgcguacguggacaacagcucccugaccaucaagaagcccaacgagcucagccgcgugcugggccugaagacccucgccacccacgggcuggccgccgucaacuccgugcccugggacacgaucgccaacuacgcgaagccguuccugaacaagguggucagcaccaccaccaacaucgugacgcgcugccucaaccgggugugcaccaacuacaugcccuacuucuucacccugcugcuccagcugugcaccuucacccgcuccacgaacagccggaucaaggccuccaugcccaccaccaucgccaagaacaccgucaagagcgugggcaaguucugccuggaggccagcuucaacuaccucaagucccccaacuucagcaagcugaucaacaucaucaucugguuccugcuccuguccgugugccugggcagccucaucuacuccacggccgcgcuggggguccugaugagcaaccucggcaugccguccuacugcaccggguaccgcgagggcuaccugaacagcaccaacgugaccaucgccacguacugcaccggcuccauccccugcagcgugugccuguccgggcucgacagccuggacaccuaccccucccuggagaccauccagaucacgaucagcuccuucaagugggaccucaccgccuucggccuggucgccgagugguuccuggccuacauccucuucacccgguucuucuacgugcuggggcuggcggccaucaugcagcucuucuucagcuacuucgccgugcacuucaucuccaacagcuggcugauguggcugaucaucaaccugguccagauggcccccaucuccgcgauggugcgcauguacaucuucuucgccagcuucuacuacguguggaagagcuacguccacgugguggacggcugcaacuccagcaccugcaugaugugcuacaagcggaaccgcgccacgcgggucgagugcaccaccaucgugaacgggguccgccgguccuucuacguguacgccaacggcggcaagggguucugcaagcuccacaacuggaacugcgugaacugcgacaccuucugcgccggcagcacguucaucuccgacgaggucgcgcgcgaccugagccugcaguucaagcggccgaucaaccccaccgaccaguccagcuacaucguggacuccgugaccgucaagaacgggagcauccaccucuacuucgacaaggccggccagaagaccuacgagcgccacucccugagccacuucgugaaccuggacaaccuccgggccaacaacacgaaggggucccugcccaucaacgugaucgucuucgacggcaagagcaagugcgaggaguccagcgccaaguccgccagcguguacuacucccagcugaugugccagcccauccuccugcuggaccaggcgcucgugagcgacgucggcgacagcgccgagguggccgugaagauguucgacgccuacgucaacaccuucuccagcaccuucaacgugccgauggagaagcugaagacccugguggccacggcggaggccgagcucgccaagaacgucucccuggacaacgugcugagcaccuucaucuccgccgcgcgccagggguucguggacagcgacgucgagaccaaggacgugguggagugccucaagcugucccaccagagcgacaucgaggucaccggcgacuccugcaacaacuacaugcugacguacaacaagguggagaacaugaccccccgggaccucggggccugcaucgacugcagcgcccgccacaucaacgcccagguggccaagucccacaacaucgcgcugaucuggaacgucaaggacuucaugagccuguccgagcagcuccggaagcagauccgcagcgccgccaagaagaacaaccugcccuucaagcugaccugcgccaccacgcgccagguggugaacgucgugaccaccaagaucgcccucaagggcgggugaggacuagucccuguucccagagcccacuuuuuuuucuuuuuuugaaauaaaauagccugucuuucagaucucaaaggcucuuuucagagccaccaaaaaaaaaaaaaaaaaaaaaaaaaaaaaaaaaaaaaaaaaaaaaaaaaaaaaaaaaaaaaaaaaaaaaaaaaaaaaaaaaaaaaaaaaaaaaaaaaaaaa

SEQ ID NO: 19885 - RNA, 6113 nt, Artificial Sequence
  SARS-CoV-2__MT706403.1__non-structural protein 3 (NSP3) mRNA gc
aggagagucccgcagucggcguccagcggcucugcuuguucgugugugugucguugcaggccuuauucaagcuuaccauggcccccaccaaggugaccuucggcgacgacacggucaucgaggugcagggguacaagagcgugaacaucaccuucgagcuggacgagcgcaucgacaagguccucaacgagaagugcuccgccuacaccguggagcugggcaccgaggugaacgaguucgcgugcgucguggccgacgccgugaucaagacgcugcagccggucagcgagcuccugaccccccuggggaucgaccucgacgagugguccauggccaccuacuaccuguucgacgagagcggcgaguucaagcuggccucccacauguacugcagcuucuacccccccgacgaggacgaggaggagggggacugcgaggaggaggaguucgagccguccacccaguacgaguacggcacggaggacgacuaccagggcaagccccucgaguucggggcgaccagcgccgcccugcagcccgaggaggagcaggaggaggacuggcuggacgacgacucccagcagaccgugggccagcaggacgggagcgaggacaaccagaccacgaccauccagaccaucguggagguccagccccagcucgagauggagcugaccccgguggugcagacgaucgaggucaacuccuucagcggcuaccugaagcucaccgacaacguguacaucaagaacgccgacaucguggaggaggcgaagaaggucaagcccaccgugguggucaacgccgccaacguguaccugaagcacgggggcggcguggccggggcccugaacaaggcgaccaacaacgccaugcaggucgaguccgacgacuacaucgccacgaacggcccccucaagguggggggcagcugcguccuguccggccacaaccuggccaagcacugccuccacgugguggggcccaacgucaacaagggcgaggacauccaguuccugaagagcgccuacgagaacuucaaccagcacgaggugcugcucgcgccgcugcuguccgccgggaucuucggcgccgaccccauccacagccuccgggugugcgucgacaccgugcgcaccaacguguaccuggccgucuucgacaagaaccuguacgacaagcucguguccagcuuccuggagaugaagagcgagaagcagguggagcagaagaucgccgagauccccaaggaggaggucaagcccuucaucaccgaguccaagccgagcguggagcagcggaagcaggacgacaagaagaucaaggcgugcguggaggaggucacgaccacccuggaggagaccaaguuccucacggagaaccugcugcucuacaucgacaucaacgggaaccugcaccccgacuccgccacccuggugagcgacaucgacaucaccuuccucaagaaggacgcccccuacaucgugggcgacgucgugcaggagggcgugcugaccgccgucgugauccccacgaagaaggccgggggcaccaccgagaugcuggcgaaggcccuccgcaaggugccgaccgacaacuacaucacgaccuaccccgggcagggccugaacggguacaccgucgaggaggccaagaccgugcugaagaagugcaaguccgccuucuacauccuccccagcaucaucuccaacgagaagcaggagauccugggcaccgugagcuggaaccugcgggagaugcucgcgcacgccgaggagacgcgcaagcugaugcccgucugcguggagaccaaggccaucguguccaccauccagcggaaguacaagggcaucaagauccaggagggggucguggacuacggcgcccgcuucuacuucuacaccagcaagacgaccguggccucccugaucaacacccugaacgaccucaacgagacccuggucacgaugccgcugggguacgugacccacggccucaaccuggaggaggcggcccgguacaugcgcagccugaaggugcccgccaccgucuccgugagcucccccgacgccgugaccgccuacaacggguaccucacgagcuccagcaagacccccgaggagcacuucaucgagaccaucucccuggcgggcagcuacaaggacuggagcuacuccggccagagcacccagcuggggaucgaguuccucaagcggggcgacaaguccgucuacuacacgagcaacccgaccaccuuccaccuggacggggaggugaucaccuucgacaaccugaagacgcuccugucccugcgcgaggugcggaccaucaaggucuucaccaccguggacaacaucaaccuccacacgcagguggucgacaugagcaugaccuacggccagcaguucggccccaccuaccuggacggggccgacgugaccaagaucaagccccacaacucccacgagggcaagacguucuacgugcugccgaacgacgacacccuccgcgucgaggccuucgaguacuaccacaccaccgaccccagcuuccuggggcgguacauguccgcccugaaccacacgaagaaguggaaguacccccaggugaacggccucaccagcaucaagugggccgacaacaacugcuaccuggcgaccgcccugcucacccugcagcagaucgagcugaaguucaaccccccggcccuccaggacgccuacuaccgcgcgcgggccggggaggccgccaacuucugcgcccugauccuggcguacugcaacaagacggugggcgagcucggcgacguccgcgagaccauguccuaccuguuccagcacgccaaccuggacagcugcaagcgggugcucaacgucgugugcaagaccugcgggcagcagcagaccacccugaagggcguggaggccgucauguacauggggacgcuguccuacgagcaguucaagaagggcgugcagauccccugcaccugcgggaagcaggccaccaaguaccucgugcagcaggagagccccuucgucaugauguccgcccccccggcgcaguacgagcugaagcacggcaccuucacgugcgccagcgaguacaccggcaacuaccagugcgggcacuacaagcacaucaccuccaaggagacccuguacugcaucgacggcgcccuccugacgaagagcagcgaguacaaggggcccaucaccgacguguucuacaaggagaacuccuacaccaccacgaucaagcccgugaccuacaagcuggacggcgucgugugcaccgagaucgaccccaagcucgacaacuacuacaagaaggacaacagcuacuucaccgagcagccgaucgaccuggugcccaaccagcccuaccccaacgccuccuucgacaacuucaaguucgucugcgacaacaucaaguucgccgacgaccugaaccagcucacgggguacaagaagccggcgagccgcgagcugaaggugaccuucuuccccgaccugaacggcgacguggucgccaucgacuacaagcacuacacccccuccuucaagaagggcgccaagcuccugcacaagcccaucguguggcacgugaacaacgccaccaacaaggcgacguacaagccgaacaccuggugcauccggugccuguggagcaccaagcccgucgagaccuccaacagcuucgacgugcucaaguccgaggacgcccaggggauggacaaccuggccugcgaggaccugaagcccgugagcgaggaggucguggagaaccccacgauccagaaggacgugcucgagugcaacgucaagaccaccgagguggugggcgacaucauccugaagccggccaacaacucccugaagaucaccgaggaggucgggcacacggaccucauggccgcguacguggacaacagcucccugaccaucaagaagcccaacgagcugagccgcgugcucggccugaagacccuggccacccacgggcucgccgccgucaacuccgugcccugggacacgaucgccaacuacgcgaagccguuccugaacaagguggucagcaccaccaccaacaucgugacgcgcugccugaaccgggugugcaccaacuacaugcccuacuucuucacccuccugcugcagcucugcaccuucacccgcuccacgaacagccggaucaaggccuccaugcccaccaccaucgccaagaacaccgucaagagcgugggcaaguucugccuggaggccagcuucaacuaccugaagucccccaacuucagcaagcucaucaacaucaucaucugguuccugcugcucuccgugugccugggcagccugaucuacuccacggccgcgcucgggguccugaugagcaaccugggcaugccguccuacugcaccggguaccgcgagggcuaccucaacagcaccaacgugaccaucgccacguacugcaccggcuccauccccugcagcgugugccuguccgggcuggacagccucgacaccuaccccucccuggagaccauccagaucacgaucagcuccuucaagugggaccugaccgccuucggccucgucgccgagugguuccuggccuacauccuguucacccgguucuucuacgugcucgggcuggcggccaucaugcagcuguucuucagcuacuucgccgugcacuucaucuccaacagcuggcucauguggcugaucaucaaccugguccagauggcccccaucuccgcgauggugcgcauguacaucuucuucgccagcuucuacuacguguggaagagcuacguccacgugguggacggcugcaacuccagcaccugcaugaugugcuacaagcggaaccgcgccacgcgggucgagugcaccaccaucgugaacgggguccgccgguccuucuacguguacgccaacggcggcaagggguucugcaagcugcacaacuggaacugcgugaacugcgacaccuucugcgccggcagcacguucaucuccgacgaggucgcgcgcgaccucagccugcaguucaagcggccgaucaaccccaccgaccaguccagcuacaucguggacuccgugaccgucaagaacgggagcauccaccuguacuucgacaaggccggccagaagaccuacgagcgccacucccucagccacuucgugaaccuggacaaccugcgggccaacaacacgaaggggucccuccccaucaacgugaucgucuucgacggcaagagcaagugcgaggaguccagcgccaaguccgccagcguguacuacucccagcugaugugccagcccauccugcuccuggaccaggcgcuggugagcgacgucggcgacagcgccgagguggccgugaagauguucgacgccuacgucaacaccuucuccagcaccuucaacgugccgauggagaagcucaagacccugguggccacggcggaggccgagcuggccaagaacgucucccucgacaacgugcugagcaccuucaucuccgccgcgcgccagggguucguggacagcgacgucgagaccaaggacgugguggagugccugaagcucucccaccagagcgacaucgaggucaccggcgacuccugcaacaacuacaugcugacguacaacaagguggagaacaugaccccccgggaccugggggccugcaucgacugcagcgcccgccacaucaacgcccagguggccaagucccacaacaucgcgcucaucuggaacgucaaggacuucaugagccuguccgagcagcugcggaagcagauccgcagcgccgccaagaagaacaaccuccccuucaagcugaccugcgccaccacgcgccagguggugaacgucgugaccaccaagaucgcccugaagggcgggugaggacuagucccuguucccagagcccacuuuuuuuucuuuuuuugaaauaaaauagccugucuuucagaucucaaaggcucuuuucagagccaccaaaaaaaaaaaaaaaaaaaaaaaaaaaaaaaaaaaaaaaaaaaaaaaaaaaaaaaaaaaaaaaaaaaaaaaaaaaaaaaaaaaaaaaaaaaaaaaaaaaaa

SEQ ID NO: 19886 - RNA, 6113 nt, Artificial Sequence
  SARS-CoV-2__MT706406.1__non-structural protein 3 (NSP3) mRNA gc
aggagagucccgcagucggcguccagcggcucugcuuguucgugugugugucguugcaggccuuauucaagcuuaccauggcccccaccaaggugaccuucggcgacgacacggucaucgaggugcagggguacaagagcgugaacaucaccuucgagcuggacgagcgcaucgacaagguccucaacgagaagugcuccgccuacaccguggagcugggcaccgaggugaacgaguucgcgugcgucguggccgacgccgugaucaagacgcugcagccggucagcgagcuccugaccccccuggggaucgaccucgacgagugguccauggccaccuacuaccuguucgacgagagcggcgaguucaagcuggccucccacauguacugcagcuucuacccccccgacgaggacgaggaggagggggacugcgaggaggaggaguucgagccguccacccaguacgaguacggcacggaggacgacuaccagggcaagccccucgaguucggggcgaccagcgccgcccugcagcccgaggaggagcaggaggaggacuggcuggacgacgacucccagcagaccgugggccagcaggacgggagcgaggacaaccagaccacgaccauccagaccaucguggagguccagccccagcucgagauggagcugaccccgguggugcagacgaucgaggucaacuccuucagcggcuaccugaagcucaccgacaacguguacaucaagaacgccgacaucguggaggaggcgaagaaggucaagcccaccgugguggucaacgccgccaacguguaccugaagcacgggggcggcguggccggggcccugaacaaggcgaccaacaacgccaugcaggucgaguccgacgacuacaucgccacgaacggcccccucaagguggggggcagcugcguccuguccggccacaaccuggccaagcacugccuccacgugguggggcccaacgucaacaagggcgaggacauccagcugcugaagagcgccuacgagaacuucaaccagcacgaggugcuccuggcgccgcugcucuccgccgggaucuucggcgccgaccccauccacagccugcgggugugcgucgacaccgugcgcaccaacguguaccuggccgucuucgacaagaaccucuacgacaagcugguguccagcuuccuggagaugaagagcgagaagcagguggagcagaagaucgccgagauccccaaggaggaggucaagcccuucaucaccgaguccaagccgagcguggagcagcggaagcaggacgacaagaagaucaaggcgugcguggaggaggucacgaccacccucgaggagaccaaguuccugacggagaaccugcuccuguacaucgacaucaacgggaaccugcaccccgacuccgccacccucgugagcgacaucgacaucaccuuccugaagaaggacgcccccuacaucgugggcgacgucgugcaggagggcgugcugaccgccgucgugauccccacgaagaaggccgggggcaccaccgagaugcucgcgaaggcccugcgcaaggugccgaccgacaacuacaucacgaccuaccccgggcagggccugaacggguacaccgucgaggaggccaagaccgugcucaagaagugcaaguccgccuucuacauccugcccagcaucaucuccaacgagaagcaggagauccugggcaccgugagcuggaaccuccgggagaugcuggcgcacgccgaggagacgcgcaagcugaugcccgucugcguggagaccaaggccaucguguccaccauccagcggaaguacaagggcaucaagauccaggagggggucguggacuacggcgcccgcuucuacuucuacaccagcaagacgaccguggccucccugaucaacacccucaacgaccugaacgagacccuggucacgaugccgcucggguacgugacccacggccugaaccuggaggaggcggcccgguacaugcgcagccucaaggugcccgccaccgucuccgugagcucccccgacgccgugaccgccuacaacggguaccugacgagcuccagcaagacccccgaggagcacuucaucgagaccaucucccuggcgggcagcuacaaggacuggagcuacuccggccagagcacccagcucggggucgaguuccugaagcggggcgacaaguccguguacuacacgagcaacccgaccaccuuccaccuggacggggaggugaucaccuucgacaaccucaagacgcugcugucccuccgcgagguccggaccaucaagguguucaccaccguggacaacaucaaccugcacacgcaggucguggacaugagcaugaccuacggccagcaguucggccccaccuaccuggacggggccgacgugaccaagaucaagccccacaacucccacgagggcaagacguucuacguccucccgaacgacgacacccugcgcguggaggccuucgaguacuaccacaccaccgaccccagcuuccuggggcgguacauguccgcccucaaccacacgaagaaguggaaguacccccaggugaacggccugaccagcaucaagugggccgacaacaacugcuaccuggcgaccgcccuccugacccugcagcagaucgagcucaaguucaaccccccggcccugcaggacgccuacuaccgcgcgcgggccggggaggccgccaacuucugcgcccugauccucgcguacugcaacaagacggucggcgagcugggcgacgugcgcgagaccauguccuaccuguuccagcacgccaaccucgacagcugcaagcggguccugaacguggugugcaagaccugcgggcagcagcagaccacccugaagggcgucgaggccgugauguacauggggacgcucuccuacgagcaguucaagaagggcgugcagauccccugcaccugcgggaagcaggccaccaaguaccugguccagcaggagagccccuucgugaugauguccgcccccccggcgcaguacgagcugaagcacggcaccuucacgugcgccagcgaguacaccggcaacuaccagugcgggcacuacaagcacaucaccuccaaggagacccucuacugcaucgacggcgcccugcugacgaagagcagcgaguacaaggggcccaucaccgacguguucuacaaggagaacuccuacaccaccacgaucaagcccgucaccuacaagcucgacggcguggugugcaccgagaucgaccccaagcuggacaacuacuacaagaaggacaacagcuacuucaccgagcagccgaucgaccugguccccaaccagcccuaccccaacgccuccuucgacaacuucaaguucgugugcgacaacaucaaguucgccgacgaccucaaccagcugacgggguacaagaagccggcgagccgcgagcugaaggugaccuucuuccccgaccucaacggcgacgucguggccaucgacuacaagcacuacacccccuccuucaagaagggcgccaagcugcugcacaagcccaucguguggcacgucaacaacgccaccaacaaggcgacguacaagccgaacaccuggugcauccggugccucuggagcaccaagcccguggagaccuccaacagcuucgacgugcugaaguccgaggacgcccaggggauggacaaccuggccugcgaggaccucaagcccgucagcgaggaggugguggagaaccccacgauccagaaggacguccuggagugcaacgugaagaccaccgagguggucggcgacaucauccugaagccggccaacaacucccucaagaucaccgaggagguggggcacacggaccugauggccgcguacguggacaacagcucccugaccaucaagaagcccaacgagcucagccgcguccugggccugaagacccucgccacccacgggcuggccgccgugaacuccgugcccugggacacgaucgccaacuacgcgaagccguuccugaacaaggucgugagcaccaccaccaacaucgugacgcgcugccucaaccgggucugcaccaacuacaugcccuacuucuucacccugcugcuccagcugugcaccuucacccgcuccacgaacagccggaucaaggccuccaugcccaccaccaucgccaagaacaccgugaagagcgugggcaaguucugccuggaggccagcuucaacuaccucaagucccccaacuucagcaagcugaucaacaucaucaucugguuccugcuccuguccgucugccugggcagccucaucuacuccacggccgcgcugggggugcugaugagcaaccucggcaugccguccuacugcaccggguaccgcgagggcuaccugaacagcaccaacgugaccaucgccacguacugcaccggcuccauccccugcagcgucugccuguccgggcucgacagccuggacaccuaccccucccuggagaccauccagaucacgaucagcuccuucaagugggaccucaccgccuucggccugguggccgagugguuccuggccuacauccucuucacccgguucuucuacgugcuggggcuggcggccaucaugcagcucuucuucagcuacuucgccguccacuucaucuccaacagcuggcugauguggcugaucaucaaccuggugcagauggcccccaucuccgcgauggugcgcauguacaucuucuucgccagcuucuacuacgucuggaagagcuacgugcacguggucgacggcugcaacuccagcaccugcaugaugugcuacaagcggaaccgcgccacgcggguggagugcaccaccaucgucaacggggugcgccgguccuucuacguguacgccaacggcggcaagggguucugcaagcuccacaacuggaacugcgucaacugcgacaccuucugcgccggcagcacguucaucuccgacgagguggcgcgcgaccugagccugcaguucaagcggccgaucaaccccaccgaccaguccuucuacaucguggacagcgucaccgugaagaacggguccauccaccucuacuucgacaaggccggccagaagaccuacgagcgccacagccugucccacuucgugaaccuggacaaccuccgggccaacaacacgaaggggagccugcccaucaacgucaucguguucgacggcaaguccaagugcgaggagagcuccgccaagagcgccuccguguacuacagccagcugaugugccagcccauccuccugcuggaccaggcgcucgucuccgacgugggcgacagcgccgagguggccgucaagauguucgacgccuacgugaacaccuucagcuccaccuucaacgugccgauggagaagcugaagacccuggucgccacggcggaggccgagcucgccaagaacgugagccuggacaacgugcuguccaccuucaucagcgccgcgcgccagggguucgucgacuccgacguggagaccaaggacguggucgagugccucaagcugagccaccaguccgacaucgaggugaccggcgacagcugcaacaacuacaugcugacguacaacaagguggagaacaugaccccccgggaccucggggccugcaucgacugcuccgcccgccacaucaacgcccaggucgccaagagccacaacaucgcgcugaucuggaacgugaaggacuucaugucccugagcgagcagcuccggaagcagauccgcuccgccgccaagaagaacaaccugcccuucaagcugaccugcgccaccacgcgccagguggucaacguggugaccaccaagaucgcccucaagggcgggugaggacuagucccuguucccagagcccacuuuuuuuucuuuuuuugaaauaaaauagccugucuuucagaucucaaaggcucuuuucagagccaccaaaaaaaaaaaaaaaaaaaaaaaaaaaaaaaaaaaaaaaaaaaaaaaaaaaaaaaaaaaaaaaaaaaaaaaaaaaaaaaaaaaaaaaaaaaaaaaaaaaaa

SEQ ID NO: 19887 - RNA, 6113 nt, Artificial Sequence
  SARS-CoV-2__MT706427.1__non-structural protein 3 (NSP3) mRNA gc
aggagagucccgcagucggcguccagcggcucugcuuguucgugugugugucguugcaggccuuauucaagcuuaccauggcccccaccaaggugaccuucggcgacgacacggucaucgaggugcagggguacaagagcgugaacaucaccuucgagcuggacgagcgcaucgacaagguccucaacgagaagugcuccgccuacaccguggagcugggcaccgaggugaacgaguucgcgugcgucguggccgacgccgugaucaagacgcugcagccggucagcgagcuccugaccccccuggggaucgaccucgacgagugguccauggccaccuacuaccuguucgacgagagcggcgaguucaagcuggccucccacauguacugcagcuucuacccccccgacgaggacgaggaggagggggacugcgaggaggaggaguucgagccguccacccaguacgaguacggcacggaggacgacuaccagggcaagccccucgaguucggggcgaccagcgccgcccugcagcccgaggaggagcaggaggaggacuggcuggacgacgacucccagcagaccgugggccagcaggacgggagcgaggacaaccagaccacgaccauccagaccaucguggagguccagccccagcucgagauggagcugaccccgguggugcagacgaucgaggucaacuccuucagcggcuaccugaagcucaccgacaacguguacaucaagaacgccgacaucguggaggaggcgaagaaggucaagcccaccgugguggucaacgccgccaacguguaccugaagcacgggggcggcguggccggggcccugaacaaggcgaccaacaacgccaugcaggucgaguccgacgacuacaucgccacgaacggcccccucaagguggggggcagcugcguccuguccggccacaaccuggccaagcacugccuccacgugguggggcccaacgucaacaagggcgaggacauccagcugcugaagagcgccuacgagaacuucaaccagcacgaggugcuccuggcgccgcugcucuccgccgggaucuucggcgccgaccccauccacagccugcgggugugcgucgacaccgugcgcaccaacguguaccuggccgucuucgacaagaaccucuacgacaagcugguguccagcuuccuggagaugaagagcgagaagcagguggagcagaacaucgccgagauccccaaggaggaggucaagcccuucaucaccgaguccaagccgagcguggagcagcggaagcaggacgacaagaagaucaaggcgugcguggaggaggucacgaccacccucgaggagaccaaguuccugacggagaaccugcuccuguacaucgacaucaacgggaaccugcaccccgacuccgccacccucgugagcgacaucgacaucaccuuccugaagaaggacgcccccuacaucgugggcgacgucgugcaggagggcgugcugaccgccgucgugauccccacgaagaaggccgggggcaccaccgagaugcucgcgaaggcccugcgcaagguguccaccgacaacuacaucacgaccuacccggggcagggccugaacggguacaccgucgaggaggccaagaccgugcucaagaagugcaagagcgccuucuacauccugcccuccaucaucagcaacgagaagcaggagauccugggcaccguguccuggaaccuccgggagaugcuggcgcacgccgaggagacgcgcaagcugaugcccgucugcguggagaccaaggccaucgugagcaccauccagcggaaguacaagggcaucaagauccaggagggggucguggacuacggcgcccgcuucuacuucuacaccuccaagacgaccguggccagccugaucaacacccucaacgaccugaacgagacccuggucacgaugccccucggguacgugacccacggccugaaccuggaggaggcggcccgguacaugcgcucccucaaggugccggccaccgucagcguguccagccccgacgccgugaccgccuacaacggguaccugacguccagcuccaagacccccgaggagcacuucaucgagaccaucagccuggcgggcagcuacaaggacugguccuacagcggccaguccacccagcucgggaucgaguuccugaagcggggcgacaagagcgucuacuacacguccaaccccaccaccuuccaccuggacggggaggugaucaccuucgacaaccucaagacgcugcugagccuccgcgaggugcggaccaucaaggucuucaccaccguggacaacaucaaccugcacacgcagguggucgacauguccaugaccuacggccagcaguucggcccgaccuaccuggacggggccgacgugaccaagaucaagccccacaacagccacgagggcaagacguucuacgugcuccccaacgacgacacccugcgcgucgaggccuucgaguacuaccacaccaccgacccguccuuccuggggcgguacaugagcgcccucaaccacacgaagaaguggaaguacccccaggugaacggccugaccuccaucaagugggccgacaacaacugcuaccuggcgaccgcccuccugacccugcagcagaucgagcucaaguucaacccccccgcccugcaggacgccuacuaccgcgcgcgggccggggaggccgccaacuucugcgcccugauccucgcguacugcaacaagacggugggcgagcugggcgacguccgcgagaccaugagcuaccuguuccagcacgccaaccucgacuccugcaagcgggugcugaacgucgugugcaagaccugcgggcagcagcagaccacccugaagggcguggaggccgucauguacauggggacgcucagcuacgagcaguucaagaagggcgugcagaucccgugcaccugcgggaagcaggccaccaaguaccuggugcagcaggagucccccuucgucaugaugagcgccccccccgcgcaguacgagcugaagcacggcaccuucacgugcgccuccgaguacaccggcaacuaccagugcgggcacuacaagcacaucaccagcaaggagacccucuacugcaucgacggcgcccugcugacgaagagcuccgaguacaaggggccgaucaccgacguguucuacaaggagaacagcuacaccaccacgaucaagcccgugaccuacaagcucgacggcgucgugugcaccgagaucgaccccaagcuggacaacuacuacaagaaggacaacuccuacuucaccgagcagcccaucgaccuggugccgaaccagcccuaccccaacgccagcuucgacaacuucaaguucgucugcgacaacaucaaguucgccgacgaccucaaccagcugacgggguacaagaagcccgcgucccgcgagcugaaggugaccuucuucccggaccucaacggcgacguggucgccaucgacuacaagcacuacacccccagcuucaagaagggcgccaagcugcugcacaagcccaucguguggcacgugaacaacgccaccaacaaggcgacguacaagcccaacaccuggugcauccggugccucugguccaccaagccggucgagaccagcaacuccuucgacgugcugaagagcgaggacgcccaggggauggacaaccuggccugcgaggaccucaagcccguguccgaggaggucguggagaaccccacgauccagaaggacgugcuggagugcaacgucaagaccaccgagguggugggcgacaucauccugaagcccgccaacaacagccucaagaucaccgaggaggucgggcacacggaccugauggccgcguacguggacaacuccagccugaccaucaagaagccgaacgagcucucccgcgugcugggccugaagacccucgccacccacgggcuggccgccgucaacagcgugcccugggacacgaucgccaacuacgcgaagcccuuccugaacaagguggucuccaccaccaccaacaucgugacgcgcugccucaaccgggugugcaccaacuacaugccguacuucuucacccugcugcuccagcugugcaccuucacccgcagcacgaacucccggaucaaggccagcaugcccaccaccaucgccaagaacaccgucaagagcgugggcaaguucugccuggaggccuccuucaacuaccucaagagccccaacuucuccaagcugaucaacaucaucaucugguuccugcuccugagcgugugccugggcucccucaucuacagcacggccgcgcuggggguccugauguccaaccucggcaugcccagcuacugcaccggguaccgcgagggcuaccugaacuccaccaacgugaccaucgccacguacugcaccggcagcaucccgugcuccgugugccugagcgggcucgacucccuggacaccuaccccagccuggagaccauccagaucacgaucuccagcuucaagugggaccucaccgccuucggccuggucgccgagugguuccuggccuacauccucuucacccgguucuucuacgugcuggggcuggcggccaucaugcagcucuucuucuccuacuucgccgugcacuucaucagcaacuccuggcugauguggcugaucaucaaccugguccagauggcccccaucagcgcgauggugcgcauguacaucuucuucgccagcuucuacuacguguggaaguccuacguccacgugguggacggcugcaacagcuccaccugcaugaugugcuacaagcggaaccgcgccacgcgggucgagugcaccaccaucgugaacgggguccgccggagcuucuacguguacgccaacggcggcaagggguucugcaagcuccacaacuggaacugcgugaacugcgacaccuucugcgccggcuccacguucaucagcgacgaggucgcgcgcgaccugucccugcaguucaagcggcccaucaacccgaccgaccagagcuccuacaucguggacagcgugaccgucaagaacggguccauccaccucuacuucgacaaggccggccagaagaccuacgagcgccacagccugucccacuucgugaacuucgacaaccugcgggccaacaacacgaaggggagccuccccaucaacgugaucgucuucgacggcaaguccaagugcgaggagagcuccgccaagagcgccuccguguacuacagccagcugaugugccagcccauccugcuccuggaccaggcgcuggugagcgacgucggcgacuccgccgagguggccgugaagauguucgacgccuacgucaacaccuucagcuccaccuucaacgugcccauggagaagcucaagacccugguggccacggcggaggccgagcuggccaagaacgucagccucgacaacgugcuguccaccuucaucagcgccgcgcgccagggguucguggacuccgacgucgagaccaaggacgugguggagugccugaagcucagccaccaguccgacaucgaggucaccggcgacagcugcaacaacuacaugcugacguacaacaagguggagaacaugaccccgcgggaccugggggccugcaucgacugcuccgcccgccacaucaacgcccagguggccaagagccacaacaucgcgcucaucuggaacgucaaggacuucaugucccugagcgagcagcugcggaagcagauccgcuccgccgccaagaagaacaaccuccccuucaagcugaccugcgccaccacgcgccagguggugaacgucgugaccaccaagaucgcccugaagggcgggugaggacuagucccuguucccagagcccacuuuuuuuucuuuuuuugaaauaaaauagccugucuuucagaucucaaaggcucuuuucagagccaccaaaaaaaaaaaaaaaaaaaaaaaaaaaaaaaaaaaaaaaaaaaaaaaaaaaaaaaaaaaaaaaaaaaaaaaaaaaaaaaaaaaaaaaaaaaaaaaaaaaaa

SEQ ID NO: 19888 - RNA, 6113 nt, Artificial Sequence
  SARS-CoV-2__MT709104.1__non-structural protein 3 (NSP3) mRNA gc
aggagagucccgcagucggcguccagcggcucugcuuguucgugugugugucguugcaggccuuauucaagcuuaccauggcccccaccaaggugaccuucggcgacgacacggucaucgaggugcagggguacaagagcgugaacaucaccuucgagcuggacgagcgcaucgacaagguccucaacgagaagugcuccgccuacaccguggagcugggcaccgaggugaacgaguucgcgugcgucguggccgacgccgugaucaagacgcugcagccggucagcgagcuccugaccccccuggggaucgaccucgacgagugguccauggccaccuacuaccuguucgacgagagcggcgaguucaagcuggccucccacauguacugcagcuucuacccccccgacgaggacgaggaggagggggacugcgaggaggaggaguucgagccguccacccaguacgaguacggcacggaggacgacuaccagggcaagccccucgaguucggggcgaccagcgccgcccugcagcccgaggaggagcaggaggaggacuggcuggacgacgacucccagcagaccgugggccagcaggacgggagcgaggacaaccagaccacgaccauccagaccaucguggagguccagccccagcucgagauggagcugaccccgguggugcagacgaucgaggucaacuccuucagcggcuaccugaagcucaccgacaacguguacaucaagaacgccgacaucguggaggaggcgaagaagaucaagcccaccgucguggugaacgccgccaacgucuaccugaagcacgggggcggcguggccggggcccugaacaaggcgaccaacaacgccaugcagguggaguccgacgacuacaucgccacgaacggcccccucaaggucgggggcagcugcgugcuguccggccacaaccuggccaagcacugccuccacgucguggggcccaacgugaacaagggcgaggacauccagcugcugaagagcgccuacgagaacuucaaccagcacgagguccuccuggcgccgcugcucuccgccgggaucuucggcgccgaccccauccacagccugcgggugugcguggacaccguccgcaccaacguguaccuggccguguucgacaagaaccucuacgacaagcuggucuccagcuuccuggagaugaagagcgagaagcagguggagcagaacaucgccgagauccccaaggaggaggugaagcccuucaucaccgaguccaagccgagcgucgagcagcggaagcaggacgacaagaagaucaaggcgugcguggaggaggugacgaccacccucgaggagaccaaguuccugacggagaaccugcuccuguacaucgacaucaacgggaaccugcaccccgacuccgccacccucgucagcgacaucgacaucaccuuccugaagaaggacgcccccuacaucgugggcgacgugguccaggagggcgugcugaccgccguggucauccccacgaagaaggccgggggcaccaccgagaugcucgcgaaggcccugcgcaaggugccgaccgacaacuacaucacgaccuaccccgggcagggccugaacggguacaccguggaggaggccaagaccguccucaagaagugcaaguccgccuucuacauccugcccagcaucaucuccaacgagaagcaggagauccugggcaccgugagcuggaaccuccgggagaugcuggcgcacgccgaggagacgcgcaagcugaugcccgugugcgucgagaccaaggccaucguguccaccauccagcggaaguacaagggcaucaagauccaggaggggguggucgacuacggcgcccgcuucuacuucuacaccagcaagacgaccguggccucccugaucaacacccucaacgaccugaacgagacccuggugacgaugccgcucggguacgucacccacggccugaaccuggaggaggcggcccgguacaugcgcagccucaaggugcccgccaccguguccgucagcucccccgacgccgugaccgccuacaacggguaccugacgagcuccagcaagacccccgaggagcacuucaucgagaccaucucccuggcgggcagcuacaaggacuggagcuacuccggccagagcacccagcucgggaucgaguuccugaagcggggcgacaaguccguguacuacacgagcaacccgaccaccuuccaccuggacggggaggucaucaccuucgacaaccucaagacgcugcugucccuccgcgaggugcggaccaucaagguguucaccaccgucgacaacaucaaccugcacacgcaggugguggacaugagcaugaccuacggccagcaguucggccccaccuaccuggacggggccgacgucaccaagaucaagccccacaacucccacgagggcaagacguucuacgugcucccgaacgacgacacccugcgcguggaggccuucgaguacuaccacaccaccgaccccagcuuccuggggcgguacauguccgcccucaaccacacgaagaaguggaaguacccccaggucaacggccugaccagcaucaagugggccgacaacaacugcuaccuggcgaccgcccuccugacccugcagcagaucgagcucaaguucaaccccccggcccugcaggacgccuacuaccgcgcgcgggccggggaggccgccaacuucugcgcccugauccucgcguacugcaacaagacggugggcgagcugggcgacgugcgcgagaccauguccuaccuguuccagcacgccaaccucgacagcugcaagcggguccugaacguggucugcaagaccugcgggcagcagcagaccacccugaagggcguggaggccgugauguacauggggacgcucuccuacgagcaguucaagaagggcguccagauccccugcaccugcgggaagcaggccaccaaguaccuggugcagcaggagagccccuucgugaugauguccgcccccccggcgcaguacgagcugaagcacggcaccuucacgugcgccagcgaguacaccggcaacuaccagugcgggcacuacaagcacaucaccuccaaggagacccucuacugcaucgacggcgcccugcugacgaagagcagcgaguacaaggggcccaucaccgacgucuucuacaaggagaacuccuacaccaccacgaucaagcccgugaccuacaagcucgacggcguggucugcaccgagaucgaccccaagcuggacaacuacuacaagaaggacaacagcuacuucaccgagcagccgaucgaccuggugcccaaccagcccuaccccaacgccuccuucgacaacuucaaguucgugugcgacaacaucaaguucgccgacgaccucaaccagcugacgggguacaagaagccggcgagccgcgagcugaaggucaccuucuuccccgaccucaacggcgacgugguggccaucgacuacaagcacuacacccccuccuucaagaagggcgccaagcugcugcacaagcccaucgucuggcacgugaacaacgccaccaacaaggcgacguacaagccgaacaccuggugcauccggugccucuggagcaccaagcccguggagaccuccaacagcuucgacguccugaaguccgaggacgcccaggggauggacaaccuggccugcgaggaccucaagcccgugagcgaggagguggucgagaaccccacgauccagaaggacgugcuggagugcaacgugaagaccaccgaggucgugggcgacaucauccugaagccggccaacaacucccucaagaucaccgaggagguggggcacacggaccugauggccgcguacgucgacaacagcucccugaccaucaagaagcccaacgagcucagccgcgugcugggccugaagacccucgccacccacgggcuggccgccgugaacuccguccccugggacacgaucgccaacuacgcgaagccguuccugaacaagguggugagcaccaccaccaacaucgucacgcgcugccucaaccgggugugcaccaacuacaugcccuacuucuucacccugcugcuccagcugugcaccuucacccgcuccacgaacagccggaucaaggccuccaugcccaccaccaucgccaagaacaccgugaagagcgucggcaaguucugccuggaggccagcuucaacuaccucaagucccccaacuucagcaagcugaucaacaucaucaucugguuccugcuccuguccgugugccugggcagccucaucuacuccacggccgcgcugggggugcugaugagcaaccucggcaugccguccuacugcaccggguaccgcgagggcuaccugaacagcaccaacgucaccaucgccacguacugcaccggcuccauccccugcagcgugugccuguccgggcucgacagccuggacaccuaccccucccuggagaccauccagaucacgaucagcuccuucaagugggaccucaccgccuucggccugguggccgagugguuccuggccuacauccucuucacccgguucuucuacguccuggggcuggcggccaucaugcagcucuucuucagcuacuucgccgugcacuucaucuccaacagcuggcugauguggcugaucaucaaccuggugcagauggcccccaucuccgcgaugguccgcauguacaucuucuucgccagcuucuacuacguguggaagagcuacgugcacgucguggacggcugcaacuccagcaccugcaugaugugcuacaagcggaaccgcgccacgcggguggagugcaccaccaucgucaacggggugcgccgguccuucuacgucuacgccaacggcggcaagggguucugcaagcuccacaacuggaacugcgugaacugcgacaccuucugcgccggcagcacguucaucuccgacgagguggcgcgcgaccugagccugcaguucaagcggccgaucaaccccaccgaccaguccagcuacaucgucgacuccgugaccgugaagaacgggagcauccaccucuacuucgacaaggccggccagaagaccuacgagcgccacucccugagccacuucgucaaccuggacaaccuccgggccaacaacacgaaggggucccugcccaucaacgugaucguguucgacggcaagagcaagugcgaggaguccagcgccaaguccgccagcgucuacuacucccagcugaugugccagcccauccuccugcuggaccaggcgcucgugagcgacgugggcgacagcgccgaggucgccgugaagauguucgacgccuacgugaacaccuucuccagcaccuucaacgucccgauggagaagcugaagacccugguggccacggcggaggccgagcucgccaagaacgugucccuggacaacguccugagcaccuucaucuccgccgcgcgccagggguucguggacagcgacguggagaccaaggacgucguggagugccucaagcugucccaccagagcgacaucgaggugaccggcgacuccugcaacaacuacaugcugacguacaacaaggucgagaacaugaccccccgggaccucggggccugcaucgacugcagcgcccgccacaucaacgcccagguggccaagucccacaacaucgcgcugaucuggaacgugaaggacuucaugagccuguccgagcagcuccggaagcagauccgcagcgccgccaagaagaacaaccugcccuucaagcugaccugcgccaccacgcgccaggucgugaacguggucaccaccaagaucgcccucaagggcgggugaggacuagucccuguucccagagcccacuuuuuuuucuuuuuuugaaauaaaauagccugucuuucagaucucaaaggcucuuuucagagccaccaaaaaaaaaaaaaaaaaaaaaaaaaaaaaaaaaaaaaaaaaaaaaaaaaaaaaaaaaaaaaaaaaaaaaaaaaaaaaaaaaaaaaaaaaaaaaaaaaaaaa

SEQ ID NO: 19889 - RNA, 6113 nt, Artificial Sequence
  SARS-CoV-2__MT704012.1__non-structural protein 3 (NSP3) mRNA gc
aggagagucccgcagucggcguccagcggcucugcuuguucgugugugugucguugcaggccuuauucaagcuuaccauggcccccaccaaggugaccuucggcgacgacacggucaucgaggugcagggguacaagagcgugaacaucaccuucgagcuggacgagcgcaucgacaagguccucaacgagaagugcuccgccuacaccguggagcugggcaccgaggugaacgaguucgcgugcgucguggccgacgccgugaucaagacgcugcagccggucagcgagcuccugaccccccuggggaucgaccucgacgagugguccauggccaccuacuaccuguucgacgagagcggcgaguucaagcuggccucccacauguacugcagcuucuacccccccgacgaggacgaggaggagggggacugcgaggaggaggaguucgagccguccacccaguacgaguacggcacggaggacgacuaccagggcaagccccucgaguucggggcgaccagcgccgcccugcagcccgaggaggagcaggaggaggacuggcuggacgacgacucccagcagaccgugggccagcaggacgggagcgaggacaaccagaccacgaccauccagaccaucguggagguccagccccagcucgagauggagcugaccccgguggugcagacgaucgaggucaacuccuucagcggcuaccugaagcucaccgacaacguguacaucaagaacgccgacaucguggaggaggcgaagaaggucaagcccaccgugguggucaacgccgccaacguguaccugaagcacgggggcggcguggccggggcccugaacaaggcgaccaacaacgccaugcaggucgaguccgacgacuacaucgccacgaacggcccccucaagguggggggcagcugcguccuguccggccacaaccuggccaagcacugccuccacgugguggggcccaacgucaacaagggcgaggacauccagcugcugaagagcgccuacgagaacuucaaccagcacgaggugcuccuggcgccgcugcucuccgccgggaucuucggcgccgaccccauccacagccugcgggugugcgucgacaccgugcgcaccaacguguaccuggccgucuucgacaagaaccucuacgacaagcugguguccagcuuccuggagaugaagagcgagaagcagguggagcagaagaucgccgagauccccaaggaggaggucaagcccuucaucaccgaguccaagccgagcguggagcagcggaagcaggacgacaagaagaucaaggcgugcguggaggaggucacgaccacccucgaggagaccaaguuccugacggagaaccugcuccuguacaucgacaucaacgggaaccugcaccccgacuccgccacccucgugagcgacaucgacaucaccuuccugaagaaggacgcccccuacaucgugggcgacgucgugcaggagggcgugcugaccgccgucgugauccccacgaagaaggccgggggcaccaccgagaugcucgcgaaggcccugcgcaaggugccgaccgacaacuacaucacgaccuaccccgggcagggccugaacggguacaccgucgaggaggccaagaccgugcucaagaagugcaaguccgccuucuacauccugcccagcaucaucuccaacgagaagcaggagauccugggcaccgugagcuggaaccuccgggagaugcuggcgcacgccgaggagacgcgcaagcugaugcccgucugcguggagaccaaggccaucguguccaccauccagcggaaguacaagggcaucaagauccaggagggggucguggacuacggcgcccgcuucuacuucuacaccagcaagacgaccguggccucccugaucaacacccucaacgaccugaacgagacccuggucacgaugccgcucggguacgugacccacggccugaaccuggaggaggcggcccgguacaugcgcagccucaaggugcccgccaccgucuccgugagcucccccgacgccgugaccgccuacaacggguaccugacgagcuccagcaagacccccgaggagcacuucaucgagaccaucucccuggcgggcagcuacaaggacuggagcuacuccggccagagcacccagcucgggaucgaguuccugaagcggggcgacaaguccgucuacuacacgagcaacccgaccaccuuccaccuggacggggaggugaucaccuucgacaaccucaagacgcugcugucccuccgcgaggugcggaccaucaaggucuucaccaccguggacaacaucaaccugcacacgcagguggucgacaugagcaugaccuacggccagcaguucggccccaccuaccuggacggggccgacgugaccaagaucaagccccacaacucccacgagggcaagacguucuacgugcucccgaacgacgacacccugcgcgucgaggccuucgaguacuaccacaccaccgaccccagcuuccuggggcgguacauguccgcccucaaccacacgaagaaguggaaguacccccaggugaacggccugaccagcaucaagugggccgacaacaacugcuaccuggcgaccgcccuccugacccugcagcagaucgagcucaaguucaaccccccggcccugcaggacgccuacuaccgcgcgcgggccggggaggccgccaacuucugcgcccugauccucgcguacugcaacaagacggugggcgagcugggcgacguccgcgagaccauguccuaccuguuccagcacgccaaccucgacagcugcaagcgggugcugaacgucgugugcaagaccugcgggcagcagcagaccacccugaagggcguggaggccgucauguacauggggacgcucuccuacgagcaguucaagaagggcgugcagauccccugcaccugcgggaagcaggccaccaaguaccuggugcagcaggagagccccuucgucaugauguccgcccccccggcgcaguacgagcugaagcacggcaccuucacgugcgccagcgaguacaccggcaacuaccagugcgggcacuacaagcacaucaccuccaaggagacccucuacugcaucgacggcgcccugcugacgaagagcagcgaguacaaggggcccaucaccgacguguucuacaaggagaacuccuacaccaccacgaucaagcccgugaccuacaagcucgacggcgucgugugcaccgagaucgaccccaagcuggacaacuacuacaagaaggacaacagcuacuucaccgagcagccgaucgaccuggugcccaaccagcccuaccccaacgccuccuucgacaacuucaaguucgucugcgacaacaucaaguucgccgacgaccucaaccagcugacgggguacaagaagccggcgagccgcgagcugaaggugaccuucuuccccgaccucaacggcgacguggucgccaucgacuacaagcacuacacccccuccuucaagaagggcgccaagcugcugcacaagcccaucguguggcacgugaacaacgccaccaacaaggcgacguacaagccgaacaccuggugcauccggugccucuggagcaccaagcccgucgagaccuccaacagcuucgacgugcugaaguccgaggacgcccaggggauggacaaccuggccugcgaggaccucaagcccgugagcgaggaggucguggagaaccccacgauccagaaggacgugcuggagugcaacgucaagaccaccgagguggugggcgacaucauccugaagccggccaacaacucccucaagaucaccgaggaggucgggcacacggaccugauggccgcguacguggacaacagcucccugaccaucaagaagcccaacgagcucagccgcgugcugggccugaagacccucgccacccacgggcuggccgccgucaacuccgugcccugggacacgaucgccaacuacgcgaagccguuccugaacaagguggucagcaccaccaccaacaucgugacgcgcugccucaaccgggugugcaccaacuacaugcccuacuucuucacccugcugcuccagcugugcaccuucacccgcuccacgaacagccggaucaaggccuccaugcccaccaccaucgccaagaacaccgucaagagcgugggcaaguucugccuggaggccagcuucaacuaccucaagucccccaacuucagcaagcugaucaacaucaucaucugguuccugcuccuguccgugugccugggcagccucaucuacuccacggccgcgcuggggguccugaugagcaaccucggcaugccguccuacugcaccggguaccgcgagggcuaccugaacagcaccaacgugaccaucgccacguacugcaccggcuccauccccugcagcgugugccuguccgggcucgacagccuggacaccuaccccucccuggagaccauccagaucacgaucagcuccuucaagugggaccucaccgccuucggccuggucgccgagugguuccuggccuacauccucuucacccgguucuucuacgugcuggggcuggcggccaucaugcagcucuucuucagcuacuucgccgugcacuucaucuccaacagcuggcugauguggcugaucaucaaccugguccagauggcccccaucuccgcgauggugcgcauguacaucuucuucgccagcuucuacuacguguggaagagcuacguccacgugguggacggcugcaacuccagcaccugcaugaugugcuacaagcggaaccgcgccacgcgggucgagugcaccaccaucgugaacgggguccgccgguccuucuacguguacgccaacggcggcaagggguucugcaagcuccacaacuggaacugcgugaacugcgacaccuucugcgccggcagcacguucaucuccgacgaggucgcgcgcgaccugagccugcaguucaagcggccgaucaaccccaccgaccaguccagcuacaucguggacuccgugaccgucaagaacgggagcauccaccucuacuucgacaaggccggccagaagaccuacgagcgccacucccugagccacuucgugaaccuggacaaccuccgggccaacaacacgaaggggucccugcccaucaacgugaucgucuucgacggcaagagcaagugcgaggaguccagcgccaaguccgccagcguguacuacucccagcugaugugccagcccauccuccugcuggaccaggcgcucgugagcgacgucggcgacagcgccgagguggccgugaagauguucgacgccuacgucaacaccuucuccagcaccuucaacgugccgauggagaagcugaagacccugguggccaucgcggaggccgagcucgccaagaacgucucccuggacaacgugcugagcacguucaucuccgccgcgcgccagggguucguggacagcgacgucgagaccaaggacgugguggagugccucaagcugucccaccagagcgacaucgaggucaccggcgacuccugcaacaacuacaugcugaccuacaacaagguggagaacaugacgccccgggaccucggggccugcaucgacugcagcgcccgccacaucaacgcccagguggccaagucccacaacaucgcgcugaucuggaacgucaaggacuucaugagccuguccgagcagcuccggaagcagauccgcagcgccgccaagaagaacaaccugcccuucaagcugaccugcgccaccacccgccagguggugaacgucgugacgaccaagaucgcccucaagggcgggugaggacuagucccuguucccagagcccacuuuuuuuucuuuuuuugaaauaaaauagccugucuuucagaucucaaaggcucuuuucagagccaccaaaaaaaaaaaaaaaaaaaaaaaaaaaaaaaaaaaaaaaaaaaaaaaaaaaaaaaaaaaaaaaaaaaaaaaaaaaaaaaaaaaaaaaaaaaaaaaaaaaaa

SEQ ID NO: 19890 - RNA, 6113 nt, Artificial Sequence
  SARS-CoV-2__MT704014.1__non-structural protein 3 (NSP3) mRNA gc
aggagagucccgcagucggcguccagcggcucugcuuguucgugugugugucguugcaggccuuauucaagcuuaccauggcccccaccaaggugaccuucggcgacgacacggucaucgaggugcagggguacaagagcgugaacaucaccuucgagcuggacgagcgcaucgacaagguccucaacgagaagugcuccgccuacaccguggagcugggcaccgaggugaacgaguucgcgugcgucguggccgacgccgugaucaagacgcugcagccggucagcgagcuccugaccccccuggggaucgaccucgacgagugguccauggccaccuacuaccuguucgacgagagcggcgaguucaagcuggccucccacauguacugcagcuucuacccccccgacgaggacgaggaggagggggacugcgaggaggaggaguucgagccguccacccaguacgaguacggcacggaggacgacuaccagggcaagccccucgaguucggggcgaccagcgccgcccugcagcccgaggaggagcaggaggaggacuggcuggacgacgacucccagcagaccgugggccagcaggacgggagcgaggacaaccagaccacgaccauccagaccaucguggagguccagccccagcucgagauggagcugaccccgguggugcagacgaucgaggucaacuccuucagcggcuaccugaagcucaccgacaacguguacaucaagaacgccgacaucguggaggaggcgaagaaggucaagcccaccgugguggucaacgccgccaacguguaccugaagcacgggggcggcguggccggggcccugaacaaggcgaccaacaacgccaugcaggucgaguccgacgacuacaucgccacgaacggcccccucaagguggggggcagcugcguccuguccggccacaaccuggccaagcacugccuccacgugguggggcccaacgucaacaagggcgaggacauccagcugcugaagagcgccuacgagaacuucaaccagcacgaggugcuccuggcgccgcugcucuccgccgggaucuucggcgccgaccccauccacagccugcgggugugcgucgacaccgugcgcaccaacguguaccuggccgucuucgacaagaaccucuacgacaagcugguguccagcuuccuggagaugaagagcgagaagcagguggagcagaagaucgccgagauccccaaggaggaggucaagcccuucaucaccgaguccaagccgagcguggagcagcggaagcaggacgacaagaagaucaaggcgugcguggaggaggucacgaccacccucgaggagaccaaguuccugacggagaaccugcuccuguacaucgacaucaacgggaaccugcaccccgacuccgccacccucgugagcgacaucgacaucaccuuccugaagaaggacgcccccuacaucgugggcgacgucuuccaggagggcgugcugaccgccguggucauccccacgaagaaggccgggggcaccaccgagaugcucgcgaaggcccugcgcaaggugccgaccgacaacuacaucacgaccuaccccgggcagggccugaacggguacaccguggaggaggccaagaccguccucaagaagugcaaguccgccuucuacauccugcccagcaucaucuccaacgagaagcaggagauccugggcaccgugagcuggaaccuccgggagaugcuggcgcacgccgaggagacgcgcaagcugaugcccgugugcgucgagaccaaggccaucguguccaccauccagcggaaguacaagggcaucaagauccaggaggggguggucgacuacggcgcccgcuucuacuucuacaccagcaagacgaccguggccucccugaucaacacccucaacgaccugaacgagacccuggugacgaugccgcucggguacgucacccacggccugaaccuggaggaggcggcccgguacaugcgcagccucaaggugcccgccaccguguccgucagcucccccgacgccgugaccgccuacaacggguaccugacgagcuccagcaagacccccgaggagcacuucaucgagaccaucucccuggcgggcagcuacaaggacuggagcuacuccggccagagcacccagcucgggaucgaguuccugaagcggggcgacaaguccguguacuacacgagcaacccgaccaccuuccaccuggacggggaggucaucaccuucgacaaccucaagacgcugcugucccuccgcgaggugcggaccaucaagguguucaccaccgucgacaacaucaaccugcacacgcaggugguggacaugagcaugaccuacggccagcaguucggccccaccuaccuggacggggccgacgucaccaagaucaagccccacaacucccacgagggcaagacguucuacgugcucccgaacgacgacacccugcgcguggaggccuucgaguacuaccacaccaccgaccccagcuuccuggggcgguacauguccgcccucaaccacacgaagaaguggaaguacccccaggucaacggccugaccagcaucaagugggccgacaacaacugcuaccuggcgaccgcccuccugacccugcagcagaucgagcucaaguucaaccccccggcccugcaggacgccuacuaccgcgcgcgggccggggaggccgccaacuucugcgcccugauccucgcguacugcaacaagacggugggcgagcugggcgacgugcgcgagaccauguccuaccuguuccagcacgccaaccucgacagcugcaagcggguccugaacguggucugcaagaccugcgggcagcagcagaccacccugaagggcguggaggccgugauguacauggggacgcucuccuacgagcaguucaagaagggcguccagauccccugcaccugcgggaagcaggccaccaaguaccuggugcagcaggagagccccuucgugaugauguccgcccccccggcgcaguacgagcugaagcacggcaccuucacgugcgccagcgaguacaccggcaacuaccagugcgggcacuacaagcacaucaccuccaaggagacccucuacugcaucgacggcgcccugcugacgaagagcagcgaguacaaggggcccaucaccgacgucuucuacaaggagaacuccuacaccaccacgaucaagcccgugaccuacaagcucgacggcguggucugcaccgagaucgaccccaagcuggacaacuacuacaagaaggacaacagcuacuucaccgagcagccgaucgaccuggugcccaaccagcccuaccccaacgccuccuucgacaacuucaaguucgugugcgacaacaucaaguucgccgacgaccucaaccagcugacgggguacaagaagccggcgagccgcgagcugaaggucaccuucuuccccgaccucaacggcgacgugguggccaucgacuacaagcacuacacccccuccuucaagaagggcgccaagcugcugcacaagcccaucgucuggcacgugaacaacgccaccaacaaggcgacguacaagccgaacaccuggugcauccggugccucuggagcaccaagcccguggagaccuccaacagcuucgacguccugaaguccgaggacgcccaggggauggacaaccuggccugcgaggaccucaagcccgugagcgaggagguggucgagaaccccacgauccagaaggacgugcuggagugcaacgugaagaccaccgaggucgugggcgacaucauccugaagccggccaacaacucccucaagaucaccgaggagguggggcacacggaccugauggccgcguacgucgacaacagcucccugaccaucaagaagcccaacgagcucagccgcgugcugggccugaagacccucgccacccacgggcuggccgccgugaacuccguccccugggacacgaucgccaacuacgcgaagccguuccugaacaagguggugagcaccaccaccaacaucgucacgcgcugccucaaccgggugugcaccaacuacaugcccuacuucuucacccugcugcuccagcugugcaccuucacccgcuccacgaacagccggaucaaggccuccaugcccaccaccaucgccaagaacaccgugaagagcgucggcaaguucugccuggaggccagcuucaacuaccucaagucccccaacuucagcaagcugaucaacaucaucaucugguuccugcuccuguccgugugccugggcagccucaucuacuccacggccgcgcugggggugcugaugagcaaccucggcaugccguccuacugcaccggguaccgcgagggcuaccugaacagcaccaacgucaccaucgccacguacugcaccggcuccauccccugcagcgugugccuguccgggcucgacagccuggacaccuaccccucccuggagaccauccagaucacgaucagcuccuucaagugggaccucaccgccuucggccugguggccgagugguuccuggccuacauccucuucacccgguucuucuacguccuggggcuggcggccaucaugcagcucuucuucagcuacuucgccgugcacuucaucuccaacagcuggcugauguggcugaucaucaaccuggugcagauggcccccaucuccgcgaugguccgcauguacaucuucuucgccagcuucuacuacguguggaagagcuacgugcacgucguggacggcugcaacuccagcaccugcaugaugugcuacaagcggaaccgcgccacgcggguggagugcaccaccaucgucaacggggugcgccgguccuucuacgucuacgccaacggcggcaagggguucugcaagcuccacaacuggaacugcgugaacugcgacaccuucugcgccggcagcacguucaucuccgacgagguggcgcgcgaccugagccugcaguucaagcggccgaucaaccccaccgaccaguccagcuacaucgucgacuccgugaccgugaagaacgggagcauccaccucuacuucgacaaggccggccagaagaccuacgagcgccacucccugagccacuucgucaaccuggacaaccuccgggccaacaacacgaaggggucccugcccaucaacgugaucguguucgacggcaagagcaagugcgaggaguccagcgccaaguccgccagcgucuacuacucccagcugaugugccagcccauccuccugcuggaccaggcgcucgugagcgacgugggcgacagcgccgaggucgccgugaagauguucgacgccuacgugaacaccuucuccagcaccuucaacgucccgauggagaagcugaagacccugguggccacggcggaggccgagcucgccaagaacgugucccuggacaacguccugagcaccuucaucuccgccgcgcgccagggguucguggacagcgacguggagaccaaggacgucguggagugccucaagcugucccaccagagcgacaucgaggugaccggcgacuccugcaacaacuacaugcugacguacaacaaggucgagaacaugaccccccgggaccucggggccugcaucgacugcagcgcccgccacaucaacgcccagguggccaagucccacaacaucgcgcugaucuggaacgugaaggacuucaugagccuguccgagcagcuccggaagcagauccgcagcgccgccaagaagaacaaccugcccuucaagcugaccugcgccaccacgcgccaggucgugaacguggucaccaccaagaucgcccucaagggcgggugaggacuagucccuguucccagagcccacuuuuuuuucuuuuuuugaaauaaaauagccugucuuucagaucucaaaggcucuuuucagagccaccaaaaaaaaaaaaaaaaaaaaaaaaaaaaaaaaaaaaaaaaaaaaaaaaaaaaaaaaaaaaaaaaaaaaaaaaaaaaaaaaaaaaaaaaaaaaaaaaaaaaa

SEQ ID NO: 19891 - RNA, 6113 nt, Artificial Sequence
  SARS-CoV-2__MT704041.1__non-structural protein 3 (NSP3) mRNA gc
aggagagucccgcagucggcguccagcggcucugcuuguucgugugugugucguugcaggccuuauucaagcuuaccauggcccccaccaaggugaccuucggcgacgacacggucaucgaggugcagggguacaagagcgugaacaucaccuucgagcuggacgagcgcaucgacaagguccucaacgagaagugcuccgccuacaccguggagcugggcaccgaggugaacgaguucgcgugcgucguggccgacgccgugaucaagacgcugcagccggucagcgagcuccugaccccccuggggaucgaccucgacgagugguccauggccaccuacuaccuguucgacgagagcggcgaguucaagcuggccucccacauguacugcagcuucuacccccccgacgaggacgaggaggagggggacugcgaggaggaggaguucgagccguccacccaguacgaguacggcacggaggacgacuaccagggcaagccccucgaguucggggcgaccagcgccgcccugcagcccgaggaggagcaggaggaggacuggcuggacgacgacucccagcagaccgugggccagcaggacgggagcgaggacaaccagaccacgaccauccagaccaucguggagguccagccccagcucgagauggagcugaccccgguggugcagacgaucgaggucaacuccuucagcggcuaccugaagcucaccgacaacguguacaucaagaacgccgacaucguggaggaggcgaagaaggucaagcccaccgugguggucaacgccgccaacguguaccugaagcacgggggcggcguggccggggcccugaacaaggcgaccaacaacgccaugcaggucgaguccgacgacuacaucgccacgaacggcccccucaagguggggggcagcugcguccuguccggccacaaccuggccaagcacugccuccacgugguggggcccaacgucaacaagggcgaggacauccagcugcugaagagcgccuacgagaacuucaaccagcacgaggugcuccuggcgccgcugcucuccgccgggaucuucggcgccgaccccauccacagccugcgggugugcgucgacaccgugcgcaccaacguguaccuggccgucuucgacaagaaccucuacgacaagcugguguccagcuuccuggagaugaagagcgagaagcagguggagcagaagaucgccgagauccccaaggaggaggucaagcccuucaucaccgaguccaagccgagcguggagcagcggaagcaggacgacaagaagaucaaggcgugcguggaggaggucacgaccacccucgaggagaccaaguuccugacggagaaccugcuccuguacaucgacaucaacgggaaccugcaccccgacuccgccacccucgugagcgacaucgacaucaccuuccugaagaaggacgcccccuacaucgugggcgacgucgugcaggagggcgugcugaccgccgucgugauccccacgaagaaggccgggggcaccaccgagaugcucgcgaaggcccugcgcaaggugccgaccgacaacuacaucacgaccuaccccgggcagggccugaacggguacaccgucgaggaggccaagaccgugcucaagaagugcaaguccgccuucuacauccugcccagcaucaucuccaacgagaagcaggagauccugggcaccgugagcuggaaccuccgggagaugcuggcgcacgccgaggagacgcgcaagcugaugcccgucugcguggagaccaaggccaucguguccaccauccagcggaaguacaagggcaucaagauccaggagggggucguggacuacggcgcccgcuucuacuucuacaccagcaagacgaccguggccucccugaucaacacccucaacgaccugaacgagacccuggucacgaugccgcucggguacgugacccacggccugaaccuggaggaggcggcccgguacaugcgcagccucaaggugcccgccaccgucuccgugagcucccccgacgccgugaccgccuacaacggguaccugacgagcuccagcaagacccccgaggagcacuucaucgagaccaucucccuggcgggcagcuacaaggacuggagcuacuccggccagagcacccagcucgggaucgaguuccugaagcggggcgacaaguccgucuacuacacgagcaacccgaccaccuuccaccuggacggggaggugaucaccuucgacaaccucaagacgcugcugucccuccgcgaggugcggaccaucaaggucuucaccaccguggacaacaucaaccugcacacgcagguggucgacaugagcaugaccuacggccagcaguucggccccaccuaccuggacggggccgacgugaccaagaucaagccccacaacucccacgagggcaagacguucuacgugcucccgaacgacgacacccugcgcgucgaggccuucgaguacuaccacaccaccgaccccagcuuccuggggcgguacauguccgcccucaaccacacgaagaaguggaaguacccccaggugaacggccugaccagcaucaagugggccgacaacaacugcuaccuggcgaccgcccuccugacccugcagcagaucgagcucaaguucaaccccccggcccugcaggacgccuacuaccgcgcgcgggccggggaggccgccaacuucugcgcccugauccucgcguacugcaacaagacggugggcgagcugggcgacguccgcgagaccauguccuaccuguuccagcacgccaaccucgacagcugcaagcgggugcugaacgucgugugcaagaccugcgggcagcagcagaccacccugaagggcguggaggccgucauguacauggggacgcucuccuacgagcaguucaagaagggcgugcagauccccugcaccugcgggaagcaggccaccaaguaccuggugcagcaggagagccccuucgucaugauguccgcccccccggcgcaguacgagcugaagcacggcaccuucacgugcgccagcgaguacaccggcaacuaccagugcgggcacuacaagcacaucaccuccaaggagacccucuacugcaucgacggcgcccugcugacgaagagcagcgaguacaaggggcccaucaccgacguguucuacaaggagaacuccuacaccaccacgaucaagcccgugaccuacaagcucgacggcgucgugugcaccgagaucgaccccaagcuggacaacuacuacaagaaggacaacagcuacuucaccgagcagccgaucgaccuggugcccaaccagcccuaccccaacgccuccuucgacaacuucaaguucgucugcgacaacaucaaguucgccgacgaccucaaccagcugacgggguacaagaagccggcgagccgcgagcugaaggugaccuucuuccccgaccucaacggcgacguggucgccaucgacuacaagcacuacacccccuccuucaagaagggcgccaagcugcugcacaagcccaucguguggcacgugaacaacgccaccaacaaggcgacguacaagccgaacaccuggugcauccggugccucuggagcaccaagcccgucgagaccuccaacagcuucgacgugcugaaguccgaggacgcccaggggauggacaaccuggccugcgaggaccucaagcccgugagcgaggaggucguggagaaccccacgauccagaaggacgugcuggagugcaacgucaagaccaccgagguggugggcgacaucauccugaagccggccaacaacucccucaagaucaccgaggaggucgggcacacggaccugauggccgcguacguggacaacagcucccugaccaucaagaagcccaacgagcucagccgcgugcugggccugaagacccucgccacccacgggcuggccgccgucaacuccgugcccugggacacgaucgccaacuacgcgaagccguuccugaacaagguggucagcaccaccaccaacaucgugacgcgcugccucaaccgggugugcaccaacuacaugcccuacuucuucacccugcugcuccagcugugcaccuucacccgcuccacgaacagccggaucaaggccuccaugcccaccaccaucgccaagaacaccgucaagagcgugggcaaguucugccuggaggccagcuucaacuaccucaagucccccaacuucagcaagcugaucaacaucaucaucugguuccugcuccuguccgugugccugggcagccucaucuacuccacggccgcgcuggggguccugaugagcaaccucggcaugccguccuacugcaccggguaccgcgagggcuaccugaacagcaccaacgugaccaucgccacguacugcaccggcuccauccccugcagcgugugccuguccgggcucgacagccuggacaccuaccccucccuggagaccauccagaucacgaucagcuccuucaagugggaccucaccgccuucggccuggucgccgagugguuccuggccuacauccucuucacccgguucuucuacgugcuggggcuggcggccaucaugcagcucuucuucagcuacuucgccgugcacuucaucuccaacagcuggcugauguggcugaucaucaaccugguccagauggcccccaucuccgcgauggugcgcauguacaucuucuucgccagcuucuacuacguguggaagagcuacguccacgugguggacggcugcaacuccagcaccugcaugaugugcuacaagcggaaccgcgccacgcgggucgagugcaccaccaucgugaacgggguccgccgguccuucuacguguacgccaacggcggcaagggguucugcaagcuccacaacuggaacugcgugaacugcgacaccuucugcgccggcagcacguucaucuccgacgaggucgcgcgcgaccugagccugcaguucaagcggccgaucaaccccaccgaccaguccagcuacaucguggacuccgugaccgucaagaacgggagcauccaccucuacuucgacaaggccggccagaagaccuacgagcgccacucccugagccacuucgugaaccuggacaaccuccgggccaacaacacgaaggggucccugcccaucaacgugaucgucuucgacggcaagagcaagugcgaggaguccagcgccaaguccgccagcguguacuacucccagcugaugugccagcccauccuccugcuggaccaggcgcucgugagcgacgucggcgacagcgccgaggugguggucaagauguucgacgccuacgugaacaccuucuccagcaccuucaacgugccgauggagaagcugaagacccuggucgccacggccgaggcggagcucgccaagaacgugucccuggacaacgugcugagcaccuucaucuccgccgcccgccagggguucgucgacagcgacguggagaccaaggacguggucgagugccucaagcugucccaccagagcgacaucgaggugaccggcgacuccugcaacaacuacaugcugacguacaacaagguggagaacaugaccccccgggaccucggggcgugcaucgacugcagcgcccgccacaucaacgcccaggucgccaagucccacaacaucgcccugaucuggaacgugaaggacuucaugagccuguccgagcagcuccggaagcagauccgcagcgcggccaagaagaacaaccugcccuucaagcugaccugcgccaccacgcgccagguggucaacguggugaccaccaagaucgcccucaagggcgggugaggacuagucccuguucccagagcccacuuuuuuuucuuuuuuugaaauaaaauagccugucuuucagaucucaaaggcucuuuucagagccaccaaaaaaaaaaaaaaaaaaaaaaaaaaaaaaaaaaaaaaaaaaaaaaaaaaaaaaaaaaaaaaaaaaaaaaaaaaaaaaaaaaaaaaaaaaaaaaaaaaaaa

SEQ ID NO: 19892 - RNA, 6113 nt, Artificial Sequence
  SARS-CoV-2__MT704066.1__non-structural protein 3 (NSP3) mRNA gc
aggagagucccgcagucggcguccagcggcucugcuuguucgugugugugucguugcaggccuuauucaagcuuaccauggcccccaccaaggugaccuucggcgacgacacggucaucgaggugcagggguacaagagcgugaacaucaccuucgagcuggacgagcgcaucgacaagguccucaacgagaagugcuccgccuacaccguggagcugggcaccgaggugaacgaguucgcgugcgucguggccgacgccgugaucaagacgcugcagccggucagcgagcuccugaccccccuggggaucgaccucgacgagugguccauggccaccuacuaccuguucgacgagagcggcgaguucaagcuggccucccacauguacugcagcuucuacccccccgacgaggacgaggaggagggggacugcgaggaggaggaguucgagccguccacccaguacgaguacggcacggaggacgacuaccagggcaagccccucgaguucggggcgaccagcgccgcccugcagcccgaggaggagcaggaggaggacuggcuggacgacgacucccagcagaccgugggccagcaggacgggagcgaggacaaccagaccacgaccauccagaccaucguggagguccagccccagcucgagauggagcugaccccgguggugcagacgaucgaggucaacuccuucagcggcuaccugaagcucaccgacaacguguacaucaagaacgccgacaucguggaggaggcgaagaaggucaagcccaccgugguggucaacgccgccaacguguaccugaagcacgggggcggcguggccggggcccugaacaaggcgaccaacaacgccaugcaggucgaguccgacgacuacaucgccacgaacggcccccucaagguggggggcagcugcguccuguccggccacaaccuggccaagcacugccuccacgugguggggcccaacgucaacaagggcgaggacauccagcugcugaagagcgccuacgagaacuucaaccagcacgaggugcuccuggcgccgcugcucuccgccgggaucuucggcgccgaccccauccacagccugcgggugugcgucgacaccgugcgcaccaacguguaccuggccgucuucgacaagaaccucuacgacaagcugguguccagcuuccuggagaugaagagcgagaagcagguggagcagaagaucgccgagauccccaaggaggaggucaagcccuucaucaccgaguccaagccgagcguggagcagcggaagcaggacgacaagaagaucaaggcgugcguggaggaggucacgaccacccucgaggagaccaaguuccugacggagaaccugcuccuguacaucgacaucaacgggaaccugcaccccgacuccgccacccucgugagcgacaucgacaucaccuuccugaagaaggacgcccccuacauggugggcgacgucgugcaggagggcgugcugaccgccgucgugauccccacgaagaaggccgggggcaccaccgagaugcucgcgaaggcccugcgcaaggugccgaccgacaacuacaucacgaccuaccccgggcagggccugaacggguacaccgucgaggaggccaagaccgugcucaagaagugcaaguccgccuucuacauccugcccagcaucaucuccaacgagaagcaggagauccugggcaccgugagcuggaaccuccgggagaugcuggcgcacgccgaggagacgcgcaagcugaugcccgucugcguggagaccaaggccaucguguccaccauccagcggaaguacaagggcaucaagauccaggagggggucguggacuacggcgcccgcuucuacuucuacaccagcaagacgaccguggccucccugaucaacacccucaacgaccugaacgagacccuggucacgaugccgcucggguacgugacccacggccugaaccuggaggaggcggcccgguacaugcgcagccucaaggugcccgccaccgucuccgugagcucccccgacgccgugaccgccuacaacggguaccugacgagcuccagcaagacccccgaggagcacuucaucgagaccaucucccuggcgggcagcuacaaggacuggagcuacuccggccagagcacccagcucgggaucgaguuccugaagcggggcgacaaguccgucuacuacacgagcaacccgaccaccuuccaccuggacggggaggugaucaccuucgacaaccucaagacgcugcugucccuccgcgaggugcggaccaucaaggucuucaccaccguggacaacaucaaccugcacacgcagguggucgacaugagcaugaccuacggccagcaguucggccccaccuaccuggacggggccgacgugaccaagaucaagccccacaacucccacgagggcaagacguucuacgugcucccgaacgacgacacccugcgcgucgaggccuucgaguacuaccacaccaccgaccccagcuuccuggggcgguacauguccgcccucaaccacacgaagaaguggaaguacccccaggugaacggccugaccagcaucaagugggccgacaacaacugcuaccuggcgaccgcccuccugacccugcagcagaucgagcucaaguucaaccccccggcccugcaggacgccuacuaccgcgcgcgggccggggaggccgccaacuucugcgcccugauccucgcguacugcaacaagacggugggcgagcugggcgacguccgcgagaccauguccuaccuguuccagcacgccaaccucgacagcugcaagcgggugcugaacgucgugugcaagaccugcgggcagcagcagaccacccugaagggcguggaggccgucauguacauggggacgcucuccuacgagcaguucaagaagggcgugcagauccccugcaccugcgggaagcaggccaccaaguaccuggugcagcaggagagccccuucgucaugauguccgcccccccggcgcaguacgagcugaagcacggcaccuucacgugcgccagcgaguacaccggcaacuaccagugcgggcacuacaagcacaucaccuccaaggagacccucuacugcaucgacggcgcccugcugacgaagagcagcgaguacaaggggcccaucaccgacguguucuacaaggagaacuccuacaccaccacgaucaagcccgugaccuacaagcucgacggcgucgugugcaccgagaucgaccccaagcuggacaacuacuacaagaaggacaacagcuacuucaccgagcagccgaucgaccuggugcccaaccagcccuaccccaacgccuccuucgacaacuucaaguucgucugcgacaacaucaaguucgccgacgaccucaaccagcugacgggguacaagaagccggcgagccgcgagcugaaggugaccuucuuccccgaccucaacggcgacguggucgccaucgacuacaagcacuacacccccuccuucaagaagggcgccaagcugcugcacaagcccaucguguggcacgugaacaacgccaccaacaaggcgacguacaagccgaacaccuggugcauccggugccucuggagcaccaagcccgucgagaccuccaacagcuucgacgugcugaaguccgaggacgcccaggggauggacaaccuggccugcgaggaccucaagcccgugagcgaggaggucguggagaaccccacgauccagaaggacgugcuggagugcaacgucaagaccaccgagguggugggcgacaucauccugaagccggccaacaacucccucaagaucaccgaggaggucgggcacacggaccugauggccgcguacguggacaacagcucccugaccaucaagaagcccaacgagcucagccgcgugcugggccugaagacccucgccacccacgggcuggccgccgucaacuccgugcccugggacacgaucgccaacuacgcgaagccguuccugaacaagguggucagcaccaccaccaacaucgugacgcgcugccucaaccgggugugcaccaacuacaugcccuacuucuucacccugcugcuccagcugugcaccuucacccgcuccacgaacagccggaucaaggccuccaugcccaccaccaucgccaagaacaccgucaagagcgugggcaaguucugccuggaggccagcuucaacuaccucaagucccccaacuucagcaagcugaucaacaucaucaucugguuccugcuccuguccgugugccugggcagccucaucuacuccacggccgcgcuggggguccugaugagcaaccucggcaugccguccuacugcaccggguaccgcgagggcuaccugaacagcaccaacgugaccaucgccacguacugcaccggcuccauccccugcagcgugugccuguccgggcucgacagccuggacaccuaccccucccuggagaccauccagaucacgaucagcuccuucaagugggaccucaccgccuucggccuggucgccgagugguuccuggccuacauccucuucacccgguucuucuacgugcuggggcuggcggccaucaugcagcucuucuucagcuacuucgccgugcacuucaucuccaacagcuggcugauguggcugaucaucaaccugguccagauggcccccaucuccgcgauggugcgcauguacaucuucuucgccagcuucuacuacguguggaagagcuacguccacgugguggacggcugcaacuccagcaccugcaugaugugcuacaagcggaaccgcgccacgcgggucgagugcaccaccaucgugaacgggguccgccgguccuucuacguguacgccaacggcggcaagggguucugcaagcuccacaacuggaacugcgugaacugcgacaccuucugcgccggcagcacguucaucuccgacgaggucgcgcgcgaccugagccugcaguucaagcggccgaucaaccccaccgaccaguccagcuacaucguggacuccgugaccgucaagaacgggagcauccaccucuacuucgacaaggccggccagaagaccuacgagcgccacucccugagccacuucgugaaccuggacaaccuccgggccaacaacacgaaggggucccugcccaucaacgugaucgucuucgacggcaagagcaagugcgaggaguccagcgccaaguccgccagcguguacuacucccagcugaugugccagcccauccuccugcuggaccaggcgcucgugagcgacgucggcgacagcgccgagguggccgugaagauguucgacgccuacgucaacaccuucuccagcaccuucaacgugccgauggagaagcugaagacccugguggccacggcggaggccgagcucgccaagaacgucucccuggacaacgugcugagcaccuucaucuccgccgcgcgccagggguucguggacagcgacgucgagaccaaggacgugguggagugccucaagcugucccaccagagcgacaucgaggucaccggcgacuccugcaacaacuacaugcugacguacaacaagguggagaacaugaccccccgggaccucggggccugcaucgacugcagcgcccgccacaucaacgcccagguggccaagucccacaacaucgcgcugaucuggaacgucaaggacuucaugagccuguccgagcagcuccggaagcagauccgcagcgccgccaagaagaacaaccugcccuucaagcugaccugcgccaccacgcgccagguggugaacgucgugaccaccaagaucgcccucaagggcgggugaggacuagucccuguucccagagcccacuuuuuuuucuuuuuuugaaauaaaauagccugucuuucagaucucaaaggcucuuuucagagccaccaaaaaaaaaaaaaaaaaaaaaaaaaaaaaaaaaaaaaaaaaaaaaaaaaaaaaaaaaaaaaaaaaaaaaaaaaaaaaaaaaaaaaaaaaaaaaaaaaaaaa

SEQ ID NO: 19893 - RNA, 6113 nt, Artificial Sequence
  SARS-CoV-2__MT704088.1__non-structural protein 3 (NSP3) mRNA gc
aggagagucccgcagucggcguccagcggcucugcuuguucgugugugugucguugcaggccuuauucaagcuuaccauggcccccaccaaggugaccuucggcgacgacacggucaucgaggugcagggguacaagagcgugaacaucaccuucgagcuggacgagcgcaucgacaagguccucaacgagaagugcuccgccuacaccguggagcugggcaccgaggugaacgaguucgcgugcgucguggccgacgccgugaucaagacgcugcagccggucagcgagcuccugaccccccuggggaucgaccucgacgagugguccauggccaccuacuaccuguucgacgagagcggcgaguucaagcuggccucccacauguacugcagcuucuacccccccgacgaggacgaggaggagggggacugcgaggaggaggaguucgagccguccacccaguacgaguacggcacggaggacgacuaccagggcaagccccucgaguucggggcgaccagcgccgcccugcagcccgaggaggagcaggaggaggacuggcuggacgacgacucccagcagaccgugggccagcaggacgggagcgaggacaaccagaccacgaccauccagaccaucguggagguccagccccagcucgagauggagcugaccccgguggugcagacgaucgaggucaacuccuucagcggcuaccugaagcucaccgacaacguguacaucaagaacgccgacaucguggaggaggcgaagaaggucaagcccaccgugguggucaacgccgccaacguguaccugaagcacgggggcggcguggccggggcccugaacaaggcgaccaacaacgccaugcaggucgaguccgacgacuacaucgccacgaacggcccccucaagguggggggcagcugcguccuguccggccacaaccuggccaagcacugccuccacgugguggggcccaacgucaacaagggcgaggacauccagcugcugaagagcgccuacgagaacuucaaccagcacgaggugcuccuggcgccgcugcucuccgccgggaucuucggcgccgaccccauccacagccugcgggugugcgucgacaccgugcgcaccaacguguaccuggccgucuucgacaagaaccucuacgacaagcugguguccagcuuccuggagaugaagagcgagaagcagguggagcagaagaucgccgagauccccaaggaggaggucaagcccuucaucaccgaguccaagccgagcguggagcagcggaagcaggacgacaagaagaucaaggcgugcguggaggaggucacgaccacccucgaggagaccaaguuccugacggagaaccugcuccuguacaucgacaucaacgggaaccugcaccccgacuccgccacccucgugagcgacaucgacaucaccuuccugaagaaggacgcccccuacaucgugggcgacgucgugcaggagggcgugcugaccgccgucgugauccccacgaagaaggccgggggcaccaccgagaugcucgcgaaggcccugcgcaaggugccgaccgacaacuacaucacgaccuaccccgggcagggccugaacggguacaccgucgaggaggccaagaccgugcucaagaagugcaaguccgccuucuacauccugcccagcaucaucuccaacgagaagcaggagauccugggcaccgugagcuggaaccuccgggagaugcuggcgcacgccgaggagacgcgcaagcugaugcccgucugcguggagaccaaggccaucguguccaccauccagcggaaguacaagggcaucaagauccaggagggggucguggacuacggcgcccgcuucuacuucuacaccagcaagacgaccguggccucccugaucaacacccucaacgaccugaacgagacccuggucacgaugccgcucggguacgugacccacggccugaaccuggaggaggcggcccgguacaugcgcagccucaaggugcccgccaccgucuccgugagcucccccgacgccgugaccgccuacaacggguaccugacgagcuccagcaagacccccgaggagcacuucaucgagaccaucucccuggcgggcagcuacaaggacuggagcuacuccggccagagcacccagcucgggaucgaguuccugaagcggggcgacaaguccgucuacuacacgagcaacccgaccaccuuccaccuggacggggaggugaucaccuucgacaaccucaagacgcugcugucccuccgcgaggugcggaccaucaaggucuucaccaccguggacaacaucaaccugcacacgcagguggucgacaugagcaugaccuacggccagcaguucggccccaccuaccuggacggggccgacgugaccaagaucaagccccacaacucccacgagggcaagacguucuacgugcucccgaacgacgacacccugcgcgucgaggccuucgaguacuaccacaccaccgacagcuccuuccuggggcgguacaugagcgcccucaaccacacgaagaaguggaaguacccccaggugaacggccugaccuccaucaagugggccgacaacaacugcuaccuggcgaccgcccuccugacccugcagcagaucgagcucaaguucaacccccccgcccugcaggacgccuacuaccgcgcgcgggccggggaggccgccaacuucugcgcccugauccucgcguacugcaacaagacggugggcgagcugggcgacguccgcgagaccaugagcuaccuguuccagcacgccaaccucgacuccugcaagcgggugcugaacgucgugugcaagaccugcgggcagcagcagaccacccugaagggcguggaggccgucauguacauggggacgcucagcuacgagcaguucaagaagggcgugcagaucccgugcaccugcgggaagcaggccaccaaguaccuggugcagcaggagucccccuucgucaugaugagcgccccccccgcgcaguacgagcugaagcacggcaccuucacgugcgccuccgaguacaccggcaacuaccagugcgggcacuacaagcacaucaccagcaaggagacccucuacugcaucgacggcgcccugcugacgaagagcuccgaguacaaggggccgaucaccgacguguucuacaaggagaacagcuacaccaccacgaucaagcccgugaccuacaagcucgacggcgucgugugcaccgagaucgaccccaagcuggacaacuacuacaagaaggacaacuccuacuucaccgagcagcccaucgaccuggugccgaaccagcccuaccccaacgccagcuucgacaacuucaaguucgucugcgacaacaucaaguucgccgacgaccucaaccagcugacgggguacaagaagcccgcgucccgcgagcugaaggugaccuucuucccggaccucaacggcgacguggucgccaucgacuacaagcacuacacccccagcuucaagaagggcgccaagcugcugcacaagcccaucguguggcacgugaacaacgccaccaacaaggcgacguacaagcccaacaccuggugcauccggugccucugguccaccaagccggucgagaccagcaacuccuucgacgugcugaagagcgaggacgcccaggggauggacaaccuggccugcgaggaccucaagcccguguccgaggaggucguggagaaccccacgauccagaaggacgugcuggagugcaacgucaagaccaccgagguggugggcgacaucauccugaagcccgccaacaacagccucaagaucaccgaggaggucgggcacacggaccugauggccgcguacguggacaacuccagccugaccaucaagaagccgaacgagcucucccgcgugcugggccugaagacccucgccacccacgggcuggccgccgucaacagcgugcccugggacacgaucgccaacuacgcgaagcccuuccugaacaagguggucuccaccaccaccaacaucgugacgcgcugccucaaccgggugugcaccaacuacaugccguacuucuucacccugcugcuccagcugugcaccuucacccgcagcacgaacucccggaucaaggccagcaugcccaccaccaucgccaagaacaccgucaagagcgugggcaaguucugccuggaggccuccuucaacuaccucaagagccccaacuucuccaagcugaucaacaucaucaucugguuccugcuccugagcgugugccugggcucccuccuguacagcacggccgcgcuggggguccucauguccaaccugggcaugcccagcuacugcaccggguaccgcgagggcuaccugaacuccaccaacgugaccaucgccacguacugcaccggcagcaucccgugcuccgugugccucagcgggcuggacucccuggacaccuaccccagccucgagaccauccagaucacgaucuccagcuucaagugggaccugaccgccuucggccuggucgccgagugguuccucgccuacauccuguucacccgguucuucuacgugcuggggcucgcggccaucaugcagcuguucuucuccuacuucgccgugcacuucaucagcaacuccuggcugauguggcugaucaucaaccucguccagauggcccccaucagcgcgauggugcgcauguacaucuucuucgccagcuucuacuacguguggaaguccuacguccacgugguggacggcugcaacagcuccaccugcaugaugugcuacaagcggaaccgcgccacgcgggucgagugcaccaccaucgugaacgggguccgccggagcuucuacguguacgccaacggcggcaagggguucugcaagcugcacaacuggaacugcgugaacugcgacaccuucugcgccggcuccacguucaucagcgacgaggucgcgcgcgaccugucccuccaguucaagcggcccaucaacccgaccgaccagagcuccuacaucguggacagcgugaccgucaagaacggguccauccaccuguacuucgacaaggccggccagaagaccuacgagcgccacagccugucccacuucgugaaccucgacaaccugcgggccaacaacacgaaggggagccugcccaucaacgugaucgucuucgacggcaaguccaagugcgaggagagcuccgccaagagcgccuccguguacuacagccagcucaugugccagcccauccugcugcucgaccaggcgcuggugagcgacgucggcgacuccgccgagguggccgugaagauguucgacgccuacgucaacaccuucagcuccaccuucaacgugcccauggagaagcugaagacccucguggccacggcggaggccgagcuggccaagaacgucagccuggacaacgugcucuccaccuucaucagcgccgcgcgccagggguucguggacuccgacgucgagaccaaggacgugguggagugccugaagcugagccaccaguccgacaucgaggucaccggcgacagcugcaacaacuacaugcucacguacaacaagguggagaacaugaccccgcgggaccugggggccugcaucgacugcuccgcccgccacaucaacgcccagguggccaagagccacaacaucgcgcugaucuggaacgucaaggacuucaugucccucagcgagcagcugcggaagcagauccgcuccgccgccaagaagaacaaccugcccuucaagcucaccugcgccaccacgcgccagguggugaacgucgugaccaccaagaucgcccugaagggcgggugaggacuagucccuguucccagagcccacuuuuuuuucuuuuuuugaaauaaaauagccugucuuucagaucucaaaggcucuuuucagagccaccaaaaaaaaaaaaaaaaaaaaaaaaaaaaaaaaaaaaaaaaaaaaaaaaaaaaaaaaaaaaaaaaaaaaaaaaaaaaaaaaaaaaaaaaaaaaaaaaaaaaa

SEQ ID NO: 19894 - RNA, 6113 nt, Artificial Sequence
  SARS-CoV-2__MT704100.1__non-structural protein 3 (NSP3) mRNA gc
aggagagucccgcagucggcguccagcggcucugcuuguucgugugugugucguugcaggccuuauucaagcuuaccauggcccccaccaaggugaccuucggcgacgacacggucaucgaggugcagggguacaagagcgugaacaucaccuucgagcuggacgagcgcaucgacaagguccucaacgagaagugcuccgccuacaccguggagcugggcaccgaggugaacgaguucgcgugcgucguggccgacgccgugaucaagacgcugcagccggucagcgagcuccugaccccccuggggaucgaccucgacgagugguccauggccaccuacuaccuguucgacgagagcggcgaguucaagcuggccucccacauguacugcagcuucuacccccccgacgaggacgaggaggagggggacugcgaggaggaggaguucgagccguccacccaguacgaguacggcacggaggacgacuaccagggcaagccccucgaguucggggcgaccagcgccgcccugcagcccgaggaggagcaggaggaggacuggcuggacgacgacucccagcagaccgugggccagcaggacgggagcgaggacaaccagaccacgaccauccagaccaucguggagguccagccccagcucgagauggagcugaccccgguggugcagacgaucgaggucaacuccuucagcggcuaccugaagcucaccgacaacguguacaucaagaacgccgacaucguggaggaggcgaagaaggucaagcccaccgugguggucaacgccgccaacguguaccugaagcacgggggcggcguggccggggcccugaacaaggcgaccaacaacgccaugcaggucgaguccgacgacuacaucgccacgaacggcccccucaagguggggggcagcugcguccuguccggccacaaccuggccaagcacugccuccacgugguggggcccaacgucaacaagggcgaggacauccagcugcugaagagcgccuacgagaacuucaaccagcacgaggugcuccuggcgccgcugcucuccgccgggaucuucggcgccgaccccauccacagccugcgggugugcgucgacaccgugcgcaccaacguguaccuggccgucuucgacaagaaccucuacgacaagcugguguccagcuuccuggagaugaagagcgagaagcagguggagcagaagaucgccgagauccccaaggaggaggucaagcccuucaucaccgaguccaagccgagcguggagcagcggaagcaggacgacaagaagaucaaggcgugcguggaggaggucacgaccacccucgaggagaccaaguuccugacggagaaccugcuccuguacaucgacaucaacgggaaccugcaccccgacuccgccacccucgugagcgacaucgacaucaccuuccugaagaaggacgcccccuacaucgugggcgacgucgugcaggagggcgugcugaccgccgucgugauccccacgaagaaggccgggggcaccaccgagaugcucgcgaaggcccugcgcaaggugccgaccgacaacuacaucacgaccuaccccgggcagggccugaacggguacaccgucgaggaggccaagaccgugcucaagaagugcaaguccgccuucuacauccugcccagcaucaucuccaacgagaagcaggagauccugggcaccgugagcuggaaccuccgggagaugcuggcgcacgccgaggagacgcgcaagcugaugcccgucugcguggagaccaaggccaucguguccaccauccagcggaaguacaagggcaucaagauccaggagggggucguggacuacggcgcccgcuucuacuucuacaccagcaagacgaccguggccucccugaucaacacccucaacgaccugaacgagacccuggucacgaugccgcucggguacgugacccacggccugaaccuggaggaggcggcccgguacaugcgcagccucaaggugcccgccaccgucuccgugagcucccccgacgccgugaccgccuacaacggguaccugacgagcuccagcaagacccccgaggagcacuucaucgagaccaucucccuggcgggcagcuacaaggacuggagcuacuccggccagagcacccagcucgggaucgaguuccugaagcggggcgacaaguccgucuacuacacgagcaacccgaccaccuuccaccuggacggggaggugaucaccuucgacaaccucaagacgcugcugucccuccgcgaggugcggaccaucaaggucuucaccaccguggacaacaucaaccugcacacgcagguggucgacaugagcaugaccuacggccagcaguucggccccaccuaccuggacggggccgacgugaccaagaucaagccccacaacucccacgagggcaagacguucuacgugcucccgaacgacgacacccugcgcgucgaggccuucgaguacuaccacaccaccgaccccagcuuccuggggcgguacauguccgcccucaaccacacgaagaaguggaaguacccccaggugaacggccugaccagcaucaagugggccgacaacaacugcuaccuggcgaccgcccuccugacccugcagcagaucgagcucaaguucaaccccccggcccugcaggacgccuacuaccgcgcgcgggccggggaggccgccaacuucugcgcccugauccucgcguacugcaacaagacggugggcgagcugggcgacguccgcgagaccauguccuaccuguuccagcacgccaaccucgacagcugcaagcgggugcugaacgucgugugcaagaccugcgggcagcagcagaccacccugaagggcguggaggccgucauguacauggggacgcucuccuacgagcaguucaagaagggcgugcagauccccugcaccugcgggaagcaggccaccaaguaccuggugcagcaggagagccccuucgucaugauguccgcccccccggcgcaguacgagcugaagcacggcaccuucacgugcgccagcgaguacaccggcaacuaccagugcgggcacuacaagcacaucaccuccaaggagacccucuacugcaucgacggcgcccugcugacgaagagcagcgaguacaaggggcccaucaccgacguguucuacaaggagaacuccuacaccaccacgaucaagcccgugaccuacaagcucgacggcgucgugugcaccgagaucgaccccaagcuggacaacuacuacaagaaggacaacagcuacuucaccgagcagccgaucgaccuggugcccaaccagcccuaccccaacgccuccuucgacaacuucaaguucgucugcgacaacaucaaguucgccgacgaccucaaccagcugacgggguacaagaagccggcgagccgcgagcugaaggugaccuucuuccccgaccucaacggcgacguggucgccaucgacuacaagcacuacacccccuccuucaagaagggcgccaagcugcugcacaagcccaucguguggcacgugaacaacgccaccaacaaggcgacguacaagccgaacaccuggugcauccggugccucuggagcaccaagcccgucgagaccuccaacagcuucgacgugcugaaguccgaggacgcccaggggauggacaaccuggccugcgaggaccucaagcccgugagcgaggaggucguggagaaccccacgauccagaaggacgugcuggagugcaacgucaagaccaccgagguggugggcgacaucauccugaagccggccaacaacucccucaagaucaccgaggaggucgggcacacggaccugauggccgcguacguggacaacagcucccugaccaucaagaagcccaacgagcucagccgcgugcugggccugaagacccucgccacccacgggcuggccgccgucaacuccgugcccugggacacgaucgccaacuacgcgaagccguuccugaacaagguggucagcaccaccaccaacaucgugacgcgcugccucaaccgggugugcaccaacuacaugcccuacuucuucacccugcugcuccagcugugcaccuucacccgcuccacgaacagccggaucaaggccuccaugcccaccaccaucgccaagaacaccgucaagagcgugggcaaguucugccuggaggccagcuucaacuaccucaagucccccaacuucagcaagcugaucaacaucaucaucugguuccugcuccuguccgugugccugggcagccucaucuacuccacggccgcgcuggggguccugaugagcaaccucggcaugccguccuacugcaccggguaccgcgagggcuaccugaacagcaccaacgugaccaucgccacguacugcaccggcuccauccccugcagcgugugccuguccgggcucgacagccuggacaccuaccccucccuggagaccauccagaucacgaucagcuccuucaagugggaccucaccgccuucggccuggucgccgagugguuccuggccuacauccucuucacccgguucuucuacgugcuggggcuggcggccaucaugcagcucuucuucagcuacuucgccgugcacuucaucuccaacagcuggcugauguggcugaucaucaaccugguccagauggcccccaucuccgcgauggugcgcauguacaucuucuucgccagcuucuacuacguguggaagagcuacguccacgugguggacggcugcaacuccagcaccugcaugaugugcuacaagcggaaccgcgccacgcgggucgagugcaccaccaucgugaacgggguccgccgguccuucuacguguacgccaacggcggcaagggguucugcaagcuccacaacuggaacugcgugaacugcgacaccuucugcgccggcagcacguucaucuccgacgaggucgcgcgcgaccugagccugcaguucaagcggccgaucaaccccaccgaccaguccagcuacaucguggacuccgugaccgucaagaacgggagcauccaccucuacuucgacaaggccggccagaagaccuacgagcgccacucccugagccacuucgugaaccuggacaaccuccgggccaacaacacgaaggggucccugcccaucaacgugaucgucuucgacggcaagagcaagugcgaggaguccagcgccaaguccgccagcguguacuacucccagcugaugugccagcccauccuccugcuggaccaggcgcucgugagcgacgucggcgacagcgccgagguggccgugaagauguucgacgccuacgucaacaccuucuccagcaccuucaacgugccgauggagaagcugaagacccugguggccacggcggaggccgagcucgccaagaacgucucccuggacaacgugcugagcaccuucaucuccgccgcgcgccagggguucguggacagcgacgucgagaccaaggacgugguggagugccucaagcugucccaccagagcgacaucgaggucaccggcgacuccugcaacaacuacaugcugacguacaacaagguggagaacaugaccccccgggaccucggggccugcaucgacugcagcgcccgccacaucaacacccagguggccaagucccacaacaucgcccugaucuggaacgucaaggacuucaugagccuguccgagcagcuccggaagcagauccgcagcgcggccaagaagaacaaccugcccuucaagcugaccugcgccacgacccgccagguggugaacgucgugaccaccaagaucgcccucaagggcgggugaggacuagucccuguucccagagcccacuuuuuuuucuuuuuuugaaauaaaauagccugucuuucagaucucaaaggcucuuuucagagccaccaaaaaaaaaaaaaaaaaaaaaaaaaaaaaaaaaaaaaaaaaaaaaaaaaaaaaaaaaaaaaaaaaaaaaaaaaaaaaaaaaaaaaaaaaaaaaaaaaaaaa

SEQ ID NO: 19895 - RNA, 6113 nt, Artificial Sequence
  SARS-CoV-2__MT683408.1__non-structural protein 3 (NSP3) mRNA gc
aggagagucccgcagucggcguccagcggcucugcuuguucgugugugugucguugcaggccuuauucaagcuuaccauggcccccaccaaggugaccuucggcgacgacacggucaucgaggugcagggguacaagagcgugaacaucaccuucgagcuggacgagcgcaucgacaagguccucaacgagaagugcuccgccuacaccguggagcugggcaccgaggugaacgaguucgcgugcgucguggccgacgccgugaucaagacgcugcagccggucagcgagcuccugaccccccuggggaucgaccucgacgagugguccauggccaccuacuaccuguucgacgagagcggcgaguucaagcuggccucccacauguacugcagcuucuacccccccgacgaggacgaggaggagggggacugcgaggaggaggaguucgagccguccacccaguacgaguacggcacggaggacgacuaccagggcaagccccucgaguucggggcgaccagcgccgcccugcagcccgaggaggagcaggaggaggacuggcuggacgacgacucccagcagaccgugggccagcaggacgggagcgaggacaaccagaccacgaccauccagaccaucguggagguccagccccagcucgagauggagcugaccccgguggugcagacgaucgaggucaacuccuucagcggcuaccugaagcucaccgacaacguguacaucaagaacgccgacaucguggaggaggcgaagaaggucaagcccaccgugguggucaacgccgccaacguguaccugaagcacgggggcggcguggccggggcccugaacaaggcgaccaacaacgccaugcaggucgaguccgacgacuacaucgccacgaacggcccccucaagguggggggcagcugcguccuguccggccacaaccuggccaagcacugccuccacgugguggggcccaacgucaacaagggcgaggacauccagcugcugaagagcgccuacgagaacuucaaccagcacgaggugcuccuggcgccgcugcucuccgccgggaucuucggcgccgaccccauccacagccugcgggugugcgucgacaccgugcgcaccaacguguaccuggccgucuucgacaagaaccucuacgacaagcugguguccagcuuccuggagaugaagagcgagaagcagguggagcagaagaucgccgagauccccaaggaggaggucaagcccuucaucaccgaguccaagccgagcguggagcagcggaagcaggacgacaagaagaucaaggcgugcguggaggaggucacgaccacccucgaggagaccaaguuccugacggagaaccugcuccuguacaucgacaucaacgggaaccugcaccccgacuccgccacccucgugagcgacaucgacaucaccuuccugaagaaggacgcccccuacaucgugggcgacgucgugcaggagggcgugcugaccgccgucgugauccccacgaagaaggccgggggcaccaccgagaugcucgcgaaggcccugcgcaaggugccgaccgacaacuacaucacgaccuaccccgggcagggccugaacggguacaccgucgaggaggccaagaccgugcucaagaagugcaaguccgccuucuacauccugcccagcaucaucuccaacgagaagcaggagauccugggcaccgugagcuggaaccuccgggagaugcuggcgcacgccgaggagacgcgcaagcugaugcccgucugcguggagaccaaggccaucguguccaccauccagcggaaguacaagggcaucaagauccaggagggggucguggacuacggcgcccgcuucuacuucuacaccagcaagacgaccguggccucccugaucaacacccucaacgaccugaacgagacccuggucacgaugccgcucggguacgugacccacggccugaaccuggaggaggcggcccgguacaugcgcagccucaaggugcccgccaccgucuccgugagcucccccgacgccgugaccgccuacaacggguaccugacgagcuccagcaagacccccgaggagcacuucaucgagaccaucucccuggcgggcagcuacaaggacuggagcuacuccggccagagcacccagcucgggaucgaguuccugaagcggggcgacaaguccgucuacuacacgagcaacccgaccaccuuccaccuggacggggaggugaucaccuucgacaaccucaagacgcugcugucccuccgcgaggugcggaccaucaaggucuucaccaccguggacaacaucaaccugcacacgcagguggucgacaugagcaugaccuacggccagcaguucggccccaccuaccuggacggggccgacgugaccaagaucaagccccacaacucccacgagggcaagacguucuacgugcucccgaacgacgacacccugcgcgucgaggccuucgaguacuaccacaccaccgaccccagcuuccuggggcgguacauguccgcccucaaccacacgaagaaguggaaguacccccaggugaacggccugaccagcaucaagugggccgacaacaacugcuaccuggcgaccgcccuccugacccugcagcagaucgagcucaaguucaaccccccggcccugcaggacgccuacuaccgcgcgcgggccggggaggccgccaacuucugcgcccugauccucgcguacugcaacaagacggugggcgagcugggcgacguccgcgagaccauguccuaccuguuccagcacgccaaccucgacagcugcaagcgggugcugaacgucgugugcaagaccugcgggcagcagcagaccacccugaagggcguggaggccgucauguacauggggacgcucuccuacgagcaguucaagaagggcgugcagauccccugcaccugcgggaagcaggccaccaaguaccuggugcagcaggagagccccuucgucaugauguccgcccccccggcgcaguacgagcugaagcacggcaccuucacgugcgccagcgaguacaccggcaacuaccagugcgggcacuacaagcacaucaccuccaaggagacccucuacugcaucgacggcgcccugcugacgaagagcagcgaguacaaggggcccaucaccgacguguucuacaaggagaacuccuacaccaccacgaucaagcccgugaccuacaagcucgacggcgucgugugcaccgagaucgaccccaagcuggacaacuacuacaagaaggacaacagcuacuucaccgagcagccgaucgaccuggugcccaaccagcccuaccccaacgccuccuucgacaacuucaaguucgucugcgacaacaucaaguucgccgacgaccucaaccagcugacgggguacaagaagccggcgagccgcgagcugaaggugaccuucuuccccgaccucaacggcgacguggucgccaucgacuacaagcacuacacccccuccuucaagaagggcgccaagcugcugcacaagcccaucguguggcacgugaacaacgccaccaacaaggcgacguacaagccgaacaccuggugcauccggugccucuggagcaccaagcccgucgagaccuccaacagcuucgacgugcugaaguccgaggacgcccaggggauggacaaccuggccugcgaggaccucaagcccgugagcgaggaggucguggagaaccccacgauccagaaggacgugcuggagugcaacgucaagaccaccgagguggugggcgacaucauccugaagccggccaacaacucccucaagaucaccgaggaggucgggcacacggaccugauggccgcguacguggacaacagcucccugaccaucaagaagcccaacgagcucagccgcgugcugggccugaagacccucgccacccacgggcuggccgccgucaacuccgugcccugggacacgaucgccaacuacgcgcgcccguuccugaacaagguggucagcaccaccaccaacaucgugacgcggugccucaaccgcgugugcaccaacuacaugcccuacuucuucacccugcugcuccagcugugcaccuucacccgguccacgaacagccgcaucaaggccuccaugcccaccaccaucgccaagaacaccgucaagagcgugggcaaguucugccuggaggccagcuucaacuaccucaagucccccaacuucagcaagcugaucaacaucaucaucugguuccugcuccuguccgugugccugggcagccucaucuacuccacggccgcgcuggggguccugaugagcaaccucggcaugccguccuacugcaccggguaccgggagggcuaccugaacagcaccaacgugaccaucgccacguacugcaccggcuccauccccugcagcgugugccuguccgggcucgacagccuggacaccuaccccucccuggagaccauccagaucacgaucagcuccuucaagugggaccucaccgccuucggccuggucgccgagugguuccuggccuacauccucuucacccgcuucuucuacgugcuggggcuggcggccaucaugcagcucuucuucagcuacuucgccgugcacuucaucuccaacagcuggcugauguggcugaucaucaaccugguccagauggcccccaucuccgcgauggugcggauguacaucuucuucgccagcuucuacuacguguggaagagcuacguccacgugguggacggcugcaacuccagcaccugcaugaugugcuacaagcgcaaccgggccacgcgcgucgagugcaccaccaucgugaacgggguccggcgcuccuucuacguguacgccaacggcggcaagggguucugcaagcuccacaacuggaacugcgugaacugcgacaccuucugcgccggcagcacguucaucuccgacgaggucgcgcgggaccugagccugcaguucaagcgcccgaucaaccccaccgaccaguccagcuacaucguggacuccgugaccgucaagaacgggagcauccaccucuacuucgacaaggccggccagaagaccuacgagcggcacucccugagccacuucgugaaccuggacaaccuccgcgccaacaacacgaaggggucccugcccaucaacgugaucgucuucgacggcaagagcaagugcgaggaguccagcgccaaguccgccagcguguacuacucccagcugaugugccagcccauccuccugcuggaccaggcgcucgugagcgacgucggcgacagcgccgagguggccgugaagauguucgacgccuacgucaacaccuucuccagcaccuucaacgugccgauggagaagcugaagacccugguggccacggcggaggccgagcucgccaagaacgucucccuggacaacgugcugagcaccuucaucuccgccgcgcggcagggguucguggacagcgacgucgagaccaaggacgugguggagugccucaagcugucccaccagagcgacaucgaggucaccggcgacuccugcaacaacuacaugcugacguacaacaagguggagaacaugaccccccgcgaccucggggccugcaucgacugcagcgcccggcacaucaacgcccagguggccaagucccacaacaucgcgcugaucuggaacgucaaggacuucaugagccuguccgagcagcuccgcaagcagauccgcagcgccgccaagaagaacaaccugcccuucaagcugaccugcgccaccacgcggcagguggugaacgucgugaccaccaagaucgcccucaagggcgggugaggacuagucccuguucccagagcccacuuuuuuuucuuuuuuugaaauaaaauagccugucuuucagaucucaaaggcucuuuucagagccaccaaaaaaaaaaaaaaaaaaaaaaaaaaaaaaaaaaaaaaaaaaaaaaaaaaaaaaaaaaaaaaaaaaaaaaaaaaaaaaaaaaaaaaaaaaaaaaaaaaaaa

SEQ ID NO: 19896 - RNA, 6113 nt, Artificial Sequence
  SARS-CoV-2__MT627391.1__non-structural protein 3 (NSP3) mRNA gc
aggagagucccgcagucggcguccagcggcucugcuuguucgugugugugucguugcaggccuuauucaagcuuaccauggcccccaccaaggugaccuucggcgacgacacggucaucgaggugcagggguacaagagcgugaacaucaccuucgagcuggacgagcgcaucgacaagguccucaacgagaagugcuccgccuacaccguggagcugggcaccgaggugaacgaguucgcgugcgucguggccgacgccgugaucaagacgcugcagccggucagcgagcuccugaccccccuggggaucgaccucgacgagugguccauggccaccuacuaccuguucgacgagagcggcgaguucaagcuggccucccacauguacugcagcuucuacccccccgacgaggacgaggaggagggggacugcgaggaggaggaguucgagccguccacccaguacgaguacggcacggaggacgacuaccagggcaagccccucgaguucggggcgaccagcgccgcccugcagcccgaggaggagcaggaggaggacuggcuggacgacgacucccagcagaccgugggccagcaggacgggagcgaggacaaccagaccacgaccauccagaccaucguggagguccagccccagcucgagauggagcugaccccgguggugcagacgaucgaggucaacuccuucagcggcuaccugaagcucaccgacaacguguacaucaagaacgccgacaucguggaggaggcgaagaaggucaagcccaccgugguggucaacgccgccaacguguaccugaagcacgggggcggcguggccggggcccugaacaaggcgaccaacaacgccaugcaggucgaguccgacgacuacaucgccacgaacggcccccucaagguggggggcagcugcguccuguccggccacaaccuggccaagcacugccuccacgugguggggcccaacgucaacaagggcgaggacauccagcugcugaagagcgccuacgagaacuucaaccagcacgaggugcuccuggcgccgcugcucuccgccgggaucuucggcgccgaccccauccacagccugcgggugugcgucgacaccgugcgcaccaacguguaccuggccgucuucgacaagaaccucuacgacaagcugguguccagcuuccuggagaugaagagcgagaagcagguggagcagaagaucgccgagauccccaaggaggaggucaagcccuucaucaccgaguccaagccgagcguggagcagcggaagcaggacgacaagaagaucaaggcgugcguggaggaggucacgaccacccucgaggagaccaaguuccugacggagaaccugcuccuguacaucgacaucaacgggaaccugcaccccgacuccgccacccucgugagcgacaucgacaucaccuuccugaagaaggacgcccccuacaucgugggcgacgucgugcaggagggcgugcugaccgccgucgugauccccacgaagaaggccgggggcaccaccgagaugcucgcgaaggcccugcgcaaggugccgaccgacaacuacaucacgaccuaccccgggcagggccugaacggguacaccgucgaggaggccaagaccgugcucaagaagugcaaguccgccuucuacauccugcccagcaucaucuccaacgacaagcaggagauccugggcaccgugagcuggaaccuccgggagaugcuggcgcacgccgaggagacgcgcaagcugaugcccgucugcguggagaccaaggccaucguguccaccauccagcggaaguacaagggcaucaagauccaggagggggucguggacuacggcgcccgcuucuacuucuacaccagcaagacgaccguggccucccugaucaacacccucaacgaccugaacgagacccuggucacgaugccgcucggguacgugacccacggccugaaccuggaggaggcggcccgguacaugcgcagccucaaggugcccgccaccgucuccgugagcucccccgacgccgugaccgccuacaacggguaccugacgagcuccagcaagacccccgaggagcacuucaucgagaccaucucccuggcgggcagcuacaaggacuggagcuacuccggccagagcacccagcucgggaucgaguuccugaagcggggcgacaaguccgucuacuacacgagcaacccgaccaccuuccaccuggacggggaggugaucaccuucgacaaccucaagacgcugcugucccuccgcgaggugcggaccaucaaggucuucaccaccguggacaacaucaaccugcacacgcagguggucgacaugagcaugaccuacggccagcaguucggccccaccuaccuggacggggccgacgugaccaagaucaagccccacaacucccacgagggcaagacguucuacgugcucccgaacgacgacacccugcgcgucgaggccuucgaguacuaccacaccaccgaccccagcuuccuggggcgguacauguccgcccucaaccacacgaagaaguggaaguacccccaggugaacggccugaccagcaucaagugggccgacaacaacugcuaccuggcgaccgcccuccugacccugcagcagaucgagcucaaguucaaccccccggcccugcaggacgccuacuaccgcgcgcgggccggggaggccgccaacuucugcgcccugauccucgcguacugcaacaagacggugggcgagcugggcgacguccgcgagaccauguccuaccuguuccagcacgccaaccucgacagcugcaagcgggugcugaacgucgugugcaagaccugcgggcagcagcagaccacccugaagggcguggaggccgucauguacauggggacgcucuccuacgagcaguucaagaagggcgugcagauccccugcaccugcgggaagcaggccaccaaguaccuggugcagcaggagagccccuucgucaugauguccgcccccccggcgcaguacgagcugaagcacggcaccuucacgugcgccagcgaguacaccggcaacuaccagugcgggcacuacaagcacaucaccuccaaggagacccucuacugcaucgacggcgcccugcugacgaagagcagcgaguacaaggggcccaucaccgacguguucuacaaggagaacuccuacaccaccacgaucaagcccgugaccuacaagcucgacggcgucgugugcaccgagaucgaccccaagcuggacaacuacuacaagaaggacaacagcuacuucaccgagcagccgaucgaccuggugcccaaccagcccuaccccaacgccuccuucgacaacuucaaguucgucugcgacaacaucaaguucgccgacgaccucaaccagcugacgggguacaagaagccggcgagccgcgagcugaaggugaccuucuuccccgaccucaacggcgacguggucgccaucgacuacaagcacuacacccccuccuucaagaagggcgccaagcugcugcacaagcccaucguguggcacgugaacaacgccaccaacaaggcgacguacaagccgaacaccuggugcauccggugccucuggagcaccaagcccgucgagaccuccaacagcuucgacgugcugaaguccgaggacgcccaggggauggacaaccuggccugcgaggaccucaagcccgugagcgaggaggucguggagaaccccacgauccagaaggacgugcuggagugcaacgucaagaccaccgagguggugggcgacaucauccugaagccggccaacaacucccucaagaucaccgaggaggucgggcacacggaccugauggccgcguacguggacaacagcucccugaccaucaagaagcccaacgagcucagccgcgugcugggccugaagacccucgccacccacgggcuggccgccgucaacuccgugcccugggacacgaucgccaacuacgcgaagccguuccugaacaagguggucagcaccaccaccaacaucgugacgcgcugccucaaccgggugugcaccaacuacaugcccuacuucuucacccugcugcuccagcugugcaccuucacccgcuccacgaacagccggaucaaggccuccaugcccaccaccaucgccaagaacaccgucaagagcgugggcaaguucugccuggaggccagcuucaacuaccucaagucccccaacuucagcaagcugaucaacaucaucaucugguuccugcuccuguccgugugccugggcagccucaucuacuccacggccgcgcuggggguccugaugagcaaccucggcaugccguccuacugcaccggguaccgcgagggcuaccugaacagcaccaacgugaccaucgccacguacugcaccggcuccauccccugcagcgugugccuguccgggcucgacagccuggacaccuaccccucccuggagaccauccagaucacgaucagcuccuucaagugggaccucaccgccuucggccuggucgccgagugguuccuggccuacauccucuucacccgguucuucuacgugcuggggcuggcggccaucaugcagcucuucuucagcuacuucgccgugcacuucaucuccaacagcuggcugauguggcugaucaucaaccugguccagauggcccccaucuccgcgauggugcgcauguacaucuucuucgccagcuucuacuacguguggaagagcuacguccacgugguggacggcugcaacuccagcaccugcaugaugugcuacaagcggaaccgcgccacgcgggucgagugcaccaccaucgugaacgggguccgccgguccuucuacguguacgccaacggcggcaagggguucugcaagcuccacaacuggaacugcgugaacugcgacaccuucugcgccggcagcacguucaucuccgacgaggucgcgcgcgaccugagccugcaguucaagcggccgaucaaccccaccgaccaguccagcuacaucguggacuccgugaccgucaagaacgggagcauccaccucuacuucgacaaggccggccagaagaccuacgagcgccacucccugagccacuucgugaaccuggacaaccuccgggccaacaacacgaaggggucccugcccaucaacgugaucgucuucgacggcaagagcaagugcgaggaguccagcgccaaguccgccagcguguacuacucccagcugaugugccagcccauccuccugcuggaccaggcgcucgugagcgacgucggcgacagcgccgagguggccgugaagauguucgacgccuacgucaacaccuucuccagcaccuucaacgugccgauggagaagcugaagacccugguggccacggcggaggccgagcucgccaagaacgucucccuggacaacgugcugagcaccuucaucuccgccgcgcgccagggguucguggacagcgacgucgagaccaaggacgugguggagugccucaagcugucccaccagagcgacaucgaggucaccggcgacuccugcaacaacuacaugcugacguacaacaagguggagaacaugaccccccgggaccucggggccugcaucgacugcagcgcccgccacaucaacgcccagguggccaagucccacaacaucgcgcugaucuggaacgucaaggacuucaugagccuguccgagcagcuccggaagcagauccgcagcgccgccaagaagaacaaccugcccuucaagcugaccugcgccaccacgcgccagguggugaacgucgugaccaccaagaucgcccucaagggcgggugaggacuagucccuguucccagagcccacuuuuuuuucuuuuuuugaaauaaaauagccugucuuucagaucucaaaggcucuuuucagagccaccaaaaaaaaaaaaaaaaaaaaaaaaaaaaaaaaaaaaaaaaaaaaaaaaaaaaaaaaaaaaaaaaaaaaaaaaaaaaaaaaaaaaaaaaaaaaaaaaaaaaa

SEQ ID NO: 19897 - RNA, 6113 nt, Artificial Sequence
  SARS-CoV-2__MT627395.1__non-structural protein 3 (NSP3) mRNA gc
aggagagucccgcagucggcguccagcggcucugcuuguucgugugugugucguugcaggccuuauucaagcuuaccauggcccccaccaaggugaccuucggcgacgacacggucaucgaggugcagggguacaagagcgugaacaucaccuucgagcuggacgagcgcaucgacaagguccucaacgagaagugcuccgccuacaccguggagcugggcaccgaggugaacgaguucgcgugcgucguggccgacgccgugaucaagacgcugcagccggucagcgagcuccugacccugcucgggaucgaccuggacgagugguccauggccaccuacuaccuguucgacgagagcggcgaguucaagcucgccucccacauguacugcagcuucuacccccccgacgaggacgaggaggagggggacugcgaggaggaggaguucgagcccuccacccaguacgaguacggcacggaggacgacuaccagggcaagccgcuggaguucggggcgaccagcgccgcccugcagcccgaggaggagcaggaggaggacuggcucgacgacgacucccagcagaccgugggccagcaggacgggagcgaggacaaccagaccacgaccauccagaccaucguggagguccagccccagcuggagauggagcugacccccguggugcagacgaucgaggucaacuccuucagcggcuaccucaagcugaccgacaacguguacaucaagaacgccgacaucguggaggaggcgaagaaggucaagccgaccgugguggucaacgccgccaacguguaccugaagcacgggggcggcguggccggggcccucaacaaggcgaccaacaacgccaugcaggucgaguccgacgacuacaucgccacgaacggcccccugaagguggggggcagcugcguccuguccggccacaaccucgccaagcacugccugcacgugguggggcccaacgucaacaagggcgaggacauccagcugcucaagagcgccuacgagaacuucaaccagcacgaggugcugcuggcgccccuccuguccgccgggaucuucggcgccgacccgauccacagccugcgggugugcgucgacaccgugcgcaccaacguguaccucgccgucuucgacaagaaccuguacgacaagcugguguccagcuuccucgagaugaagagcgagaagcagguggagcagaagaucgccgagauccccaaggaggaggucaagcccuucaucaccgaguccaagcccagcguggagcagcggaagcaggacgacaagaagaucaaggcgugcguggaggaggucacgaccacccuggaggagaccaaguuccugacggagaaccuccugcuguacaucgacaucaacgggaaccuccacccggacuccgccacccuggugagcgacaucgacaucaccuuccugaagaaggacgcccccuacaucgugggcgacgucgugcaggagggcgugcucaccgccgucgugauccccacgaagaaggccgggggcaccaccgagaugcuggcgaaggcccugcgcaaggugcccaccgacaacuacaucacgaccuacccggggcagggccucaacggguacaccgucgaggaggccaagaccgugcugaagaagugcaaguccgccuucuacauccugcccagcaucaucuccaacgagaagcaggagauccucggcaccgugagcuggaaccugcgggagaugcuggcgcacgccgaggagacgcgcaagcugaugcccgucugcguggagaccaaggccaucguguccaccauccagcggaaguacaagggcaucaagauccaggagggggucguggacuacggcgcccgcuucuacuucuacaccagcaagacgaccguggccucccucaucaacacccugaacgaccugaacgagacccucgucacgaugccccugggguacgugacccacggccugaaccucgaggaggcggcccgguacaugcgcagccugaaggugccggccaccgucuccgugagcucccccgacgccgugaccgccuacaacggguaccugacgagcuccagcaagacccccgaggagcacuucaucgagaccaucucccucgcgggcagcuacaaggacuggagcuacuccggccagagcacccagcuggggaucgaguuccugaagcggggcgacaaguccgucuacuacacgagcaaccccaccaccuuccaccucgacggggaggugaucaccuucgacaaccugaagacgcugcucucccugcgcgaggugcggaccaucaaggucuucaccaccguggacaacaucaaccugcacacgcagguggucgacaugagcaugaccuacggccagcaguucggcccgaccuaccucgacggggccgacgugaccaagaucaagccccacaacucccacgagggcaagacguucuacgugcugcccaacgacgacacccugcgcgucgaggccuucgaguacuaccacaccaccgacccgagcuuccucgggcgguacauguccgcccugaaccacacgaagaaguggaaguacccccaggugaacggccugaccagcaucaagugggccgacaacaacugcuaccucgcgaccgcccugcugacccuccagcagaucgagcugaaguucaacccccccgcccugcaggacgccuacuaccgcgcgcgggccggggaggccgccaacuucugcgcccucauccuggcguacugcaacaagacggugggcgagcugggcgacguccgcgagaccauguccuaccucuuccagcacgccaaccuggacagcugcaagcgggugcugaacgucgugugcaagaccugcgggcagcagcagaccacccucaagggcguggaggccgucauguacauggggacgcuguccuacgagcaguucaagaagggcgugcagaucccgugcaccugcgggaagcaggccaccaaguaccuggugcagcaggagagccccuucgucaugauguccgccccccccgcgcaguacgagcucaagcacggcaccuucacgugcgccagcgaguacaccggcaacuaccagugcgggcacuacaagcacaucaccuccaaggagacccuguacugcaucgacggcgcccugcucacgaagagcagcgaguacaaggggccgaucaccgacguguucuacaaggagaacuccuacaccaccacgaucaagcccgugaccuacaagcuggacggcgucgugugcaccgagaucgaccccaagcuggacaacuacuacaagaaggacaacagcuacuucaccgagcagcccaucgaccucgugccgaaccagcccuaccccaacgccuccuucgacaacuucaaguucgucugcgacaacaucaaguucgccgacgaccugaaccagcugacgggguacaagaagcccgcgagccgcgagcucaaggugaccuucuucccggaccugaacggcgacguggucgccaucgacuacaagcacuacacccccuccuucaagaagggcgccaagcugcuccacaagcccaucguguggcacgugaacaacgccaccaacaaggcgacguacaagcccaacaccuggugcauccggugccuguggagcaccaagccggucgagaccuccaacagcuucgacgugcugaaguccgaggacgcccaggggauggacaaccucgccugcgaggaccugaagcccgugagcgaggaggucguggagaaccccacgauccagaaggacgugcuggagugcaacgucaagaccaccgagguggugggcgacaucauccucaagcccgccaacaacucccugaagaucaccgaggaggucgggcacacggaccugauggccgcguacguggacaacagcucccucaccaucaagaagccgaacgagcugagccgcgugcugggccucaagacccuggccacccacgggcuggccgccgucaacuccgugcccugggacacgaucgccaacuacgcgaagcccuuccucaacaagguggucagcaccaccaccaacaucgugacgcgcugccugaaccgggugugcaccaacuacaugccguacuucuucacccugcuccugcagcugugcaccuucacccgcuccacgaacagccggaucaaggccuccaugcccaccaccaucgccaagaacaccgucaagagcgugggcaaguucugccucgaggccagcuucaacuaccugaagucccccaacuucagcaagcugaucaacaucaucaucugguuccuccugcuguccgugugccucggcagccugaucuacuccacggccgcgcuggggguccucaugagcaaccugggcaugcccuccuacugcaccggguaccgcgagggcuaccugaacagcaccaacgugaccaucgccacguacugcaucggcuccaucccgugcagcgugugccucuccgggcuggacagccuggacaccuaccccucccucgagaccauccagaucaccaucagcuccuucaagugggaccugacggccuucggccuggucgccgagugguuccucgccuacauccuguucacccgguucuucuacgugcuggggcucgcggccaucaugcagcuguucuucagcuacuucgccgugcacuucaucuccaacagcuggcugauguggcugaucaucaaccucguccagauggcccccaucuccgcgauggugcgcauguacaucuucuucgccagcuucuacuacguguggaagagcuacguccacgugguggacggcugcaacuccagcaccugcaugaugugcuacaagcggaaccgcgccacccgggucgagugcacgaccaucgugaacgggguccgccgguccuucuacguguacgccaacggcggcaagggguucugcaagcugcacaacuggaacugcgugaacugcgacaccuucugcgccggcagcaccuucaucuccgacgaggucgcgcgcgaccugagccuccaguucaagcggcccaucaacccgacggaccaguccagcuacaucguggacuccgugaccgucaagaacgggagcauccaccuguacuucgacaaggccggccagaagaccuacgagcgccacucccugagccacuucgugaaccucgacaaccugcgggccaacaacaccaaggggucccugcccaucaacgugaucgucuucgacggcaagagcaagugcgaggaguccagcgccaaguccgccagcguguacuacucccagcucaugugccagcccauccugcugcucgaccaggcgcuggugagcgacgucggcgacagcgccgagguggccgugaagauguucgacgccuacgucaacacguucuccagcaccuucaacgugcccauggagaagcugaagacccucguggccaccgcggaggccgagcuggccaagaacgucucccuggacaacgugcucagcacguucaucuccgccgcgcgccagggguucguggacagcgacgucgagaccaaggacgugguggagugccugaagcugucccaccagagcgacaucgaggucaccggcgacuccugcaacaacuacaugcucaccuacaacaagguggagaacaugacgccgcgggaccugggggccugcaucgacugcagcgcccgccacaucaacgcccagguggccaagucccacaacaucgcgcugaucuggaacgucaaggacuucaugagccucuccgagcagcugcggaagcagauccgcagcgccgccaagaagaacaaccugcccuucaagcucaccugcgccaccacccgccagguggugaacgucgugacgaccaagaucgcccugaagggcgggugaggacuagucccuguucccagagcccacuuuuuuuucuuuuuuugaaauaaaauagccugucuuucagaucucaaaggcucuuuucagagccaccaaaaaaaaaaaaaaaaaaaaaaaaaaaaaaaaaaaaaaaaaaaaaaaaaaaaaaaaaaaaaaaaaaaaaaaaaaaaaaaaaaaaaaaaaaaaaaaaaaaaa

SEQ ID NO: 19898 - RNA, 6113 nt, Artificial Sequence
  SARS-CoV-2__MT678839.1__non-structural protein 3 (NSP3) mRNA gc
aggagagucccgcagucggcguccagcggcucugcuuguucgugugugugucguugcaggccuuauucaagcuuaccauggcccccaccaaggugaccuucggcgacgacacggucaucgaggugcagggguacaagagcgugaacaucaccuucgagcuggacgagcgcaucgacaagguccucaacgagaagugcuccgccuacaccguggagcugggcaccgaggugaacgaguucgcgugcgucguggccgacgccgugaucaagacgcugcagccggucagcgagcuccugaccccccuggggaucgaccucgacgagugguccauggccaccuacuaccuguucgacgagagcggcgaguucaagcuggccucccacauguacugcagcuucuacccccccgacgaggacgaggaggagggggacugcgaggaggaggaguucgagccguccacccaguacgaguacggcacggaggacgacuaccagggcaagccccucgaguucggggcgaccagcgccgcccugcagcccgaggaggagcaggaggaggacuggcuggacgacgacucccagcagaccgugggccagcaggacgggagcgaggacaaccagaccacgaccauccagaccaucguggagguccagccccagcucgagauggagcugaccccgguggugcagacgaucgaggucaacuccuucagcggcuaccugaagcucaccgacaacguguacaucaagaacgccgacaucguggaggaggcgaagaaggucaagcccaccgugguggucaacgccgccaacguguaccugaagcacgggggcggcguggccggggcccugaacaaggcgaccaacaacgccaugcaggucgaguccgacgacuacaucgccacgaacggcccccucaagguggggggcagcugcguccuguccggccacaaccuggccaagcacugccuccacgugguggggcccaacgucaacaagggcgaggacauccagcugcugaagagcgccuacgagaacuucaaccagcacgaggugcuccuggcgccgcugcucuccgccgggaucuucggcgccgaccccauccacagccugcgggugugcgucgacaccgugcgcaccaacguguaccuggccgucuucgacaagaaccucuacaacaagcugguguccagcuuccuggagaugaagagcgagaagcagguggagcagaagaucgccgagauccccaaggaggaggucaagcccuucaucaccgaguccaagccgagcguggagcagcggaagcaggacgacaagaagaucaaggcgugcguggaggaggucacgaccacccucgaggagaccaaguuccugacggagaaccugcuccuguacaucgacaucaacgggaaccugcaccccgacuccgccacccucgugagcgacaucgacaucaccuuccugaagaaggacgcccccuacaucgugggcgacgucgugcaggagggcgugcugaccgccgucgugauccccacgaagaaggccgggggcaccaccgagaugcucgcgaaggcccugcgcaaggugccgaccgacaacuacaucacgaccuaccccgggcagggccugaacggguacaccgucgaggaggccaagaccgugcucaagaagugcaaguccgccuucuacauccugcccagcaucaucuccaacgagaagcaggagauccugggcaccgugagcuggaaccuccgggagaugcuggcgcacgccgaggagacgcgcaagcugaugcccgucugcguggagaccaaggccaucguguccaccauccagcggaaguacaagggcaucaagauccaggagggggucguggacuacggcgcccgcuucuacuucuacaccagcaagacgaccguggccucccugaucaacacccucaacgaccugaacgagacccuggucacgaugccgcucggguacgugacccacggccugaaccuggaggaggcggcccgguacaugcgcagccucaaggugcccgccaccgucuccgugagcucccccgacgccgugaccgccuacaacggguaccugacgagcuccagcaagacccccgaggagcacuucaucgagaccaucucccuggcgggcagcuacaaggacuggagcuacuccggccagagcacccagcucgggaucgaguuccugaagcggggcgacaaguccgucuacuacacgagcaacccgaccaccuuccaccuggacggggaggugaucaccuucgacaaccucaagacgcugcugucccuccgcgaggugcggaccaucaaggucuucaccaccguggacaacaucaaccugcacacgcagguggucggcaugagcaugaccuacggccagcaguucgggcccaccuacuucgacggcgccgacgugaccaagaucaagccccacaacucccacgaggggaagacguucuacgugcugccgaacgacgacacccuccgcgucgaggccuucgaguacuaccacaccaccgaccccagcuuccugggccgguacauguccgcccugaaccacacgaagaaguggaaguacccccaggugaacgggcucaccagcaucaagugggccgacaacaacugcuaccuggcgaccgcccugcucacccugcagcagaucgagcugaaguucaaccccccggcccuccaggacgccuacuaccgcgcgcgggccggcgaggccgccaacuucugcgcccugauccuggcguacugcaacaagacggugggcgagcucggggacguccgcgagaccauguccuaccuguuccagcacgccaaccuggacagcugcaagcgggugcucaacgucgugugcaagaccugcggccagcagcagaccacccugaaggggguggaggccgucauguacaugggcacgcuguccuacgagcaguucaagaagggggugcagauccccugcaccugcggcaagcaggccaccaaguaccucgugcagcaggagagccccuucgucaugauguccgcccccccggcgcaguacgagcugaagcacggcaccuucacgugcgccagcgaguacaccgggaacuaccagugcggccacuacaagcacaucaccuccaaggagacccuguacugcaucgacggggcccuccugacgaagagcagcgaguacaagggccccaucaccgacguguucuacaaggagaacuccuacaccaccacgaucaagcccgugaccuacaagcuggacggggucgugugcaccgagaucgaccccaagcucgacaacuacuacaagaaggacaacagcuacuucaccgagcagccgaucgaccuggugcccaaccagcccuaccccuccgccagcuucgacaacuucaaguucgucugcgacaacaucaaguucgccgacgaccugaaccagcucacgggcuacaagaagccggcgucccgcgagcugaaggugaccuucuuccccgaccugaacggcgacguggucgccaucgacuacaagcacuacacccccagcuucaagaagggggccaagcuccugcacaagcccaucguguggcacgugaacaacgccaccaacaaggcgacguacaagccgaacaccuggugcauccggugccugugguccaccaagcccgucgagaccagcaacuccuucgacgugcucaagagcgaggacgcccagggcauggacaaccuggccugcgaggaccugaagcccguguccgaggaggucguggagaaccccacgauccagaaggacgugcucgagugcaacgucaagaccaccgagguggugggggacaucauccugaagccggccaacaacagccugaagaucaccgaggaggucggccacacggaccucauggccgcguacguggacaacuccagccugaccaucaagaagcccaacgagcugucccgcgugcucgggcugaagacccuggccacccacggccucgccgccgucaacagcgugcccugggacacgaucgccaacuacgcgaagccguuccugaacaagguggucuccaccaccaccaacaucgugacgcgcugccugaaccgggugugcaccaacuacaugcccuacuucuucacccuccugcugcagcucugcaccuucacccgcagcacgaacucccggaucaaggccagcaugcccaccaccaucgccaagaacaccgucaagagcgugggcaaguucugccuggaggccuccuucaacuaccugaagagccccaacuucuccaagcucaucaacaucaucaucugguuccugcugcucagcgugugccuggggucccugaucuacagcacggccgcgcucggcguccugauguccaaccuggggaugccgagcuacugcaccggcuaccgcgagggcuaccucaacuccaccaacgugaccaucgccacguacugcaccgggagcauccccugcuccgugugccugagcggccuggacucccucgacaccuaccccagccuggagaccauccagaucacgaucuccagcuucaagugggaccugaccgccuucgggcucgucgccgagugguuccuggccuacauccuguucacccgguucuucuacgugcucggccuggcggccaucaugcagcuguucuucuccuacuucgccgugcacuucaucagcaacuccuggcucauguggcugaucaucaaccuggcccagauggcgcccaucagcgccaugguccgcauguacaucuucuucgccagcuucuacuacguguggaaguccuacgugcacgucguggacgggugcaacagcuccaccugcaugaugugcuacaagcggaaccgcgccacgcggguggagugcaccaccaucgucaacggcgugcgccggagcuucuacgucuacgccaacggcgggaagggcuucugcaagcugcacaacuggaacugcgugaacugcgacaccuucugcgcgggguccacguucaucagcgacgagguggcccgcgaccucucccugcaguucaagcggccgaucaaccccaccgaccagagcuccuacaucgucgacagcgugaccgugaagaacggcuccauccaccuguacuucgacaaggccgggcagaagaccuacgagcgccacagccucucccacuucgucaaccuggacaaccugcgggccaacaacacgaagggcagccuccccaucaacgugaucguguucgacggcaaguccaagugcgaggagagcuccgccaagagcgcguccgucuacuacagccagcugaugugccagcccauccugcuccuggaccaggcccuggugagcgacgugggggacuccgccgaggucgccgugaagauguucgacgccuacgugaacaccuucagcuccaccuucaacgucccgauggagaagcucaagacccugguggcgacggccgaggccgagcuggccaagaacgugagccucgacaacguccuguccaccuucaucagcgcggcccgccagggcuucguggacuccgacguggagaccaaggacgucguggagugccugaagcucagccaccaguccgacaucgaggugaccggggacagcugcaacaacuacaugcugacguacaacaaggucgagaacaugaccccccgggaccugggcgccugcaucgacugcuccgcccgccacaucaacgcccagguggcgaagagccacaacaucgcccucaucuggaacgugaaggacuucaugucccugagcgagcagccccggaagcagauccgcuccgccgccaagaagaacaaccugcccuucaagcucaccugcgccaccacgcgccaggucgugaacgcggugaccaccaagaucgcccugaaggggggcugaggacuagucccuguucccagagcccacuuuuuuuucuuuuuuugaaauaaaauagccugucuuucagaucucaaaggcucuuuucagagccaccaaaaaaaaaaaaaaaaaaaaaaaaaaaaaaaaaaaaaaaaaaaaaaaaaaaaaaaaaaaaaaaaaaaaaaaaaaaaaaaaaaaaaaaaaaaaaaaaaaaaa

SEQ ID NO: 19899 - RNA, 6113 nt, Artificial Sequence
  SARS-CoV-2__MT679161.1__non-structural protein 3 (NSP3) mRNA gc
aggagagucccgcagucggcguccagcggcucugcuuguucgugugugugucguugcaggccuuauucaagcuuaccauggcccccaccaaggugaccuucggcgacgacacggucaucgaggugcagggguacaagagcgugaacaucaccuucgagcuggacgagcgcaucgacaagguccucaacgagaagugcuucgccuacaccguggagcugggcaccgaggugaacgaguucgcgugcgucguggccgacgccgugaucaagacgcugcagccggucuccgagcuccugaccccccuggggaucgaccucgacgaguggagcauggccaccuacuaccuguucgacgaguccggcgaguucaagcuggccagccacauguacugcuccuucuacccccccgacgaggacgaggaggagggggacugcgaggaggaggaguucgagccgagcacccaguacgaguacggcacggaggacgacuaccagggcaagccccucgaguucggggcgaccuccgccgcccugcagcccgaggaggagcaggaggaggacuggcuggacgacgacagccagcagaccgugggccagcaggacggguccgaggacaaccagaccacgaccauccagaccaucguggagguccagccccagcucgagauggagcugaccccgguggugcagacgaucgaggucaacagcuucuccggcuaccugaagcucaccgacaacguguacaucaagaacgccgacaucguggaggaggcgaagaaggucaagcccaccgugguggucaacgccgccaacguguaccugaagcacgggggcggcguggccggggcccugaacaaggcgaccaacaacgccaugcaggucgagagcgacgacuacaucgccacgaacggcccccucaagguggggggcuccugcguccugagcggccacaaccuggccaagcacugccuccacgugguggggcccaacgucaacaagggcgaggacauccagcugcugaaguccgccuacgagaacuucaaccagcacgaggugcuccuggcgccgcugcucagcgccgggaucuucggcgccgaccccauccacucccugcgggugugcgucgacaccgugcgcaccaacguguaccuggccgucuucgacaagaaccucuacgacaagcuggugagcuccuuccuggagaugaagagcgagaagcagguggagcagaagaucgccgagauccccaaggaggaggucaagcccuucaucaccgagagcaagccguccguggagcagcggaagcaggacgacaagaagaucaaggcgugcguggaggaggucacgaccacccucgaggagaccaaguuccugacggagaaccugcuccuguacaucgacaucaacgggaaccugcaccccgacagcgccacccucguguccgacaucgacaucaccuuccugaagaaggacgcccccuacaucgugggcgacgucgugcaggagggcgugcugaccgccgucgugauccccacgaagaaggccgggggcaccaccgagaugcucgcgaaggcccugcgcaaggugccgaccgacaacuacaucacgaccuaccccgggcagggccugaacggguacaccgucgaggaggccaagaccgugcucaagaagugcaagagcgccuucuacauccugcccuccaucaucagcaacgagaagcaggagauccugggcaccguguccuggaaccuccgggagaugcuggcgcacgccgaggagacgcgcaagcugaugcccgucugcguggagaccaaggccaucgugagcaccauccagcggaaguacaagggcaucaagauccaggagggggucguggacuacggcgcccgcuucuacuucuacaccuccaagacgaccguggccagccugaucaacacccucaacgaccugaacgagacccuggucacgaugccgcucggguacgugacccacggccugaaccuggaggaggcggcccgguacaugcgcucccucaaggugcccgccaccgucagcguguccagccccgacgccgugaccgccuacaacggguaccugacguccagcuccaagacccccgaggagcacuucaucgagaccaucagccuggcgggcuccuacaaggacuggagcuacagcggccaguccacccagcucgggaucgaguuccugaagcggggcgacaagagcgucuacuacacguccaacccgaccaccuuccaccuggacggggaggugaucaccuucgacaaccucaagacgcugcugagccuccgcgaggugcggaccaucaaggucuucaccaccguggacaacaucaaccugcacacgcagguggucgacauguccaugaccuacggccagcaguucggccccaccuaccuggacggggccgacgugaccaagaucaagccccacaacagccacgagggcaagacguucuacgugcucccgaacgacgacacccugcgcgucgaggccuucgaguacuaccacaccaccgaccccuccuuccuggggcgguacaugagcgcccucaaccacacgaagaaguggaaguacccccaggugaacggccugaccuccaucaagugggccgacaacaacugcuaccuggcgaccgcccuccugacccugcagcagaucgagcucaaguucaaccccccggcccugcaggacgccuacuaccgcgcgcgggccggggaggccgccaacuucugcgcccugauccucgcguacugcaacaagacggugggcgagcugggcgacguccgcgagaccaugagcuaccuguuccagcacgccaaccucgacuccugcaagcgggugcugaacgucgugugcaagaccugcgggcagcagcagaccacccugaagggcguggaggccgucauguacauggggacgcucagcuacgagcaguucaagaagggcgugcagauccccugcaccugcgggaagcaggccaccaaguaccuggugcagcaggagucccccuucgucaugaugagcgcccccccggcgcaguacgagcugaagcacggcaccuucacgugcgccuccgaguacaccggcaacuaccagugcgggcacuacaagcacaucaccagcaaggagacccucuacugcaucgacggcgcccugcugacgaaguccagcgaguacaaggggcccaucaccgacguguucuacaaggagaacagcuacaccaccacgaucaagcccgugaccuacaagcucgacggcgucgugugcaccgagaucgaccccaagcuggacaacuacuacaagaaggacaacuccuacuucaccgagcagccgaucgaccuggugcccaaccagcccuaccccaacgccagcuucgacaacuucaaguucgucugcgacaacaucaaguucgccgacgaccucaaccagcugacgggguacaagaagccggcgucccgcgagcugaaggugaccuucuuccccgaccucaacggcgacguggucgccaucgacuacaagcacuacacccccagcuucaagaagggcgccaagcugcugcacaagcccaucguguggcacgugaacaacgccaccaacaaggcgacguacaagccgaacaccuggugcauccggugccucugguccaccaagcccgucgagaccagcaacuccuucgacgugcugaagagcgaggacgcccaggggauggacaaccuggccugcgaggaccucaagcccguguccgaggaggucguggagaaccccacgauccagaaggacgugcuggagugcaacgucaagaccaccgagguggugggcgacaucauccugaagccggccaacaacagccucaagaucaccgaggaggucgggcacacggaccugauggccgcguacguggacaacuccagccugaccaucaagaagcccaacgagcucucccgcgugcugggccugaagacccucgccacccacgggcuggccgccgucaacagcgugcccugggacacgaucgccaacuacgcgaagccguuccugaacaagguggucuccaccaccaccaacaucgugacgcgcugccucaaccgggugugcaccaacuacaugcccuacuucuucacccugcugcuccagcugugcaccuucacccgcagcacgaacucccggaucaaggccagcaugcccaccaccaucgccaagaacaccgucaaguccgugggcaaguucugccuggaggccagcuucaacuaccucaagagccccaacuucuccaagcugaucaacaucaucaucugguuccugcuccugagcgugugccugggcucccucaucuacagcacggccgcgcuggggguccugauguccaaccucggcaugccgagcuacugcaccggguaccgcgagggcuaccugaacuccaccaacgugaccaucgccacguacugcaccggcagcauccccugcuccgugugccugagcgggcucgacucccuggacaccuaccccagccuggagaccauccagaucacgaucuccagcuucaagugggaccucaccgccuucggccuggucgccgagugguuccuggccuacauccucuucacccgguucuucuacgugcuggggcuggcggccaucaugcagcucuucuucuccuacuucgccgugcacuucaucagcaacuccuggcugauguggcugaucaucaaccugguccagauggcccccaucagcgcgauggugcgcauguacaucuucuucgccuccuucuacuacguguggaagagcuacguccacgugguggacggcugcaacagcuccaccugcaugaugugcuacaagcggaaccgcgccacgcgggucgagugcaccaccaucgugaacgggguccgccggagcuucuacguguacgccaacggcggcaagggguucugcaagcuccacaacuggaacugcgugaacugcgacaccuucugcgccggcuccacguucaucagcgacgaggucgcgcgcgaccugucccugcaguucaagcggccgaucaaccccaccgaccagagcuccuacaucguggacagcgugaccgucaagaacggguccauccaccucuacuucgacaaggccggccagaagaccuacgagcgccacagccugucccacuucgugaaccuggacaaccuccgggccaacaacacgaaggggagccugcccaucaacgugaucgucuucgacggcaaguccaagugcgaggagagcuccgccaagagcgccuccguguacuacagccagcugaugugccagcccauccuccugcuggaccaggcgcucguguccgacgucggcgacagcgccgagguggccgugaagauguucgacgccuacgucaacaccuucagcuccaccuucaacgugccgauggagaagcugaagacccugguggccacggcggaggccgagcucgccaagaacgucagccuggacaacgugcuguccaccuucaucagcgccgcgcgccagggguucguggacuccgacgucgagaccaaggacgugguggagugccucaagcugagccaccaguccgacaucgaggucaccggcgacagcugcaacaacuacaugcugacguacaacaagguggagaacaugaccccccgggaccucggggccugcaucgacugcuccgcccgccacaucaacgcccagguggccaagagccacaacaucgcgcugaucuggaacgucaaggacuucaugucccugagcgagcagcuccggaagcagauccgcuccgccgccaagaagaacaaccugcccuucaagcugaccugcgccaccacgcgccagguggugaacgucgugaccaccaagaucgcccucaagggcgggugaggacuagucccuguucccagagcccacuuuuuuuucuuuuuuugaaauaaaauagccugucuuucagaucucaaaggcucuuuucagagccaccaaaaaaaaaaaaaaaaaaaaaaaaaaaaaaaaaaaaaaaaaaaaaaaaaaaaaaaaaaaaaaaaaaaaaaaaaaaaaaaaaaaaaaaaaaaaaaaaaaaaa

SEQ ID NO: 19900 - RNA, 6113 nt, Artificial Sequence
  SARS-CoV-2__MT679198.1__non-structural protein 3 (NSP3) mRNA gc
aggagagucccgcagucggcguccagcggcucugcuuguucgugugugugucguugcaggccuuauucaagcuuaccauggcccccaccaaggugaccuucggcgacgacacggucaucgaggugcagggguacaagagcgugaacaucaccuucgagcuggacgagcgcaucgacaagguccucaacgagaagugcuccgccuacaccguggagcugggcaccgaggugaacgaguucgcgugcgucguggccgacgccgugaucaagacgcugcagccggucagcgagcuccugaccccccuggggaucgaccucgacgagugguccauggccaccuacuaccuguucgacgagagcggcgaguucaagcuggccucccacauguacugcagcuucuacccccccgacgaggacgaggaggagggggacugcgaggaggaggaguucgagccguccacccaguacgaguacggcacggaggacgacuaccagggcaagccccucgaguucggggcgaccagcgccgcccugcagcccgaggaggagcaggaggaggacuggcuggacgacgacucccagcagaccgugggccagcaggacgggagcgaggacaaccagaccacgaccauccagaccaucguggagguccagccccagcucgagauggagcugaccccgguggugcagacgaucgaggucaacuccuucagcggcuaccugaagcucaccgacaacguguacaucaagaacgccgacaucguggaggaggcgaagaaggucaagcccaccgugguggucaacgccgccaacguguaccugaagcacgggggcggcguggccggggcccugaacaaggcgaccaacaacgccaugcaggucgaguccgacgacuacaucgccacgaacggcccccucaagguggggggcagcugcguccuguccggccacaaccuggccaagcacugccuccacgugguggggcccaacgucaacaagggcgaggacauccagcugcugaagagcgccuacgagaacuucaaccagcacgaggugcuccuggcgccgcugcucuccgccgggaucuucggcgccgaccccauccacagccugcgggugugcgucgacaccgugcgcaccaacguguaccuggccgucuucgacaagaaccucuacgacaagcugguguccagcuuccuggagaugaagagcgagaagcagguggagcagaagaucgccgagauccccaaggaggaggucaagcccuucaucaccgaguccaagccgagcguggagcagcggaagcaggacgacaagaagaucaaggcgugcguggaggaggucacgaccacccucgaggagaccaaguuccugacggagaaccugcuccuguacaucgacaucaacgggaaccugcaccccgacuccgccacccucgugagcgacaucgacaucaccuuccugaagaaggacgcccccuacaucgugggcgacgucgugcaggagggcgugcugaccgccgucgugauccccacgaagaaggccgggggcaccaccgagaugcucgcgaaggcccugcgcaaggugccgaccgacaacuacaucacgaccuaccccgggcagggccugaacggguacaccgucgaggaggccaagaccgugcucaagaagugcaaguccgccuucuacauccugcccagcaucaucuccaacgagaagcaggagauccugggcaccgugagcuggaaccuccgggagaugcuggcgcacgccgaggagacgcgcaagcugaugcccgucugcguggagaccaaggccaucguguccaccauccagcggaaguacaagggcaucaagauccaggagggggucguggacuacggcgcccgcuucuacuucuacaccagcaaggccacgguggcgucccugaucaacacccucaacgaccugaacgagacccuggucaccaugccgcucggguacgugacgcacggccugaaccuggaggaggccgcccgguacaugcgcagccucaaggugcccgccaccgucuccgugagcucccccgacgccgugaccgcguacaacggguaccugaccagcuccagcaagacgcccgaggagcacuucaucgagaccaucucccuggccggcagcuacaaggacuggagcuacuccggccagagcacccagcucgggaucgaguuccugaagcggggcgacaaguccgucuacuacaccagcaacccgacgaccuuccaccuggacggggaggugaucaccuucgacaaccucaagacccugcugucccuccgcgaggugcggacgaucaaggucuucaccaccguggacaacaucaaccugcacacccagguggucgacaugagcaugacguacggccagcaguucggccccaccuaccuggacggggccgacgugaccaagaucaagccccacaacucccacgagggcaagaccuucuacgugcucccgaacgacgacacgcugcgcgucgaggccuucgaguacuaccacaccaccgaccccagcuuccuggggcgguacauguccgcccucaaccacaccaagaaguggaaguacccccaggugaacggccugacgagcaucaagugggcggacaacaacugcuaccuggccaccgcccuccugacccugcagcagaucgagcucaaguucaaccccccggcccugcaggacgcguacuaccgcgcccgggccggggaggccgccaacuucugcgcgcugauccucgccuacugcaacaagaccgugggcgagcugggcgacguccgcgagacgauguccuaccuguuccagcacgccaaccucgacagcugcaagcgggugcugaacgucgugugcaagaccugcgggcagcagcagaccacccugaagggcguggaggccgucauguacauggggacccucuccuacgagcaguucaagaagggcgugcagauccccugcacgugcgggaagcaggccaccaaguaccuggugcagcaggagagccccuucgucaugauguccgcgcccccggcccaguacgagcugaagcacggcaccuucaccugcgccagcgaguacacgggcaacuaccagugcgggcacuacaagcacaucaccuccaaggagacccucuacugcaucgacggcgcccugcugaccaagagcagcgaguacaaggggcccaucacggacguguucuacaaggagaacuccuacaccaccaccaucaagcccgugacguacaagcucgacggcgucgugugcaccgagaucgaccccaagcuggacaacuacuacaagaaggacaacagcuacuucaccgagcagccgaucgaccuggugcccaaccagcccuaccccaacgccuccuucgacaacuucaaguucgucugcgacaacaucaaguucgcggacgaccucaaccagcugaccggguacaagaagccggccagccgcgagcugaaggugacguucuuccccgaccucaacggcgacguggucgccaucgacuacaagcacuacacccccuccuucaagaagggcgccaagcugcugcacaagcccaucguguggcacgugaacaacgcgaccaacaaggccaccuacaagccgaacacguggugcauccggugccucuggagcaccaagcccgucgagaccuccaacagcuucgacgugcugaaguccgaggacgcccaggggauggacaaccuggccugcgaggaccucaagcccgugagcgaggaggucguggagaaccccaccauccagaaggacgugcuggagugcaacgucaagacgaccgagguggugggcgacaucauccugaagccggccaacaacucccucaagaucaccgaggaggucgggcacaccgaccugauggcggccuacguggacaacagcucccugacgaucaagaagcccaacgagcucagccgcgugcugggccugaagacccucgccacccacgggcuggccgccgucaacuccgugcccugggacaccaucgcgaacuacgccaagccguuccugaacaagguggucagcacgaccaccaacaucgugacccgcugccucaaccgggugugcacgaacuacaugcccuacuucuucacccugcugcuccagcugugcaccuucacccgcuccaccaacagccggaucaaggccuccaugcccacgaccaucgccaagaacaccgucaagagcgugggcaaguucugccuggaggccagcuucaacuaccucaagucccccaacuucagcaagcugaucaacaucaucaucugguuccugcuccuguccgugugccugggcagccucaucuacuccaccgcggcccuggggguccugaugagcaaccucggcaugccguccuacugcacgggguaccgcgagggcuaccugaacagcaccaacgugaccaucgccaccuacugcacgggcuccauccccugcagcgugugccuguccgggcucgacagccuggacaccuaccccucccuggagaccauccagaucaccaucagcuccuucaagugggaccucacggccuucggccuggucgccgagugguuccuggcguacauccucuucacccgguucuucuacgugcuggggcuggccgccaucaugcagcucuucuucagcuacuucgccgugcacuucaucuccaacagcuggcugauguggcugaucaucaaccugguccagauggcgcccaucuccgccauggugcgcauguacaucuucuucgccagcuucuacuacguguggaagagcuacguccacgugguggacggcugcaacuccagcaccugcaugaugugcuacaagcggaaccgcgccacccgggucgagugcacgaccaucgugaacgggguccgccgguccuucuacguguacgccaacggcggcaagggguucugcaagcuccacaacuggaacugcgugaacugcgacaccuucugcgcgggcagcaccuucaucuccgacgaggucgcccgcgaccugagccugcaguucaagcggccgaucaaccccacggaccaguccagcuacaucguggacuccgugaccgucaagaacgggagcauccaccucuacuucgacaaggccggccagaagaccuacgagcgccacucccugagccacuucgugaaccuggacaaccuccgggccaacaacaccaaggggucccugcccaucaacgugaucgucuucgacggcaagagcaagugcgaggaguccagcgccaaguccgcgagcguguacuacucccagcugaugugccagcccauccuccugcuggaccaggcccucgugagcgacgucggcgacagcgccgagguggccgugaagauguucgacgccuacgucaacacguucuccagcaccuucaacgugccgauggagaagcugaagacccugguggcgaccgccgaggccgagcucgccaagaacgucucccuggacaacgugcugagcacguucaucuccgcggcccgccagggguucguggacagcgacgucgagaccaaggacgugguggagugccucaagcugucccaccagagcgacaucgaggucaccggcgacuccugcaacaacuacaugcugaccuacaacaagguggagaacaugacgccccgggaccucggggccugcaucgacugcagcgcccgccacaucaacgcccagguggcgaagucccacaacaucgcccugaucuggaacgucaaggacuucaugagccuguccgagcagcuccggaagcagauccgcagcgccgccaagaagaacaaccugcccuucaagcugaccugcgccaccacccgccagguggugaacgucgugacgaccaagaucgcgcucaagggcgggugaggacuagucccuguucccagagcccacuuuuuuuucuuuuuuugaaauaaaauagccugucuuucagaucucaaaggcucuuuucagagccaccaaaaaaaaaaaaaaaaaaaaaaaaaaaaaaaaaaaaaaaaaaaaaaaaaaaaaaaaaaaaaaaaaaaaaaaaaaaaaaaaaaaaaaaaaaaaaaaaaaaaa

SEQ ID NO: 19901 - RNA, 6113 nt, Artificial Sequence
  SARS-CoV-2__MT680218.1__non-structural protein 3 (NSP3) mRNA gc
aggagagucccgcagucggcguccagcggcucugcuuguucgugugugugucguugcaggccuuauucaagcuuaccauggcccccaccaaggugaccuucggcgacgacacggucaucgaggugcagggguacaagagcgugaacaucaccuucgagcuggacgagcgcaucgacaagguccucaacgagaagugcuccgccuacaccguggagcugggcaccgaggugaacgaguucgcgugcgucguggccgacgccgugaucaagacgcugcagccggucagcgagcuccugaccccccuggggaucgaccucgacgagugguccauggccaccuacuaccuguucgacgagagcggcgaguucaagcuggccucccacauguacugcagcuucuacccccccgacgaggacgaggaggagggggacugcgaggaggaggaguucgagccguccacccaguacgaguacggcacggaggacgacuaccagggcaagccccucgaguucggggcgaccagcgccgcccugcagcccgaggaggagcaggaggaggacuggcuggacgacgacucccagcagaccgugggccagcaggacgggagcgaggacaaccagaccacgaccauccagaccaucguggagguccagccccagcucgagauggagcugaccccgguggugcagacgaucgaggucaacuccuucagcggcuaccugaagcucaccgacaacguguacaucaagaacgccgacaucguggaggaggcgaagaaggucaagcccaccgugguggucaacgccgccaacguguaccugaagcacgggggcggcguggccggggcccugaacaaggcgaccaacaacgccaugcaggucgaguccgacgacuacaucgccacgaacggcccccucaagguggggggcagcugcguccuguccggccacaaccuggccaagcacugccuccacgugguggggcccaacgucaacaagggcgaggacauccagcugcugaagagcgccuacgagaacuucaaccagcacgaggugcuccuggcgccgcugcucuccgccgggaucuucggcgccgaccccauccacagccugcgggugugcgucgacaccgugcgcaccaacguguaccuggccgucuucgacaagaaccucuacgacaagcugguguccagcuuccuggagaugaagagcgagaagcagguggagcagaagaucgccgagauccccaaggaggaggucaagcccuucaucaccgaguccaagccgagcguggagcagcggaagcaggacgacaagaagaucaaggcgugcguggaggaggucacgaccacccucgaggagaccaaguuccugacggagaaccugcuccuguacaucgacaucaacgggaaccugcaccccgacuccgccacccucgugagcgacaucgacaucaccuuccugaagaaggacgcccccuacaucgugggcgacgucgugcaggagggcgugcugaccgccgucgugauccccacgaagaaggccgggggcaccaccgagaugcucgcgaaggcccugcgcaaggugccgaccgacaacuacaucacgaccuaccccgggcagggccugaacggguacaccgucgaggaggccaagaccgugcucaagaagugcaaguccgccuucuacauccugcccagcaucaucuccaacgagaagcaggagauccugggcaccgugagcuggaaccuccgggagaugcuggcgcacgccgaggagacgcgcaagcugaugcccgucugcguggagaccaaggccaucguguccaccauccagcggaaguacaagggcaucaagauccaggagggggucguggacuacggcgcccgcuucuacuucuacaccagcaagacgaccguggccucccugaucaacacccucaacgaccugaacgagacccuggucacgaugccgcucggguacgugacccacggccugaaccuggaggaggcggcccgguacaugcgcagccucaaggugcccgccaccgucuccgugagcucccccgacgccgugaccgccuacaacggguaccugacgagcuccagcaagacccccgaggagcacuucaucgagaccaucucccuggcgggcagcuacaaggacuggagcuacuccggccagagcacccagcucgggaucgaguuccugaagcggggcgacaaguccgucuacuacacgagcaacccgaccaccuuccaccuggacggggaggugaucaccuucgacaaccucaagacgcugcugucccuccgcgaggugcggaccaucaaggucuucaccaccguggacaacaucaaccugcacacgcagguggucgacaugagcaugaccuacggccagcaguucggccccaccuaccuggacggggccgacgugaccaagaucaagccccacaacucccacgagggcaagacguucuacgugcucccgaacgacgacacccugcgcgucgaggccuucgaguacuaccacaccaccgaccccagcuuccuggggcgguacauguccgcccucaaccacacgaagaaguggaaguacccccaggugaacggccugaccagcaucaagugggccgacaacaacugcuaccuggcgaccgcccuccugacccugcagcagaucgagcucaaguucaaccccccggcccugcaggacgccuacuaccgcgcgcgggccggggaggccgccaacuucugcgcccugauccucgcguacugcaacaagacggugggcgagcugggcgacguccgcgagaccauguccuaccuguuccagcacgccaaccucgacagcugcaagcgggugcugaacgucgugugcaagaccugcgggcagcagcagaccacccugaagggcguggaggccgucauguacauggggacgcucuccuacgagcaguucaagaagggcgugcagauccccugcaccugcgggaagcaggccaccaaguaccuggugcagcaggagagccccuucgucaugauguccgcccccccggcgcaguacgagcugaagcacggcaccuucacgugcgccagcgaguacaccggcaacuaccagugcgggcacuacaagcacaucaccuccaaggagacccucuacugcaucgacggcgcccugcugacgaagagcagcgaguacaaggggcccaucaccgacguguucuacaaggagaacuccuacaccaccacgaucaagcccgugaccuacaagcucgacggcgucgugugcaccgagaucgaccccaagcuggacaacuacuacaagaaggacaacagcuacuucaccgagcagccgaucgaccuggugcccaaccagcccuaccccaacgccuccuucgacaacuucaaguucgucugcgacaacaucaaguucgccgacgaccucaaccagcugacgggguacaagaagccggcgagccgcgagcugaaggugaccuucuuccccgaccucaacggcgacguggucgccaucgacuacaagcacuacacccccuccuucaagaagggcgccaagcugcugcacaagcccaucguguggcacgugaacaacgccaccaacaaggcgacguacaagccgaacaccuggugcauccggugccucuggagcaccaagcccgucgagaccuccaacagcuucgacgugcugaaguccgaggacgcccaggggauggacaaccuggccugcgaggaccucaagcccgugagcgaggaggucguggagaaccccacgauccagaaggacgugcuggagugcaacgucaagaccaccgagguggugggcgacaucauccugaagccggccaacaucaagaucaccgaggaggucgggcacacggaccucauggccgcguacguggacaacuccagccugaccaucaagaagcccaacgagcugucccgcgugcucggccugaagacccuggccacccacgggcucgccgccgucaacagcgugcccugggacacgaucgccaacuacgcgaagccguuccugaacaagguggucuccaccaccaccaacaucgugacgcgcugccugaaccgggugugcaccaacuacaugcccuacuucuucacccuccugcugcagcucugcaccuucacccgcagcacgaacucccggaucaaggccagcaugcccaccaccaucgccaagaacaccgucaaguccgugggcaaguucugccuggaggccagcuucaacuaccugaagagccccaacuucuccaagcucaucaacaucaucaucugguuccugcugcucagcgugugccugggcucccugaucuacagcacggccgcgcucgggguccugauguccaaccugggcaugccgagcuacugcaccggguaccgcgagggcuaccucaacuccaccaacgugaccaucgccacguacugcaccggcagcauccccugcuccgugugccugagcgggcuggacucccucgacaccuaccccagccuggagaccauccagaucacgaucuccagcuucaagugggaccugaccgccuucggccucgucgccgagugguuccuggccuacauccuguucacccgguucuucuacgugcucgggcuggcggccaucaugcagcuguucuucuccuacuucgccgugcacuucaucagcaacuccuggcucauguggcugaucaucaaccugguccagauggcccccaucagcgcgauggugcgcauguacaucuucuucgccuccuucuacuacguguggaagagcuacguccacgugguggacggcugcaacagcuccaccugcaugaugugcuacaagcggaaccgcgccacgcgggucgagugcaccaccaucgugaacgggguccgccggagcuucuacguguacgccaacggcggcaagggguucugcaagcugcacaacuggaacugcgugaacugcgacaccuucugcgccggcuccacguucaucagcgacgaggucgcgcgcgaccucucccugcaguucaagcggccgaucaaccccaccgaccagagcuccuacaucguggacagcgugaccgucaagaacggguccauccaccuguacuucgacaaggccggccagaagaccuacgagcgccacagccucucccacuucgugaaccuggacaaccugcgggccaacaacacgaaggggagccuccccaucaacgugaucgucuucgacggcaaguccaagugcgaggagagcuccgccaagagcgccuccguguacuacagccagcugaugugccagcccauccugcuccuggaccaggcgcugguguccgacgucggcgacagcgccgagguggccgugaagauguucgacgccuacgucaacaccuucagcuccaccuucaacgugccgauggagaagcucaagacccugguggccacggcggaggccgagcuggccaagaacgucagccucgacaacgugcuguccaccuucaucagcgccgcgcgccagggguucguggacuccgacgucgagaccaaggacgugguggagugccugaagcucagccaccaguccgacaucgaggucaccggcgacagcugcaacaacuacaugcugacguacaacaagguggagaacaugaccccccgggaccugggggccugcaucgacugcuccgcccgccacaucaacgcccagguggccaagagccacaacaucgcgcucaucuggaacgucaaggacuucaugucccugagcgagcagcugcggaagcagauccgcuccgccgccaagaagaacaaccuccccuucaagcugaccugcgccaccacgcgccagguggugaacgucgugaccaccaagaucgcccugaagggcgggaagaucugaggacuagucccuguucccagagcccacuuuuuuuucuuuuuuugaaauaaaauagccugucuuucagaucucaaaggcucuuuucagagccaccaaaaaaaaaaaaaaaaaaaaaaaaaaaaaaaaaaaaaaaaaaaaaaaaaaaaaaaaaaaaaaaaaaaaaaaaaaaaaaaaaaaaaaaaaaaaaaaaaaaaa

SEQ ID NO: 19902 - RNA, 6113 nt, Artificial Sequence
  SARS-CoV-2__MT680242.1__non-structural protein 3 (NSP3) mRNA gc
aggagagucccgcagucggcguccagcggcucugcuuguucgugugugugucguugcaggccuuauucaagcuuaccauggcccccaccaaggugaccuucggcgacgacacggucaucgaggugcagggguacaagagcgugaacaucaccuucgagcuggacgagcgcaucgacaagguccucaacgagaagugcuccgccuacaccguggagcugggcaccgaggugaacgaguucgcgugcgucguggccgacgccgugaucaagacgcugcagccggucagcgagcuccugaccccccuggggaucgaccucgacgagugguccauggccaccuacuaccuguucgacgagagcggcgaguucaagcuggccucccacauguacugcagcuucuacccccccgacgaggacgaggaggagggggacugcgaggaggaggaguucgagccguccacccaguacgaguacggcacggaggacgacuaccagggcaagccccucgaguucggggcgaccagcgccgcccugcagcccgaggaggagcaggaggaggacuggcuggacgacgacucccagcagaccgugggccagcaggacgggagcgaggacaaccagaccacgaccauccagaccaucguggagguccagccccagcucgagauggagcugaccccgguggugcagacgaucgaggucaacuccuucagcggcuaccugaagcucaccgacaacguguacaucaagaacgccgacaucguggaggaggcgaagaaggucaagcccaccgugguggucaacgccgccaacguguaccugaagcacgggggcggcguggccggggcccugaacaaggcgaccaacaacgccaugcaggucgaguccgacgacuacaucgccacgaacggcccccucaagguggggggcagcugcguccuguccggccacaaccuggccaagcacugccuccacgugguggggcccaacgucaacaagggcgaggacauccagcugcugaagagcgccuacgagaacuucaaccagcacgaggugcuccuggcgccgcugcucuccgccgggaucuucggcgccgaccccauccacagccugcgggugugcgucgacaccgugcgcaccaacguguaccuggccgucuucgacaagaaccucuacgacaagcugguguccagcuuccuggagaugaagagcgagaagcagguggagcagaagaucgccgagauccccaaggaggaggucaagcccuucaucaccgaguccaagccgagcguggagcagcggaagcaggacgacaagaagaucaaggcgugcguggaggaggucacgaccacccucgaggagaccaaguuccugacggagaaccugcuccuguacaucgacaucaacgggaaccugcaccccgacuccgccacccucgugagcgacaucgacaucaccuuccugaagaaggacgcccccuacaucgugggcgacgucgugcaggagggcgugcugaccgccgucgugauccccacgaagaaggccgggggcaccaccgagaugcucgcgaaggcccugcgcaaggugccgaccgacaacuacaucacgaccuaccccgggcagggccugaacggguacaccgucgaggaggccaagaccgugcucaagaagugcaaguccgccuucuacauccugcccagcaucaucuccaacgagaagcaggagauccugggcaccgugagcuggaaccuccgggagaugcuggcgcacgccgaggagacgcgcaagcugaugcccgucugcguggagaccaaggccaucguguccaccauccagcggaaguacaagggcaucaagauccaggagggggucguggacuacggcgcccgcuucuacuucuacaccagcaagacgaccguggccucccugaucaacacccucaacgaccugaacgagacccuggucacgaugccgcucggguacgugacccacggccugaaccuggaggaggcggcccgguacaugcgcuuccucaaggugcccgccaccgucagcguguccagccccgacgccgugaccgccuacaacggguaccugacguccagcuccaagacccccgaggagcacuucaucgagaccaucagccuggcgggcuccuacaaggacuggagcuacagcggccaguccacccagcucgggaucgaguuccugaagcggggcgacaagagcgucuacuacacguccaacccgaccaccuuccaccuggacggggaggugaucaccuucgacaaccucaagacgcugcugagccuccgcgaggugcggaccaucaaggucuucaccaccguggacaacaucaaccugcacacgcagguggucgacauguccaugaccuacggccagcaguucggccccaccuaccuggacggggccgacgugaccaagaucaagccccacaacagccacgagggcaagacguucuacgugcucccgaacgacgacacccugcgcgucgaggccuucgaguacuaccacaccaccgaccccuccuuccuggggcgguacaugagcgcccucaaccacacgaagaaguggaaguacccccaggugaacggccugaccuccaucaagugggccgacaacaacugcuaccuggcgaccgcccuccugacccugcagcagaucgagcucaaguucaaccccccggcccugcaggacgccuacuaccgcgcgcgggccggggaggccgccaacuucugcgcccugauccucgcguacugcaacaagacggugggcgagcugggcgacguccgcgagaccaugagcuaccuguuccagcacgccaaccucgacuccugcaagcgggugcugaacgucgugugcaagaccugcgggcagcagcagaccacccugaagggcguggaggccgucauguacauggggacgcucagcuacgagcaguucaagaagggcgugcagauccccugcaccugcgggaagcaggccaccaaguaccuggugcagcaggagucccccuucgucaugaugagcgcccccccggcgcaguacgagcugaagcacggcaccuucacgugcgccuccgaguacaccggcaacuaccagugcgggcacuacaagcacaucaccagcaaggagacccucuacugcaucgacggcgcccugcugacgaaguccagcgaguacaaggggcccaucaccgacguguucuacaaggagaacagcuacaccaccacgaucaagcccgugaccuacaagcucgacggcgucgugugcaccgagaucgaccccaagcuggacaacuacuacaagaaggacaacuccuacuucaccgagcagccgaucgaccuggugcccaaccagcccuaccccaacgccagcuucgacaacuucaaguucgucugcgacaacaucaaguucgccgacgaccucaaccagcugacgggguacaagaagccggcgucccgcgagcugaaggugaccuucuuccccgaccucaacggcgacguggucgccaucgacuacaagcacuacacccccagcuucaagaagggcgccaagcugcugcacaagcccaucguguggcacgugaacaacgccaccaacaaggcgacguacaagccgaacaccuggugcauccggugccucugguccaccaagcccgucgagaccagcaacuccuucgacgugcugaagagcgaggacgcccaggggauggacaaccuggccugcgaggaccucaagcccguguccgaggaggucguggagaaccccacgauccagaaggacgugcuggagugcaacgucaagaccaccgagguggugggcgacaucauccugaagccggccaacaacagccucaagaucaccgaggaggucgggcacacggaccugauggccgcguacguggacaacuccagccugaccaucaagaagcccaacgagcucucccgcgugcugggccugaagacccucgccacccacgggcuggccgccgucaacagcgugcccugggacacgaucgccaacuacgcgaagccguuccugaacaagguggucuccaccaccaccaacaucgugacgcgcugccucaaccgggugugcaccaacuacaugcccuacuucuucacccugcugcuccagcugugcaccuucacccgcagcacgaacucccggaucaaggccagcaugcccaccaccaucgccaagaacaccgucaaguccgugggcaaguucugccuggaggccagcuucaacuaccucaagagccccaacuucuccaagcugaucaacaucaucaucugguuccugcuccugagcgugugccugggcucccucaucuacagcacggccgcgcuggggguccugauguccaaccucggcaugccgagcuacugcaccggguaccgcgagggcuaccugaacuccaccaacgugaccaucgccacguacugcaccggcagcauccccugcuccgugugccugagcgggcucgacucccuggacaccuaccccagccuggagaccauccagaucacgaucuccagcuucaagugggaccucaccgccuucggccuggucgccgagugguuccuggccuacauccucuucacccgguucuucuacgugcuggggcuggcggccaucaugcagcucuucuucuccuacuucgccgugcacuucaucagcaacuccuggcugauguggcugaucaucaaccugguccagauggcccccaucagcgcgauggugcgcauguacaucuucuucgccuccuucuacuacguguggaagagcuacguccacgugguggacggcugcaacagcuccaccugcaugaugugcuacaagcggaaccgcgccacgcgggucgagugcaccaccaucgugaacgggguccgccggagcuucuacguguacgccaacggcggcaagggguucugcaagcuccacaacuggaacugcgugaacugcgacaccuucugcgccggcuccacguucaucagcgacgaggucgcgcgcgaccugucccugcaguucaagcggccgaucaaccccaccgaccagagcuccuacaucguggacagcgugaccgucaagaacggguccauccaccucuacuucgacaaggccggccagaagaccuacgagcgccacagccugucccacuucgugaaccuggacaaccuccgggccaacaacacgaaggggagccugcccaucaacgugaucgucuucgacggcaaguccaagugcgaggagagcuccgccaagagcgccuccguguacuacagccagcugaugugccagcccauccuccugcuggaccaggcgcucguguccgacgucggcgacagcgccgagguggccgugaagauguucgacgccuacgucaacaccuucagcuccaccuucaacgugccgauggagaagcugaagacccugguggccacggcggaggccgagcucgccaagaacgucagccuggacaacgugcuguccaccuucaucagcgccgcgcgccagggguucguggacuccgacgucgagaccaaggacgugguggagugccucaagcugagccaccaguccgacaucgaggucaccggcgacagcugcaacaacuacaugcugacguacaacaagguggagaacaugaccccccgggaccucggggccugcaucgacugcuccgcccgccacaucaacgcccagguggccaagagccacaacaucgcgcugaucuggaacgucaaggacuucaugucccugagcgagcagcuccggaagcagauccgcuccgccgccaagaagaacaaccugcccuucaagcugaccugcgccaccacgcgccagguggugaacgucgugaccaccaagaucgcccucaagggcgggugaggacuagucccuguucccagagcccacuuuuuuuucuuuuuuugaaauaaaauagccugucuuucagaucucaaaggcucuuuucagagccaccaaaaaaaaaaaaaaaaaaaaaaaaaaaaaaaaaaaaaaaaaaaaaaaaaaaaaaaaaaaaaaaaaaaaaaaaaaaaaaaaaaaaaaaaaaaaaaaaaaaaa

SEQ ID NO: 19903 - RNA, 6113 nt, Artificial Sequence
  SARS-CoV-2__MT609918.1__non-structural protein 3 (NSP3) mRNA gc
aggagagucccgcagucggcguccagcggcucugcuuguucgugugugugucguugcaggccuuauucaagcuuaccauggcccccaccaaggugaccuucggcgacgacacggucaucgaggugcagggguacaagagcgugaacaucaccuucgagcuggacgaguccaucgacaagguccucaacgagaagugcagcgccuacaccguggagcugggcaccgaggugaacgaguucgcgugcgucguggccgacgccgugaucaagacgcugcagccggucuccgagcuccugaccccccuggggaucgaccucgacgaguggagcauggccaccuacuaccuguucgacgaguccggcgaguucaagcuggccagccacauguacugcuccuucuacccccccgacgaggacgaggaggagggggacugcgaggaggaggaguucgagccgagcacccaguacgaguacggcacggaggacgacuaccagggcaagccccucgaguucggggcgaccuccgccgcccugcagcccgaggaggagcaggaggaggacuggcuggacgacgacagccagcagaccgugggccagcaggacggguccgaggacaaccagaccacgaccauccagaccaucguggagguccagccccagcucgagauggagcugaccccgguggugcagacgaucgaggucaacagcuucuccggcuaccugaagcucaccgagaacguguacaucaagaacgccgacaucguggaggaggcgaagaaggucaagcccaccgugguggucaacgccgccaacguguaccugaagcacgggggcggcguggccggggcccugaacaaggcgaccaacaacgccaugcaggucgagagcgacgacuacaucgccacgaacggcccccucaagguggggggcuccugcguccugagcggccacaaccuggccaagcacugccuccacgugguggggcccaacgucaacaagggcgaggacauccagcugcugaaguccgccuacgagaacuucaaccagcacgaggugcuccuggcgccgcugcucagcgccgggaucuucggcgccgaccccauccacucccugcgcgugugcgucgacaccgugcggaccaacguguaccuggccgucuucgacaagaaccucuacgacaagcuggugagcagcuuccuggagaugaaguccgagaagcagguggagcagaagaucgccgagauccccaaggaggaggucaagcccuucaucaccgagagcaagccguccguggagcagcgcaagcaggacgacaagaagaucaaggcgugcguggaggaggucacgaccacccucgaggagaccaaguuccugacggagaaccugcuccuguacaucgacaucaacgggaaccugcaccccgacagcgccacccucguguccgacaucgacaucaccuuccugaagaaggacgcccccuacaucgugggcgacgucgugcaggagggcgugcugaccgccgucgugauccccacgaagaaggccgggggcaccaccgagauccucgcgaaggcccugcggaaggugccgaccgacaacuacaucacgaccuaccccgggcagggccugaacggguacaccgucgaggaggccaagaccgugcucaagaagugcaagagcgccuucuacauccugcccuccaucaucagcaacgagaagcaggagauccugggcaccguguccuggaaccuccgcgagaugcuggcgcacgccgaggagacgcggaagcugaugcccgucugcguggagaccaaggccaucgugagcaccauccagcgcaaguacaagggcaucaagauccaggagggggucguggacuacggcgcccgguucuacuucuacaccuccaagacgaccguggccagccugaucaacacccucaacgaccugaacgagacccuggucacgaugccgcucggguacgugacccacggccugaaccuggaggaggcggcccgcuacaugcggucccucaaggugcccgccaccgucagcguguccagccccgacgccgugaccgccuacaacggguaccugacguccagcuccaagacccccgaggagcacuucaucgagaccaucagccuggcgggcagcuacaaggacugguccuacagcggccaguccacccagcucgggaucgaguuccugaagcgcggcgacaagagcgucuacuacacguccaacccgaccaccuuccaccuggacggggaggugaucaccuucgacaaccucaagacgcugcugagccuccgggaggugcgcaccaucaaggucuucaccaccguggacaacaucaaccugcacacgcagguggucgacauguccaugaccuacggccagcaguucggccccaccuaccuggacggggccgacgugaccaagaucaagccccacaacagccacgagggcaagacguucuacgugcucccgaacgacgacacccugcgggucgaggccuucgaguacuaccacaccaccgaccccuccuuccuggggcgcuacaugagcgcccucaaccacacgaagaaguggaaguacccccaggugaacggccugaccuccaucaagugggccgacaacaacugcuaccuggcgaccgcccuccugacccugcagcagaucgagcucaaguucaaccccccggcccugcaggacgccuacuaccgggcgcgcgccggggaggccgccaacuucugcgcccugauccucgcguacugcaacaagacggugggcgagcugggcgacguccgggagaccaugagcuaccuguuccagcacgccaaccucgacuccugcaagcgcgugcugaacgucgugugcaagaccugcgggcagcagcagaccacccugaagggcguggaggccgucauguacauggggacgcucagcuacgagcaguucaagaagggcgugcagauccccugcaccugcgggaagcaggccaccaaguaccuggugcagcaggagucccccuucgucaugaugagcgcccccccggcgcaguacgagcugaagcacggcaccuucacgugcgccuccgaguacaccggcaacuaccagugcgggcacuacaagcacaucaccagcaaggagacccucuacugcaucgacggcgcccugcugacgaagagcuccgaguacaaggggcccaucaccgacguguucuacaaggagaacagcuacaccaccacgaucaagcccgugaccuacaagcucgacggcgucgugugcaccgagaucgaccccaagcuggacaacuacuacaagaaggacaacuccuacuucaccgagcagccgaucgaccuggugcccaaccagcccuaccccaacgccagcuucgacaacuucaaguucgucugcgacaacaucaaguucgccgacgaccucaaccagcugacgggguacaagaagccggcgucccgggagcugaaggugaccuucuuccccgaccucaacggcgacguggucgccaucgacuacaagcacuacacccccagcuucaagaagggcgccaagcugcugcacaagcccaucguguggcacgugaacaacgccaccaacaaggcgacguacaagccgaacaccuggugcauccgcugccucugguccaccaagcccgucgagaccagcaacuccuucgacgugcugaagagcgaggacgcccaggggauggacaaccuggccugcgaggaccucaagcccguguccgaggaggucguggagaaccccacgauccagaaggacgugcuggagugcaacgucaagaccaccgagguggugggcgacaucauccugaagccggccaacaacagccucaagaucaccgaggaggucgggcacacggaccugauggccgcguacguggacaacuccagccugaccaucaagaagcccaacgagcucucccgggugcugggccugaagacccucgccacccacgggcuggccgccgucaacagcgugcccugggacacgaucgccaacuacgcgaagccguuccugaacaagguggucuccaccaccaccaacaucgugacgcgcugccucaaccgcgugugcaccaacuacaugcccuacuucuucacccugcugcuccagcugugcaccuucacccggagcacgaacucccgcaucaaggccagcaugcccaccaccaucgccaagaacaccgucaagagcgugggcaaguucugccuggaggccuccuucaacuaccucaagagccccaacuucuccaagcugaucaacaucaucaucugguuccugcuccugagcgugugccugggcucccucaucuacagcacggccgcgcuggggguccugauguccaaccucggcaugccgagcuacugcaccggguaccgggagggcuaccugaacuccaccaacgugaccaucgccacguacugcaccggcagcauccccugcuccgugugccugagcgggcucgacucccuggacaccuaccccagccuggagaccauccagaucacgaucuccagcuucaagugggaccucaccgccuucggccuggucgccgagugguuccuggccuacauccucuucacccgcuucuucuacgugcuggggcuggcggccaucaugcagcucuucuucuccuacuucgccgugcacuucaucagcaacuccuggcugauguggcugaucaucaaccugguccagauggcccccaucagcgcgauggugcggauguacaucuucuucgccagcuucuacuacguguggaaguccuacguccacgugguggacggcugcaacagcuccaccugcaugaugugcuacaagcgcaaccgggccacgcgcgucgagugcaccaccaucgugaacgggguccggcgcagcuucuacguguacgccaacggcggcaagggguucugcaagcuccacaacuggaacugcgugaacugcgacaccuucugcgccggcuccacguucaucagcgacgaggucgcgcgggaccugucccugcaguucaagcgcccgaucaaccccaccgaccagagcuccuacaucguggacagcgugaccgucaagaacggguccauccaccucuacuucgacaaggccggccagaagaccuacgagcggcacagccugucccacuucgugaaccuggacaaccuccgcgccaacaacacgaaggggagccugcccaucaacgugaucgucuucgacggcaaguccaagugcgaggagagcuccgccaagagcgccuccguguacuacagccagcugaugugccagcccauccuccugcuggaccaggcgcucgugagcgacgucggcgacuccgccgagguggccgugaagauguucgacgccuacgucaacaccuucagcuccaccuucaacgugccgauggagaagcugaagacccugguggccacggcggaggccgagcucgccaagaacgucagccuggacaacgugcuguccaccuucaucagcgccgcgcggcagggguucguggacuccgacgucgagaccaaggacgugguggagugccucaagcugagccaccaguccgacaucgaggucaccggcgacagcugcaacaacuacaugcugacguacaacaagguggagaacaugaccccccgcgaccucggggccugcaucgacugcuccgcccggcacaucaacgcccagguggccaagagccacaacaucgcgcugaucuggaacgucaaggacuucaugucccugagcgagcagcuccgcaagcagauccgguccgccgccaagaagaacaaccugcccuucaagcugaccugcgccaccacgcgccagguggugaacgucgugaccaccaagaucgcccucaagggcgggugaggacuagucccuguucccagagcccacuuuuuuuucuuuuuuugaaauaaaauagccugucuuucagaucucaaaggcucuuuucagagccaccaaaaaaaaaaaaaaaaaaaaaaaaaaaaaaaaaaaaaaaaaaaaaaaaaaaaaaaaaaaaaaaaaaaaaaaaaaaaaaaaaaaaaaaaaaaaaaaaaaaaa

SEQ ID NO: 19904 - RNA, 6113 nt, Artificial Sequence
  SARS-CoV-2__MT611440.1__non-structural protein 3 (NSP3) mRNA gc
aggagagucccgcagucggcguccagcggcucugcuuguucgugugugugucguugcaggccuuauucaagcuuaccauggcccccaccaaggugaccuucggcgacgacacggucaucgaggugcagggguacaagagcgugaacaucaccuucgagcuggacgagcgcaucgacaagguccucaacgagaagugcuccgccuacaccguggagcugggcaccgaggugaacgaguucgcgugcgucguggccgacgccgugaucaagacgcugcagccggucagcgagcuccugaccccccuggggaucgaccucgacgagugguccauggccaccuacuaccuguucgacgagagcggcgaguucaagcuggccucccacauguacugcagcuucuacccccccgacgaggacgaggaggagggggacugcgaggaggaggaguucgagccguccacccaguacgaguacggcacggaggacgacuaccagggcaagccccucgaguucggggcgaccagcgccgcccugcagcccgaggaggagcaggaggaggacuggcuggacgacgacucccagcagaccgugggccagcaggacgggagcgaggacaaccagaccacgaccauccagaccaucguggagguccagccccagcucgagauggagcugaccccgguggugcagacgaucgaggucaacuccuucagcggcuaccugaagcucaccgacaacguguacaucaagaacgccgacaucguggaggaggcgaagaaggucaagcccaccgugguggucaacgccgccaacguguaccugaagcacgggggcggcguggccggggcccugaacaaggcgaccaacaacgccaugcaggucgaguccgacgacuacaucgccacgaacggcccccucaagguggggggcagcugcguccuguccggccacaaccuggccaagcacugccuccacgugguggggcccaacgucaacaagggcgaggacauccagcugcugaagagcgccuacgagaacuucaaccagcacgaggugcuccuggcgccgcugcucuccgccgggaucuucggcgccgaccccauccacagccugcgggugugcgucgacaccgugcgcaccaacguguaccuggccgucuucgacaagaaccucuacgacaagcugguguccagcuuccuggagaugaagagcgagaagcagguggagcagaagaucgccgagauccccaaggaggaggucaagcccuucaucaccgaguccaagccgagcguggagcagcggaagcaggacgacaagaagaucaaggcgugcguggaggaggucacgaccacccucgaggagaucaaguuccugaccgagaaccugcuccuguacaucgacaucaacgggaaccugcaccccgacuccgccacgcucgugagcgacaucgacaucaccuuccugaagaaggacgcccccuacaucgugggcgacgucgugcaggagggcgugcugaccgccgucgugauccccaccaagaaggccgggggcacgaccgagaugcucgcgaaggcccugcgcaaggugccgaccgacaacuacaucaccacguaccccgggcagggccugaacggguacaccgucgaggaggccaagaccgugcucaagaagugcaaguccgccuucuacauccugcccagcaucaucuccaacgagaagcaggagauccugggcaccgugagcuggaaccuccgggagaugcuggcgcacgccgaggagacccgcaagcugaugcccgucugcguggagacgaaggccaucguguccaccauccagcggaaguacaagggcaucaagauccaggagggggucguggacuacggcgcccgcuucuacuucuacaccagcaagaccacgguggccucccugaucaacacccucaacgaccugaacgagacccuggucaccaugccgcucggguacgugacgcacggccugaaccuggaggaggcggcccgguacaugcgcagccucaaggugcccgccaccgucuccgugagcucccccgacgccgugaccgccuacaacggguaccugaccagcuccagcaagacgcccgaggagcacuucaucgagaccaucucccuggcgggcagcuacaaggacuggagcuacuccggccagagcacccagcucgggaucgaguuccugaagcggggcgacaaguccgucuacuacaccagcaacccgacgaccuuccaccuggacggggaggugaucaccuucgacaaccucaagacccugcugucccuccgcgaggugcggacgaucaaggucuucaccaccguggacaacaucaaccugcacacccagguggucgacaugagcaugacguacggccagcaguucggccccaccuaccuggacggggccgacgugaccaagaucaagccccacaacucccacgagggcaagaccuucuacgugcucccgaacgacgacacgcugcgcgucgaggccuucgaguacuaccacaccaccgaccccagcuuccuggggcgguacauguccgcccucaaccacaccaagaaguggaaguacccccaggugaacggccugacgagcaucaagugggccgacaacaacugcuaccuggcgaccgcccuccugacccugcagcagaucgagcucaaguucaaccccccggcccugcaggacgccuacuaccgcgcgcgggccggggaggccgccaacuucugcgcccugauccucgcguacugcaacaagaccgugggcgagcugggcgacguccgcgagacgauguccuaccuguuccagcacgccaaccucgacagcugcaagcgggugcugaacgucgugugcaagaccugcgggcagcagcagaccacccugaagggcguggaggccgucauguacauggggacccucuccuacgagcaguucaagaagggcgugcagauccccugcacgugcgggaagcaggccaccaaguaccuggugcagcaggagagccccuucgucaugauguccgcccccccggcgcaguacgagcugaagcacggcaccuucaccugcgccagcgaguacacgggcaacuaccagugcgggcacuacaagcacaucaccuccaaggagacccucuacugcaucgacggcgcccugcugaccaagagcagcgaguacaaggggcccaucacggacguguucuacaaggagaacuccuacaccaccaccaucaagcccgugacguacaagcucgacggcgucgugugcaccgagaucgaccccaagcuggacaacuacuacaagaaggacaacagcuacuucaccgagcagccgaucgaccuggugcccaaccagcccuaccccaacgccuccuucgacaacuucaaguucgucugcgacaacaucaaguucgccgacgaccucaaccagcugaccggguacaagaagccggcgagccgcgagcugaaggugacguucuuccccgaccucaacggcgacguggucgccaucgacuacaagcacuacacccccuccuucaagaagggcgccaagcugcugcacaagcccaucguguggcacgugaacaacgccaccaacaaggcgaccuacaagccgaacacguggugcauccggugccucuggagcaccaagcccgucgagaccuccaacagcuucgacgugcugaaguccgaggacgcccaggggauggacaaccuggccugcgaggaccucaagcccgugagcgaggaggucguggagaaccccaccauccagaaggacgugcuggagugcaacgucaagacgaccgagguggugggcgacaucauccugaagccggccaacaacucccucaagaucaccgaggaggucgggcacaccgaccugauggccgcguacguggacaacagcucccugacgaucaagaagcccaacgagcucagccgcgugcugggccugaagacccucgccacccacgggcuggccgccgucaacuccgugcccugggacaccaucgccaacuacgcgaagccguuccugaacaagguggucagcacgaccaccaacaucgugacccgcugccucaaccgggugugcacgaacuacaugcccuacuucuucacccugcugcuccagcugugcaccuucacccgcuccaccaacagccggaucaaggccuccaugcccacgaccaucgccaagaacaccgucaagagcgugggcaaguucugccuggaggccagcuucaacuaccucaagucccccaacuucagcaagcugaucaacaucaucaucugguuccugcuccuguccgugugccugggcagccucaucuacuccaccgccgcgcuggggguccugaugagcaaccucggcaucccguccuacugcacgggguaccgcgagggcuaccugaacagcaccaacgugaccaucgccaccuacugcacgggcuccauccccugcagcgugugccuguccgggcucgacagccuggacaccuaccccucccuggagaccauccagaucaccaucagcuccuucaagugggaccucacggccuucggccuggucgccgagugguuccuggccuacauccucuucacccgguucuucuacgugcuggggcuggcggccaucaugcagcucuucuucagcuacuucgccgugcacuucaucuccaacagcuggcugauguggcugaucaucaaccugguccagauggcccccaucuccgcgauggugcgcauguacaucuucuucgccagcuucuacuacguguggaagagcuacguccacgugguggacggcugcaacuccagcaccugcaugaugugcuacaagcggaaccgcgccacccgggucgagugcacgaccaucgugaacgggguccgccgguccuucuacguguacgccaacggcggcaagggguucugcaagcuccacaacuggaacugcgugaacugcgacaccuucugcgccggcagcaccuucaucuccgacgaggucgcgcgcgaccugagccugcaguucaagcggccgaucaaccccacggaccaguccagcuacaucguggacuccgugaccgucaagaacgggagcauccaccucuacuucgacaaggccggccagaagaccuacgagcgccacucccugagccacuucgugaaccuggacaaccuccgggccaacaacaccaaggggucccugcccaucaacgugaucgucuucgacggcaagagcaagugcgaggaguccagcgccaaguccgccagcguguacuacucccagcugaugugccagcccauccuccugcuggaccaggcgcucgugagcgacgucggcgacagcgccgagguggccgugaagauguucgacgccuacgucaacacguucuccagcaccuucaacgugccgauggagaagcugaagacccugguggccaccgcggaggccgagcucgccaagaacgucucccuggacaacgugcugagcacguucaucuccgccgcgcgccagggguucguggacagcgacgucgagaccaaggacgugguggagugccucaagcugucccaccagagcgacaucgaggucaccggcgacuccugcaacaacuacaugcugaccuacaacaagguggagaacaugacgccccgggaccucggggccugcaucgacugcagcgcccgccacaucaacgcccagguggccaagucccacaacaucgcgcugaucuggaacgucaaggacuucaugagccuguccgagcagcuccggaagcagauccgcagcgccgccaagaagaacaaccugcccuucaagcugaccugcgccaccacccgccagguggugaacgucgugacgaccaagaucgcccucaagggcgggugaggacuagucccuguucccagagcccacuuuuuuuucuuuuuuugaaauaaaauagccugucuuucagaucucaaaggcucuuuucagagccaccaaaaaaaaaaaaaaaaaaaaaaaaaaaaaaaaaaaaaaaaaaaaaaaaaaaaaaaaaaaaaaaaaaaaaaaaaaaaaaaaaaaaaaaaaaaaaaaaaaaaa

SEQ ID NO: 19905 - RNA, 6113 nt, Artificial Sequence
  SARS-CoV-2__MT611449.1__non-structural protein 3 (NSP3) mRNA gc
aggagagucccgcagucggcguccagcggcucugcuuguucgugugugugucguugcaggccuuauucaagcuuaccauggcccccaccaaggugaccuucggcgacgacacggucaucgaggugcagggguacaagagcgugaacaucaccuucgagcuggacgagcgcaucgacaagguccucaacgagaagugcuccguguacaccguggagcugggcaccgaggucaacgaguucgccugcgugguggcggacgccgucaucaagacgcugcagccggugagcgagcuccugaccccccuggggaucgaccucgacgagugguccauggccaccuacuaccuguucgacgagagcggcgaguucaagcuggccucccacauguacugcagcuucuacccccccgacgaggacgaggaggagggggacugcgaggaggaggaguucgagccguccacccaguacgaguacggcacggaggacgacuaccagggcaagccccucgaguucggggccaccagcgcggcccugcagcccgaggaggagcaggaggaggacuggcuggacgacgacucccagcagaccgugggccagcaggacgggagcgaggacaaccagaccacgaccauccagaccaucgucgaggugcagccccagcucgagauggagcugaccccggugguccagacgaucgaggugaacuccuucagcggcuaccugaagcucaccgacaacguguacaucaagaacgccgacaucgucgaggaggccaagaaggugaagcccaccguggucgugaacgcggccaacguguaccugaagcacgggggcggcgucgccggggcccugaacaaggccaccaacaacgcgaugcagguggaguccgacgacuacaucgccacgaacggcccccucaaggucgggggcagcugcgugcuguccggccacaaccuggccaagcacugccuccacguggucgggcccaacgugaacaagggcgaggacauccagcugcugaagagcgccuacgagaacuucaaccagcacgaggugcuccuggccccgcugcucuccgcggggaucuucugcgccgaccccauccacagccugcgggucugcguggacaccgugcgcaccaacgucuaccuggccguguucgacaagaaccucuacgacaagcugguguccagcuuccuggagaugaagagcgagaagcaggucgagcagaagaucgccgagauccccaaggaggaggugaagcccuucaucaccgaguccaagccgagcguggagcagcggaagcaggacgacaagaagaucaaggccugcgucgaggaggugacgaccacccucgaggagaucaaguuccugaccgagaaccugcuccuguacaucgacaucaacggcaaccugcaccccgacuccgcgacgcucgugagcgacaucgacaucaccuuccugaagaaggacgcccccuacaucgucggggacguggugcaggagggcguccugaccgccguggugauccccaccaagaaggccggcgggacgaccgagaugcucgccaaggcgcugcgcaaggucccgaccgacaacuacaucaccacguaccccggccaggggcugaacggcuacaccguggaggaggccaagaccgugcucaagaagugcaaguccgccuucuacauccugcccagcaucaucuccaacgagaagcaggagauccuggggaccgucagcuggaaccuccgggagaugcuggcccacgcggaggagacccgcaagcugaugcccgugugcguggagacgaaggccaucgucuccaccauccagcggaaguacaagggcaucaagauccaggagggcgugguggacuacggggcccgcuucuacuucuacaccagcaagaccacggucgccucccugaucaacacccucaacgaccugaacgagacccuggugaccaugccgcucggcuacgugacgcacgggcugaaccuggaggaggccgcgcgguacaugcgcagccucaagguccccgccaccguguccgugagcucccccgacgccgucaccgccuacaacggcuaccugaccagcuccagcaagacgcccgaggagcacuucaucgagaccaucucccuggccgggagcuacaaggacuggagcuacuccggccagagcacccagcucggcaucgaguuccugaagcggggggacaaguccguguacuacaccagcaacccgacgaccuuccaccuggacggcgaggugaucaccuucgacaaccucaagacccugcugucccuccgcgagguccggacgaucaagguguucaccaccguggacaacaucaaccugcacacccaggucguggacaugagcaugacguacgggcagcaguucggccccaccuaccuggacggcgcggacgugaccaagaucaagccccacaacucccacgaggggaagaccuucuacguccucccgaacgacgacacgcugcgcguggaggccuucgaguacuaccacaccaccgaccccagcuuccugggccgguacauguccgcccucaaccacaccaagaaguggaaguacccccaggugaacgggcugacgagcaucaagugggccgacaacaacugcuaccuggccaccgcgcuccugacccugcagcagaucgagcucaaguucaaccccccggcccugcaggacgccuacuaccgcgcccgggcgggcgaggccgccaacuucugcgcccugauccucgccuacugcaacaagaccgucggggagcugggcgacgugcgcgagacgauguccuaccuguuccagcacgcgaaccucgacagcugcaagcggguccugaacguggugugcaagaccugcggccagcagcagaccacccugaagggggucgaggccgugauguacaugggcacccucuccuacgagcaguucaagaagggggugcagauccccugcacgugcggcaagcaggccaccaaguaccugguccagcaggagagccccuucgugaugauguccgcccccccggcccaguacgagcugaagcacgggaccuucaccugcgcgagcgaguacacgggcaacuaccagugcggccacuacaagcacaucaccuccaaggagacccucuacugcaucgacggggcccugcugaccaagagcagcgaguacaagggccccaucacggacguguucuacaaggagaacuccuacaccaccaccaucaagcccgucacguacaagcucgacgggguggugugcaccgagaucgaccccaagcuggacaacuacuacaagaaggacaacagcuacuucaccgagcagccgaucgaccugguccccaaccagcccuaccccaacgccuccuucgacaacuucaaguucgugugcgacaacaucaaguucgccgacgaccucaaccagcugaccggcuacaagaagccggccagccgcgagcugaaggugacguucuuccccgaccucaacggggacgucguggcgaucgacuacaagcacuacacccccuccuucaagaagggcgccaagcugcugcacaagcccaucguguggcacgucaacaacgccaccaacaaggccaccuacaagccgaacacguggugcauccggugccucuggagcaccaagcccguggagaccuccaacagcuucgacgugcugaaguccgaggacgcgcagggcauggacaaccuggccugcgaggaccucaagcccgucagcgaggaggugguggagaaccccaccauccagaaggacguccuggagugcaacgugaagacgaccgagguggucggggacaucauccugaagccggccaacaacucccucaagaucaccgaggaggugggccacaccgaccugauggccgccuacguggacaacagcucccugacgaucaagaagcccaacgagcucagccgcguccuggggcugaagacccucgcgacccacggccuggccgccgugaacuccgugcccugggacaccaucgccaacuacgccaagccguuccugaacaaggucgugagcacgaccaccaacaucgugacccgcugccucaaccgggucugcacgaacuacaugcccuacuucuucacccugcugcuccagcugugcaccuucacccgcuccaccaacagccggaucaaggcguccaugcccacgaccaucgccaagaacaccgugaagagcguggggaaguucugccuggaggccagcuucaacuaccucaagucccccaacuucagcaagcugaucaacaucaucaucugguuccugcuccuguccgucugccugggcagccucaucuacuccaccgccgcccugggcgugcugaugagcaaccucgggaugccguccuacugcacgggcuaccgcgagggguaccugaacagcaccaacgugaccaucgcgaccuacugcacgggcuccauccccugcagcgucugccuguccggccucgacagccuggacaccuaccccucccuggagaccauccagaucaccaucagcuccuucaagugggaccucacggccuucgggcugguggccgagugguuccuggccuacauccucuucacccgguucuucuacgugcugggccuggccgcgaucaugcagcucuucuucagcuacuucgccguccacuucaucuccaacagcuggcugauguggcugaucaucaaccuggugcagauggcccccaucuccgccauggugcgcauguacaucuucuucgcgagcuucuacuacgucuggaagagcuacgugcacguggucgacgggugcaacuccagcaccugcaugaugugcuacaagcggaaccgcgccacccggguggagugcacgaccaucgucaacggcgugcgccgguccuucuacguguacgccaacgggggcaagggcuucugcaagcuccacaacuggaacugcgucaacugcgacaccuucugcgccgggagcaccuucaucuccgacgagguggcccgcgaccugagccugcaguucaagcggccgaucaaccccacggaccaguccagcuacaucguggacuccgucaccgugaagaacggcagcauccaccucuacuucgacaaggcggggcagaagaccuacgagcgccacucccugagccacuucgugaaccuggacaaccuccgggccaacaacaccaagggcucccugcccaucaacgucaucguguucgacgggaagagcaagugcgaggaguccagcgccaaguccgccagcguguacuacucccagcugaugugccagcccauccuccugcuggaccaggcccucgucagcgacgugggcgacagcgcggagguggccgucaagauguucgacgccuacgugaacacguucuccagcaccuucaacgugccgauggagaagcugaagacccuggucgccaccgccgaggcggagcucgccaagaacgugucccuggacaacgugcugagcacguucaucuccgccgcccgccagggcuucgucgacagcgacguggagaccaaggacguggucgagugccucaagcugucccaccagagcgacaucgaggugaccggggacuccugcaacaacuacaugcugaccuacaacaagguggagaacaugacgccccgggaccucggcgcgugcaucgacugcagcgcccgccacaucaacgcccaggucgccaagucccacaacaucgcccugaucuggaacgugaaggacuucaugagccuguccgagcagcuccggaagcagauccgcagcgcggccaagaagaacaaccugcccuucaagcugaccugcgccaccacccgccagguggucaacguggugacgaccaagaucgcccucaaggggggcugaggacuagucccuguucccagagcccacuuuuuuuucuuuuuuugaaauaaaauagccugucuuucagaucucaaaggcucuuuucagagccaccaaaaaaaaaaaaaaaaaaaaaaaaaaaaaaaaaaaaaaaaaaaaaaaaaaaaaaaaaaaaaaaaaaaaaaaaaaaaaaaaaaaaaaaaaaaaaaaaaaaaa

SEQ ID NO: 19906 - RNA, 6113 nt, Artificial Sequence
  SARS-CoV-2__MT611444.1__non-structural protein 3 (NSP3) mRNA gc
aggagagucccgcagucggcguccagcggcucugcuuguucgugugugugucguugcaggccuuauucaagcuuaccauggcccccaccaaggugaccuucggcgacgacacggucaucgaggugcagggguacaagagcgugaacaucaccuucgagcuggacgagcgcaucgacaagguccucaacgagaagugcuccgccuacaccguggagcugggcaccgaggugaacgaguucgcgugcgucguggccgacgccgugaucaagacgcugcagccggucagcgagcuccugaccccccuggggaucgaccucgacgagugguccauggccaccuacuaccuguucgacgagagcggcgaguucaagcuggccucccacauguacugcagcuucuacccccccgacgaggacgaggaggagggggacugcgaggaggaggaguucgagccguccacccaguacgaguacggcacggaggacgacuaccagggcaagccccucgaguucggggcgaccagcgccgcccugcagcccgaggaggagcaggaggaggacuggcuggacgacgacucccagcagaccgugggccagcaggacgggagcgaggacaaccagaccacgaccauccagaccaucguggagguccagccccagcucgagauggagcugaccccgguggugcagacgaucgaggucaacuccuucagcggcuaccugaagcucaccgacaacguguacaucaagaacgccgacaucguggaggaggcgaagaaggucaagcccaccgugguggucaacgccgccaacguguaccugaagcacgggggcggcguggccggggcccugaacaaggcgaccaacaacgccaugcaggucgaguccgacgacuacaucgccacgaacggcccccucaagguggggggcagcugcguccuguccggccacaaccuggccaagcacugccuccacgugguggggcccaacgucaacaagggcgaggacauccagcugcugaagagcgccuacgagaacuucaaccagcacgaggugcuccuggcgccgcugcucuccgccgggaucuucggcgccgaccccauccacagccugcgggugugcgucgacaccgugcgcaccaacguguaccuggccgucuucgacaagaaccucuacgacaagcugguguccagcuuccuggagaugaagagcgagaagcagguggagcagaagaucgccgagauccccaaggaggaggucaagcccuucaucaccgaguccaagccgagcguggagcagcggaagcaggacgacaagaagaucaaggcgugcguggaggaggucacgaccacccucgaggagaccaaguuccugacggagaaccugcuccuguacaucgacaucaacgggaaccugcaccccgacuccgccacccucgugagcgacaucgacaucaccuuccugaagaaggacgcccccuacaucgugggcgacgucgugcaggagggcgugcugaccgccgucgugauccccacgaagaaggccgggggcaccaccgagaugcucgcgaaggcccugcgcaaggugccgaccgacaacuacaucacgaccuaccccgggcagggccugaacggguacaccgucgaggaggccaagaccgugcucaagaagugcaaguccgccuucuacauccugcccagcaucaucuccaacgagaagcaggagauccugggcaccgugagcuggaaccuccgggagaugcuggcgcacgccgaggagacgcgcaagcugaugcccgucugcguggagaccaaggccaucguguccaccauccagcggaaguacaagggcaucaagauccaggagggggucguggacuacggcgcccgcuucuacuucuacaccagcaagacgaccguggccucccugaucaacacccucaacgaccugaacgagacccuggucacgaugccgcucggguacgugacccacggccugaaccuggaggaggcggcccgguacaugcgcagccucaaggugcccgccaccgucuccgugagcucccccgacgccgugaccgccuacaacggguaccugacgagcuccagcaagacccccgaggagcacuucaucgagaccaucucccuggcgggcagcuacaaggacuggagcuacuccggccagagcacccagcucgggaucgaguuccugaagcggggcgacaaguccgucuacuacacgagcaacccgaccaccuuccaccuggacggggaggugaucaccuucgacaaccucaagacgcugcugucccuccgcgaggugcggaccaucaaggucuucaccaccguggacaacaucaaccugcacacgcagguggucgacaugagcaugaccuacggccagcaguucggccccaccuaccuggacggggccgacgugaccaagaucaagccccacaacucccacgagggcaagacguucuacgugcucccgaacgacgacacccugcgcgucgaggccuucgaguacuaccacaccaccgaccccagcuuccuggggcgguacauguccgcccucaaccacacgaagaaguggaaguacccccaggugaacggccugaccagcaucaagugggccgacaacaacugcuaccuggcgaccgcccuccugacccugcagcagaucgagcucaaguucaaccccccggcccugcaggacgccuacuaccgcgcgcgggccggggaggccgccaacuucugcgcccugauccucgcguacugcaacaagacggugggcgagcugggcgacguccgcgagaccauguccuaccuguuccagcacgccaaccucgacagcugcaagcgggugcugaacgucgugugcaagaccugcgggcagcagcagaccacccugaagggcguggaggccgucauguacauggggacgcucuccuacgagcaguucaagaagggcgugcagauccccugcaccugcgggaagcaggccaccaaguaccuggugcagcaggagagccccuucgucaugauguccgcccccccggcgcaguacgagcugaagcacggcaccuucacgugcgccagcgaguacaccggcaacuaccagugcgggcacuacaagcacaucaccuccaaggagacccucuacugcaucgacggcgcccugcugacgaagagcagcgaguacaaggggcccaucaccgacguguucuacaaggagaacuccuacaccaccacgaucaagcccgugaccuacaagcucgacggcgucgugugcaccgagaucgaccccaagcuggacaacuacuacaagaaggacaacagcuacuucaccgagcagccgaucgaccuggugcccaaccagcccuaccccaacgccuccuucgacaacuucaaguucgucugcgacaacaucaaguucgccgacgaccucaaccagcugacgggguacaagaagccggcgagccgcgagcugaaggugaccuucuuccccgaccucaacggcgacguggucgccaucgacuacaagcacuacacccccuccuucaagaagggcgccaagcugcugcacaagcccaucguguggcacgugaacaacgccaccaacaaggcgacguacaagccgaacaccuggugcauccggugccucuggagcaccaagcccgucgagaccuccaacagcuucgacgugcugaaguccgaggacgcccaggggauggacaaccuggccugcgaggaccucaagcccgugagcgaggaggucguggagaaccccacgauccagaaggacgugcuggagugcaacgucaagaccaccgagguggugggcgacaucauccugaagccggccaacaacucccucaagaucaucgaggaggucgggcacaccgaccugauggccgcguacguggacaacagcucccugacgaucaagaagcccaacgagcucagccgcgugcugggccugaagacccucgccacccacgggcuggccgccgucaacuccgugcccugggacaccaucgccaacuacgcgaagccguuccugaacaagguggucagcacgaccaccaacaucgugacccgcugccucaaccgggugugcacgaacuacaugcccuacuucuucacccugcugcuccagcugugcaccuucacccgcuccaccaacagccggaucaaggccuccaugcccacgaccaucgccaagaacaccgucaagagcgugggcaaguucugccuggaggccagcuucaacuaccucaagucccccaacuucagcaagcugaucaacaucaucaucugguuccugcuccuguccgugugccugggcagccucaucuacuccaccgccgcgcuggggguccugaugagcaaccucggcaugccguccuacugcacgggguaccgcgagggcuaccugaacagcaccaacgugaccaucgccaccuacugcacgggcuccauccccugcagcgugugccuguccgggcucgacagccuggacaccuaccccucccuggagaccauccagaucaccaucagcuccuucaagugggaccucacggccuucggccuggucgccgagugguuccuggccuacauccucuucacccgguucuucuacgugcuggggcuggcggccaucaugcagcucuucuucagcuacuucgccgugcacuucaucuccaacagcuggcugauguggcugaucaucaaccugguccagauggcccccaucuccgcgauggugcgcauguacaucuucuucgccagcuucuacuacguguggaagagcuacguccacgugguggacggcugcaacuccagcaccugcaugaugugcuacaagcggaaccgcgccacccgggucgagugcacgaccaucgugaacgggguccgccgguccuucuacguguacgccaacggcggcaagggguucugcaagcuccacaacuggaacugcgugaacugcgacaccuucugcgccggcagcaccuucaucuccgacgaggucgcgcgcgaccugagccugcaguucaagcggccgaucaaccccacggaccaguccagcuacaucguggacuccgugaccgucaagaacgggagcauccaccucuacuucgacaaggccggccagaagaccuacgagcgccacucccugagccacuucgugaaccuggacaaccuccgggccaacaacaccaaggggucccugcccaucaacgugaucgucuucgacggcaagagcaagugcgaggaguccagcgccaaguccgccagcguguacuacucccagcugaugugccagcccauccuccugcuggaccaggcgcucgugagcgacgucggcgacagcgccgagguggccgugaagauguucgacgccuacgucaacacguucuccagcaccuucaacgugccgauggagaagcugaagacccugguggccaccgcggaggccgagcucgccaagaacgucucccuggacaacgugcugagcacguucaucuccgccgcgcgccagggguucguggacagcgacgucgagaccaaggacgugguggagugccucaagcuguccuaccagagcgacaucgaggucaccggcgacuccugcaacaacuacaugcugaccuacaacaagguggagaacaugacgccccgggaccucggggccugcaucgacugcagcgcccgccacaucaacgcccagguggccaagucccacaacaucgcgcugaucuggaacgucaaggacuucaugagccuguccgagcagcuccggaagcagauccgcagcgccgccaagaagaacaaccugcccuucaagcugaccugcgccaccacccgccagguggugaacgucgugacgaccaagaucgcccucaagggcgggugaggacuagucccuguucccagagcccacuuuuuuuucuuuuuuugaaauaaaauagccugucuuucagaucucaaaggcucuuuucagagccaccaaaaaaaaaaaaaaaaaaaaaaaaaaaaaaaaaaaaaaaaaaaaaaaaaaaaaaaaaaaaaaaaaaaaaaaaaaaaaaaaaaaaaaaaaaaaaaaaaaaaa

SEQ ID NO: 19907 - RNA, 6113 nt, Artificial Sequence
  SARS-CoV-2__MT614599.1__non-structural protein 3 (NSP3) mRNA gc
aggagagucccgcagucggcguccagcggcucugcuuguucgugugugugucguugcaggccuuauucaagcuuaccauggcccccaccaaggugaccuucggcgacgacacggucaucgaggugcagggguacaagagcgugaacaucaccuucgagcuggacgagcgcaucgacaagguccucaacgagaagugcuccgccuacaccguggagcugggcaccgaggugaacgaguucgcgugcgucguggccgacgccgugaucaagacgcugcagccggucagcgagcuccugaccccccuggggaucgaccucgacgagugguccauggccaccuacuaccuguucgacgagagcggcgaguucaagcuggccucccacauguacugcagcuucuacccccccgacgaggacgaggaggagggggacugcgaggaggaggaguucgagccguccacccaguacgaguacggcacggaggacgacuaccagggcaagccccucgaguucggggcgaccagcgccgcccugcagcccgaggaggagcaggaggaggacuggcuggacgacgacucccagcagaccgugggccagcaggacgggagcgaggacaaccagaccacgaccauccagaccaucguggagguccagccccagcucgagauggagcugaccccgguggugcagacgaucgaggucaacuccuucagcggcuaccugaagcucaccgacaacguguacaucaagaacgccgacaucguggaggaggcgaagaaggucaagcccaccgugguggucaacgccgccaacguguaccugaagcacgggggcggcguggccggggcccugaacaaggcgaccaacaacgccaugcaggucgaguccgacgacuacaucgccacgaacggcccccucaagguggggggcagcugcguccuguccggccacaaccuggccaagcacugccuccacgugguggggcccaacgucaacaagggcgaggacauccagcugcugaagagcgccuacgagaacuucaaccagcacgaggugcuccuggcgccgcugcucuccgccgggaucuucggcgccgaccccauccacagccugcgggugugcgucgacaccgugcgcaccaacguguaccuggccgucuucgacaagaaccucuacgacaagcugguguccagcuuccuggagaugaagagcgagaagcagguggagcagaagaucgccgagauccccaaggaggaggucaagcccuucaucaccgaguccaagccgagcguggagcagcggaagcaggacgacaagaagaucaaggcgugcguggaggaggucacgaccacccucgaggagaccaaguuccugacggagaaccugcuccuguacaucgacaucaacgggaaccugcaccccgacuccgccacccucgugagcgacaucgacaucaccuuccugaagaaggacgcccccuacaucgugggcgacgucgugcaggagggcgugcugaccgccgucgugauccccacgaagaaggccgggggcaccaccgagaugcucgcgaaggcccugcgcaaggugccgaccgacaacuacaucacgaccuaccccgggcagggccugaacggguacaccgucgaggaggccaagaccgugcucaagaagugcaaguccgccuucuacauccugcccagcaucaucuccaacgagaagcaggagauccugggcaccgugagcuggaaccuccgggagaugcuggcgcacgccgaggagacgcgcaagcugaugcccgucugcguggagaccaaggccaucguguccaccauccagcggaaguacaagggcaucaagauccaggagggggucguggacuacggcgcccgcuucuacuucuacaccagcaagacgaccguggccucccugaucaacacccucaacgaccugaacgagacccuggucacgaugccgcucggguacgugacccacggccugaaccuggaggaggcggcccgguacaugcgcagccucaaggugcccgccaccgucuccgugagcucccccgacgccgugaccgccuacaacggguaccugacgagcuccagcaagacccccgaggagcacuucaucgagaccaucucccuggcgggcagcuacaaggacuggagcuacuccggccagagcacccagcucgggaucgaguuccugaagcggggcgacaaguccgucuacuacacgagcaacccgaccaccuuccaccuggacggggaggugaucaccuucgacaaccucaagacgcugcugucccuccgcgaggugcggaccaucaaggucuucaccaccguggacaacaucaaccugcacacgcagguggucgacaugagcaugaccuacggccagcaguucggccccaccuaccuggacggggccgacgugaccaagaucaagccccacaacucccacgagggcaagacguucuacgugcucccgaacgacgacacccugcgcgucgaggccuucgaguacuaccacaccaccgaccccagcuuccuggggcgguacauguccgcccucaaccacacgaagaaguggaaguacccccaggugaacggccugaccagcaucaagugggccgacaacaacugcuaccuggcgaccgcccuccugacccugcagcagaucgagcucaaguucaaccccccggcccugcaggacgccuacuaccgcgcgcgggccggggaggccgccaacuucugcgcccugauccucgcguacugcaacaagacggugggcgagcugggcgacguccgcgagaccauguccuaccuguuccagcacgccaaccucgacagcugcaagcgggugcugaacgucgugugcaagaccugcgggcagcagcagaccacccugaagggcguggaggccgucauguacauggggacgcucuccuacgagcaguucaagaagggcgugcagauccccugcaccugcgggaagcaggccaccaaguaccuggugcagcaggagagccccuucgucaugauguccgcccccccggcgcaguacgagcugaagcacggcaccuucacgugcgccagcgaguacaccggcaacuaccagugcgggcacuacaagcacaucaccuccaaggagacccucuacugcaucgacggcgcccugcugacgaagagcagcgaguacaaggggcccaucaccgacguguucuacaaggagaacuccuacaccaccacgaucaagcccgugaccuacaagcucgacggcgucgugugcaccgagaucgaccccaagcuggacaacuacuacaagaaggacaacagcuacuucaccgagcagccgaucgaccuggugcccaaccagcccuaccccaacgccuccuucgacaacuucaaguucgucugcgacaacaucaaguucgccgacgaccucaaccagcugacgggguacaagaagccggcgagccgcgagcugaaggugaccuucuuccccgaccucaacggcgacguggucgccaucgacuacaagcacuacacccccuccuucaagaagggcgccaagcugcugcacaagcccaucguguggcacgugaacaacgccaccaacaaggcgacguacaagccgaacaccuggugcauccggugccucuggagcaccaagcccgucgagaccuccaacagcuucgacgugcugaaguccgaggacgcccaggggauggacaaccuggccugcgaggaccucaagagcguguccgaggaggucguggagaaccccacgauccagaaggacgugcuggagugcaacgucaagaccaccgagguggugggcgacaucauccugaagcccgccaacaacagccucaagaucaccgaggaggucgggcacacggaccugauggccgcguacguggacaacuccagccugaccaucaagaagccgaacgagcucucccgcgugcugggccugaagacccucgccacccacgggcuggccgccgucaacagcgugcccugggacacgaucgccaacuacgcgaagcccuuccugaacaagguggucuccaccaccaccaacaucgugacgcgcugccucaaccgggugugcaccaacuacaugccguacuucuucacccugcugcuccagcugugcaccuucacccgcagcacgaacucccggaucaaggccagcaugcccaccaccaucgccaagaacaccgucaagagcgugggcaaguucugccuggaggccuccuucaacuaccucaagagccccaacuucuccaagcugaucaacaucaucaucugguuccugcuccugagcgugugccugggcucccucaucuacagcacggccgcgcuggggguccugauguccaaccucggcaugcccagcuacugcaccggguaccgcgagggcuaccugaacuccaccaacgugaccaucgccacguacugcaccggcagcaucccgugcuccgugugccugagcgggcucgacucccuggacaccuaccccagccuggagaccauccagaucacgaucuccagcuucaagugggaccucaccgccuucggccuggucgccgagugguuccuggccuacauccucuucacccgguucuucuacgugcuggggcuggcggccaucaugcagcucuucuucuccuacuucgccgugcacuucaucagcaacuccuggcugauguggcugaucaucaaccugguccagauggcccccaucagcgcgauggugcgcauguacaucuucuucgccagcuucuacuacguguggaaguccuacguccacgugguggacggcugcaacagcuccaccugcaugaugugcuacaagcggaaccgcgccacgcgggucgagugcaccaccaucgugaacgggguccgccggagcuucuacguguacgccaacggcggcaagggguucugcaagcuccacaacuggaacugcgugaacugcgacaccuucugcgccggcuccacguucaucagcgacgaggucgcgcgcgaccugucccugcaguucaagcggcccaucaacccgaccgaccagagcuccuacaucguggacagcgugaccgucaagaacggguccauccaccucuacuucgacaaggccggccagaagaccuacgagcgccacagccugucccacuucgugaaccuggacaaccuccgggccaacaacacgaaggggagccugcccaucaacgugaucgucuucgacggcaaguccaagugcgaggagagcuccgccaagagcgccuccguguacuacagccagcugaugugccagcccauccuccugcuggaccaggcgcucgugagcgacgucggcgacuccgccgagguggccgugaagauguucgacgccuacgucaacaccuucagcuccaccuucaacgugcccauggagaagcugaagacccugguggccacggcggaggccgagcucgccaagaacgucagccuggacaacgugcuguccaccuucaucagcgccgcgcgccagggguucguggacuccgacgucgagaccaaggacgugguggagugccucaagcugagccaccaguccgacaucgaggucaccggcgacagcugcaacaacuacaugcugacguacaacaagguggagaacaugaccccgcgggaccucggggccugcaucgacugcuccgcccgccacaucaacgcccagguggccaagagccacaacaucgcgcugaucuggaacgucaaggacuucaugucccugagcgagcagcuccggaagcagauccgcuccgccgccaagaagaacaaccugcccuucaagcugaccugcgccaccacgcgccagguggugaacgucgugaccaccaagaucgcccucaagggcgggugaggacuagucccuguucccagagcccacuuuuuuuucuuuuuuugaaauaaaauagccugucuuucagaucucaaaggcucuuuucagagccaccaaaaaaaaaaaaaaaaaaaaaaaaaaaaaaaaaaaaaaaaaaaaaaaaaaaaaaaaaaaaaaaaaaaaaaaaaaaaaaaaaaaaaaaaaaaaaaaaaaaaa

SEQ ID NO: 19908 - RNA, 6113 nt, Artificial Sequence
  SARS-CoV-2__MT675289.1__non-structural protein 3 (NSP3) mRNA gc
aggagagucccgcagucggcguccagcggcucugcuuguucgugugugugucguugcaggccuuauucaagcuuaccauggcccccaccaaggugaccuucggcgacgacacggucaucgaggugcagggguacaagagcgugaacaucaccuucgagcuggacgagcgcaucgacaagguccucaacgagaagugcuccgccuacaccguggagcugggcaccgaggugaacgaguucgcgugcgucguggccgacgccgugaucaagacgcugcagccggucagcgagcuccugaccccccuggggaucgaccucgacgagugguccauggccaccuacuaccuguucgacgagagcggcgaguucaagcuggccucccacauguacugcagcuucuacccccccgacgaggacgaggaggagggggacugcgaggaggaggaguucgagccguccacccaguacgaguacggcacggaggacgacuaccagggcaagccccucgaguucggggcgaccagcgccgcccugcagcccgaggaggagcaggaggaggacuggcuggacgacgacucccagcagaccgugggccagcaggacgggagcgaggacaaccagaccacgaccauccagaccaucguggagguccagccccagcucgagauggagcugaccccgguggugcagacgaucgaggucaacuccuucagcggcuaccugaagcucaccgacaacguguacaucaagaacgccgacaucguggaggaggcgaagaaggucaagcccaccgugguggucaacgccgccaacguguaccugaagcacgggggcggcguggccggggcccugaacaaggcgaccaacaacgccaugcaggucgaguccgacgacuacaucgccacgaacggcccccucaagguggggggcagcugcguccuguccggccacaaccuggccaagcacugccuccacgugguggggcccaacgucaacaagggcgaggacauccagcugcugaagagcgccuacgagaacuucaaccagcacgaggugcuccuggcgccgcugcucuccgccgggaucuucggcgccgaccccauccacagccugcgggugugcgucgacaccgugcgcaccaacguguaccuggccgucuucgacaagaaccucuacgacaagcugguguccagcuuccuggagaugaagagcgagaagcagguggagcagaagaucgccgagauccccaaggaggaggucaagcccuucaucaccgaguccaagccgagcguggagcagcggaagcaggacgacaagaagaucaaggcgugcguggaggaggucacgaccacccucgaggagaccaaguuccugacggagaaccugcuccuguacaucgacaucaacgggaaccugcaccccgacuccgccacccucgugagcgacaucgacaucaccuuccugaagaaggacgcccccuacaucgugggcgacgucgugcaggagggcgugcugaccgccgucgugauccccacgaagaaggccgggggcaccaccgagaugcucgcgaaggcccugcgcaaggugccgaccgacuccuacaucacgaccuaccccgggcagggccugaacggguacaccgucgaggaggccaagaccgugcucaagaagugcaagagcgccuucuacauccugcccuccaucaucagcaacgagaagcaggagauccugggcaccguguccuggaaccuccgggagaugcuggcgcacgccgaggagacgcgcaagcugaugcccgucugcguggagaccaaggccaucgugagcaccauccagcggaaguacaagggcaucaagauccaggagggggucguggacuacggcgcccgcuucuacuucuacaccuccaagacgaccguggccagccugaucaacacccucaacgaccugaacgagacccuggucacgaugccgcucggguacgugacccacggccugaaccuggaggaggcggcccgguacaugcgcucccucaaggugcccgccaccgucagcguguccagccccgacgccgugaccgccuacaacggguaccugacguccagcuccaagacccccgaggagcacuucaucgagaccaucagccuggcgggcagcuacaaggacugguccuacagcggccaguccacccagcucgggaucgaguuccugaagcggggcgacaagagcgucuacuacacguccaacccgaccaccuuccaccuggacggggaggugaucaccuucgacaaccucaagacgcugcugagccuccgcgaggugcggaccaucaaggucuucaccaccguggacaacaucaaccugcacacgcagguggucgacauguccaugaccuacggccagcaguucggccccaccuaccuggacggggccgacgugaccaagaucaagccccacaacagccacgagggcaagacguucuacgugcucccgaacgacgacacccugcgcgucgaggccuucgaguacuaccacaccaccgaccccuccuuccuggggcgguacaugagcgcccucaaccacacgaagaaguggaaguacccccaggugaacggccugaccuccaucaagugggccgacaacaacugcuaccuggcgaccgcccuccugacccugcagcagaucgagcucaaguucaaccccccggcccugcaggacgccuacuaccgcgcgcgggccggggaggccgccaacuucugcgcccugauccucgcguacugcaacaagacggugggcgagcugggcgacguccgcgagaccaugagcuaccuguuccagcacgccaaccucgacuccugcaagcgggugcugaacgucgugugcaagaccugcgggcagcagcagaccacccugaagggcguggaggccgucauguacauggggacgcucagcuacgagcaguucaagaagggcgugcagauccccugcaccugcgggaagcaggccaccaaguaccuggugcagcaggagucccccuucgucaugaugagcgcccccccggcgcaguacgagcugaagcacggcaccuucacgugcgccuccgaguacaccggcaacuaccagugcgggcacuacaagcacaucaccagcaaggagacccucuacugcaucgacggcgcccugcugacgaagagcuccgaguacaaggggcccaucaccgacguguucuacaaggagaacagcuacaccaccacgaucaagcccgugaccuacaagcucgacggcgucgugugcaccgagaucgaccccaagcuggacaacuacuacaagaaggacaacuccuacuucaccgagcagccgaucgaccuggugcccaaccagcccuaccccaacgccagcuucgacaacuucaaguucgucugcgacaacaucaaguucgccgacgaccucaaccagcugacgggguacaagaagccggcgucccgcgagcugaaggugaccuucuuccccgaccucaacggcgacguggucgccaucgacuacaagcacuacacccccagcuucaagaagggcgccaagcugcugcacaagcccaucguguggcacgugaacaacgccaccaacaaggcgacguacaagccgaacaccuggugcauccggugccucugguccaccaagcccgucgagaccagcaacuccuucgacgugcugaagagcgaggacgcccaggggauggacaaccuggccugcgaggaccucaagcccguguccgaggaggucguggagaaccccacgauccagaaggacgugcuggagugcaacgucaagaccaccgagguggugggcgacaucauccugaagccggccaacaacagccucaagaucaccgaggaggucgggcacacggaccugauggccgcguacguggacaacuccagccugaccaucaagaagcccaacgagcucucccgcgugcugggccugaagacccucgccacccacgggcuggccgccgucaacagcgugcccugggacacgaucgccaacuacgcgaagccguuccugaacaagguggucuccaccaccaccaacaucgugacgcgcugccucaaccgggugugcaccaacuacaugcccuacuucuucacccugcugcuccagcugugcaccuucacccgcagcacgaacucccggaucaaggccagcaugcccaccaccaucgccaagaacaccgucaagagcgugggcaaguucugccuggaggccuccuucaacuaccucaagagccccaacuucuccaagcugaucaacaucaucaucugguuccugcuccugagcgugugccugggcucccucaucuacagcacggccgcgcuggggguccugauguccaaccucggcaugccgagcuacugcaccggguaccgcgagggcuaccugaacuccaccaacgugaccaucgccacguacugcaccggcagcauccccugcuccgugugccugagcgggcucgacucccuggacaccuaccccagccuggagaccauccagaucacgaucuccagcuucaagugggaccucaccgccuucggccuggucgccgagugguuccuggccuacauccucuucacccgguucuucuacgugcuggggcuggcggccaucaugcagcucuucuucuccuacuucgccgugcacuucaucagcaacuccuggcugauguggcugaucaucaaccugguccagauggcccccaucagcgcgauggugcgcauguacaucuucuucgccagcuucuacuacguguggaaguccuacguccacgugguggacggcugcaacagcuccaccugcaugaugugcuacaagcggaaccgcgccacgcgggucgagugcaccaccaucgugaacgggguccgccggagcuucuacguguacgccaacggcggcaagggguucugcaagcuccacaacuggaacugcgugaacugcgacaccuucugcgccggcuccacguucaucagcgacgaggucgcgcgcgaccugucccugcaguucaagcggccgaucaaccccaccgaccagagcuccuacaucguggacagcgugaccgucaagaacggguccauccaccucuacuucgacaaggccggccagaagaccuacgagcgccacagccugucccacuucgugaaccuggacaaccuccgggccaacaacacgaaggggagccugcccaucaacgugaucgucuucgacggcaaguccaagugcgaggagagcuccgccaagagcgccuccguguacuacagccagcugaugugccagcccauccuccugcuggaccaggcgcucgugagcgacgucggcgacuccgccgagguggccgugaagauguucgacgccuacgucaacaccuucagcuccaccuucaacgugccgauggagaagcugaagacccugguggccacggcggaggccgagcucgccaagaacgucagccuggacaacgugcuguccaccuucaucagcgccgcgcgccagggguucguggacuccgacgucgagaccaaggacgugguggagugccucaagcugagccaccaguccgacaucgaggucaccggcgacagcugcaacaacuacaugcugacguacaacaagguggagaacaugaccccccgggaccucggggccugcaucgacugcuccgcccgccacaucaacgcccagguggccaagagccacaacaucgcgcugaucuggaacgucaaggacuucaugucccugagcgagcagcuccggaagcagauccgcuccgccgccaagaagaacaaccugcccuucaagcugaccugcgccaccacgcgccagguggugaacgucgugaccaccaagaucgcccucaagggcgggugaggacuagucccuguucccagagcccacuuuuuuuucuuuuuuugaaauaaaauagccugucuuucagaucucaaaggcucuuuucagagccaccaaaaaaaaaaaaaaaaaaaaaaaaaaaaaaaaaaaaaaaaaaaaaaaaaaaaaaaaaaaaaaaaaaaaaaaaaaaaaaaaaaaaaaaaaaaaaaaaaaaaa

SEQ ID NO: 19909 - RNA, 6113 nt, Artificial Sequence
  SARS-CoV-2__MT675950.1__non-structural protein 3 (NSP3) mRNA gc
aggagagucccgcagucggcguccagcggcucugcuuguucgugugugugucguugcaggccuuauucaagcuuaccauggcccccaccaaggugaccuucggcgacgacacggucaucgaggugcagggguacaagagcgugaacaucaccuucgagcuggacgagcgcaucgacaagguccucaacgagaagugcuccgccuacaccguggagcugggcaccgaggugaacgaguucgcgugcgucguggccgacgccgugaucaagacgcugcagccggucagcgagcuccugaccccccuggggaucgaccucgacgagugguccauggccaccuacuaccuguucgacgagagcggcgaguucaagcuggccucccacauguacugcagcuucuacccccccgacgaggacgaggaggagggggacugcgaggaggaggaguucgagccguccacccaguacgaguacggcacggaggacgacuaccagggcaagccccucgaguucggggcgaccagcgccgcccugcagcccgaggaggagcaggaggaggacuggcuggacgacgacucccagcagaccgugggccagcaggacgggagcgaggacaaccagaccacgaccauccagaccaucguggagguccagccccagcucgagauggagcugaccccgguggugcagacgaucgaggucaacuccuucagcggcuaccugaagcucaccgacaacguguacaucaagaacgccgacaucguggaggaggcgaagaaggucaagcccaccgugguggucaacgccgccaacguguaccugaagcacgggggcggcguggccggggcccugaacaaggcgaccaacaacgccaugcaggucgaguccgacgacuacaucgccacgaacggcccccucaagguggggggcagcugcguccuguccggccacaaccuggccaagcacugccuccacgugguggggcccaacgucaacaagggcgaggacauccagcugcugaagagcgccuacgagaacuucaaccagcacgaggugcuccuggcgccgcugcucuccgccgggaucuucggcgccgaccccauccacagccugcgggugugcgucgacaccgugcgcaccaacguguaccuggccgucuucgacaagaaccucuacgacaagcugguguccagcuuccuggagaugaagagcgagaagcagguggagcagaagaucgccgagauccccaaggaggaggucaagcccuucaucaccgaguccaagccgagcguggagcagcggaagcaggacgacaagaagaucaaggcgugcguggaggaggucacgaccacccucgaggagaccaaguuccugacggagaaccugcuccuguacaucgacaucaacgggaaccugcaccccgacuccgccacccucgugagcgacaucgacaucaccuuccugaagaaggacgcccccuacaucgugggcgacgucgugcaggagggcgugcugaccgccgucgugauccccacgaagaaggccgggggcaccaccgagaugcucgcgaaggcccugcgcaaggugccgaccgacaacuacaucacgaccuaccccgggcagggccugaacggguacaccgucgaggaggccaagaccgugcucaagaagugcaaguccgccuucuacauccugcccagcaucaucuccaacgagaagcaggagauccugggcaccgugagcuggaaccuccgggagaugcuggcgcacgccgaggagacgcgcaagcugaugcccgucugcguggagaccaaggccaucguguccaccauccagcggaaguacaagggcaucaagauccaggagggggucguggacuacggcgcccgcuucuacuucuacaccagcaagacgaccguggccucccugaucaacacccucaacgaccugaacgagacccuggucacgaugccgcucggguacgugacccacggccugaaccuggaggaggcggcccgguacaugcgcagccucaaggugcccgccaccgucuccgugagcucccccgacgccgugaccgccuacaacggguaccugacgagcuccagcaagacccccgaggagcacuucaucgagaccaucucccuggcgggcagcuacaaggacuggagcuacuccggccagagcacccagcucgggaucgaguuccugaagcggggcgacaaguccgucuacuacacgagcaacccgaccaccuuccaccuggacggggaggugaucaccuucgacaaccucaagacgcugcugucccuccgcgaggugcggaccaucaaggucuucaccaccguggacaacaucaaccugcacacgcagguggucgacaugagcaugaccuacggccagcaguucggccccaccuaccuggacggggccgacgugaccaagaucaagccccacaacucccacgagggcaagacguucuacgugcucccgaacgacgacacccugcgcgucgaggccuucgaguacuaccacaccaccgaccccagcuuccuggggcgguacauguccgcccucaaccacacgaagaaguggaaguacccccaggugaacggccugaccagcaucaagugggccgacaacaacugcuaccuggcgaccgcccuccugacccugcagcagaucgagcucaaguucaaccccccggcccugcaggacgccuacuaccgcgcgcgggccggggaggccgccaacuucugcgcccugauccucgcguacugcaacaagacggugggcgagcugggcgacguccgcgagaccauguccuaccuguuccagcacgccaaccucgacagcugcaagcgggugcugaacgucgugugcaagaccugcgggcagcagcagaccacccugaagggcguggaggccgucauguacauggggacgcucuccuacgagcaguucaagaagggcgugcagauccccugcaccugcgggaagcaggccaccaaguaccuggugcagcaggagagccccuucgucaugauguccgcccccccggcgcaguacgagcugaagcacggcaccuucaucugcgccagcgaguacacgggcaacuaccagugcgggcacuacaagcacaucaccuccaaggagacccucuacugcaucgacggcgcccugcugaccaagagcagcgaguacaaggggcccaucacggacguguucuacaaggagaacuccuacaccaccaccaucaagcccgugacguacaagcucgacggcgucgugugcaccgagaucgaccccaagcuggacaacuacuacaagaaggacaacagcuacuucaccgagcagccgaucgaccuggugcccaaccagcccuaccccaacgccuccuucgacaacuucaaguucgucugcgacaacaucaaguucgccgacgaccucaaccagcugaccggguacaagaagccggcgagccgcgagcugaaggugacguucuuccccgaccucaacggcgacguggucgccaucgacuacaagcacuacacccccuccuucaagaagggcgccaagcugcugcacaagcccaucguguggcacgugaacaacgccaccaacaaggcgaccuacaagccgaacacguggugcauccggugccucuggagcaccaagcccgucgagaccuccaacagcuucgacgugcugaaguccgaggacgcccaggggauggacaaccuggccugcgaggaccucaagcccgugagcgaggaggucguggagaaccccaccauccagaaggacgugcuggagugcaacgucaagacgaccgagguggugggcgacaucauccugaagccggccaacaacucccucaagaucaccgaggaggucgggcacaccgaccugauggccgcguacguggacaacagcucccugacgaucaagaagcccaacgagcucagccgcgugcugggccugaagacccucgccacccacgggcuggccgccgucaacuccgugcccugggacaccaucgccaacuacgcgaagccguuccugaacaagguggucagcacgaccaccaacaucgugacccgcugccucaaccgggugugcacgaacuacaugcccuacuucuucacccugcugcuccagcugugcaccuucacccgcuccaccaacagccggaucaaggccuccaugcccacgaccaucgccaagaacaccgucaagagcgugggcaaguucugccuggaggccagcuucaacuaccucaagucccccaacuucagcaagcugaucaacaucaucaucugguuccugcuccuguccgugugccugggcagccucaucuacuccaccgccgcgcuggggguccugaugagcaaccucggcaugccguccuacugcacgggguaccgcgagggcuaccugaacagcaccaacgugaccaucgccaccuacugcacgggcuccauccccugcagcgugugccuguccgggcucgacagccuggacaccuaccccucccuggagaccauccagaucaccaucagcuccuucaagugggaccucacggccuucggccuggucgccgagugguuccuggccuacauccucuucacccgguucuucuacgugcuggggcuggcggccaucaugcagcucuucuucagcuacuucgccgugcacuucaucuccaacagcuggcugauguggcugaucaucaaccugguccagauggcccccaucuccgcgauggugcgcauguacaucuucuucgccagcuucuacuacguguggaagagcuacguccacgugguggacggcugcaacuccagcaccugcaugaugugcuacaagcggaaccgcgccacccgggucgagugcacgaccaucgugaacgggguccgccgguccuucuacguguacgccaacggcggcaagggguucugcaagcuccacaacuggaacugcgugaacugcgacaccuucugcgccggcagcaccuucaucuccgacgaggucgcgcgcgaccugagccugcaguucaagcggccgaucaaccccacggaccaguccagcuacaucguggacuccgugaccgucaagaacgggagcauccaccucuacuucgacaaggccggccagaagaccuacgagcgccacucccugagccacuucgugaaccuggacaaccuccgggccaacaacaccaaggggucccugcccaucaacgugaucgucuucgacggcaagagcaagugcgaggaguccagcgccaaguccgccagcguguacuacucccagcugaugugccagcccauccuccugcuggaccaggcgcucgugagcgacgucggcgacagcgccgagguggccgugaagauguucgacgccuacgucaacacguucuccagcaccuucaacgugccgauggagaagcugaagacccugguggccaccgcggaggccgagcucgccaagaacgucucccuggacaacgugcugagcacguucaucuccgccgcgcgccagggguucguggacagcgacgucgagaccaaggacgugguggagugccucaagcugucccaccagagcgacaucgaggucaccggcgacuccugcaacaacuacaugcugaccuacaacaagguggagaacaugacgccccgggaccucggggccugcaucgacugcagcgcccgccacaucaacgcccagguggccaagucccacaacaucgcgcugaucuggaacgucaaggacuucaugagccuguccgagcagcuccggaagcagauccgcagcgccgccaagaagaacaaccugcccuucaagcugaccugcgccaccacccgccagguggugaacgucgugacgaccaagaucgcccucaagggcgggugaggacuagucccuguucccagagcccacuuuuuuuucuuuuuuugaaauaaaauagccugucuuucagaucucaaaggcucuuuucagagccaccaaaaaaaaaaaaaaaaaaaaaaaaaaaaaaaaaaaaaaaaaaaaaaaaaaaaaaaaaaaaaaaaaaaaaaaaaaaaaaaaaaaaaaaaaaaaaaaaaaaaa

SEQ ID NO: 19910 - RNA, 6113 nt, Artificial Sequence
  SARS-CoV-2__MT664106.1__non-structural protein 3 (NSP3) mRNA gc
aggagagucccgcagucggcguccagcggcucugcuuguucgugugugugucguugcaggccuuauucaagcuuaccauggcccccaccaaggugaccuucggcgacgacacggucaucgaggugcagggguacaagagcgugaacaucaccuucgagcuggacgagcgcaucgacaagguccucaacgagaagugcuccgccuacaccguggagcugggcaccgaggugaacgaguucgcgugcgucguggccgacgccgugaucaagacgcugcagccggucagcgagcuccugaccccccuggggaucgaccucgacgagugguccauggccaccuacuaccuguucgacgagagcggcgaguucaagcuggccucccacauguacugcagcuucuacccccccgacgaggacgaggaggagggggacugcgaggaggaggaguucgagccguccacccaguacgaguacggcacggaggacgacuaccagggcaagccccucgaguucggggcgaccagcgccgcccugcagcccgaggaggagcaggaggaggacuggcuggacgacgacucccagcagaccgugggccagcaggacgggagcgaggacaaccagaccacgaccauccagaccaucguggagguccagccccagcucgagauggagcugaccccgguggugcagacgaucgaggucaacuccuucagcggcuaccugaagcucaccgacaacguguacaucaagaacgccgacaucguggaggaggcgaagaaggucaagcccaccgugguggucaacgccgccaacguguaccugaagcacgggggcggcguggccggggcccugaacaaggcgaccaacaacgccaugcaggucgaguccgacgacuacaucgccacgaacggcccccucaagguggggggcagcugcguccuguccggccacaaccuggccaagcacugccuccacgugguggggcccaacgucaacaagggcgaggacauccagcugcugaagagcgccuacgagaacuucaaccagcacgaggugcuccuggcgccgcugcucuccgccgggaucuucggcgccgaccccauccacagccugcgggugugcgucgacaccgugcgcaccaacguguaccuggccgucuucgacaagaaccucuacgacaagcugguguccagcuuccuggagaugaagagcgagaagcagguggagcagaagaucgccgagauccccaaggaggaggucaagcccuucaucaccgaguccaagccgagcguggagcagcggaagcaggacgacaagaagaucaaggcgugcguggaggaggucacgaccacccucgaggagaccaaguuccugacggagaaccugcuccuguacaucgacaucaacgggaaccugcaccccgacuccgccacccucgugagcgacaucgacaucaccuuccugaagaaggacgcccccuacaucgugggcgacgucgugcaggagggcgugcugaccgccgucgugauccccacgaagaaggccgggggcaccaccgagaugcucgcgaaggcccugcgcaaggugccgaccgacaacuacaucacgaccuaccccgggcagggccugaacggguacaccgucgaggaggccaagaccgugcucaagaagugcaaguccgccuucuacauccugcccagcaucaucuccaacgagaagcaggagauccugggcaccgugagcuggaaccuccgggagaugcuggcgcacgccgaggagacgcgcaagcugaugcccgucugcguggagaccaaggccaucguguccaccauccagcggaaguacaagggcaucaagauccaggagggggucguggacuacggcgcccgcuucuacuucuacaccagcaagacgaccguggccucccugaucaacacccucaacgaccugaacgagacccuggucacgaugccgcucggguacgugacccacggccugaaccuggaggaggcggcccgguacaugcgcagccucaaggugcccgccaccgucuccgugagcucccccgacgccgugaccgccuacaacggguaccugacgagcuccagcaagacccccgaggagcacuucaucgagaccaucucccuggcgggcagcuacaaggacuggagcuacuccggccagagcacccagcucgggaucgaguuccugaagcggggcgacaaguccgucuacuacacgagcaacccgaccaccuuccaccuggacggggaggugaucaccuucgacaaccucaagacgcugcugucccuccgcgaggugcggaccaucaaggucuucaccaccguggacaacaucaaccugcacacgcagguggucgacaugagcaugaccuacggccagcaguucggccccaccuaccuggacggggccgacgugaccaagaucaagccccacaacucccacgagggcaagacguucuacgugcucccgaacgacgacacccugcgcgucgaggccuucgaguacuaccacaccaccgaccccagcuuccuggggcgguacauguccgcccucaaccacacgaagaaguggaaguacccccaggugaacggccugaccagcaucaagugggccgacaacaacugcuaccuggcgaccgcccuccugacccugcagcagaucgagcucaaguucaaccccccggcccugcaggacgccuacuaccgcgcgcgggccggggaggccgccaacuucugcgcccugauccucgcguacugcaacaagacggugggcgagcugggcgacguccgcgagaccauguccuaccuguuccagcacgccaaccucgacagcugcaagcgggugcugaacgucgugugcaagaccugcgggcagcagcagaccacccugaagggcguggaggccgucauguacauggggacgcucuccuacgagcaguucaagaagggcgugcagauccccugcaccugcgggaagcaggccaccaaguaccuggugcagcaggagagccccuucgucaugauguccgcccccccggcgcaguacgagcugaagcacggcaccuucacgugcgccagcgaguacaccggcaacuaccagugcgggcacuacaagcacaucaccuccaaggagacccucuacugcaucgacggcgcccugcugacgaagagcagcgaguacaaggggcccaucaccgacguguucuacaaggagaacuccuacaccaccacgaucaagcccgugaccuacaagcucgacggcgucgugugcaccgagaucgaccccaagcuggacaacuacuacaagaaggacaacagcuacuucaccgagcagccgaucgaccuggugcccaaccagcccuaccccaacgccuccuucgacaacuucaaguucgucugcgacaacaucaaguucgccgacgaccucaaccagcugacgggguacaagaagccggcgagccgcgagcugaaggugaccuucuuccccgaccucaacggcgacguggucgccaucgacuacaagcacuacacccccuccuucaagaagggcgccaagcugcugcacaagcccaucguguggcacgugaacaacgccaccaacaaggcgacguacaagccgaacaccuggugcauccggugccucuggagcaccaagcccgucgagaccuccaacagcuucgacgugcugaaguccgagaacgcccaggggauggacaaccuggccugcgaggaccucaagcccgugagcgaggaggucguggagaaccccacgauccagaaggacgugcuggagugcaacgucaagaccaccgagguggugggcgacaucauccugaagccggccaacaacucccucaagaucaccgaggaggucgggcacacggaccugauggccgcguacguggacaacagcucccugaccaucaagaagcccaacgagcucagccgcgugcugggccugaagacccucgccacccacgggcuggccgccgucaacuccgugcccugggacacgaucgccaacuacgcgaagccguuccugaacaagguggucagcaccaccaccaacaucgugacgcgcugccucaaccgggugugcaccaacuacaugcccuacuucuucacccugcugcuccagcugugcaccuucacccgcuccacgaacagccggaucaaggccuccaugcccaccaccaucgccaagaacaccgucaagagcgugggcaaguucugccuggaggccagcuucaacuaccucaagucccccaacuucagcaagcugaucaacaucaucaucugguuccugcuccuguccgugugccugggcagccucaucuacuccacggccgcgcuggggguccugaugagcaaccucggcaugccguccuacugcaccggguaccgcgagggcuaccugaacagcaccaacgugaccaucgccacguacugcaccggcuccauccccugcagcgugugccuguccgggcucgacagccuggacaccuaccccucccuggagaccauccagaucacgaucagcuccuucaagugggaccucaccgccuucggccuggucgccgagugguuccuggccuacauccucuucacccgguucuucuacgugcuggggcuggcggccaucaugcagcucuucuucagcuacuucgccgugcacuucaucuccaacagcuggcugauguggcugaucaucaaccugguccagauggcccccaucuccgcgauggugcgcauguacaucuucuucgccagcuucuacuacguguggaagagcuacguccacgugguggacggcugcaacuccagcaccugcaugaugugcuacaagcggaaccgcgccacgcgggucgagugcaccaccaucgugaacgggguccgccgguccuucuacguguacgccaacggcggcaagggguucugcaagcuccacaacuggaacugcgugaacugcgacaccuucugcgccggcagcacguucaucuccgacgaggucgcgcgcgaccugagccugcaguucaagcggccgaucaaccccaccgaccaguccagcuacaucguggacuccgugaccgucaagaacgggagcauccaccucuacuucgacaaggccggccagaagaccuacgagcgccacucccugagccacuucgugaaccuggacaaccuccgggccaacaacacgaaggggucccugcccaucaacgugaucgucuucgacggcaagagcaagugcgaggaguccagcgccaaguccgccagcguguacuacucccagcugaugugccagcccauccuccugcuggaccaggcgcucgugagcgacgucggcgacagcgccgagguggccgugaagauguucgacgccuacgucaacaccuucuccagcaccuucaacgugccgauggagaagcugaagacccugguggccacggcggaggccgagcucgccaagaacgucucccuggacaacgugcugagcaccuucaucuccgccgcgcgccagggguucguggacagcgacgucgagaccaaggacgugguggagugccucaagcugucccaccagagcgacaucgaggucaccggcgacuccugcaacaacuacaugcugacguacaacaagguggagaacaugaccccccgggaccucggggccugcaucgacugcagcgcccgccacaucaacgcccagguggccaagucccacaacaucgcgcugaucuggaacgucaaggacuucaugagccuguccgagcagcuccggaagcagauccgcagcgccgccaagaagaacaaccugcccuucaagcugaccugcgccaccacgcgccagguggugaacgucgugaccaccaagaucgcccucaagggcgggugaggacuagucccuguucccagagcccacuuuuuuuucuuuuuuugaaauaaaauagccugucuuucagaucucaaaggcucuuuucagagccaccaaaaaaaaaaaaaaaaaaaaaaaaaaaaaaaaaaaaaaaaaaaaaaaaaaaaaaaaaaaaaaaaaaaaaaaaaaaaaaaaaaaaaaaaaaaaaaaaaaaaa

SEQ ID NO: 19911 - RNA, 6113 nt, Artificial Sequence
  SARS-CoV-2__MT664171.1__non-structural protein 3 (NSP3) mRNA gc
aggagagucccgcagucggcguccagcggcucugcuuguucgugugugugucguugcaggccuuauucaagcuuaccauggcccccaccaaggugaccuucggcgacgacacggucaucgaggugcagggguacaagagcgugaacaucaccuucgagcuggacgagcgcaucgacaagguccucaacgagaagugcuccgccuacaccguggagcugggcaccgaggugaacgaguucgcgugcgucguggccgacgccgugaucaagacgcugcagccggucagcgagcuccugaccccccuggggaucgaccucgacgagugguccauggccaccuacuaccuguucgacgagagcggcgaguucaagcuggccucccacauguacugcagcuucuacccccccgacgaggacgaggaggagggggacugcgaggaggaggaguucgagccguccacccaguacgaguacggcacggaggacgacuaccagggcaagccccucgaguucggggcgaccagcgccgcccugcagcccgaggaggagcaggaggaggacuggcuggacgacgacucccagcagaccgugggccagcaggacgggagcgaggacaaccagaccacgaccauccagaccaucguggagguccagccccagcucgagauggagcugaccccgguggugcagacgaucgaggucaacuccuucagcggcuaccugaagcucaccgacaacguguacaucaagaacgccgacaucguggaggaggcgaagaaggucaagcccaccgugguggucaacgccgccaacguguaccugaagcacgggggcggcguggccggggcccugaacaaggcgaccaacaacgccaugcaggucgaguccgacgacuacaucgccacgaacggcccccucaagguggggggcagcugcguccuguccggccacaaccuggccaagcacugccuccacgugguggggcccaacgucaacaagggcgaggacauccagcugcugaagagcgccuacgagaacuucaaccagcacgaggugcuccuggcgccgcugcucuccgccgggaucuucggcgccgaccccauccacagccugcgggugugcgucgacaccgugcgcaccaacguguaccuggccgucuucgacaagaaccucuacgacaagcugguguccagcuuccuggagaugaagagcgagaagcagguggagcagaagaucgccgagauccccaaggaggaggucaagcccuucaucaccgaguccaagccgagcguggagcagcggaagcaggacgacaagaagaucaaggcgugcguggaggaggucacgaccacccucgaggagaccaaguuccugacggagaaccugcuccuguacaucgacaucaacgggaaccugcaccccgacuccgccacccucgugagcgacaucgacaucaccuuccugaagaaggacgcccccuacaucgugggcgacgucgugcaggagggcgugcugaccgccgucgugauccccacgaagaaggccgggggcaccaccgagaugcucgcgaaggcccugcgcaaggugccgaccgacaacuacaucacgaccuaccccgggcagggccugaacggguacaccgucgaggaggccaagaccgugcucaagaagugcaaguccgccuucuacauccugcccagcaucaucuccaacgagaagcaggagauccugggcaccgugagcuggaaccuccgggagaugcuggcgcacgccgaggagacgcgcaagcugaugcccgucugcguggagaccaaggccaucguguccaccauccagcggaaguacaagggcaucaagauccaggucggggugguggacuacggcgcccgcuucuacuucuacaccagcaagacgaccgucgccucccugaucaacacccucaacgaccugaacgagacccuggugacgaugccgcucggguacgugacccacggccugaaccuggaggaggcggcccgguacaugcgcagccucaagguccccgccaccguguccgugagcucccccgacgccgucaccgccuacaacggguaccugacgagcuccagcaagacccccgaggagcacuucaucgagaccaucucccuggcgggcagcuacaaggacuggagcuacuccggccagagcacccagcucgggaucgaguuccugaagcggggcgacaaguccguguacuacacgagcaacccgaccaccuuccaccuggacggggaggugaucaccuucgacaaccucaagacgcugcugucccuccgcgagguccggaccaucaagguguucaccaccguggacaacaucaaccugcacacgcaggucguggacaugagcaugaccuacggccagcaguucggccccaccuaccuggacggggccgacgugaccaagaucaagccccacaacucccacgagggcaagacguucuacguccucccgaacgacgacacccugcgcguggaggccuucgaguacuaccacaccaccgaccccagcuuccuggggcgguacauguccgcccucaaccacacgaagaaguggaaguacccccaggugaacggccugaccagcaucaagugggccgacaacaacugcuaccuggcgaccgcccuccugacccugcagcagaucgagcucaaguucaaccccccggcccugcaggacgccuacuaccgcgcgcgggccggggaggccgccaacuucugcgcccugauccucgcguacugcaacaagacggucggcgagcugggcgacgugcgcgagaccauguccuaccuguuccagcacgccaaccucgacagcugcaagcggguccugaacguggugugcaagaccugcgggcagcagcagaccacccugaagggcgucgaggccgugauguacauggggacgcucuccuacgagcaguucaagaagggcgugcagauccccugcaccugcgggaagcaggccaccaaguaccugguccagcaggagagccccuucgugaugauguccgcccccccggcgcaguacgagcugaagcacggcaccuucacgugcgccagcgaguacaccggcaacuaccagugcgggcacuacaagcacaucaccuccaaggagacccucuacugcaucgacggcgcccugcugacgaagagcagcgaguacaaggggcccaucaccgacguguucuacaaggagaacuccuacaccaccacgaucaagcccgucaccuacaagcucgacggcguggugugcaccgagaucgaccccaagcuggacaacuacuacaagaaggacaacagcuacuucaccgagcagccgaucgaccugguccccaaccagcccuaccccaacgccuccuucgacaacuucaaguucgugugcgacaacaucaaguucgccgacgaccucaaccagcugacgggguacaagaagccggcgagccgcgagcugaaggugaccuucuuccccgaccucaacggcgacgucguggccaucgacuacaagcacuacacccccuccuucaagaagggcgccaagcugcugcacaagcccaucguguggcacgucaacaacgccaccaacaaggcgacguacaagccgaacaccuggugcauccggugccucuggagcaccaagcccguggagaccuccaacagcuucgacgugcugaaguccgaggacgcccaggggauggacaaccuggccugcgaggaccucaagcccgucagcgaggaggugguggagaaccccacgauccagaaggacguccuggagugcaacgugaagaccaccgagguggucggcgacaucauccugaagccggccaacaacucccucaagaucaccgaggagguggggcacacggaccugauggccgcguacguggacaacagcucccugaccaucaagaagcccaacgagcucagccgcguccugggccugaagacccucgccacccacgggcuggccgccgugaacuccgugcccugggacacgaucgccaacuacgcgaagccguuccugaacaaggucgugagcaccaccaccaacaucgugacgcgcugccucaaccgggucugcaccaacuacaugcccuacuucuucacccugcugcuccagcugugcaccuucacccgcuccacgaacagccggaucaaggccuccaugcccaccaccaucgccaagaacaccgugaagagcgugggcaaguucugccuggaggccagcuucaacuaccucaagucccccaacuucagcaagcugaucaacaucaucaucugguuccugcuccuguccgucugccugggcagccucaucuacuccacggccgcgcugggggugcugaugagcaaccucggcaugccguccuacugcaccggguaccgcgagggcuaccugaacagcaccaacgugaccaucgccacguacugcaccggcuccauccccugcagcgucugccuguccgggcucgacagccuggacaccuaccccucccuggagaccauccagaucacgaucagcuccuucaagugggaccucaccgccuucggccugguggccgagugguuccuggccuacauccucuucacccgguucuucuacgugcuggggcuggcggccaucaugcagcucuucuucagcuacuucgccguccacuucaucuccaacagcuggcugauguggcugaucaucaaccuggugcagauggcccccaucuccgcgauggugcgcauguacaucuucuucgccagcuucuacuacgucuggaagagcuacgugcacguggucgacggcugcaacuccagcaccugcaugaugugcuacaagcggaaccgcgccacgcggguggagugcaccaccaucgucaacggggugcgccgguccuucuacguguacgccaacggcggcaagggguucugcaagcuccacaacuggaacugcgucaacugcgacaccuucugcgccggcagcacguucaucuccgacgagguggcgcgcgaccugagccugcaguucaagcggccgaucaaccccaccgaccaguccagcuacaucguggacuccgucaccgugaagaacgggagcauccaccucuacuucgacaaggccggccagaagaccuacgagcgccacucccugagccacuucgugaaccuggacaaccuccgggccaacaacacgaaggggucccugcccaucaacgucaucguguucgacggcaagagcaagugcgaggaguccagcgccaaguccgccagcguguacuacucccagcugaugugccagcccauccuccugcuggaccaggcgcucgucagcgacgugggcgacagcgccgagguggccgucaagauguucgacgccuacgugaacaccuucuccagcaccuucaacgugccgauggagaagcugaagacccuggucgccacggcggaggccgagcucgugaagaacgugucccuggacaacguccugagcaccuucaucuccgccgcccgccagggguucguggacagcgacguggagaccaaggacgucguggagugccucaagcugucccaccagagcgacaucgaggugaccggcgacuccugcaacaacuacaugcugacguacaacaaggucgagaacaugaccccccgggaccucggggcgugcaucgacugcagcgcccgccacaucaacgcccagguggccaagucccacaacaucgcccugaucuggaacgugaaggacuucaugagccuguccgagcagcuccggaagcagauccgcagcgcggccaagaagaacaaccugcccuucaagcugaccugcgccaccacgcgccaggucgugaacguggucaccaccaagaucgcccucaagggcgggugaggacuagucccuguucccagagcccacuuuuuuuucuuuuuuugaaauaaaauagccugucuuucagaucucaaaggcucuuuucagagccaccaaaaaaaaaaaaaaaaaaaaaaaaaaaaaaaaaaaaaaaaaaaaaaaaaaaaaaaaaaaaaaaaaaaaaaaaaaaaaaaaaaaaaaaaaaaaaaaaaaaaa

SEQ ID NO: 19912 - RNA, 6113 nt, Artificial Sequence
  SARS-CoV-2__MT666042.1__non-structural protein 3 (NSP3) mRNA gc
aggagagucccgcagucggcguccagcggcucugcuuguucgugugugugucguugcaggccuuauucaagcuuaccauggcccccaccaaggugaccuucggcgacgacacggucaucgaggugcagggguacaagagcgugaacaucaccuucgagcuggacgagcgcaucgacaagguccucaacgagaagugcuccgccuacaccguggagcugggcaccgaggugaacgaguucgcgugcgucguggccgacgccgugaucaagacgcugcagccggucagcgagcuccugaccccccuggggaucgaccucgacgagugguccauggccaccuacuaccuguucgacgagagcggcgaguucaagcuggccucccacauguacugcagcuucuacccccccgacgaggacgaggaggagggggacugcgaggaggaggaguucgagccguccacccaguacgaguacggcacggaggacgacuaccagggcaagccccucgaguucggggcgaccagcgccgcccugcagcccgaggaggagcaggaggaggacuggcuggacgacgacucccagcagaccgugggccagcaggacgggagcgaggacaaccagaccacgaccauccagaccaucguggagguccagccccagcucgagauggagcugaccccgguggugcagacgaucgaggucaacuccuucagcggcuaccugaagcucaccgacaacguguacaucaagaacgccgacaucguggaggaggcgaagaaggucaagcccaccgugguggucaacgccgccaacguguaccugaagcacgggggcggcguggccggggcccugaacaaggcgaccaacaacgccaugcaggucgaguccgacgacuacaucgccacgaacggcccccucaagguggggggcagcugcguccuguccggccacaaccuggccaagcacugccuccacgugguggggcccaacgucaacaagggcgaggacauccagcugcugaagagcgccuacgagaacuucaaccagcacgaggugcuccuggcgccgcugcucuccgccgggaucuucggcgccgacagcauccacucccugcgggugugcgucgacaccgugcgcaccaacguguaccuggccgucuucgacaagaaccucuacgacaagcuggugagcagcuuccuggagaugaaguccgagaagcagguggagcagaagaucgccgagauccccaaggaggaggucaagcccuucaucaccgagagcaagcccuccguggagcagcggaagcaggacgacaagaagaucaaggcgugcguggaggaggucacgaccacccucgaggagaccaaguuccugacggagaaccugcuccuguacaucgacaucaacgggaaccugcacccggacagcgccacccucguguccgacaucgacaucaccuuccugaagaaggacgcccccuacaucgugggcgacgucgugcaggagggcgugcugaccgccgucgugauccccacgaagaaggccgggggcaccaccgagaugcucgcgaaggcccugcgcaaggugcccaccgacaacuacaucacgaccuacccggggcagggccugaacggguacaccgucgaggaggccaagaccgugcucaagaagugcaagagcgccuucuacauccugcccuccaucaucagcaacgagaagcaggagauccugggcaccguguccuggaaccuccgggagaugcuggcgcacgccgaggagacgcgcaagcugaugcccgucugcguggagaccaaggccaucgugagcaccauccagcggaaguacaagggcaucaagauccaggagggggucguggacuacggcgcccgcuucuacuucuacaccuccaagacgaccguggccagccugaucaacacccucaacgaccugaacgagacccuggucacgaugccccucggguacgugacccacggccugaaccuggaggaggcggcccgguacaugcgcucccucaaggugccggccaccgucagcguguccagccccgacgccgugaccgccuacaacggguaccugacguccagcuccaagacccccgaggagcacuucaucgagaccaucagccuggcgggcagcuacaaggacugguccuacagcggccaguccacccagcucgggaucgaguuccugaagcggggcgacaagaucgucuacuacacgagcaaccccaccaccuuccaccuggacggggaggugaucaccuucgacaaccucaagacgcugcugucccuccgcgaggugcggaccaucaaggucuucaccaccguggacaacaucaaccugcacacgcagguggucgacaugagcaugaccuacggccagcaguucggcccgaccuaccuggacggggccgacgugaccaagaucaagccccacaacucccacgagggcaagacguucuacgugcuccccaacgacuacacccugcgcgucgaggccuucgaguacuaccacaccaccgacccgagcuuccuggggcgguacauguccgcccucaaccacacgaagaaguggaaguacccccaggugaacggccugaccagcaucaagugggccgacaacaacugcuaccuggcgaccgcccuccugacccugcagcagaucgagcucaaguucaacccccccgcccugcaggacgccuacuaccgcgcgcgggccggggaggccgccaacuucugcgcccugauccucgcguacugcaacaagacggugggcgagcugggcgacguccgcgagaccauguccuaccuguuccagcacgccaaccucgacagcugcaagcgggugcugaacgucgugugcaagaccugcgggcagcagcagaccacccugaagggcguggaggccgucauguacauggggacgcucuccuacgagcaguucaagaagggcgugcagaucccgugcaccugcgggaagcaggccaccaaguaccuggugcagcaggagagccccuucgucaugauguccgccccccccgcgcaguacgagcugaagcacggcaccuucacgugcgccagcgaguacaccggcaacuaccagugcgggcacuacaagcacaucaccuccaaggagacccucuacugcaucgacggcgcccugcugacgaagagcagcgaguacaaggggccgaucaccgacguguucuacaaggagaacuccuacaccaccacgaucaagcccgugaccuacaagcucgacggcgucgugugcaccgagaucgaccccaagcuggacaacuacuacaagaaggacaacagcuacuucaccgagcagcccaucgaccuggugccgaaccagcccuaccccaacgccuccuucgacaacuucaaguucgucugcgacaacaucaaguucgccgacgaccucaaccagcugacgggguacaagaagcccgcgagccgcgagcugaaggugaccuucuucccggaccucaacggcgacguggucgccaucgacuacaagcacuacacccccuccuucaagaagggcgccaagcugcugcacaagcccaucguguggcacgugaacaacgccaccaacaaggcgacguacaagcccaacaccuggugcauccggugccucuggagcaccaagccggucgagaccuccaacagcuucgacgugcugaaguccgaggacgcccaggggauggacaaccuggccugcgaggaccucaagcccgugagcgaggaggucguggagaaccccacgauccagaaggacgugcuggagugcaacgucaagaccaccgagguggugggcgacaucauccugaagcccgccaacaacucccucaagaucaccgaggaggucgggcacacggaccugauggccgcguacguggacaacagcucccugaccaucaagaagccgaacgagcucagccgcgugcugggccugaagacccucgccacccacgggcuggccgccgucaacuccgugcccugggacacgaucgccaacuacgcgaagcccuuccugaacaagguggucagcaccaccaccaacaucgugacgcgcugccucaaccgggugugcaccaacuacaugccguacuucuucacccugcugcuccagcugugcaccuucacccgcuccacgaacagccggaucaaggccuccaugcccaccaccaucgccaagaacaccgucaagagcgugggcaaguucugccuggaggccagcuucaacuaccucaagucccccaacuucagcaagcugaucaacaucaucaucugguuccugcuccuguccgugugccugggcagccucaucuacuccacggccgcgcuggggguccugaugagcaaccucggcaugcccuccuacugcaccggguaccgcgagggcuaccugaacagcaccaacgugaccaucgccacguacugcaccggcuccaucccgugcagcgugugccuguccgggcucgacagccuggacaccuaccccucccuggagaccauccagaucacgaucagcuccuucaagugggaccucaccgccuucggccuggucgccgagugguuccuggccuacauccucuucacccgguucuucuacgugcuggggcuggcggccaucaugcagcucuucuucagcuacuucgccgugcacuucaucuccaacagcuggcugauguggcugaucaucaaccugguccagauggcccccaucuccgcgauggugcgcauguacaucuucuucgccagcuucuacuacguguggaagagcuacguccacgugguggacggcugcaacuccagcaccugcaugaugugcuacaagcggaaccgcgccacgcgggucgagugcaccaccaucgugaacgggguccgccgguccuucuacguguacgccaacggcggcaagggguucugcaagcuccacaacuggaacugcgugaacugcgacaccuucugcgccggcagcacguucaucuccgacgaggucgcgcgcgaccugagccugcaguucaagcggcccaucaacccgaccgaccaguccagcuacaucguggacuccgugaccgucaagaacgggagcauccaccucuacuucgacaaggccggccagaagaccuacgagcgccacucccugagccacuucgugaaccuggacaaccuccgggccaacaacacgaaggggucccugcccaucaacgugaucgucuucgacggcaagagcaagugcgaggaguccagcgccaaguccgccagcguguacuacucccagcugaugugccagcccauccuccugcuggaccaggcgcucgugagcgacgucggcgacagcgccgagguggccgugaagauguucgacgccuacgucaacaccuucuccagcaccuucaacgugcccauggagaagcugaagacccugguggccacggcggaggccgagcucgccaagaacgucucccuggacaacgugcugagcaccuucaucuccgccgcgcgccagggguucguggacagcgacgucgagaccaaggacgugguggagugccucaagcugucccaccagagcgacaucgaggucaccggcgacuccugcaacaacuacaugcugacguacaacaagguggagaacaugaccccgcgggaccucggggccugcaucgacugcagcgcccgccacaucaacgcccagguggccaagucccacaacaucgcgcugaucuggaacgucaaggacuucaugagccuguccgagcagcuccggaagcagauccgcagcgccgccaagaagaacaaccugcccuucaagcugaccugcgccaccacgcgccagguggugaacgucgugaccaccaagaucgcccucaagggcgggugaggacuagucccuguucccagagcccacuuuuuuuucuuuuuuugaaauaaaauagccugucuuucagaucucaaaggcucuuuucagagccaccaaaaaaaaaaaaaaaaaaaaaaaaaaaaaaaaaaaaaaaaaaaaaaaaaaaaaaaaaaaaaaaaaaaaaaaaaaaaaaaaaaaaaaaaaaaaaaaaaaaaa

SEQ ID NO: 19913 - RNA, 6113 nt, Artificial Sequence
  SARS-CoV-2__MT666099.1__non-structural protein 3 (NSP3) mRNA gc
aggagagucccgcagucggcguccagcggcucugcuuguucgugugugugucguugcaggccuuauucaagcuuaccauggcccccaccaaggugaccuucggcgacgacacggucaucgaggugcagggguacaagagcgugaacaucaccuucgagcuggacgagcgcaucgacaagguccucaacgagaagugcuccgccuacaccguggagcugggcaccgaggugaacgaguucgcgugcgucguggccgacgccgugaucaagacgcugcagccggucagcgagcuccugaccccccuggggaucgaccucgacgagugguccauggccaccuacuaccuguucgacgagagcggcgaguucaagcuggccucccacauguacugcagcuucuacccccccgacgaggacgaggaggagggggacugcgaggaggaggaguucgagccguccacccaguacgaguacggcacggaggacgacuaccagggcaagccccucgaguucggggcgaccagcgccgcccugcagcccgaggaggagcaggaggaggacuggcuggacgacgacucccagcagaccgugggccagcaggacgggagcgaggacaaccagaccacgaccauccagaccaucguggagguccagccccagcucgagauggagcugaccccgguggugcagacgaucgaggucaacuccuucagcggcuaccugaagcucaccgacaacguguacaucaagaacgccgacaucguggaggaggcgaagaaggucaagcccaccgugguggucaacgccgccaacguguaccugaagcacgggggcggcguggccggggcccugaacaaggcgaccaacaacgccaugcaggucgaguccgacgaccacaucgccacgaacggcccccucaagguggggggcagcugcguccuguccggccacaaccuggccaagcacugccuccacgugguggggcccaacgucaacaagggcgaggacauccagcugcugaagagcgccuacgagaacuucaaccagcacgaggugcuccuggcgccgcugcucuccgccgggaucuucggcgccgaccccauccacagccugcgggugugcgucgacaccgugcgcaccaacguguaccuggccgucuucgacaagaaccucuacgacaagcugguguccagcuuccuggagaugaagagcgagaagcagguggagcagaagaucgccgagauccccaaggaggaggucaagcccuucaucaccgaguccaagccgagcguggagcagcggaagcaggacgacaagaagaucaaggcgugcguggaggaggucacgaccacccucgaggagaccaaguuccugacggagaaccugcuccuguacaucgacaucaacgggaaccugcaccccgacuccgccacccucgugagcgacaucgacaucaccuuccugaagaaggacgcccccuacaucgugggcgacgucgugcaggagggcgugcugaccgccgucgugauccccacgaagaaggccgggggcaccaccgagaugcucgcgaaggcccugcgcaaggugccgaccgacaacuacaucacgaccuaccccgggcagggccugaacggguacaccgucgaggaggccaagaccgugcucaagaagugcaaguccgccuucuacauccugcccagcaucaucuccaacgagaagcaggagauccugggcaccgugagcuggaaccuccgggagaugcuggcgcacgccgaggagacgcgcaagcugaugcccgucugcguggagaccaaggccaucguguccaccauccagcggaaguacaagggcaucaagauccaggagggggucguggacuacggcgcccgcuucuacuucuacaccagcaagacgaccguggccucccugaucaacacccucaacgaccugaacgagacccuggucacgaugccgcucggguacgugacccacggccugaaccuggaggaggcggcccgguacaugcgcagccucaaggugcccgccaccgucuccgugagcucccccgacgccgugaccgccuacaacggguaccugacgagcuccagcaagacccccgaggagcacuucaucgagaccaucucccuggcgggcagcuacaaggacuggagcuacuccggccagagcacccagcucgggaucgaguuccugaagcggggcgacaaguccgucuacuacacgagcaacccgaccaccuuccaccuggacggggaggugaucaccuucgacaaccucaagacgcugcugucccuccgcgaggugcggaccaucaaggucuucaccaccguggacaacaucaaccugcacacgcagguggucgacaugagcaugaccuacggccagcaguucggccccaccuaccuggacggggccgacgugaccaagaucaagccccacaacucccacgagggcaagacguucuacgugcucccgaacgacgacacccugcgcgucgaggccuucgaguacuaccacaccaccgaccccagcuuccuggggcgguacauguccgcccucaaccacacgaagaaguggaaguacccccaggugaacggccugaccagcaucaagugggccgacaacaacugcuaccuggcgaccgcccuccugacccugcagcagaucgagcucaaguucaaccccccggcccugcaggacgccuacuaccgcgcgcgggccggggaggccgccaacuucugcgcccugauccucgcguacugcaacaagacggugggcgagcugggcgacguccgcgagaccauguccuaccuguuccagcacgccaaccucgacagcugcaagcgggugcugaacgucgugugcaagaccugcgggcagcagcagaccacccugaagggcguggaggccgucauguacauggggacgcucuccuacgagcaguucaagaagggcgugcagauccccugcaccugcgggaagcaggccaccaaguaccuggugcagcaggagagccccuucgucaugauguccgcccccccggcgcaguacgagcugaagcacggcaccuucacgugcgccagcgaguacaccggcaacuaccagugcgggcacuacaagcacaucaccuccaaggagacccucuacugcaucgacggcgcccugcugacgaagagcagcgaguacaaggggcccaucaccgacguguucuacaaggagaacuccuacaccaccacgaucaagcccgugaccuacaagcucgacggcgucgugugcaccgagaucgaccccaagcuggacaacuacuacaagaaggacaacagcuacuucaccgagcagccgaucgaccuggugcccaaccagcccuaccccaacgccuccuucgacaacuucaaguucgucugcgacaacaucaaguucgccgacgaccucaaccagcugacgggguacaagaagccggcgagccgcgagcugaaggugaccuucuuccccgaccucaacggcgacguggucgccaucgacuacaagcacuacacccccuccuucaagaagggcgccaagcugcugcacaagcccaucguguggcacgugaacaacgccaccaacaaggcgacguacaagccgaacaccuggugcauccggugccucuggagcaccaagcccgucgagaccuccaacagcuucgacgugcugaaguccgaggacgcccaggggauggacaaccuggccugcgaggaccucaagcccgugagcgaggaggucguggagaaccccacgauccagaaggacgugcuggagugcaacgucaagaccaccgagguggugggcgacaucauccugaagccggccaacaacucccucaagaucaccgaggaggucgggcacacggaccugauggccgcguacguggacaacagcucccugaccaucaagaagcccaacgagcucagccgcgugcugggccugaagacccucgccacccacgggcuggccgccgucaacuccgugcccugggacacgaucgccaacuacgcgaagccguuccugaacaagguggucagcaccaccaccaacaucgugacgcgcugccucaaccgggugugcaccaacuacaugcccuacuucuucacccugcugcuccagcugugcaccuucacccgcuccacgaacagccggaucaaggccuccaugcccaccaccaucgccaagaacaccgucaagagcgugggcaaguucugccuggaggccagcuucaacuaccucaagucccccaacuucagcaagcugaucaacaucaucaucugguuccugcuccuguccgugugccugggcagccucaucuacuccacggccgcgcuggggguccugaugagcaaccucggcaugccguccuacugcaccggguaccgcgagggcuaccugaacagcaccaacgugaccaucgccacguacugcaccggcuccauccccugcagcgugugccuguccgggcucgacagccuggacaccuaccccucccuggagaccauccagaucacgaucagcuccuucaagugggaccucaccgccuucggccuggucgccgagugguuccuggccuacauccucuucacccgguucuucuacgugcuggggcuggcggccaucaugcagcucuucuucagcuacuucgccgugcacuucaucuccaacagcuggcugauguggcugaucaucaaccugguccagauggcccccaucuccgcgauggugcgcauguacaucuucuucgccagcuucuacuacguguggaagagcuacguccacgugguggacggcugcaacuccagcaccugcaugaugugcuacaagcggaaccgcgccacgcgggucgagugcaccaccaucgugaacgggguccgccgguccuucuacguguacgccaacggcggcaagggguucugcaagcuccacaacuggaacugcgugaacugcgacaccuucugcgccggcagcacguucaucuccgacgaggucgcgcgcgaccugagccugcaguucaagcggccgaucaaccccaccgaccaguccagcuacaucguggacuccgugaccgucaagaacgggagcauccaccucuacuucgacaaggccggccagaagaccuacgagcgccacucccugagccacuucgugaaccuggacaaccuccgggccaacaacacgaaggggucccugcccaucaacgugaucgucuucgacggcaagagcaagugcgaggaguccagcgccaaguccgccagcguguacuacucccagcugaugugccagcccauccuccugcuggaccaggcgcucgugagcgacgucggcgacagcgccgagguggccgugaagauguucgacgccuacgucaacaccuucuccagcaccuucaacgugccgauggagaagcugaagacccugguggccacggcggaggccgagcucgccaagaacgucucccuggacaacgugcugagcaccuucaucuccgccgcgcgccagggguucguggacagcgacgucgagaccaaggacgugguggagugccucaagcugucccaccagagcgacaucgaggucaccggcgacuccugcaacaacuacaugcugacguacaacaagguggagaacaugaccccccgggacuucggggccugcaucgacugcagcgcccgccacaucaacgcccagguggccaagucccacaacaucgcgcucaucuggaacgucaaggacuucaugagccuguccgagcagcugcggaagcagauccgcagcgccgccaagaagaacaaccuccccuucaagcugaccugcgccaccacgcgccagguggugaacgucgugaccaccaagaucgcccugaagggcgggugaggacuagucccuguucccagagcccacuuuuuuuucuuuuuuugaaauaaaauagccugucuuucagaucucaaaggcucuuuucagagccaccaaaaaaaaaaaaaaaaaaaaaaaaaaaaaaaaaaaaaaaaaaaaaaaaaaaaaaaaaaaaaaaaaaaaaaaaaaaaaaaaaaaaaaaaaaaaaaaaaaaaa

SEQ ID NO: 19914 - RNA, 6113 nt, Artificial Sequence
  SARS-CoV-2__MT655744.1__non-structural protein 3 (NSP3) mRNA gc
aggagagucccgcagucggcguccagcggcucugcuuguucgugugugugucguugcaggccuuauucaagcuuaccauggcccccaccaaggugaccuucggcgacgacacggucaucgaggugcagggguacaagagcgugaacaucaccuucgagcuggacgagcgcaucgacaagguccucaacgagaagugcuccgccuacaccguggagcugggcaccgaggugaacgaguucgcgugcgucguggccgacgccgugaucaagacgcugcagccggucagcgagcuccugaccccccuggggaucgaccucgacgagugguccauggccaccuacuaccuguucgacgagagcggcgaguucaagcuggccucccacauguacugcagcuucuacccccccgacgaggacgaggaggagggggacugcgaggaggaggaguucgagccguccacccaguacgaguacggcacggaggacgacuaccagggcaagccccucgaguucggggcgaccagcgccgcccugcagcccgaggaggagcaggaggaggacuggcuggacgacgacucccagcagaccgugggccagcaggacgggagcgaggacaaccagaccacgaccauccagaccaucguggagguccagccccagcucgagauggagcugaccccgguggugcagacgaucgaggucaacuccuucagcggcuaccugaagcucaccgacaacguguacaucaagaacgccgacaucguggaggaggcgaagaaggucaagcccaccgugguggucaacgccgccaacguguaccugaagcacgggggcggcguggccggggcccugaacaaggcgaccaacaacgccaugcaggucgaguccgacgacuacaucgccacgaacggcccccucaagguggggggcagcugcguccuguccggccacaaccuggccaagcacugccuccacgugguggggcccaacgucaacaagggcgaggacauccagcugcugaagagcgccuacgagaacuucaaccagcacgaggugcuccuggcgccgcugcucuccgccgggaucuucggcgccgaccccauccacagccugcgggugugcgucgacaccgugcgcaccaacguguaccuggccgucuucgacaagaaccucuacgacaagcugguguccagcuuccuggagaugaagagcgagaagcagguggagcagaagaucgccgagauccccaaggaggaggucaagcccuucaucaccgaguccaagccgagcguggagcagcggaagcaggacgacaagaagaucaaggcgugcguggaggaggucacgaccacccucgaggagaccaaguuccugacggagaaccugcuccuguacaucgacaucaacgggaaccugcaccccgacuccgccacccucgugagcgacaucgacaucaccuuccugaagaaggacgcccccuacaucgugggcgacgucgugcaggagggcgugcugaccgccgucgugauccccacgaagaaggccgggggcaccaccgagaugcucgcgaaggcccugcgcaaggugccgaccgacaacuacaucacgaccuaccccgggcagggccugaacggguacaccgucgaggaggccaagaccgugcucaagaagugcaaguccgccuucuacauccugcccagcaucaucuccaacgagaagcaggagauccugggcaccgugagcuggaaccuccgggagaugcuggcgcacgccgaggagacgcgcaagcugaugcccgucugcguggagaccaaggccaucguguccaccauccagcggaaguacaagggcaucaagauccaggagggggucguggacuacggcgcccgcuucuacuucuacaccagcaagacgaccguggccucccugaucaacacccucaacgaccugaacgagacccuggucacgaugccgcucggguacgugacccacggccugaaccuggaggaggcggcccgguacaugcgcagccucaaggugcccgccaccgucuccgugagcucccccgacgccgugaccgccuacaacggguaccugacgagcuccagcaagacccccgaggagcacuucaucgagaccaucucccuggcgggcagcuacaaggacuggagcuacuccggccagagcacccagcucgggaucgaguuccugaagcggggcgacaaguccgucuacuacacgagcaacccgaccaccuuccaccuggacggggaggugaucaccuucgacaaccucaagacgcugcugucccuccgcgaggugcggaccaucaaggucuucaccaccguggacaacaucaaccugcacacgcagguggucgacaugagcaugaccuacggccagcaguucggccccaccuaccuggacggggccgacgugaccaagaucaagccccacaacucccacgagggcaagacguucuacgugcucccgaacgacgacacccugcgcgucgaggccuucgaguacuaccacaccaccgaccccagcuuccuggggcgguacauguccgcccucaaccacacgaagaaguggaaguacccccaggugaacggccugaccagcaucaagugggccgacaacaacugcuaccuggcgaccgcccuccugacccugcagcagaucgagcucaaguucaaccccccggcccugcaggacgccuacuacggggcgcgcgccggcgaggccgccaacuucugcgcccugauccucgcguacugcaacaagacggugggcgagcugggggacguccgggagaccauguccuaccuguuccagcacgccaaccucgacagcugcaagcgcgugcugaacgucgugugcaagaccugcggccagcagcagaccacccugaaggggguggaggccgucauguacaugggcacgcucuccuacgagcaguucaagaagggggugcagauccccugcaccugcggcaagcaggccaccaaguaccuggugcagcaggagagccccuucgucaugauguccgcccccccggcgcaguacgagcugaagcacggcaccuucacgugcgccagcgaguacaccgggaacuaccagugcggccacuacaagcacaucaccuccaaggagacccucuacugcaucgacggggcccugcugacgaaguucagcgaguacaagggccccaucaccgacguguucuacaaggagaacagcuacaccaccacgaucaagcccgugaccuacaagcucgacggggucgugugcaccgagaucgaccccaagcuggacaacuacuacaagaaggacaacuccuacuucaccgagcagccgaucgaccuggugcccaaccagcccuaccccaacgccagcuucgacaacuucaaguucgucugcgacaacaucaaguucgccgacgaccucaaccagcugacgggcuacaagaagccggcgucccgggagcugaaggugaccuucuuccccgaccucaacggcgacguggucgccaucgacuacaagcacuacacccccagcuucaagaagggggccaagcugcugcacaagcccaucguguggcacgugaacaacgccaccaacaaggcgacguacaagccgaacaccuggugcauccgcugccucugguccaccaagcccgucgagaccagcaacuccuucgacgugcugaagagcgaggacgcccagggcauggacaaccuggccugcgaggaccucaagcccguguccgaggaggucguggagaaccccacgauccagaaggacgugcuggagugcaacgucaagaccaccgagguggugggggacaucauccugaagccggccaacaacagccucaagaucaccgaggaggucggccacacggaccugauggccgcguacguggacaacuccagccugaccaucaagaagcccaacgagcucucccgggugcuggggcugaagacccucgccacccacggccuggccgccgucaacagcgugcccugggacacgaucgccaacuacgcgaagccguuccugaacaagguggucuccaccaccaccaacaucgugacgcgcugccucaaccgcgugugcaccaacuacaugcccuacuucuucacccugcugcuccagcugugcaccuucacccggagcacgaacucccgcaucaaggccagcaugcccaccaccaucgccaagaacaccgucaaguccgugggcaaguucugccuggaggccagcuucaacuaccucaagagccccaacuucuccaagcugaucaacaucaucaucugguuccugcuccugagcgugugccuggggucccucaucuacagcacggccgcgcugggcguccugauguccaaccucgggaugccgagcuacugcaccggcuaccgggagggcuaccugaacuccaccaacgugaccaucgccacguacugcaccgggagcauccccugcuccgugugccugagcggccucgacucccuggacaccuaccccagccuggagaccauccagaucacgaucuccagcuucaagugggaccucaccgccuucgggcuggucgccgagugguuccuggccuacauccucuucacccgcuucuucuacgugcugggccuggcggccaucaugcagcucuucuucuccuacuucgccgugcacuucaucagcaacuccuggcugauguggcugaucaucaaccugguccagauggcccccaucagcgcgauggugcggauguacaucuucuucgccuccuucuacuacguguggaagagcuacguccacgugguggacgggugcaacagcuccaccugcaugaugugcuacaagcgcaaccgggccacgcgcgucgagugcaccaccaucgugaacggcguccggcgcagcuucuacguguacgccaacggcgggaagggcuucugcaagcuccacaacuggaacugcgugaacugcgacaccuucugcgccggguccacguucaucagcgacgaggucgcgcgggaccugucccugcaguucaagcgcccgaucaaccccaccgaccagagcuccuacaucguggacagcgugaccgucaagaacggcuccauccaccucuacuucgacaaggccgggcagaagaccuacgagcggcacagccugucccacuucgugaaccuggacaaccuccgcgccaacaacacgaagggcagccugcccaucaacgugaucgucuucgacggcaaguccaagugcgaggagagcuccgccaagagcgccuccguguacuacagccagcugaugugccagcccauccuccugcuggaccaggcgcucguguccgacgucggggacagcgccgagguggccgugaagauguucgacgccuacgucaacaccuucagcuccaccuucaacgugccgauggagaagcugaagacccugguggccacggcggaggccgagcucgccaagaacgucagccuggacaacgugcuguccaccuucaucagcgccgcgcggcagggcuucguggacuccgacgucgagaccaaggacgugguggagugccucaagcugagccaccaguccgacaucgaggucaccggggacagcugcaacaacuacaugcugacguacaacaagguggagaacaugaccccccgcgaccucggcgccugcaucgacugcuccgcccggcacaucaacgcccagguggccaagagccacaacaucgcgcugaucuggaacgucaaggacuucaugucccugagcgagcagcuccgcaagcagauccgguccgccgccaagaagaacaaccugcccuucaagcugaccugcgccaccacgcgccagguggugaacgucgugaccaccaagaucgcccucaaggggggcugaggacuagucccuguucccagagcccacuuuuuuuucuuuuuuugaaauaaaauagccugucuuucagaucucaaaggcucuuuucagagccaccaaaaaaaaaaaaaaaaaaaaaaaaaaaaaaaaaaaaaaaaaaaaaaaaaaaaaaaaaaaaaaaaaaaaaaaaaaaaaaaaaaaaaaaaaaaaaaaaaaaaa

SEQ ID NO: 19915 - RNA, 6113 nt, Artificial Sequence
  SARS-CoV-2__MT656257.1__non-structural protein 3 (NSP3) mRNA gc
aggagagucccgcagucggcguccagcggcucugcuuguucgugugugugucguugcaggccuuauucaagcuuaccauggcccccaccaaggugaccuucggcgacgacacggucaucgaggugcagggguacaagagcgugaacaucaccuucgagcuggacgagcgcaucgacaagguccucaacgagaagugcuccgccuacaccguggagcugggcaccgaggugaacgaguucgcgugcgucguggccgacgccgugaucaagauccugcagccggucagcgagcuccugacgccccuggggaucgaccucgacgagugguccauggccaccuacuaccuguucgacgagagcggcgaguucaagcuggccucccacauguacugcagcuucuacccccccgacgaggacgaggaggagggggacugcgaggaggaggaguucgagccguccacccaguacgaguacggcaccgaggacgacuaccagggcaagccccucgaguucggggcgacgagcgccgcccugcagcccgaggaggagcaggaggaggacuggcuggacgacgacucccagcagaccgugggccagcaggacgggagcgaggacaaccagaccaccacgauccagaccaucguggagguccagccccagcucgagauggagcugaccccgguggugcagaccaucgaggucaacuccuucagcggcuaccugaagcucacggacaacguguacaucaagaacgccgacaucguggaggaggcgaagaaggucaagcccaccgugguggucaacgccgccaacguguaccugaagcacgggggcggcguggccggggcccugaacaaggcgaccaacaacgccaugcaggucgaguccgacgacuacaucgccaccaacggcccccucaagguggggggcagcugcguccuguccggccacaaccuggccaagcacugccuccacgugguggggcccaacgucaacaagggcgaggacauccagcugcugaagagcgccuacgagaacuucaaccagcacgaggugcuccuggcgccgcugcucuccgccgggaucuucggcgccgaccccauccacagccugcgggugugcgucgacacggugcgcaccaacguguaccuggccgucuucgacaagaaccucuacgacaagcuggugcuguccuuccucgagaugaagagcgagaagcagguggagcagaagaucgccgagauccccaaggaggaggucaagcccuucaucaccgagagcaagccguccguggagcagcggaagcaggacgacaagaagaucaaggcgugcguggaggaggucaccacgacccuggaggagaccaaguuccugaccgagaaccuccugcuguacaucgacaucaacgggaaccuccaccccgacagcgccacgcugguguccgacaucgacaucaccuuccugaagaaggacgcccccuacaucgugggcgacgucgugcaggagggcgugcucaccgccgucgugauccccaccaagaaggccgggggcacgaccgagaugcuggcgaaggcccugcgcaaggugccgaccgacaacuacaucaccacguaccccgggcagggccucaacggguacaccgucgaggaggccaagaccgugcugaagaagugcaagagcgccuucuacauccugcccuccaucaucagcaacgagaagcaggagauccucggcaccguguccuggaaccugcgggagaugcuggcgcacgccgaggagacccgcaagcugaugcccgucugcguggagacgaaggccaucgugagcaccauccagcggaaguacaagggcaucaagauccaggagggggucguggacuacggcgcccgcuucuacuucuacaccuccaagaccacgguggccagccucaucaacacccugaacgaccugaacgagacccucgucaccaugccgcugggguacgugacgcacggccugaaccucgaggaggcggcccgguacaugcgcucccugaaggugcccgccaccgucagcguguccagccccgacgccgugaccgccuacaacggguaccugaccuccagcuccaagacgcccgaggagcacuucaucgagaccaucagccucgcgggcuccuacaaggacuggagcuacagcggccaguccacccagcuggggaucgaguuccugaagcggggcgacaagagcgucuacuacaccuccaacccgacgaccuuccaccucgacggggaggugaucaccuucgacaaccugaagacccugcucagccugcgcgaggugcggacgaucaaggucuucaccaccguggacaacaucaaccugcacacccagguggucgacauguccaugacguacggccagcaguucggccccaccuaccucgacggggccgacgugaccaagaucaagccccacaacagccacgagggcaagaccuucuacgugcugccgaacgacgacacgcugcgcgucgaggccuucgaguacuaccacaccaccgaccccuccuuccucgggcgguacaugagcgcccugaaccacaccaagaaguggaaguacccccaggugaacggccugacguccaucaagugggccgacaacaacugcuaccucgcgaccgcccugcugacccuccagcagaucgagcugaaguucaaccccccggcccugcaggacgccuacuaccgcgcgcgggccggggaggccgccaacuucugcgcccucauccuggcguacugcaacaagaccgugggcgagcugggcgacguccgcgagacgaugagcuaccucuuccagcacgccaaccuggacuccugcaagcgggugcugaacgucgugugcaagaccugcgggcagcagcagaccacccucaagggcguggaggccgucauguacauggggacccugagcuacgagcaguucaagaagggcgugcagauccccugcacgugcgggaagcaggccaccaaguaccuggugcagcaggagucccccuucgucaugaugagcgcccccccggcgcaguacgagcucaagcacggcaccuucaccugcgccuccgaguacacgggcaacuaccagugcgggcacuacaagcacaucaccagcaaggagacccuguacugcaucgacggcgcccugcucaccaaguccagcgaguacaaggggcccaucacggacguguucuacaaggagaacagcuacaccaccaccaucaagcccgugacguacaagcuggacggcgucgugugcaccgagaucgaccccaaccuggacaacuacuacaagaaggacaacuccuacuucaccgagcagccgaucgaccucgugcccaaccagcccuaccccaacgccagcuucgacaacuucaaguucgucugcgacaacaucaaguucgccgacgaccugaaccagcugaccggguacaagaagccggcgucccgcgagcucaaggugacguucuuccccgaccugaacggcgacguggucgccaucgacuacaagcacuacacccccagcuucaagaagggcgccaagcugcuccacaagcccaucguguggcacgugaacaacgccaccaacaaggcgaccuacaagccgaacacguggugcauccggugccugugguccaccaagcccgucgagaccagcaacuccuucgacgugcugaagagcgaggacgcccaggggauggacaaccucgccugcgaggaccugaagcccguguccgaggaggucguggagaaccccaccauccagaaggacgugcuggagugcaacgucaagacgaccgagguggugggcgacaucauccucaagccggccaacaacagccugaagaucaccgaggaggucgggcacaccgaccugauggccgcguacguggacaacuccagccucacgaucaagaagcccaacgagcugucccgcgugcugggccucaagacccuggccacccacgggcuggccgccgucaacagcgugcccugggacaccaucgccaacuacgcgaagccguuccucaacaagguggucuccacgaccaccaacaucgugacccgcugccugaaccgggugugcacgaacuacaugcccuacuucuucacccugcuccugcagcugugcaccuucacccgcagcaccaacucccggaucaaggccagcaugcccacgaccaucgccaagaacaccgucaaguccgugggcaaguucugccucgaggccagcuucaacuaccugaagagccccaacuucuccaagcugaucaacaucaucaucugguuccuccugcugagcgugugccucggcucccugaucuacagcaccgccgcgcuggggguccucauguccaaccugggcaugccgagcuacugcacgggguaccgcgagggcuaccugaacuccaccaacgugaccaucgccaccuacugcacgggcagcauccccugcuccgugugccucagcgggcuggacucccuggacaccuaccccagccucgagaccauccagaucaccaucuccagcuucaagugggaccugacggccuucggccuggucgccgagugguuccucgccuacauccuguucacccgguucuucuacgugcuggggcucgcggccaucaugcagcuguucuucuccuacuucgccgugcacuucaucagcaacuccuggcugauguggcugaucaucaaccucguccagauggcccccaucagcgcgauggugcgcauguacaucuucuucgccuccuucuacuacguguggaagagcuacguccacgugguggacggcugcaacagcuccaccugcaugaugugcuacaagcggaaccgcgccacccgggucgagugcacgaccaucgugaacgggguccgccggagcuucuacguguacgccaacggcggcaagggguucugcaagcugcacaacuggaacugcgugaacugcgacaccuucugcgccggcuccaccuucaucagcgacgaggucgcgcgcgaccugucccuccaguucaagcggccgaucaaccccacggaccagagcuccuacaucguggacagcgugaccgucaagaacggguccauccaccuguacuucgacaaggccggccagaagaccuacgagcgccacagccugucccacuucgugaaccucgacaaccugcgggccaacaacaccaaggggagccugcccaucaacgugaucgucuucgacggcaaguccaagugcgaggagagcuccgccaagagcgccuccguguacuacagccagcucaugugccagcccauccugcugcucgaccaggcgcugguguccgacgucggcgacagcgccgagguggccgugaagauguucgacgccuacgucaacacguucagcuccaccuucaacgugccgauggagaagcugaagacccucguggccaccgcggaggccgagcuggccaagaacgucagccuggacaacgugcucuccacguucaucagcgccgcgcgccagggguucguggacuccgacgucgagaccaaggacgugguggagugccugaagcugagccaccaguccgacaucgaggucaccggcgacagcugcaacaacuacaugcucaccuacaacaagguggagaacaugacgccccgggaccugggggccugcaucgacugcuccgcccgccacaucaacgcccagguggccaagagccacaacaucgcgcugaucuggaacgucaaggacuucaugucccucagcgagcagcugcggaagcagauccgcuccgccgccaagaagaacaaccugcccuucaagcucaccugcgccaccacccgccagguggugaacgucgugacgaccaagaucgcccugaagggcgggugaggacuagucccuguucccagagcccacuuuuuuuucuuuuuuugaaauaaaauagccugucuuucagaucucaaaggcucuuuucagagccaccaaaaaaaaaaaaaaaaaaaaaaaaaaaaaaaaaaaaaaaaaaaaaaaaaaaaaaaaaaaaaaaaaaaaaaaaaaaaaaaaaaaaaaaaaaaaaaaaaaaaa

SEQ ID NO: 19916 - RNA, 6113 nt, Artificial Sequence
  SARS-CoV-2__MT657958.1__non-structural protein 3 (NSP3) mRNA gc
aggagagucccgcagucggcguccagcggcucugcuuguucgugugugugucguugcaggccuuauucaagcuuaccauggcccccaccaaggugaccuucggcgacgacacggucaucgaggugcagggguacaagagcgugaacaucaccuucgagcuggacgagcgcaucgacaagguccucaacgagaagugcuccgccuacaccguggagcugggcaccgaggugaacgaguucgcgugcgucguggccgacgccgugaucaagacgcugcagccggucagcgagcuccugaccccccuggggaucgaccucgacgagugguccauggccaccuacuaccuguucgacgagagcggcgaguucaagcuggccucccacauguacugcagcuucuacccccccgacgaggacgaggaggagggggacugcgaggaggaggaguucgagccguccacccaguacgaguacggcacggaggacgacuaccagggcaagccccucgaguucggggcgaccagcgccgcccugcagcccgaggaggagcaggaggaggacuggcuggacgacgacucccagcagaccgugggccggcaggacgggagcgaggacaaccagaccacgaccauccagaccaucguggagguccagccccagcucgagauggagcugaccccgguggugcagacgaucgaggucaacuccuucagcggcuaccugaagcucaccgacaacguguacaucaagaacgccgacaucguggaggaggcgaagaaggucaagcccaccgugguggucaacgccgccaacguguaccugaagcacgggggcggcguggccggggcccugaacaaggcgaccaacaacgccaugcaggucgaguccgacgacuacaucgccacgaacggcccccucaagguggggggcagcugcguccuguccggccacaaccuggccaagcacugccuccacgugguggggcccaacgucaacaagggcgaggacauccagcugcugaagagcgccuacgagaacuucaaccagcacgaggugcuccuggcgccgcugcucuccgccgggaucuucggcgccgaccccauccacagccugcgcgugugcgucgacaccgugcggaccaacguguaccuggccgucuucgacaagaaccucuacgacaagcugguguccagcuuccuggagaugaagagcgagaagcagguggagcagaagaucgccgagauccccaaggaggaggucaagcccuucaucaccgaguccaagccgagcguggagcagcgcaagcaggacgacaagaagaucaaggcgugcguggaggaggucacgaccacccucgaggagaccaaguuccugacggagaaccugcuccuguacaucgacaucaacgggaaccugcaccccgacuccgccacccucgugagcgacaucgacaucaccuuccugaagaaggacgcccccuacaucgugggcgacgucgugcaggagggcgugcugaccgccgucgugauccccacgaagaaggccgggggcaccaccgagaugcucgcgaaggcccugcggaaggugccgaccgacaacuacaucacgaccuaccccgggcagggccugaacggguacaccgucgaggaggccaagaccgugcucaagaagugcaaguccgccuucuacauccugcccagcaucaucuccaacgagaagcaggagauccugggcaccgugagcuggaaccuccgcgagaugcuggcgcacgccgaggagacgcggaagcugaugcccgucugcguggagaccaaggccaucguguccaccauccagcgcaaguacaagggcaucaagauccaggagggggucguggacuacggcgcccgguucuacuucuacaccagcaagacgaccguggccucccugaucaacacccucaacgaccugaacgagacccuggucacgaugccgcucggguacgugacccacggccugaaccuggaggaggcggcccgcuacaugcggagccucaaggugcccgccaccgucuccgugagcucccccgacgccgugaccgccuacaacggguaccugacgagcuccagcaagacccccgaggagcacuucaucgagaccaucucccuggcgggcagcuacaaggacuggagcuacuccggccagagcacccagcucgggaucgaguuccugaagcgcggcgacaaguccgucuacuacacgagcaacccgaccaccuuccaccuggacggggaggugaucaccuucgacaaccucaagacgcugcugucccuccgggaggugcgcaccaucaaggucuucaccaccguggacaacaucaaccugcacacgcagguggucgacaugagcaugaccuacggccagcaguucggccccaccuaccuggacggggccgacgugaccaagaucaagccccacaacucccacgagggcaagacguucuacgugcucccgaacgacgacacccugcgggucgaggccuucgaguacuaccacaccaccgaccccagcuuccuggggcgcuacauguccgcccucaaccacacgaagaaguggaaguacccccaggugaacggccugaccagcaucaagugggccgacaacaacugcuaccuggcgaccgcccuccugacccugcagcagaucgagcucaaguucaaccccccggcccugcaggacgccuacuaccgggcgcgcgccggggaggccgccaacuucugcgcccugauccucgcguacugcaacaagacggugggcgagcugggcgacguccgggagaccauguccuaccuguuccagcacgccaaccucgacagcugcaagcgcgugcugaacgucgugugcaagaccugcgggcagcagcagaccacccugaagggcguggaggccgucauguacauggggacgcucuccuacgagcaguucaagaagggcgugcagauccccugcaccugcgggaagcaggccaccaaguaccuggugcagcaggagagccccuucgucaugauguccgcccccccggcgcaguacgagcugaagcacggcaccuucacgugcgccagcgaguacaccggcaacuaccagugcgggcacuacaagcacaucaccuccaaggagacccucuacugcaucgacggcgcccugcugacgaagagcagcgaguacaaggggcccaucaccgacguguucuacaaggagaacuccuacaccaccacgaucaagcccgugaccuacaagcucgacggcgucgugugcaccgagaucgaccccaagcuggacaacuacuacaagaaggacaacagcuacuucaccgagcagccgaucgaccuggugcccaaccagcccuaccccaacgccuccuucgacaacuucaaguucgucugcgacaacaucaaguucgccgacgaccucaaccagcugacgggguacaagaagccggcgagccgggagcugaaggugaccuucuuccccgaccucaacggcgacguggucgccaucgacuacaagcacuacacccccuccuucaagaagggcgccaagcugcugcacaagcccaucguguggcacgugaacaacgccaccaacaaggcgacguacaagccgaacaccuggugcauccgcugccucuggagcaccaagcccgucgagaccuccaacagcuucgacgugcugaaguccgaggacgcccaggggauggacaaccuggccugcgaggaccucaagcccgugagcgaggaggucguggagaaccccacgauccagaaggacgugcuggagugcaacgucaagaccaccgagguggugggcgacaucauccugaagccggccaacaacucccucaagaucaccgaggaggucgggcacacggaccugauggccgcguacguggacaacagcucccugaccaucaagaagcccaacgagcucagccgcgugcugggccugaagacccucgccacccacgggcuggccgccgucaacuccgugcccugggacacgaucgccaacuacgcgaagccguuccugaacaagguggucagcaccaccaccaacaucgugacgcggugccucaaccgcgugugcaccaacuacaugcccuacuucuucacccugcugcuccagcugugcaccuucacccgguccacgaacagccgcaucaaggccuccaugcccaccaccaucgccaagaacaccgucaagagcgugggcaaguucugccuggaggccagcuucaacuaccucaagucccccaacuucagcaagcugaucaacaucaucaucugguuccugcuccuguccgugugccugggcagccucaucuacuccacggccgcgcuggggguccugaugagcaaccucggcaugccguccuacugcaccggguaccgggagggcuaccugaacagcaccaacgugaccaucgccacguacugcaccggcuccauccccugcagcgugugccuguccgggcucgacagccuggacaccuaccccucccuggagaccauccagaucacgaucagcuccuucaagugggaccucaccgccuucggccuggucgccgagugguuccuggccuacauccucuucacccgcuucuucuacgugcuggggcuggcggccaucaugcagcucuucuucagcuacuucgccgugcacuucaucuccaacagcuggcugauguggcugaucaucaaccugguccagauggcccccaucuccgcgauggugcggauguacaucuucuucgccagcuucuacuacguguggaagagcuacguccacgugguggacggcugcaacuccagcaccugcaugaugugcuacaagcgcaaccgggccacgcgcgucgagugcaccaccaucgugaacgggguccggcgcuccuucuacguguacgccaacggcggcaagggguucugcaagcuccacaacuggaacugcgugaacugcgacaccuucugcgccggcagcacguucaucuccgacgaggucgcgcgggaccugagccugcaguucaagcgcccgaucaaccccaccgaccaguccagcuacaucguggacuccgugaccgucaagaacgggagcauccaccucuacuucgacaaggccggccagaagaccuacgagcggcacucccugagccacuucgugaaccuggacaaccuccgcgccaacaacacgaaggggucccugcccaucaacgugaucgucuucgacggcaagagcaagugcgaggaguccagcgccaaguccgccagcguguacuacucccagcugaugugccagcccauccuccugcuggaccaggcgcucgugagcgacgucggcgacagcgccgagguggccgugaagauguucgacgccuacgucaacaccuucuccagcaccuucaacgugccgauggagaagcugaagacccugguggccacggcggaggccgagcucgccaagaacgucucccuggacaacgugcugagcaccuucaucuccgccgcgcggcagggguucguggacagcgacgucgagaccaaggacgugguggagugccucaagcugucccaccagagcgacaucgaggucaccggcgacuccugcaacaacuacaugcugacguacaacaagguggagaacaugaccccccgcgaccucggggccugcaucgacugcagcgcccggcacaucaacgcccagguggccaagucccacaacaucgcgcugaucuggaacgucaaggacuucaugagccuguccgagcagcuccgcaagcagauccgcagcgccgccaagaagaacaaccugcccuucaagcugaccugcgccaccacgcggcagguggugaacgucgugaccaccaagaucgcccucaagggcgggugaggacuagucccuguucccagagcccacuuuuuuuucuuuuuuugaaauaaaauagccugucuuucagaucucaaaggcucuuuucagagccaccaaaaaaaaaaaaaaaaaaaaaaaaaaaaaaaaaaaaaaaaaaaaaaaaaaaaaaaaaaaaaaaaaaaaaaaaaaaaaaaaaaaaaaaaaaaaaaaaaaaaa

SEQ ID NO: 19917 - RNA, 6113 nt, Artificial Sequence
  SARS-CoV-2__MT646054.1__non-structural protein 3 (NSP3) mRNA gc
aggagagucccgcagucggcguccagcggcucugcuuguucgugugugugucguugcaggccuuauucaagcuuaccauggcccccaccaaggugaccuucggcgacgacacggucaucgaggugcagggguacaagagcgugaacaucaccuucgagcuggacgagcgcaucgacaagguccucaacgagaagugcuccgccuacaccguggagcugggcaccgaggugaacgaguucgcgugcgucguggccgacgccgugaucaagacgcugcagccggucagcgagcuccugaccccccuggggaucgaccucgacgagugguccauggccaccuacuaccuguucgacgagagcggcgaguucaagcuggccucccacauguacugcagcuucuacccccccgacgaggacgaggaggagggggacugcgaggaggaggaguucgagccguccacccaguacgaguacggcacggaggacgacuaccagggcaagccccucgaguucggggcgaccagcgccgcccugcagcccgaggaggagcaggaggaggacuggcuggacgacgacucccagcagaccgugggccagcaggacgggagcgaggacaaccagaccacgaccauccagaccaucguggagguccagccccagcucgagauggagcugaccccgguggugcagacgaucgaggucaacuccuucagcggcuaccugaagcucaccgacaacguguacaucaagaacgccgacaucguggaggaggcgaagaaggucaagcccaccgugguggucaacgccgccaacguguaccugaagcacgggggcggcguggccggggcccugaacaaggcgaccaacaacgccaugcaggucgaguccgacgacuacaucgccacgaacggcccccucaagguggggggcagcugcguccuguccggccacaaccuggccaagcacugccuccacgugguggggcccaacgucaacaagggcgaggacauccagcugcugaagagcgccuacgagaacuucaaccagcacgaggugcuccuggcgccgcugcucuccgccgggaucuucggcgccgaccccauccacagccugcgggugugcgucgacaccgugcgcaccaacguguaccuggccgucuucgacaagaaccucuacgacaagcugguguccagcuuccuggagaugaagagcgagaagcagguggagcagaagaucgccgagauccccaaggaggaggucaagcccuucaucaccgaguccaagccgagcguggagcagcggaagcaggacgacaagaagaucaaggcgugcguggaggaggucacgaccacccucgaggagaccaaguuccugacggagaaccugcuccuguacaucgacaucaacgggaaccugcaccccgacuccgccacccucgugagcgacaucgacaucaccuuccugaagaaggacgcccccuacaucgugggcgacgucgugcaggagggcgugcugaccgccgucgugauccccacgaagaaggccgggggcaccaccgagaugcucgcgaaggcccugcgcaaggugccgaccgacaacuacaucacgaccuaccccgggcagggccugaacggguacaccgucgaggaggccaagaccgugcucaagaagugcaaguccgccuucuacauccugcccagcaucaucuccaacgagaagcaggagauccugggcaccgugagcuggaaccuccgggagaugcuggcgcacgccgaggagacgcgcaagcugaugcccgucugcguggagaccaaggccaucguguccaccauccagcggaaguacaagggcaucaagauccaggagggggucguggacuacggcgcccgcuucuacuucuacaccagcaagacgaccguggccucccugaucaacacccucaacgaccugcacgagacccuggucacgaugccgcucggguacgugacccacggccugaaccuggaggaggcggcccgguacaugcgcagccucaaggugcccgccaccgucuccgugagcucccccgacgccgugaccgccuacaacggguaccugacgagcuccagcaagacccccgaggagcacuucaucgagaccaucucccuggcgggcagcuacaaggacuggagcuacuccggccagagcacccagcucgggaucgaguuccugaagcggggcgacaaguccgucuacuacacgagcaacccgaccaccuuccaccuggacggggaggugaucaccuucgacaaccucaagacgcugcugucccuccgcgaggugcggaccaucaaggucuucaccaccguggacaacaucaaccugcacacgcagguggucgacaugagcaugaccuacggccagcaguucggccccaccuaccuggacggggccgacgugaccaagaucaagccccacaacucccacgagggcaagacguucuacgugcucccgaacgacgacacccugcgcgucgaggccuucgaguacuaccacaccaccgaccccagcuuccuggggcgguacauguccgcccucaaccacacgaagaaguggaaguacccccaggugaacggccugaccagcaucaagugggccgacaacaacugcuaccuggcgaccgcccuccugacccugcagcagaucgagcucaaguucaaccccccggcccugcaggacgccuacuaccgcgcgcgggccggggaggccgccaacuucugcgcccugauccucgcguacugcaacaagacggugggcgagcugggcgacguccgcgagaccauguccuaccuguuccagcacgccaaccucgacagcugcaagcgggugcugaacgucgugugcaagaccugcgggcagcagcagaccacccugaagggcguggaggccgucauguacauggggacgcucuccuacgagcaguucaagaagggcgugcagauccccugcaccugcgggaagcaggccaccaaguaccuggugcagcaggagagccccuucgucaugauguccgcccccccggcgcaguacgagcugaagcacggcaccuucacgugcgccagcgaguacaccggcaacuaccagugcgggcacuacaagcacaucaccuccaaggagacccucuacugcaucgacggcgcccugcugacgaagagcagcgaguacaaggggcccaucaccgacguguucuacaaggagaacuccuacaccaccacgaucaagcccgugaccuacaagcucgacggcgucgugugcaccgagaucgaccccaagcuggacaacuacuacaagaaggacaacagcuacuucaccgagcagccgaucgaccuggugcccaaccagcccuaccccaacgccuccuucgacaacuucaaguucgucugcgacaacaucaaguucgccgacgaccucaaccagcugacgggguacaagaagccggcgagccgcgagcugaaggugaccuucuuccccgaccucaacggcgacguggucgccaucgacuacaagcacuacacccccuccuucaagaagggcgccaagcugcugcacaagcccaucguguggcacgugaacaacgccaccaacaaggcgacguacaagccgaacaccuggugcauccggugccucuggagcaccaagcccgucgagaccuccaacagcuucgacgugcugaaguccgaggacgcccaggggauggacaaccuggccugcgaggaccucaagcccgugagcgaggaggucguggagaaccccacgauccagaaggacgugcuggagugcaacgucaagaccaccgagguggugggcgacaucauccugaagccggccaacaacucccucaagaucaccgaggaggucgggcacacggaccugauggccgcguacguggacaacagcucccugaccaucaagaagcccaacgagcucagccgcgugcugggccugaagacccucgccacccacgggcuggccgccgucaacuccgugcccugggacacgaucgccaacuacgcgaagccguuccugaacaagguggucagcaccaccaccaacaucgugacgcgcugccucaaccgggugugcaccaacuacaugcccuacuucuucacccugcugcuccagcugugcaccuucacccgcuccacgaacagccggaucaaggccuccaugcccaccaccaucgccaagaacaccgucaagagcgugggcaaguucugccuggaggccagcuucaacuaccucaagucccccaacuucagcaagcugaucaacaucaucaucugguuccugcuccuguccgugugccugggcagccucaucuacuccacggccgcgcuggggguccugaugagcaaccucggcaugccguccuacugcaccggguaccgcgagggcuaccugaacagcaccaacgugaccaucgccacguacugcaccggcuccauccccugcagcgugugccuguccgggcucgacagccuggacaccuaccccucccuggagaccauccagaucacgaucagcuccuucaagugggaccucaccgccuucggccuggucgccgagugguuccuggccuacauccucuucacccgguucuucuacgugcuggggcuggcggccaucaugcagcucuucuucagcuacuucgccgugcacuucaucuccaacagcuggcugauguggcugaucaucaaccugguccagauggcccccaucuccgcgauggugcgcauguacaucuucuucgccagcuucuacuacguguggaagagcuacguccacgugguggacggcugcaacuccagcaccugcaugaugugcuacaagcggaaccgcgccacgcgggucgagugcaccaccaucgugaacgggguccgccgguccuucuacguguacgccaacggcggcaagggguucugcaagcuccacaacuggaacugcgugaacugcgacaccuucugcgccggcagcacguucaucuccgacgaggucgcgcgcgaccugagccugcaguucaagcggccgaucaaccccaccgaccaguccagcuacaucguggacuccgugaccgucaagaacgggagcauccaccucuacuucgacaaggccggccagaagaccuacgagcgccacucccugagccacuucgugaaccuggacaaccuccgggccaacaacacgaaggggucccugcccaucaacgugaucgucuucgacggcaagagcaagugcgaggaguccagcgccaaguccgccagcguguacuacucccagcugaugugccagcccauccuccugcuggaccaggcgcucgugagcgacgucggcgacagcgccgagguggccgugaagauguucgacgccuacgucaacaccuucuccagcaccuucaacgugccgauggagaagcugaagacccugguggccacggcggaggccgagcucgccaagaacgucucccuggacaacgugcugagcaccuucaucuccgccgcgcgccagggguucguggacagcgacgucgagaccaaggacgugguggagugccucaagcugucccaccagagcgacaucgaggucaccggcgacuccugcaacaacuacaugcugacguacaacaagguggagaacaugaccccccgggaccucggggccugcaucgacugcagcgcccgccacaucaacgcccagguggccaagucccacaacaucgcgcugaucuggaacgucaaggacuucaugagccuguccgagcagcuccggaagcagauccgcagcgccgccaagaagaacaaccugcccuucaagcugaccugcgccaccacgcgccagguggugaacgucgugaccaccaagaucgcccucaagggcgggugaggacuagucccuguucccagagcccacuuuuuuuucuuuuuuugaaauaaaauagccugucuuucagaucucaaaggcucuuuucagagccaccaaaaaaaaaaaaaaaaaaaaaaaaaaaaaaaaaaaaaaaaaaaaaaaaaaaaaaaaaaaaaaaaaaaaaaaaaaaaaaaaaaaaaaaaaaaaaaaaaaaaa

SEQ ID NO: 19918 - RNA, 6113 nt, Artificial Sequence
  SARS-CoV-2__MT646073.1__non-structural protein 3 (NSP3) mRNA gc
aggagagucccgcagucggcguccagcggcucugcuuguucgugugugugucguugcaggccuuauucaagcuuaccauggcccccaccaaggugaccuucggcgacgacacggucaucgaggugcagggguacaagagcgugaacaucaccuucgagcuggacgagcgcaucgacaagguccucaacgagaagugcuccgccuacaccguggagcugggcaccgaggugaacgaguucgcgugcgucguggccgacgccgugaucaagacgcugcagccggucagcgagcuccugaccccccuggggaucgaccucgacgagugguccauggccaccuacuaccuguucgacgagagcggcgaguucaagcuggccucccacauguacugcagcuucuacccccccgacgaggacgaggaggagggggacugcgaggaggaggaguucgagccguccacccaguacgaguacggcacggaggacgacuaccagggcaagccccucgaguucggggcgaccagcgccgcccugcagcccgaggaggagcaggaggaggacuggcuggacgacgacucccagcagaccgugggccagcaggacgggagcgaggacaaccagaccacgaccauccagaccaucguggagguccagccccagcucgagauggagcugaccccgguggugcagacgaucgaggucaacuccuucagcggcuaccugaagcucaccgacaacguguacaucaagaacgccgacaucguggaggaggcgaagaaggucaagcccaccgugguggucaacgccgccaacguguaccugaagcacgggggcggcguggccggggcccugaacaaggcgaccaacaacgccaugcaggucgaguccgacgacuacaucgccacgaacggcccccucaagguggggggcagcugcguccuguccggccacaaccuggccaagcacugccuccacgugguggggcccaacgucaacaagggcgaggacauccagcugcugaagagcgccuacgagaacuucaaccagcacgaggugcuccuggcgccgcugcucuccgccgggaucuucggcgccgaccccauccacagccugcgggugugcgucgacaccgugcgcaccaacguguaccuggccgucuucgacaagaaccucuacgacaagcugguguccagcuuccuggagaugaagagcgagaagcagguggagcagaagaucgccgagauccccaaggaggaggucaagcccuucaucaccgaguccaagccgagcguggagcagcggaagcaggacgacaagaagaucaaggcgugcguggaggaggucacgaccacccucgaggagaccaaguuccugacggagaaccugcuccuguacaucgacaucaacgggaaccugcaccccgacuccgccacccucgugagcgacaucgacaucaccuuccugaagaaggacgcccccuacaucgugggcgacgucgugcaggagggcgugcugaccgccgucgugauccccacgaagaaggccgggggcaccaccgagaugcucgcgaaggcccugcgcaaggugccgaccgacaacuacaucacgaccuaccccgggcagggccugaacggguacaccgucgaggaggccaagaccgugcucaagaagugcaaguccgccuucuacauccugcccagcaucaucuccaacgagaagcaggagauccugggcaccgugagcuggaaccuccgggagaugcuggcgcacgccgaggagacgcgcaagcugaugcccgucugcguggagaccaaggccaucguguccaccauccagcggaaguacaagggcaucaagauccaggacggggucguggacuacggcgcccgcuucuacuucuacaccagcaagacgaccguggccucccugaucaacacccucaacgaccugaacgagacccuggucacgaugccgcucggguacgugacccacggccugaaccuggaggaggcggcccgguacaugcgcagccucaaggugcccgccaccgucuccgugagcucccccgacgccgugaccgccuacaacggguaccugacgagcuccagcaagacccccgaggagcacuucaucgagaccaucucccuggcgggcagcuacaaggacuggagcuacuccggccagagcacccagcucgggaucgaguuccugaagcggggcgacaaguccgucuacuacacgagcaacccgaccaccuuccaccuggacggggaggugaucaccuucgacaaccucaagacgcugcugucccuccgcgaggugcggaccaucaaggucuucaccaccguggacaacaucaaccugcacacgcagguggucgacaugagcaugaccuacggccagcaguucggccccaccuaccuggacggggccgacgugaccaagaucaagccccacaacucccacgagggcaagacguucuacgugcucccgaacgacgacacccugcgcgucgaggccuucgaguacuaccacaccaccgaccccagcuuccuggggcgguacauguccgcccucaaccacacgaagaaguggaaguacccccaggugaacggccugaccagcaucaagugggccgacaacaacugcuaccuggcgaccgcccuccugacccugcagcagaucgagcucaaguucaaccccccggcccugcaggacgccuacuaccgcgcgcgggccggggaggccgccaacuucugcgcccugauccucgcguacugcaacaagacggugggcgagcugggcgacguccgcgagaccauguccuaccuguuccagcacgccaaccucgacagcugcaagcgggugcugaacgucgugugcaagaccugcgggcagcagcagaccacccugaagggcguggaggccgucauguacauggggacgcucuccuacgagcaguucaagaagggcgugcagauccccugcaccugcgggaagcaggccaccaaguaccuggugcagcaggagagccccuucgucaugauguccgcccccccggcgcaguacgagcugaagcacggcaccuucacgugcgccagcgaguacaccggcaacuaccagugcgggcacuacaagcacaucaccuccaaggagacccucuacugcaucgacggcgcccugcugacgaagagcagcgaguacaaggggcccaucaccgacguguucuacaaggagaacuccuacaccaccacgaucaagcccgugaccuacaagcucgacggcgucgugugcaccgagaucgaccccaagcuggacaacuacuacaagaaggacaacagcuacuucaccgagcagccgaucgaccuggugcccaaccagcccuaccccaacgccuccuucgacaacuucaaguucgucugcgacaacaucaaguucgccgacgaccucaaccagcugacgggguacaagaagccggcgagccgcgagcugaaggugaccuucuuccccgaccucaacggcgacguggucgccaucgacuacaagcacuacacccccuccuucaagaagggcgccaagcugcugcacaagcccaucguguggcacgugaacaacgccaccaacaaggcgacguacaagccgaacaccuggugcauccggugccucuggagcaccaagcccgucgagaccuccaacagcuucgacgugcugaaguccgaggacgcccaggggauggacaaccuggccugcgaggaccucaagcccgugagcgaggaggucguggagaaccccacgauccagaaggacgugcuggagugcaacgucaagaccaccgagguggugggcgacaucauccugaagccggccaacaacucccucaagaucaccgaggaggucgggcacacggaccugauggccgcguacguggacaacagcucccugaccaucaagaagcccaacgagcucagccgcgugcugggccugaagacccucgccacccacgggcuggccgccgucaacuccgugcccugggacacgaucgccaacuacgcgaagccguuccugaacaagguggucagcaccaccaccaacaucgugacgcgcugccucaaccgggugugcaccaacuacaugcccuacuucuucacccugcugcuccagcugugcaccuucacccgcuccacgaacagccggaucaaggccuccaugcccaccaccaucgccaagaacaccgucaagagcgugggcaaguucugccuggaggccagcuucaacuaccucaagucccccaacuucagcaagcugaucaacaucaucaucugguuccugcuccuguccgugugccugggcagccucaucuacuccacggccgcgcuggggguccugaugagcaaccucggcaugccguccuacugcaccggguaccgcgagggcuaccugaacagcaccaacgugaccaucgccacguacugcaccggcuccauccccugcagcgugugccuguccgggcucgacagccuggacaccuaccccucccuggagaccauccagaucacgaucagcuccuucaagugggaccucaccgccuucggccuggucgccgagugguuccuggccuacauccucuucacccgguucuucuacgugcuggggcuggcggccaucaugcagcucuucuucagcuacuucgccgugcacuucaucuccaacagcuggcugauguggcugaucaucaaccugguccagauggcccccaucuccgcgauggugcgcauguacaucuucuucgccagcuucuacuacguguggaagagcuacguccacgugguggacggcugcaacuccagcaccugcaugaugugcuacaagcggaaccgcgccacgcgggucgagugcaccaccaucgugaacgggguccgccgguccuucuacguguacgccaacggcggcaagggguucugcaagcuccacaacuggaacugcgugaacugcgacaccuucugcgccggcagcacguucaucuccgacgaggucgcgcgcgaccugagccugcaguucaagcggccgaucaaccccaccgaccaguccagcuacaucguggacuccgugaccgucaagaacgggagcauccaccucuacuucgacaaggccggccagaagaccuacgagcgccacucccugagccacuucgugaaccuggacaaccuccgggccaacaacacgaaggggucccugcccaucaacgugaucgucuucgacggcaagagcaagugcgaggaguccagcgccaaguccgccagcguguacuacucccagcugaugugccagcccauccuccugcuggaccaggcgcucgugagcgacgucggcgacagcgccgagguggccgugaagauguucgacgccuacgucaacaccuucuccagcaccuucaacgugccgauggagaagcugaagacccugguggccacggcggaggccgagcucgccaagaacgucucccuggacaacgugcugagcaccuucaucuccgccgcgcgccagggguucguggacagcgacgucgagaccaaggacgugguggagugccucaagcugucccaccagagcgacaucgaggucaccggcgacuccugcaacaacuacaugcugacguacaacaagguggagaacaugaccccccgggaccucggggccugcaucgacugcagcgcccgccacaucaacgcccagguggccaagucccacaacaucgcgcugaucuggaacgucaaggacuucaugagccuguccgagcagcuccggaagcagauccgcagcgccgccaagaagaacaaccugcccuucaagcugaccugcgccaccacgcgccagguggugaacgucgugaccaccaagaucgcccucaagggcgggugaggacuagucccuguucccagagcccacuuuuuuuucuuuuuuugaaauaaaauagccugucuuucagaucucaaaggcucuuuucagagccaccaaaaaaaaaaaaaaaaaaaaaaaaaaaaaaaaaaaaaaaaaaaaaaaaaaaaaaaaaaaaaaaaaaaaaaaaaaaaaaaaaaaaaaaaaaaaaaaaaaaaa

SEQ ID NO: 19919 - RNA, 6113 nt, Artificial Sequence
  SARS-CoV-2__MT641485.1__non-structural protein 3 (NSP3) mRNA gc
aggagagucccgcagucggcguccagcggcucugcuuguucgugugugugucguugcaggccuuauucaagcuuaccauggcccccaccaaggugaccuucggcgacgacacggucaucgaggugcagggguacaagagcgugaacaucaccuucgagcuggacgagcgcaucgacaagguccucaacgagaagugcuccgccuacaccguggagcugggcaccgaggugaacgaguucgcgugcgucguggccgacgccgugaucaagacgcugcagccggucagcgagcuccugaccccccuggggaucgaccucgacgagugguccauggccaccuacuaccuguucgacgagagcggcgaguucaagcuggccucccacauguacugcagcuucuacccccccgacgaggacgaggaggagggggacugcgaggaggaggaguucgagccguccacccaguacgaguacggcacggaggacgacuaccagggcaagccccucgaguucggggcgaccagcgccgcccugcagcccgaggaggagcaggaggaggacuggcuggacgacgacucccagcagaccgugggccagcaggacgggagcgaggacaaccagaccacgaccauccagaccaucguggagguccagccccagcucgagauggagcugaccccgguggugcagacgaucgaggucaacuccuucagcggcuaccugaagcucaccgacaacguguacaucaagaacgccgacaucguggaggaggcgaagaaggucaagcccaccgugguggucaacgccgccaacguguaccugaagcacgggggcggcguggccggggcccugaacaaggcgaccaacaacgccaugcaggucgaguccgacgacuacaucgccacgaacggcccccucaagguggggggcagcugcguccuguccggccacaaccuggccaagcacugccuccacgugguggggcccaacgucaacaagggcgaggacauccagcugcugaagagcgccuacgagaacuucaaccagcacgaggugcuccuggcgccgcugcucuccgccgggaucuucggcgccgaccccauccacagccugcgggugugcgucgacaccgugcgcaccaacguguaccuggccgucuucgacaagaaccucuacgacaagcugguguccagcuuccuggagaugaagagcgagaagcagguggagcagaagaucgccgagauccccaaggaggaggucaagcccuucaucaccgaguccaagccgagcguggagcagcggaagcaggacgacaacaagaucaaggcgugcguggaggaggucacgaccacccucgaggagaccaaguuccugacggagaaccugcuccuguacaucgacaucaacgggaaccugcaccccgacuccgccacccucgugagcgacaucgacaucaccuuccugaagaaggacgcccccuacaucgugggcgacgucgugcaggagggcgugcugaccgccgucgugauccccacgaagaaggccgggggcaccaccgagaugcucgcgaaggcccugcgcaaggugccgaccgacaacuacaucacgaccuaccccgggcagggccugaacggguacaccgucgaggaggccaagaccgugcucaagaagugcaaguccgccuucuacauccugcccagcaucaucuccaacgagaagcaggagauccugggcaccgugagcuggaaccuccgggagaugcuggcgcacgccgaggagacgcgcaagcugaugcccgucugcguggagaccaaggccaucguguccaccauccagcggaaguacaagggcaucaagauccaggagggggucguggacuacggcgcccgcuucuacuucuacaccagcaagacgaccguggccucccugaucaacacccucaacgaccugaacgagacccuggucacgaugccgcucggguacgugacccacggccugaaccuggaggaggcggcccgguacaugcgcagccucaaggugcccgccaccgucuccgugagcucccccgacgccgugaccgccuacaacggguaccugacgagcuccagcaagacccccgaggagcacuucaucgagaccaucucccuggcgggcagcuacaaggacuggagcuacuccggccagagcacccagcucgggaucgaguuccugaagcggggcgacaaguccgucuacuacacgagcaacccgaccaccuuccaccuggacggggaggugaucaccuucgacaaccucaagacgcugcugucccuccgcgaggugcggaccaucaaggucuucaccaccguggacaacaucaaccugcacacgcagguggucgacaugagcaugaccuacggccagcaguucggccccaccuaccuggacggggccgacgugaccaagaucaagccccacaacucccacgagggcaagacguucuacgugcucccgaacgacgacacccugcgcgucgaggccuucgaguacuaccacaccaccgaccccagcuuccuggggcgguacauguccgcccucaaccacacgaagaaguggaaguacccccaggugaacggccugaccagcaucaagugggccgacaacaacugcuaccuggcgaccgcccuccugacccugcagcagaucgagcucaaguucaaccccccggcccugcaggacgccuacuaccgcgcgcgggccggggaggccgccaacuucugcgcccugauccucgcguacugcaacaagacggugggcgagcugggcgacguccgcgagaccauguccuaccuguuccagcacgccaaccucgacagcugcaagcgggugcugaacgucgugugcaagaccugcgggcagcagcagaccacccugaagggcguggaggccgucauguacauggggacgcucuccuacgagcaguucaagaagggcgugcagauccccugcaccugcgggaagcaggccaccaaguaccuggugcagcaggagagccccuucgucaugauguccgcccccccggcgcaguacgagcugaagcacggcaccuucacgugcgccagcgaguacaccggcaacuaccagugcgggcacuacaagcacaucaccuccaaggagacccucuacugcaucgacggcgcccugcugacgaagagcagcgaguacaaggggcccaucaccgacguguucuacaaggagaacuccuacaccaccacgaucaagcccgugaccuacaagcucgacggcgucgugugcaccgagaucgaccccaagcuggacaacuacuacaagaaggacaacagcuacuucaccgagcagccgaucgaccuggugcccaaccagcccuaccccaacgccuccuucgacaacuucaaguucgucugcgacaacaucaaguucgccgacgaccucaaccagcugacgggguacaagaagccggcgagccgcgagcugaaggugaccuucuuccccgaccucaacggcgacguggucgccaucgacuacaagcacuacacccccuccuucaagaagggcgccaagcugcugcacaagcccaucguguggcacgugaacaacgccaccaacaaggcgacguacaagccgaacaccuggugcauccggugccucuggagcaccaagcccgucgagaccuccaacagcuucgacgugcugaaguccgaggacgcccaggggauggacaaccuggccugcgaggaccucaagcccgugagcgaggaggucguggagaaccccacgauccagaaggacgugcuggagugcaacgucaagaccaccgagguggugggcgacaucauccugaagccggccaacaacucccucaagaucaccgaggaggucgggcacacggaccugauggccgcguacguggacaacagcucccugaccaucaagaagcccaacgagcucagccgcgugcugggccugaagacccucgccacccacgggcuggccgccgucaacuccgugcccugggacacgaucgccaacuacgcgaagccguuccugaacaagguggucagcaccaccaccaacaucgugacgcgcugccucaaccgggugugcaccaacuacaugcccuacuucuucacccugcugcuccagcugugcaccuucacccgcuccacgaacagccggaucaaggccuccaugcccaccaccaucgccaagaacaccgucaagagcgugggcaaguucugccuggaggccagcuucaacuaccucaagucccccaacuucagcaagcugaucaacaucaucaucugguuccugcuccuguccgugugccugggcagccucaucuacuccacggccgcgcuggggguccugaugagcaaccucggcaugccguccuacugcaccggguaccgcgagggcuaccugaacagcaccaacgugaccaucgccacguacugcaccggcuccauccccugcagcgugugccuguccgggcucgacagccuggacaccuaccccucccuggagaccauccagaucacgaucagcuccuucaagugggaccucaccgccuucggccuggucgccgagugguuccuggccuacauccucuucacccgguucuucuacgugcuggggcuggcggccaucaugcagcucuucuucagcuacuucgccgugcacuucaucuccaacagcuggcugauguggcugaucaucaaccugguccagauggcccccaucuccgcgauggugcgcauguacaucuucuucgccagcuucuacuacguguggaagagcuacguccacgugguggacggcugcaacuccagcaccugcaugaugugcuacaagcggaaccgcgccacgcgggucgagugcaccaccaucgugaacgggguccgcaaguccuucuacguguacgccaacggcggcaagggguucugcaagcuccacaacuggaacugcgugaacugcgacaccuucugcgccggcagcacguucaucuccgacgaggucgcgcgggaccugagccugcaguucaagcgcccgaucaaccccaccgaccaguccagcuacaucguggacuccgugaccgucaagaacgggagcauccaccucuacuucgacaaggccggccagaagaccuacgagcggcacucccugagccacuucgugaaccuggacaaccuccgcgccaacaacacgaaggggucccugcccaucaacgugaucgucuucgacggcaagagcaagugcgaggaguccagcgccaaguccgccagcguguacuacucccagcugaugugccagcccauccuccugcuggaccaggcgcucgugagcgacgucggcgacagcgccgagguggccgugaagauguucgacgccuacgucaacaccuucuccagcaccuucaacgugccgauggagaagcugaagacccugguggccacggcggaggccgagcucgccaagaacgucucccuggacaacgugcugagcaccuucaucuccgccgcgcggcagggguucguggacagcgacgucgagaccaaggacgugguggagugccucaagcugucccaccagagcgacaucgaggucaccggcgacuccugcaacaacuacaugcugacguacaacaagguggagaacaugaccccccgcgaccucggggccugcaucgacugcagcgcccggcacaucaacgcccagguggccaagucccacaacaucgcgcugaucuggaacgucaaggacuucaugagccuguccgagcagcuccgcaagcagauccggagcgccgccaagaagaacaaccugcccuucaagcugaccugcgccaccacgcgccagguggugaacgucgugaccaccaagaucgcccucaagggcgggugaggacuagucccuguucccagagcccacuuuuuuuucuuuuuuugaaauaaaauagccugucuuucagaucucaaaggcucuuuucagagccaccaaaaaaaaaaaaaaaaaaaaaaaaaaaaaaaaaaaaaaaaaaaaaaaaaaaaaaaaaaaaaaaaaaaaaaaaaaaaaaaaaaaaaaaaaaaaaaaaaaaaa

SEQ ID NO: 19920 - RNA, 6113 nt, Artificial Sequence
  SARS-CoV-2__MT641489.1__non-structural protein 3 (NSP3) mRNA gc
aggagagucccgcagucggcguccagcggcucugcuuguucgugugugugucguugcaggccuuauucaagcuuaccauggcccccaccaaggugaccuucggcgacgacacggucaucgaggugcagggguacaagagcgugaacaucaccuucgagcuggacgagcgcaucgacaagguccucaacgagaagugcuccgccuacaccguggagcugggcaccgaggugaacgaguucgcgugcgucguggccgacgccgugaucaagacgcugcagccggucagcgagcuccugaccccccuggggaucgaccucgacgagugguccauggccaccuacuaccuguucgacgagagcggcgaguucaagcuggccucccacauguacugcagcuucuacccccccgacgaggacgaggaggagggggacugcgaggaggaggaguucgagccguccacccaguacgaguacggcacggaggacgacuaccagggcaagccccucgaguucggggcgaccagcgccgcccugcagcccgaggaggagcaggaggaggacuggcuggacgacgacucccagcagaccgugggccagcaggacgggagcgaggacaaccagaccacgaccauccagaccaucguggagguccagccccagcucgagauggagaucaccccgguggugcagacgaucgaggucaacuccuucagcggcuaccugaagcugaccgacaacguguacaucaagaacgccgacaucguggaggaggcgaagaaggucaagcccaccgugguggucaacgccgccaacguguaccucaagcacgggggcggcguggccggggcccugaacaaggcgaccaacaacgccaugcaggucgaguccgacgacuacaucgccacgaacggcccccugaagguggggggcagcugcguccucuccggccacaaccuggccaagcacugccugcacgugguggggcccaacgucaacaagggcgaggacauccagcuccugaagagcgccuacgagaacuucaaccagcacgaggugcugcucgcgccgcugcuguccgccgggaucuucggcgccgaccccauccacagccuccgggugugcgucgacaccgugcgcaccaacguguaccuggccgucuucgacaagaaccuguacgacaagcucguguccagcuuccuggagaugaagagcgagaagcagguggagcagaagaucgccgagauccccaaggaggaggucaagcccuucaucaccgaguccaagccgagcguggagcagcggaagcaggacgacaagaagaucaaggcgugcguggaggaggucacgaccacccuggaggagaccaaguuccucacgcugaaccugcuccuguacaucgacaucaacgggaaccugcaccccgacuccgccacccucgugagcgacaucgacaucaccuuccugaagaaggacgcccccuacaucgugggcgacgucgugcaggagggcgugcugaccgccgucgugauccccacgaagaaggccgggggcaccaccgagaugcucgcgaaggcccugcgcaaggugccgaccgacaacuacaucacgaccuaccccgggcagggccugaacggguacaccgucgaggaggccaagaccgugcucaagaagugcaaguccgccuucuacauccugcccagcaucaucuccaacgagaagcaggagauccugggcaccgugagcuggaaccuccgggagaugcuggcgcacgccgaggagacgcgcaagcugaugcccgucugcguggagaccaaggccaucguguccaccauccagcggaaguacaagggcaucaagauccaggagggggucguggacuacggcgcccgcuucuacuucuacaccagcaagacgaccguggccucccugaucaacacccucaacgaccugaacgagacccuggucacgaugccgcucggguacgugacccacggccugaaccuggaggaggcggcccgguacaugcgcagccucaaggugcccgccaccgucuccgugagcucccccgacgccgugaccgccuacaacggguaccugacgagcuccagcaagacccccgaggagcacuucaucgagaccaucucccuggcgggcagcuacaaggacuggagcuacuccggccagagcacccagcucgggaucgaguuccugaagcggggcgacaaguccgucuacuacacgagcaacccgaccaccuuccaccuggacggggaggugaucaccuucgacaaccucaagacgcugcugucccuccgcgaggugcggaccaucaaggucuucaccaccguggacaacaucaaccugcacacgcagguggucgacaugagcaugaccuacggccagcaguucggccccaccuaccuggacggggccgacgugaccaagaucaagccccacaacucccacgagggcaagacguucuacgugcucccgaacgacgacacccugcgcgucgaggccuucgaguacuaccacaccaccgaccccagcuuccuggggcgguacauguccgcccucaaccacacgaagaaguggaaguacccccaggugaacggccugaccagcaucaagugggccgacaacaacugcuaccuggcgaccgcccuccugacccugcagcagaucgagcucaaguucaaccccccggcccugcaggacgccuacuaccgcgcgcgggccggggaggccgccaacuucugcgcccugauccucgcguacugcaacaagacggugggcgagcugggcgacguccgcgagaccauguccuaccuguuccagcacgccaaccucgacagcugcaagcgggugcugaacgucgugugcaagaccugcgggcagcagcagaccacccugaagggcguggaggccgucauguacauggggacgcucuccuacgagcaguucaagaagggcgugcagauccccugcaccugcgggaagcaggccaccaaguaccuggugcagcaggagagccccuucgucaugauguccgcccccccggcgcaguacgagcugaagcacggcaccuucacgugcgccagcgaguacaccggcaacuaccagugcgggcacuacaagcacaucaccuccaaggagacccucuacugcaucgacggcgcccugcugacgaagagcagcgaguacaaggggcccaucaccgacguguucuacaaggagaacuccuacaccaccacgaucaagcccgugaccuacaagcucgacggcgucgugugcaccgagaucgaccccaagcuggacaacuacuacaagaaggacaacagcuacuucaccgagcagccgaucgaccuggugcccaaccagcccuaccccaacgccuccuucgacaacuucaaguucgucugcgacaacaucaaguucgccgacgaccucaaccagcugacgggguacaagaagccggcgagccgcgagcugaaggugaccuucuuccccgaccucaacggcgacguggucgccaucgacuacaagcacuacacccccuccuucaagaagggcgccaagcugcugcacaagcccaucguguggcacgugaacaacgccaccaacaaggcgacguacaagccgaacaccuggugcauccggugccucuggagcaccaagcccgucgagaccuccaacagcuucgacgugcugaaguccgaggacgcccaggggauggacaaccuggccugcgaggaccucaagcccgugagcgaggaggucguggagaaccccacgauccagaaggacgugcuggagugcaacgucaagaccaccgagguggugggcgacaucauccugaagccggccaacaacucccucaagaucaccgaggaggucgggcacacggaccugauggccgcguacguggacaacagcucccugaccaucaagaagcccaacgagcucagccgcgugcugggccugaagacccucgccacccacgggcuggccgccgucaacuccgugcccugggacacgaucgccaacuacgcgaagccguuccugaacaagguggucagcaccaccaccaacaucgugacgcgcugccucaaccgggugugcaccaacuacaugcccuacuucuucacccugcugcuccagcugugcaccuucacccgcuccacgaacagccggaucaaggccuccaugcccaccaccaucgccaagaacaccgucaagagcgugggcaaguucugccuggaggccagcuucaacuaccucaagucccccaacuucagcaagcugaucaacaucaucaucugguuccugcuccuguccgugugccugggcagccucaucuacuccacggccgcgcuggggguccugaugagcaaccucggcaugccguccuacugcaccggguaccgcgagggcuaccugaacagcaccaacgugaccaucgccacguacugcaccggcuccauccccugcagcgugugccuguccgggcucgacagccuggacaccuaccccucccuggagaccauccagaucacgaucagcuccuucaagugggaccucaccgccuucggccuggucgccgagugguuccuggccuacauccucuucacccgguucuucuacgugcuggggcuggcggccaucaugcagcucuucuucagcuacuucgccgugcacuucaucuccaacagcuggcugauguggcugaucaucaaccugguccagauggcccccaucuccgcgauggugcgcauguacaucuucuucgccagcuucuacuacguguggaagagcuacguccacgugguggacggcugcaacuccagcaccugcaugaugugcuacaagcggaaccgcgccacgcgggucgagugcaccaccaucgugaacgggguccgccgguccuucuacguguacgccaacggcggcaagggguucugcaagcuccacaacuggaacugcgugaacugcgacaccuucugcgccggcagcacguucaucuccgacgaggucgcgcgcgaccugagccugcaguucaagcggccgaucaaccccaccgaccaguccagcuacaucguggacuccgugaccgucaagaacgggagcauccaccucuacuucgacaaggccggccagaagaccuacgagcgccacucccugagccacuucgugaaccuggacaaccuccgggccaacaacacgaaggggucccugcccaucaacgugaucgucuucgacggcaagagcaagugcgaggaguccagcgccaaguccgccagcguguacuacucccagcugaugugccagcccauccuccugcuggaccaggcgcucgugagcgacgucggcgacagcgccgagguggccgugaagauguucgacgccuacgucaacaccuucuccagcaccuucaacgugccgauggagaagcugaagacccugguggccacggcggaggccgagcucgccaagaacgucucccuggacaacgugcugagcaccuucaucuccgccgcgcgccagggguucguggacagcgacgucgagaccaaggacgugguggagugccucaagcugucccaccagagcgacaucgaggucaccggcgacuccugcaacaacuacaugcugacguacaacaagguggagaacaugaccccccgggaccucggggccugcaucgacugcagcgcccgccacaucaacgcccagguggccaagucccacaacaucgcgcugaucuggaacgucaaggacuucaugagccuguccgagcagcuccggaagcagauccgcagcgccgccaagaagaacaaccugcccuucaagcugaccugcgccaccacgcgccagguggugaacgucgugaccaccaagaucgcccucaagggcgggugaggacuagucccuguucccagagcccacuuuuuuuucuuuuuuugaaauaaaauagccugucuuucagaucucaaaggcucuuuucagagccaccaaaaaaaaaaaaaaaaaaaaaaaaaaaaaaaaaaaaaaaaaaaaaaaaaaaaaaaaaaaaaaaaaaaaaaaaaaaaaaaaaaaaaaaaaaaaaaaaaaaaa

SEQ ID NO: 19921 - RNA, 6113 nt, Artificial Sequence
  SARS-CoV-2__MT641492.1__non-structural protein 3 (NSP3) mRNA gc
aggagagucccgcagucggcguccagcggcucugcuuguucgugugugugucguugcaggccuuauucaagcuuaccauggcccccaccaaggugaccuucggcgacgacacggucaucgaggugcagggguacaagagcgugaacaucaccuucgagcuggacgagcgcaucgacaagguccucaacgagaagugcuccgccuacaccguggagcugggcaccgaggugaacgaguucgcgugcgucguggccgacgccgugaucaagacgcugcagccggucagcgagcuccugaccccccuggggaucgaccucgacgagugguccauggccaccuacuaccuguucgacgagagcggcgaguucaagcuggccucccacauguacugcagcuucuacccccccgacgaggacgaggaggagggggacugcgaggaggaggaguucgagccguccacccaguacgaguacggcacggaggacgacuaccagggcaagccccucgaguucggggcgaccagcgccgcccugcagcccgaggaggagcaggaggaggacuggcuggacgacgacucccagcagaccgugggccagcaggacgggagcgaggacaaccagaccacgaccauccagaccaucguggagguccagccccagcucgagauggagcugaccccgguggugcagacgaucgaggucaacuccuucagcggcuaccugaagcucaccgacaacguguacaucaagaacgccgacaucguggaggaggcgaagaaggucaagcccaccgugguggucaacgccgccaacguguaccugaagcacgggggcggcguggccggggcccugaacaaggcgaccaacaacgccaugcaggucgaguccgacgacuacaucgccacgaacggcccccucaagguggggggcagcugcguccuguccggccacaaccuggccaagcacugccuccacgugguggggcccaacgucaacaagggcgaggacauccagcugcugaagagcgccuacgagaacuucaaccagcacgaggugcuccuggcgccgcugcucuccgccgggaucuucggcgccgaccccauccacagccugcgggugugcgucgacaccgugcgcaccaacguguaccuggccgucuucgacaagaaccucuacgacaagcugguguccagcuuccuggagaugaagagcgagaagcagguggagcagaagaucgccgagauccccaaggaggaggucaagcccuucaucaccgaguccaagccgagcguggagcagcggaagcaggacgacaagaagaucaaggcgugcguggaggaggucacgaccacccucgaggagaccaaguuccugacggagaaccugcuccuguacaucgacaucaacgggaaccugcaccccgacuccgccacccucgugagcgacaucgacaucaccuuccugaagaaggacgcccccuacaucgugggcgacgucgugcaggagggcgugcugaccgccgucgugauccccacgaagaaggccgggggcaccaccgagaugcucgcgaaggcccugcgcaaggugccgaccgacaacuacaucacgaccuaccccgggcagggccugaacggguacaccgucgaggaggccaagaccgugcucaagaagugcaaguccgccuucuacauccugcccagcaucaucuccaacgagaagcaggagauccugggcaccgugagcuggaaccuccgggagaugcuggcgcacgccgaggagacgcgcaagcugaugcccgucugcguggagaccaaggccaucguguccaccauccagcggaaguacaagggcaucaagauccaggagggggucguggacuacggcgcccgcuucuacuucuacaccagcaagacgaccguggccucccugaucaacacccucaacgaccugaacgagacccuggucacgaugccgcucggguacgugacccacggccugaaccuggaggaggcggcccgguacaugcgcagccucaaggugcccgccaccgucuccgugagcucccccgacgccgugaccgccuacaacggguaccugacgagcuccagcaagacccccgaggagcacuucaucgagaccaucucccuggcgggcagcuacaaggacuggagcuacuccggccagagcacccagcucgggaucgaguuccugaagcggggcgacaaguccgucuacuacacgagcaacccgaccaccuuccaccuggacggggaggugaucaccuucgacaaccucaagacgcugcugucccuccgcgaggugcggaccaucaaggucuucaccaccguggacaacaucaaccugcacacgcagguggucgacaugagcaugaccuacggccagcaguucggccccaccuaccuggacggggccgacgugaccaagaucaagccccacaacucccacgagggcaagacguucuacgugcucccgaacgacgacacccugcgcgucgaggccuucgaguacuaccacaccaccgaccccagcuuccuggggcgguacauguccgcccucaaccacacgaagaaguggaaguacccccaggugaacggccugaccagcaucaagugggccgacaacaacugcuaccuggcgaccgcccuccugacccugcagcagaucgagcucaaguucaaccccccggcccugcaggacgccuacuaccgcgcgcgggccggggaggccgccaacuucugcgcccugauccucgcguacugcaacaagacggugggcgagcugggcgacguccgcgagaccauguccuaccuguuccagcacgccaaccucgacagcugcaagcgggugcugaacgucgugugcaagaccugcgggcagcagcagaccacccugaagggcguggaggccgucauguacauggggacgcucuccuacgagcaguucaagaagggcgugcagauccccugcaccugcgggaagcaggccaccaaguaccuggugcagcaggagagccccuucgucaugauguccgcccccccggcgcaguacgagcugaagcacggcaccuucacgugcgccagcgaguacaccggcaacuaccagugcgggcacuacaagcacaucaccuccaaggagacccucuacugcaucgacggcgcccugcugacgaagagcagcgaguacaaggggcccaucaccgacguguucuacaaggagaacuccuacaccaccacgaucaagcccgugaccuacaagcucgacggcgucgugugcaccgagaucgaccccaagcuggacaacuacuacaagaaggacaacagcuacuucaccgagcagccgaucgaccuggugcccaaccagcccuaccccaacgccuccuucgacaacuucaaguucgucugcgacaacaucaaguucgccgacgaccucaaccagcugacgggguacaagaagccggcgagccgcgagcugaaggugaccuucuuccccgaccucaacggcgacguggucgccaucgacuacaagcacuacacccccuccuucaagaagggcgccaagcugcugcacaagcccaucguguggcacgugaacaacgccaccaacaaggcgacguacaagccgaacaccuggugcauccggugccucuggagcaccaagcccgucgagaccuccaacagcuucgacgugcugaaguccgaggacgcccaggggauggacaaccuggccugcgaggaccucaagcccgugagcgaggaggucguggagaaccccacgauccagaaggacgugcuggagugcaacgucaagaccaccgagguggugggcgacaucauccugaagccggccaacaacucccucaagaucaccgaggaggucgggcacacggaccugauggccgcguacguggacaacagcucccugaccaucaagaagcccaacgagcucagccgcgugcugggccugaagacccucgccacccacgggcuggccgccgucaacuccgugcccugggacacgaucgccaacuacgcgaagccguuccugaacaagguggucagcaccaccaccaacaucgugacgcgcugccucaaccgggugugcaccaacuacaugcccuacuucuucacccugaugcugcagcucugcaccuucacccgcuccacgaacagccggaucaaggccuccaugcccaccaccaucgccaagaacaccgucaagagcgugggcaaguucugccuggaggccagcuucaacuaccugaagucccccaacuucagcaagcucaucaacaucaucaucugguuccugcugcucuccgugugccugggcagccugaucuacuccacggccgcgcucgggguccugaugagcaaccugggcaugccguccuacugcaccggguaccgcgagggcuaccucaacagcaccaacgugaccaucgccacguacugcaccggcuccauccccugcagcgugugccuguccgggcuggacagccucgacaccuaccccucccuggagaccauccagaucacgaucagcuccuucaagugggaccugaccgccuucggccucgucgccgagugguuccuggccuacauccuguucacccgguucuucuacgugcucgggcuggcggccaucaugcagcuguucuucagcuacuucgccgugcacuucaucuccaacagcuggcucauguggcugaucaucaaccugguccagauggcccccaucuccgcgauggugcgcauguacaucuucuucgccagcuucuacuacguguggaagagcuacguccacgugguggacggcugcaacuccagcaccugcaugaugugcuacaagcggaaccgcgccacgcgggucgagugcaccaccaucgugaacgggguccgccgguccuucuacguguacgccaacggcggcaagggguucugcaagcugcacaacuggaacugcgugaacugcgacaccuucugcgccggcagcacguucaucuccgacgaggucgcgcgcgaccucagccugcaguucaagcggccgaucaaccccaccgaccaguccagcuacaucguggacuccgugaccgucaagaacgggagcauccaccuguacuucgacaaggccggccagaagaccuacgagcgccacucccucagccacuucgugaaccuggacaaccugcgggccaacaacacgaaggggucccuccccaucaacgugaucgucuucgacggcaagagcaagugcgaggaguccagcgccaaguccgccagcguguacuacucccagcugaugugccagcccauccugcuccuggaccaggcgcuggugagcgacgucggcgacagcgccgagguggccgugaagauguucgacgccuacgucaacaccuucuccagcaccuucaacgugccgauggagaagcucaagacccugguggccacggcggaggccgagcuggccaagaacgucucccucgacaacgugcugagcaccuucaucuccgccgcgcgccagggguucguggacagcgacgucgagaccaaggacgugguggagugccugaagcucucccaccagagcgacaucgaggucaccggcgacuccugcaacaacuacaugcugacguacaacaagguggagaacaugaccccccgggaccugggggccugcaucgacugcagcgcccgccacaucaacgcccagguggccaagucccacaacaucgcgcucaucuggaacgucaaggacuucaugagccuguccgagcagcugcggaagcagauccgcagcgccgccaagaagaacaaccuccccuucaagcugaccugcgccaccacgcgccagguggugaacgucgugaccaccaagaucgcccugaagggcgggugaggacuagucccuguucccagagcccacuuuuuuuucuuuuuuugaaauaaaauagccugucuuucagaucucaaaggcucuuuucagagccaccaaaaaaaaaaaaaaaaaaaaaaaaaaaaaaaaaaaaaaaaaaaaaaaaaaaaaaaaaaaaaaaaaaaaaaaaaaaaaaaaaaaaaaaaaaaaaaaaaaaaa

SEQ ID NO: 19922 - RNA, 6113 nt, Artificial Sequence
  SARS-CoV-2__MT641496.1__non-structural protein 3 (NSP3) mRNA gc
aggagagucccgcagucggcguccagcggcucugcuuguucgugugugugucguugcaggccuuauucaagcuuaccauggcccccaccaaggugaccuucggcgacgacacggucaucgaggugcagggguacaagagcgugaacaucaccuucgagcuggacgagcgcaucgacaagguccucaacgagaagugcuccgccuacaccguggagcugggcaccgaggugaacgaguucgcgugcgucguggccgacgccgugaucaagacgcugcagccggucagcgagcuccugaccccccuggggaucgaccucgacgagugguccauggccaccuacuaccuguucgacgagagcggcgaguucaagcuggccucccacauguacugcagcuucuacccccccgacgaggacgaggaggagggggacugcgaggaggaggaguucgagccguccacccaguacgaguacggcacggaggacgacuaccagggcaagccccucgaguucggggcgaccagcgccgcccugcagcccgaggaggagcaggaggaggacuggcuggacgacgacucccagcagaccgugggccagcaggacgggagcgaggacaaccagaccacgaccauccagaccaucguggagguccagccccagcucgagauggagcugaccccgguggugcagacgaucgaggucaacuccuucagcggcuaccugaagcucaccgacaacguguacaucaagaacgccgacaucguggaggaggcgaagaaggucaagcccaccgugguggucaacgccgccaacguguaccugaagcacgggggcggcguggccggggcccugaacaaggcgaccaacaacgccaugcaggucgaguccgacgacuacaucgccacgaacggcccccucaagguggggggcagcugcguccuguccggccacaaccuggccaagcacugccuccacgugguggggcccaacgucaacaagggcgaggacauccagcugcugaagagcgccuacgagaacuucaaccagcacgaggugcuccuggcgccgcugcucuccgccgggaucuucggcgccgaccccauccacagccugcgggugugcgucgacaccgugcgcaccaacguguaccuggccgucuucgacaagaaccucuacgacaagcugguguccagcuuccuggagaugaagagcgagaagcagguggagcagaagaucgccgagauccccaaggaggaggucaagcccuucaucaccgaguccaagccgagcguggagcagcggaagcaggacgacaagaagaucaaggcgugcguggaggaggucacgaccacccucgaggagaccaaguuccugacggagaaccugcuccuguacaucgacaucaacgggaaccugcaccccgacuccgccacccucgugagcgacaucgacaucaccuuccugaagaaggacgcccccuacaucgugggcgacgucgugcaggagggcgugcugaccgccgucgugauccccacgaagaaggccgggggcaccaccgagaugcucgcgaaggcccugcgcaaggugccgaccgacaacuacaucacgaccuaccccgggcagggccugaacggguacaccgucgaggaggccaagaccgugcucaagaagugcaaguccgccuucuacauccugcccagcaucaucuccaacgagaagcaggagauccugggcaccgugagcuggaaccuccgggagaugcuggcgcacgccgaggagacgcgcaagcugaugcccgucugcguggagaccaaggccaucguguccaccauccagcggaaguacaagggcaucaagauccaggagggggucguggacuacggcgcccgcuucuacuucuacaccagcaagacgaccguggccucccugaucaacacccucaacgaccugaacgagacccuggucacgaugccgcucggguacgugacccacggccugaaccuggaggaggcggcccgguacaugcgcagccucaaggugcccgccaccgucuccgugagcucccccgacgccgugaccgccuacaacggguaccugacgagcuccagcaagacccccgaggagcacuucaucgagaccaucucccuggcgggcagcuacaaggacuggagcuacuccggccagagcacccagcucgggaucgaguuccugaagcggggcgacaaguccgucuacuacacgagcaacccgaccaccuuccaccuggacggggaggugaucaccuucgacaaccucaagacgcugcugucccuccgcgaggugcggaccaucaaggucuucaccaccguggacaacaucaaccugcacacgcagguggucgacaugagcaugaccuacggccagcaguucggccccaccuaccuggacggggccgacgugaccaagaucaagccccacaacucccacgagggcaagacguucuacgugcucccgaacgacgacacccugcgcgucgaggccuucgaguacuaccacaccaccgaccccagcuuccuggggcgguacauguccgcccucaaccacacgaagaaguggaaguacccccaggugaacggccugaccagcaucaagugggccgacaacaacugcuaccuggcgaccgcccuccugacccugcagcagaucgagcucaaguucaaccccccggcccugcaggacgccuacuaccgcgcgcgggccggggaggccgccaacuucugcgcccugauccucgcguacugcaacaagacggugggcgagcugggcgacguccgcgagaccauguccuaccuguuccagcacgccaaccucgacagcugcaagcgggugcugaacgucgugugcaagaccugcgggcagcagcagaccacccugaagggcguggaggccgucauguacauggggacgcucuccuacgagcaguucaagaagggcgugcagauccccugcaccugcgggaagcaggccaccaaguaccuggugcagcaggagagccccuucgucaugauguccgcccccccggcgcaguacgagcugaagcacggcaccuucacgugcgccagcgaguacaccggcaacuaccagugcgggcacuacaagcacaucaccuccaaggagacccucuacugcaucgacggcgcccugcugacgaagagcagcgaguacaaggggcccaucaccgacguguucuacaaggagaacuccuacaccaccacgaucaagcccgugaccuacaagcucgacggcgucgugugcaccgagaucgaccccaagcuggacaacuacuacaagaaggacaacagcuacuucaccgagcagccgaucgaccuggugcccaaccagcccuaccccaacgccuccuucgacaacuucaaguucgucugcgacaacaucaaguucgccgacgaccucaaccagcugacgggguacaagaagccggcgagccgcgagcugaaggugaccuucuuccccgaccucaacggcgacguggucgccaucgacuacaagcacuacacccccuccuucaagaagggcgccaagcugcugcacaagcccaucguguggcacgugaacaacgccaccaacaaggcgacguacaagccgaacaccuggugcauccggugccucuggagcaccaagcccgucgagaccuccaacagcuucgacgugcugaaguccgaggacgcccaggggauggacaaccuggccugcgaggaccucaagcccgugagcgaggaggucguggagaaccccacgauccagaaggacgugcuggagugcaacgucaagaccaccgagguggugggcgacaucauccugaagccggccaacaacucccucaagaucaccgaggaggucgggcacacggaccugauggccgcguacguggacaacagcucccugaccaucaagaagcccaacgagcucagccgcgugcugggccugaagacccucgccacccacgggcuggccgccgucaacuccgugcccugggacacgaucgccaacuacgcgaagccguuccugaacaagguggucagcaccaccaccaacaucgugacgcgcugccucaaccgggugugcaccaacuacaugcccuacuucuucacccugcugcuccagcugugcaccuucacccgcuccacgaacagccggaucaaggccuccaugcccaccaccaucgccaagaacaccgucaagagcgugggcaaguucugccuggaggccagcuucaacuaccucaagucccccaacuucagcaagcugaucaacaucaucaucugguuccugcuccuguccgugugccugggcagccucaucuacuccacggccgcgcuggggguccugaugagcaaccucggcaugccguccuacugcaccggguaccgcgagggcuaccugaacagcaccaacgugaccaucgccacguacugcaccggcuccauccccugcagcgugugccuguccgggcucgacagccuggacaccuaccccucccuggagaccauccagaucacgaucagcuccuucaagugggaccucaccgccuucggccuggucgccgagugguuccuggccuacauccucuucacccgguucuucuacgugcuggggcuggcggccaucaugcagcucuucuucagcuacuucgccgugcacuucaucuccaacagcuggcugauguggcugaucaucaaccugguccagauggcccccaucuccgcgauggugcgcauguacaucuucuucgccagcuucuacuacguguggaagagcuacguccacgugguggacggcugcaacuccagcaccugcaugaugugcuacaagcggaaccgcgccacgcgggucgagugcaccaccaucgugaacgggguccgccgguccuucuacguguacgccaacggcggcaagggguucugcaagcuccacaacuggaacugcgugaacugcgacaccuucugcgccggcagcacguucaucuccgacgaggucgcgcgcgaccugagccugcaguucaagcggccgaucaaccccaccgaccaguccagcuacaucguggacuccgugaccgucaacaacgggagcauccaccucuacuucgacaaggccggccagaagaccuacgagcgccacucccugagccacuucgugaaccuggacaaccuccgggccaacaacacgaaggggucccugcccaucaacgugaucgucuucgacggcaagagcaagugcgaggaguccagcgccaaguccgccagcguguacuacucccagcugaugugccagcccauccuccugcuggaccaggcgcucgugagcgacgucggcgacagcgccgagguggccgugaagauguucgacgccuacgucaacaccuucuccagcaccuucaacgugccgauggagaagcugaagacccugguggccacggcggaggccgagcucgccaagaacgucucccuggacaacgugcugagcaccuucaucuccgccgcgcgccagggguucguggacagcgacgucgagaccaaggacgugguggagugccucaagcugucccaccagagcgacaucgaggucaccggcgacuccugcaacaacuacaugcugacguacaacaagguggagaacaugaccccccgggaccucggggccugcaucgacugcagcgcccgccacaucaacgcccagguggccaagucccacaacaucgcgcugaucuggaacgucaaggacuucaugagccuguccgagcagcuccggaagcagauccgcagcgccgccaagaagaacaaccugcccuucaagcugaccugcgccaccacgcgccagguggugaacgucgugaccaccaagaucgcccucaagggcgggugaggacuagucccuguucccagagcccacuuuuuuuucuuuuuuugaaauaaaauagccugucuuucagaucucaaaggcucuuuucagagccaccaaaaaaaaaaaaaaaaaaaaaaaaaaaaaaaaaaaaaaaaaaaaaaaaaaaaaaaaaaaaaaaaaaaaaaaaaaaaaaaaaaaaaaaaaaaaaaaaaaaaa

SEQ ID NO: 19923 - RNA, 6113 nt, Artificial Sequence
  SARS-CoV-2__MT641501.1__non-structural protein 3 (NSP3) mRNA gc
aggagagucccgcagucggcguccagcggcucugcuuguucgugugugugucguugcaggccuuauucaagcuuaccauggcccccaccaaggugaccuucggcgacgacacggucaucgaggugcagggguacaagagcgugaacaucaccuucgagcuggacgagcgcaucgacaagguccucaacgagaagugcuccgccuacaccguggagcugggcaccgaggugaacgaguucgcgugcgucguggccgacgccgugaucaagacgcugcagccggucagcgagcuccugaccccccuggggaucgaccucgacgagugguccauggccaccuacuaccuguucgacgagagcggcgaguucaagcuggccucccacauguacugcagcuucuacccccccgacgaggacgaggaggagggggacugcgaggaggaggaguucgagccguccacccaguacgaguacggcacggaggacgacuaccagggcaagccccucgaguucggggcgaccagcgccgcccugcagcccgaggaggagcaggaggaggacuggcuggacgacgacucccagcagaccgugggccagcaggacgggagcgaggacaaccagaccacgaccauccagaccaucguggagguccagccccagcucgagauggagcugaccccgguggugcagacgaucgaggucaacuccuucagcggcuaccugaagcucaccgacaacguguacaucaagaacgccgacaucguggaggaggcgaagaaggucaagcccaccgugguggucaacgccgccaacguguaccugaagcacgggggcggcguggccggggcccugaacaaggcgaccaacaacgccaugcaggucgaguccgacgacuacaucgccacgaacggcccccucaagguggggggcagcugcguccuguccggccacaaccuggccaagcacugccuccacgugguggggcccaacgucaacaagggcgaggacauccagcugcugaagagcgccuacgagaacuucaaccagcacgaggugcuccuggcgccgcugcucuccgccgggaucuucggcgccgaccccauccacagccugcgggugugcgucgacaccgugcgcaccaacguguaccuggccgucuucgacaagaaccucuacgacaagcugguguccagcuuccuggagaugaagagcgagaagcagguggagcagaagaucgccgagauccccaaggaggaggucaagcccuucaucaccgaguccaagccgagcguggagcagcggaagcaggacgacaagaagaucaaggcgugcguggaggaggucacgaccacccucgaggagaccaaguuccugacggagaaccugcuccuguacaucgacaucaacgggaaccugcaccccgacuccgccacccucgugagcgacaucgacaucaccuuccugaagaaggacgcccccuacaucgugggcgacgucgugcaggagggcgugcugaccgccgucgugauccccacgaagaaggccgggggcaccaccgagaugcucgcgaaggcccugcgcaaggugccgaccgacaacuacaucacgaccuaccccgggcagggccugaacggguacaccgucgaggaggccaagaccgugcucaagaagugcaaguccgccuucuacauccugcccagcaucaucuccaacgagaagcaggagauccugggcaccgugagcuggaaccuccgggagaugcuggcgcacgccgaggagacgcgcaagcugaugcccgucugcguggagaccaaggccaucguguccaccauccagcggaaguacaagggcaucaagauccaggagggggucguggacuacggcgcccgcuucuacuucuacaccagcaagacgaccguggccucccugaucaacacccucaacgaccugaacgagacccuggucacgaugccgcucggguacgugacccacggccugaaccuggaggaggcggcccgguacaugcgcagccucaaggugcccgccaccgucuccgugagcucccccgacgccgugaccgccuacaacggguaccugacgagcuccagcaagacccccgaggagcacuucaucgagaccaucucccuggcgggcagcuacaaggacuggagcuacuccggccagagcacccagcucgggaucgaguuccugaagcggggcgacaaguccgucuacuacacgagcaacccgaccaccuuccaccuggacggggaggugaucaccuucgacaaccucaagacgcugcugucccuccgcgaggugcggaccaucaaggucuucaccaccguggacaacaucaaccugcacacgcagguggucgacaugagcaugaccuacggccagcaguucggccccaccuaccuggacggggccgacgugaccaagaucaagccccacaacucccacgagggcaagacguucuacgugcucccgaacgacgacacccugcgcgucgaggccuucgaguacuaccacaccaccgaccccagcuuccuggggcgguacauguccgcccucaaccacacgaagaaguggaaguacccccaggugaacggccugaccagcaucaagugggccgacaacaacugcuaccuggcgaccgcccuccugacccugcagcagaucgagcucaaguucaaccccccggcccugcaggacgccuacuaccgcgcgcgggccggggaggccgccaacuucugcgcccugauccucgcguacugcaacaagacggugggcgagcugggcgacguccgcgagaccauguccuaccuguuccagcacgccaaccucgacagcugcaagcgggugcugaacgucgugugcaagaccugcgggcagcagcagaccacccugaagggcguggaggccgucauguacauggggacgcucuccuacgagcaguucaagaagggcgugcagauccccugcaccugcgggaagcaggccaccaaguaccuggugcagcaggagagccccuucgucaugauguccgcccccccggcgcaguacgagcugaagcacggcaccuucaucugcgccagcgaguacacgggcaacuaccagugcgggcacuacaagcacaucaccuccaaggagacccucuacugcaucgacggcgcccugcugaccaagagcagcgaguacaaggggcccaucacggacguguucuacaaggagaacuccuacaccaccaccaucaagcccgugacguacaagcucgacggcgucgugugcaccgagaucgaccccaagcuggacaacuacuacaagaaggacaacagcuacuucaccgagcagccgaucgaccuggugcccaaccagcccuaccccaacgccuccuucgacaacuucaaguucgucugcgacaacaucaaguucgccgacgaccucaaccagcugaccggguacaagaagccggcgagccgcgagcugaaggugacguucuuccccgaccucaacggcgacguggucgccaucgacuacaagcacuacacccccuccuucaagaagggcgccaagcugcugcacaagcccaucguguggcacgugaacaacgccaccaacaaggcgaccuacaagccgaacacguggugcauccggugccucuggagcaccaagcccgucgagaccuccaacagcuucgacgugcugaaguccgaggacgcccaggggauggacaaccuggccugcgaggaccucaagcccgugagcgaggaggucguggagaaccccaccauccagaaggacgugcuggagugcaacgucaagacgaccgagguggugggcgacaucauccugaagccggccaacaacucccucaagaucaccgaggaggucgggcacaccgaccugauggccgcguacguggacaacagcucccugacgaucaagaagcccaacgagcucagccgcgugcugggccugaagacccucgccacccacgggcuggccgccgucaacuccgugcccugggacaccaucgccaacuacgcgcgcccguuccugaacaagguggucagcacgaccaccaacaucgugacccggugccucaaccgcgugugcacgaacuacaugcccuacuucuucacccugcugcuccagcugugcaccuucacccgguccaccaacagccgcaucaaggccuccaugcccacgaccaucgccaagaacaccgucaagagcgugggcaaguucugccuggaggccagcuucaacuaccucaagucccccaacuucagcaagcugaucaacaucaucaucugguuccugcuccuguccgugugccugggcagccucaucuacuccaccgccgcgcuggggguccugaugagcaaccucggcaugccguccuacugcacgggguaccgggagggcuaccugaacagcaccaacgugaccaucgccaccuacugcacgggcuccauccccugcagcgugugccuguccgggcucgacagccuggacaccuaccccucccuggagaccauccagaucaccaucagcuccuucaagugggaccucacggccuucggccuggucgccgagugguuccuggccuacauccucuucacccgcuucuucuacgugcuggggcuggcggccaucaugcagcucuucuucagcuacuucgccgugcacuucaucuccaacagcuggcugauguggcugaucaucaaccugguccagauggcccccaucuccgcgauggugcggauguacaucuucuucgccagcuucuacuacguguggaagagcuacguccacgugguggacggcugcaacuccagcaccugcaugaugugcuacaagcgcaaccgggccacccgcgucgagugcacgaccaucgugaacgggguccggcgcuccuucuacguguacgccaacggcggcaagggguucugcaagcuccacaacuggaacugcgugaacugcgacaccuucugcgccggcagcaccuucaucuccgacgaggucgcgcgggaccugagccugcaguucaagcgcccgaucaaccccacggaccaguccagcuacaucguggacuccgugaccgucaagaacgggagcauccaccucuacuucgacaaggccggccagaagaccuacgagcggcacucccugagccacuucgugaaccuggacaaccuccgcgccaacaacaccaaggggucccugcccaucaacgugaucgucuucgacggcaagagcaagugcgaggaguccagcgccaaguccgccagcguguacuacucccagcugaugugccagcccauccuccugcuggaccaggcgcucgugagcgacgucggcgacagcgccgagguggccgugaagauguucgacgccuacgucaacacguucuccagcaccuucaacgugccgauggagaagcugaagacccugguggccaccgcggaggccgagcucgccaagaacgucucccuggacaacgugcugagcacguucaucuccgccgcgcggcagggguucguggacagcgacgucgagaccaaggacgugguggagugccucaagcugucccaccagagcgacaucgaggucaccggcgacuccugcaacaacuacaugcugaccuacaacaagguggagaacaugacgccccgcgaccucggggccugcaucgacugcagcgcccggcacaucaacgcccagguggccaagucccacaacaucgcgcugaucuggaacgucaaggacuucaugagccuguccgagcagcuccgcaagcagauccgcagcgccgccaagaagaacaaccugcccuucaagcugaccugcgccaccacccggcagguggugaacgucgugacgaccaagaucgcccucaagggcgggugaggacuagucccuguucccagagcccacuuuuuuuucuuuuuuugaaauaaaauagccugucuuucagaucucaaaggcucuuuucagagccaccaaaaaaaaaaaaaaaaaaaaaaaaaaaaaaaaaaaaaaaaaaaaaaaaaaaaaaaaaaaaaaaaaaaaaaaaaaaaaaaaaaaaaaaaaaaaaaaaaaaaa

SEQ ID NO: 19924 - RNA, 6113 nt, Artificial Sequence
  SARS-CoV-2__MT641511.1__non-structural protein 3 (NSP3) mRNA gc
aggagagucccgcagucggcguccagcggcucugcuuguucgugugugugucguugcaggccuuauucaagcuuaccauggcccccaccaaggugaccuucggcgacgacacggucaucgaggugcagggguacaagagcgugaacaucaccuucgagcuggacgagcgcaucgacaagguccucaacgagaagugcuccgccuacaccguggagcugggcaccgaggugaacgaguucgcgugcgucguggccgacgccgugaucaagacgcugcagccggucagcgagcuccugaccccccuggggaucgaccucgacgagugguccauggccaccuacuaccuguucgacgagagcggcgaguucaagcuggccucccacauguacugcagcuucuacccccccgacgaggacgaggaggagggggacugcgaggaggaggaguucgagccguccacccaguacgaguacggcacggaggacgacuaccagggcaagccccucgaguucggggcgaccagcgccgcccugcagcccgaggaggagcaggaggaggacuggcuggacgacgacucccagcagaccgugggccagcaggacgggagcgaggacaaccagaccacgaccauccagaccaucguggagguccagccccagcucgagauggagcugaccccgguggugcagacgaucgaggucaacuccuucagcggcuaccugaagcucaccgacaacguguacaucaagaacgccgacaucguggaggaggcgaagaaggucaagcccaccgugguggucaacgccgccaacguguaccugaagcacgggggcggcguggccggggcccugaacaaggcgaccaacaacgccaugcaggucgaguccgacgacuacaucgccacgaacggcccccucaagguggggggcagcugcguccuguccggccacaaccuggccaagcacugccuccacgugguggggcccaacgucaacaagggcgaggacauccagcugcugaagagcgccuacgagaacuucaaccagcacgaggugcuccuggcgccgcugcucuccgccgggaucuucggcgccgaccccauccacagccugcgggugugcgucgacaccgugcgcaccaacguguaccuggccgucuucgacaagaaccucuacgacaagcugguguccagcuuccuggagaugaagagcgagaagcagguggagcagaagaucgccgagauccccaaggaggaggucaagcccuucaucaccgaguccaagccgagcguggagcagcggaagcaggacgacaagaagaucaaggcgugcguggaggaggucacgaccacccucgaggagaccaaguuccugacggagaaccugcuccuguacaucgacaucaacgggaaccugcaccccgacuccgccacccucgugagcgacaucgacaucaccuuccugaagaaggacgcccccuacaucgugggcgacgucgugcaggagggcgugcugaccgccgucgugauccccacgaagaaggccgggggcaccaccgagaugcucgcgaaggcccugcgcaaggugccgaccgacaacuacaucacgaccuaccccgggcagggccugaacggguacaccgucgaggaggccaagaccgugcucaagaagugcaaguccgccuucuacauccugcccagcaucaucuccaacgagaagcaggagauccugggcaccgugagcuggaaccuccgggagaugcuggcgcacgccgaggagacgcgcaagcugaugcccgucugcguggagaccaaggccaucguguccaccauccagcggaaguacaagggcaucaagauccaggagggggucguggacuacggcgcccgcuucuacuucuacaccagcaagacgaccguggccucccugaucaacacccucaacgaccugaacgagacccuggucacgaugccgcucggguacgugacccacggccugaaccuggaggaggcggcccgguacaugcgcagccucaaggugcccgccaccgucuccgugagcucccccgacgccgugaccgccuacaacggguaccugacgagcuccagcaagacccccgaggagcacuucaucgagaccaucucccuggcgggcagcuacaaggacuggagcuacuccggccagagcacccagcucgggaucgaguuccugaagcggggcgacaaguccgucuacuacacgagcaacccgaccaccuuccaccuggacggggaggugaucaccuucgacaaccucaagacgcugcugucccuccgcgaggugcggaccaucaaggucuucaccaccguggacaacaucaaccugcacacgcagguggucgacaugagcaugaccuacggccagcaguucggccccaccuaccuggacggggccgacgugaccaagaucaagccccacaacucccacgagggcaagacguucuacgugcucccgaacgacgacacccugcgcgucgaggccuucgaguacuaccacaccaccgaccccagcuuccuggggcgguacauguccgcccucaaccacacgaagaaguggaaguacccccaggugaacggccugaccagcaucaagugggccgacaacaacugcuaccuggcgaccgcccuccugacccugcagcagaucgagcucaaguucaaccccccggcccugcaggacgccuacuaccgcgcgcgggccggggaggccgccaacuucugcgcccugauccucgcguacugcaacaagacggugggcgagcugggcgacguccgcgagaccauguccuaccuguuccagcacgccaaccucgacagcugcaagcgggugcugaacgucgugugcaagaccugcgggcagcagcagaccacccugaagggcguggaggccgucauguacauggggacgcucuccuacgagcaguucaagaagggcgugcagauccccugcaccugcgggaagcaggccaccaaguaccuggugcagcaggagagccccuucgucaugauguccgcccccccggcgcaguacgagcugaagcacggcaccuucacgugcgccagcgaguacaccggcaacuaccagugcgggcacuacaagcacaucaccuccaaggagacccucuacugcaucgacggcgcccugcugacgaagagcagcgaguacaaggggcccaucaccgacguguucuacaaggagaacuccuacaccaccacgaucaagcccgugaccuacaagcucgacggcgucgugugcaccgagaucgaccccaagcuggacaacuacuacaagaaggacaacagcuacuucaccgagcagccgaucgaccuggugcccaaccagcccuaccccaacgccuccuucgacaacuucaaguucgucugcgacaacaucaaguucgccgacgaccucaaccagcugacgggguacaagaagccggcgagccgcgagcugaaggugaccuucuuccccgaccucaacggcgacguggucgccaucgacuacaagcacuacacccccuccuucaagaagggcgccaagcugcugcacaagcccaucguguggcacgugaacaacgccaccaacaaggcgacguacaagccgaacaccuggugcauccggugccucuggagcaccaagcccgucgagaccuccaacagcuucgacgugcugaaguccgaggacgcccaggggauggacaaccuggccugcgaggaccucaagcccgugagcgaggaggucguggagaaccccacgauccagaaggacgugcuggagugcaacgucaagaccaccgagguggugggcgacaucauccugaagccggccaacaacucccucaagaucaccgaggaggucgggcacacggaccugauggccgcguacguggacaacagcucccugaccaucaagaagcccaacgagcucagccgcgugcugggccugaagacccucgccacccacgggcuggccgccgucaacuccgugcccugggacacgaucgccaacuacgcgaagccguuccugaacaagguggucagcaccaccaccaacaucgugacgcgcugccucaaccgggugugcaccaacuacaugcccuacuucuucacccugcugcuccagcugugcaccuucacccgcuccacgaacagccggaucaaggccuccaugcccaccaccaucgccaagaacaccgucaagagcgugggcaaguucugccuggaggccagcuucaacuaccucaagucccccaacuucagcaagcugaucaacaucaucaucugguuccugcuccuguccgugugccugggcagccucaucuacuccacggccgcgcuggggguccugaugagcaaccucggcaugccguccuacugcaccggguaccgcgagggcuaccugaacagcaccaacgugaccaucgccacguacugcaccggcuccauccccugcagcgugugccuguccgggcucgacagccuggacaccuaccccucccuggagaccauccagaucacgaucagcuccuucaagugggaccucaccgccuucggccuggucgccgagugguuccuggccuacauccucuucacccgguucuucuacgugcuggggcuggcggccaucaugcagcucuucuucagcuacuucgccgugcacuucaucuccaacagcuggcugauguggcugaucaucaaccugguccagauggcccccaucuccgcgauggugcgcauguacaucuucuucgccagcuucuacuacguguggaagagcuacguccacgugguggacggcugcaacuccagcaccugcaugaugugcuacaagcggaaccgcgccacgcgggucgagugcaccaccaucgugaacgggguccgccgguccuucuacguguacgccaacggcggcaagggguucugcaagcuccacaacuggaacugcgugaacugcgacaccuucugcgccggcagcacguucaucuccgacgaggucgcgcgcgaccugagccugcaguucaagcggccgaucaaccccaccgaccaguccagcuacaucguggacuccgugaccgucaagaacgggagcauccaccucuacuucgacaaggccggccagaagaccuacgagcgccacucccugagccacuucgugaaccuggacaaccuccgggccaacuccacgaaggggagccugcccaucaacgugaucgucuucgacggcaaguccaagugcgaggagagcuccgccaagagcgccuccguguacuacagccagcugaugugccagcccauccuccugcuggaccaggcgcucgugagcgacgucggcgacuccgccgagguggccgugaagauguucgacgccuacgucaacaccuucagcuccaccuucaacgugccgauggagaagcugaagacccugguggccacggcggaggccgagcucgccaagaacgucagccuggacaacgugcuguccaccuucaucagcgccgcgcgccagggguucguggacuccgacgucgagaccaaggacgugguggagugccucaagcugagccaccaguccgacaucgaggucaccggcgacagcugcaacaacuacaugcugacguacaacaagguggagaacaugaccccccgggaccucggggccugcaucgacugcuccgcccgccacaucaacgcccagguggccaagagccacaacaucgcgcugaucuggaacgucaaggacuucaugucccugagcgagcagcuccggaagcagauccgcuccgccgccaagaagaacaaccugcccuucaagcugaccugcgccaccacgcgccagguggugaacgucgugaccaccaagaucgcccucaagggcgggugaggacuagucccuguucccagagcccacuuuuuuuucuuuuuuugaaauaaaauagccugucuuucagaucucaaaggcucuuuucagagccaccaaaaaaaaaaaaaaaaaaaaaaaaaaaaaaaaaaaaaaaaaaaaaaaaaaaaaaaaaaaaaaaaaaaaaaaaaaaaaaaaaaaaaaaaaaaaaaaaaaaaa

SEQ ID NO: 19925 - RNA, 6113 nt, Artificial Sequence
  SARS-CoV-2__MT641518.1__non-structural protein 3 (NSP3) mRNA gc
aggagagucccgcagucggcguccagcggcucugcuuguucgugugugugucguugcaggccuuauucaagcuuaccauggcccccaccaaggugaccuucggcgacgacacggucaucgaggugcagggguacaagagcgugaacaucaccuucgagcuggacgagcgcaucgacaagguccucaacgagaagugcuccgccuacaccguggagcugggcaccgaggugaacgaguucgcgugcgucguggccgacgccgugaucaagacgcugcagccggucagcgagcuccugaccccccuggggaucgaccucgacgagugguccauggccaccuacuaccuguucgacgagagcggcgaguucaagcuggccucccacauguacugcagcuucuacccccccgacgaggacgaggaggagggggacugcgaggaggaggaguucgagccguccacccaguacgaguacggcacggaggacgacuaccagggcaagccccucgaguucggggcgaccagcgccgcccugcagcccgaggaggagcaggaggaggacuggcuggacgacgacucccagcagaccgugggccagcaggacgggagcgaggacaaccagaccacgaccauccagaccaucguggagguccagccccagcucgagauggagcugaccccgguggugcagacgaucgaggucaacuccuucagcggcuaccugaagcucaccgacaacguguacaucaagaacgccgacaucguggaggaggcgaagaaggucaagcccaccgugguggucaacgccgccaacguguaccugaagcacgggggcggcguggccggggcccugaacaaggcgaccaacaacgccaugcaggucgaguccgacgacuacaucgccacgaacggcccccucaagguggggggcagcugcguccuguccggccacaaccuggccaagcacugccuccacgugguggggcccaacgucaacaagggcgaggacauccagcugcugaagagcgccuacgagaacuucaaccagcacgaggugcuccuggcgccgcugcucuccgccgggaucuucggcgccgaccccauccacagccugcgggugugcgucgacaccgugcgcaccaacguguaccuggccgucuucgacaagaaccucuacgacaagcugguguccagcuuccuggagaugaagagcgagaagcagguggagcagaagaucgccgagauccccaaggaggaggucaagcccuucaucaccgaguccaagccgagcguggagcagcggaagcaggacgacaagaagaucaaggcgugcguggaggaggucacgaccacccucgaggagaccaaguuccugacggagaaccugcuccuguacaucgacaucaacgggaaccugcaccccgacuccgccacccucgugagcgacaucgacaucaccuuccugaagaaggacgcccccuacaucgugggcgacgucgugcaggagggcgugcugaccgccgucgugauccccacgaagaaggccgggggcaccaccgagaugcucgcgaaggcccugcgcaaggugccgaccgacaacuacaucacgaccuaccccgggcagggccugaacggguacaccgucgaggaggccaagaccgugcucaagaagugcaaguccgccuucuacauccugcccagcaucaucuccaacgagaagcaggagauccugggcaccgugagcuggaaccuccgggagaugcuggcgcacgccgaggagacgcgcaagcugaugcccgucugcguggagaccaaggccaucguguccaccauccagcggaaguacaagggcaucaagauccaggagggggucguggacuacggcgcccgcuucuacuucuacaccagcaagacgaccguggccucccugaucaacacccucaacgaccugaacgagacccuggucacgaugccgcucggguacgugacccacggccugaaccuggaggaggcggcccgguacaugcgcagccucaaggugcccgccaccgucuccgugagcucccccgacgccgugaccgccuacaacggguaccugacgagcuccagcaagacccccgaggagcacuucaucgagaccaucucccuggcgggcagcuacaaggacuggagcuacuccggccagagcacccagcucgggaucgaguuccugaagcggggcgacaaguccgucuacuacacgagcaacccgaccaccuuccaccuggacggggaggugaucaccuucgacaaccucaagacgcugcugucccuccgcgaggugcggaccaucaaggucuucaccaccguggacaacaucaaccugcacacgcagguggucgacaugagcaugaccuacggccagcaguucggccccaccuaccuggacggggccgacgugaccaagaucaagccccacaacucccacgagggcaagacguucuacgugcucccgaacgacgacacccugcgcgucgaggccuucgaguacuaccacaccaccgaccccagcuuccuggggcgguacauguccgcccucaaccacacgaagaaguggaaguacccccaggugaacggccugaccagcaucaagugggccgacaacaacugcuaccuggcgaccgcccuccugacccugcagcagaucgagcucaaguucaaccccccggcccugcaggacgccuacuaccgcgcgcgggccggggaggccgccaacuucugcgcccugauccucgcguacugcaacaagacggugggcgagcugggcgacguccgcgagaccauguccuaccuguuccagcacgccaaccucgacagcugcaagcgggugcugaacgucgugugcaagaccugcgggcagcagcagaccacccugaagggcguggaggccgucauguacauggggacgcucuccuacgagcaguucaagaagggcgugcagauccccugcaccugcgggaagcaggccaccaaguaccuggugcagcaggagagccccuucgucaugauguccgcccccccggcgcaguacgagcugaagcacggcaccuucacgugcgccagcgaguacaccggcaacuaccagugcgggcacuacaagcacaucaccuccaaggagacccucuacugcaucgacggcgcccugcugacgaagagcagcgaguacaaggggcccaucaccgacguguucuacaaggagaacuccuacaccaccacgaucaagcccgugaccuacaagcucgacggcgucgugugcaccgagaucgaccccaagcuggacaacuacuacaagaaggacaacagcuacuucaccgagcagccgaucgaccuggugcccaaccagcccuaccccaacgccuccuucgacaacuucaaguucgucugcgacaacaucaaguucgccgacgaccucaaccagcugacgggguacaagaagccggcgagccgcgagcugaaggugaccuucuuccccgaccucaacggcgacguggucgccaucgacuacaagcacuacacccccuccuucaagaagggcgccaagcugcugcacaagcccaucguguggcacgugaacaacgccaccaacaaggcgacguacaagccgaacaccuggugcauccggugccucuggagcaccaagcccgucgagaccuccaacagcuucgacgugcugaaguccgaggacgcccaggggauggacaaccuggccugcgaggaccucaagcccgugagcgaggaggucguggagaaccccacgauccagaaggacgugcuggagugcaacgucaagaccaccgagguggugggcgacaucauccugaagccggccaacaacucccucaagaucaccgaggaggucgggcacacggaccugauggccgcguacguggacaacagcucccugaccaucaagaagcccaacgagcucagccgcgugcugggccugaagacccucgccacccacgggcuggccgccgucaacuccgugcccugggacacgaucgccaacuacgcgaagccguuccugaacaagguggucagcaccaccaccaacaucgugacgcgcugccucaaccgggugugcaccaacuacaugcccuacuucuucacccugcugcuccagcugugcaccuucacccgcuccacgaacagccggaucaaggccuccaugcccaccaccaucgccaagaacaccgucaagagcgugggcaaguucugccuggaggccagcuucaacuaccucaagucccccaacuucagcaagcugaucaacaucaucaucugguuccugcuccuguccgugugccugggcagccucaucuacuccacggccgcgcuggggguccugaugagcaaccucggcaugccguccuacugcaccggguaccgcgagggcuaccugaacagcaccaacgugaccaucgccacguacugcaccggcuccauccccugcagcgugugccuguccgggcucgacagccuggacaccuaccccucccuggagaccauccagaucacgaucagcuccuucaagugggaccucaccgccuucggccuggucgccgagugguuccuggccuacauccucuucacccgguucuucuacgugcuggggcuggcggccaucaugcagcucuucuucagcuacuucgccgugcacuucaucuccaacagcuggcugauguggcugaucaucaaccugguccagauggcccccaucuccgcgauggugcgcauguacaucuucuucgccagcuucuacuacguguggaagagcuacguccacgugguggacggcugcaacuccagcaccugcaugaugugcuacaagcggaaccgcgccacgcgggucgagugcaccaccaucgugaacgggguccgccgguccuucuacguguacgccaacggcggcaagggguucugcaagcuccacaacuggaacugcgugaacugcgacaccuucugcgccggcagcacguucaucuccgacgaggucgcgcgcgaccugagccugcaguucaagcggccgaucaaccccaccgaccaguccagcuacaucguggacuccgugaccgucaagaacgggagcauccaccucuacuucgacaaggccggccagaagaccuacgagcgccacucccugagccacuucgugaaccuggacaaccuccgggccaacaacacgaaggggucccugcccaucaacgugaucgucuucgacggcaagagcaagugcgaggaguccagcgccaaguccgccagcguguacuacucccagcugaugugccagcccauccuccugcuggaccaggcgcucgugagcgacgucggcgacagcgccgagguggccgugaagauguucgacgccuacgucaacaccuucuccagcaccuucaacgugccgauggagaagcugaagacccugguggccacggcggaggccgagcucgccaagaacgucucccuggacaacgugcugagcaccuucaucuccgccgcgcgccagggguucguggacagcgacgucgagaccaaggacgugguggagugccucaagcugucccaccaguucgacaucgaggucaccggcgacagcugcaacaacuacaugcugacguacaacaagguggagaacaugaccccccgggaccucggggccugcaucgacugcuccgcccgccacaucaacgcccagguggccaagagccacaacaucgcgcugaucuggaacgucaaggacuucaugucccugagcgagcagcuccggaagcagauccgcuccgccgccaagaagaacaaccugcccuucaagcugaccugcgccaccacgcgccagguggugaacgucgugaccaccaagaucgcccucaagggcgggugaggacuagucccuguucccagagcccacuuuuuuuucuuuuuuugaaauaaaauagccugucuuucagaucucaaaggcucuuuucagagccaccaaaaaaaaaaaaaaaaaaaaaaaaaaaaaaaaaaaaaaaaaaaaaaaaaaaaaaaaaaaaaaaaaaaaaaaaaaaaaaaaaaaaaaaaaaaaaaaaaaaaa

SEQ ID NO: 19926 - RNA, 6113 nt, Artificial Sequence
  SARS-CoV-2__MT641645.1__non-structural protein 3 (NSP3) mRNA gc
aggagagucccgcagucggcguccagcggcucugcuuguucgugugugugucguugcaggccuuauucaagcuuaccauggcccccaccaaggugaccuucggcgacgacacggucaucgaggugcagggguacaagagcgugaacaucaccuucgagcuggacgagcgcaucgacaagguccucaacgagaagugcuccgccuacaccguggagcugggcaccgaggugaacgaguucgcgugcgucguggccgacgccgugaucaagacgcugcagccggucagcgagcuccugaccccccuggggaucgaccucgacgagugguccauggccaccuacuaccuguucgacgagagcggcgaguucaagcuggccucccacauguacugcagcuucuacccccccgacgaggacgaggaggagggggacugcgaggaggaggaguucgagccguccauccaguacgaguacggcaccgaggacgacuaccagggcaagccccucgaguucggggcgacgagcgccgcccugcagcccgaggaggagcaggaggaggacuggcuggacgacgacucccagcagaccgugggccagcaggacgggagcgaggacaaccagaccaccacgauccagaccaucguggagguccagccccagcucgagauggagcugaccccgguggugcagaccaucgaggucaacuccuucagcggcuaccugaagcucacggacaacguguacaucaagaacgccgacaucguggaggaggcgaagaaggucaagcccaccgugguggucaacgccgccaacguguaccugaagcacgggggcggcguggccggggcccugaacaaggcgaccaacaacgccaugcaggucgaguccgacgacuacaucgccaccaacggcccccucaagguggggggcagcugcguccuguccggccacaaccuggccaagcacugccuccacgugguggggcccaacgucaacaagggcgaggacauccagcugcugaagagcgccuacgagaacuucaaccagcacgaggugcuccuggcgccgcugcucuccgccgggaucuucggcgccgaccccauccacagccugcgggugugcgucgacacggugcgcaccaacguguaccuggccgucuucgacaagaaccucuacgacaagcugguguccagcuuccuggagaugaagagcgagaagcagguggagcagaagaucgccgagauccccaaggaggaggucaagcccuucaucaccgaguccaagccgagcguggagcagcggaagcaggacgacaagaagaucaaggcgugcguggaggaggucaccacgacccucgaggagaccaaguuccugaccgagaaccugcuccuguacaucgacaucaacgggaaccugcaccccgacuccgccacgcucgugagcgacaucgacaucaccuuccugaagaaggacgcccccuacaucgugggcgacgucgugcaggagggcgugcugaccgccgucgugauccccaccaagaaggccgggggcacgaccgagaugcucgcgaaggcccugcgcaaggugccgaccgacaacuacaucaccacguaccccgggcagggccugaacggguacaccgucgaggaggccaagaccgugcucaagaagugcaaguccgccuucuacauccugcccagcaucaucuccaacgagaagcaggagauccugggcaccgugagcuggaaccuccgggagaugcuggcgcacgccgaggagacccgcaagcugaugcccgucugcguggagacgaaggccaucguguccaccauccagcggaaguacaagggcaucaagauccaggagggggucguggacuacggcgcccgcuucuacuucuacaccagcaagaccacgguggccucccugaucaacacccucaacgaccugaacgagacccuggucaccaugccgcucggguacgugacgcacggccugaaccuggaggaggcggcccgguacaugcgcagccucaaggugcccgccaccgucuccgugagcucccccgacgccgugaccgccuacaacggguaccugaccagcuccagcaagacgcccgaggagcacuucaucgagaccaucucccuggcgggcagcuacaaggacuggagcuacuccggccagagcacccagcucgggaucgaguuccugaagcggggcgacaaguccgucuacuacaccagcaacccgacgaccuuccaccuggacggggaggugaucaccuucgacaaccucaagacccugcugucccuccgcgaggugcggacgaucaaggucuucaccaccguggacaacaucaaccugcacacccagguggucgacaugagcaugacguacggccagcaguucggccccaccuaccuggacggggccgacgugaccaagaucaagccccacaacucccacgagggcaagaccuucuacgugcucccgaacgacgacacgcugcgcgucgaggccuucgaguacuaccacaccaccgaccccagcuuccuggggcgguacauguccgcccucaaccacaccaagaaguggaaguacccccaggugaacggccugacgagcaucaagugggccgacaacaacugcuaccuggcgaccgcccuccugacccugcagcagaucgagcucaaguucaaccccccggcccugcaggacgccuacuaccgcgcgcgggccggggaggccgccaacuucugcgcccugauccucgcguacugcaacaagaccgugggcgagcugggcgacguccgcgagacgauguccuaccuguuccagcacgccaaccucgacagcugcaagcgggugcugaacgucgugugcaagaccugcgggcagcagcagaccacccugaagggcguggaggccgucauguacauggggacccucuccuacgagcaguucaagaagggcgugcagauccccugcacgugcgggaagcaggccaccaaguaccuggugcagcaggagagccccuucgucaugauguccgcccccccggcgcaguacgagcugaagcacggcaccuucaccugcgccagcgaguacacgggcaacuaccagugcgggcacuacaagcacaucaccuccaaggagacccucuacugcaucgacggcgcccugcugaccaagagcagcgaguacaaggggcccaucacggacguguucuacaaggagaacuccuacaccaccaccaucaagcccgugacguacaagcucgacggcgucgugugcaccgagaucgaccccaagcuggacaacuacuacaagaaggacaacagcuacuucaccgagcagccgaucgaccuggugcccaaccagcccuaccccaacgccuccuucgacaacuucaaguucgucugcgacaacaucaaguucgccgacgaccucaaccagcugaccggguacaagaagccggcgagccgcgagcugaaggugacguucuuccccgaccucaacggcgacguggucgccaucgacuacaagcacuacacccccuccuucaagaagggcgccaagcugcugcacaagcccaucguguggcacgugaacaacgccaccaacaaggcgaccuacaagccgaacacguggugcauccggugccucuggagcaccaagcccgucgagaccuccaacagcuucgacgugcugaaguccgaggacgcccaggggauggacaaccuggccugcgaggaccucaagcccgugagcgaggaggucguggagaaccccaccauccagaaggacgugcuggagugcaacgucaagacgaccgagguggugggcgacaucauccugaagccggccaacaacucccucaagaucaccgaggaggucgggcacaccgaccugauggccgcguacguggacaacagcucccugacgaucaagaagcccaacgagcucagccgcgugcugggccugaagacccucgccacccacgggcuggccgccgucaacuccgugcccugggacaccaucgccaacuacgcgaagccguuccugaacaagguggucagcacgaccaccaacaucgugacccgcugccucaaccgggugugcacgaacuacaugcccuacuucuucacccugcugcuccagcugugcaccuucacccgcuccaccaacagccggaucaaggccuccaugcccacgaccaucgccaagaacaccgucaagagcgugggcaaguucugccuggaggccagcuucaacuaccucaagucccccaacuucagcaagcugaucaacaucaucaucugguuccugcuccuguccgugugccugggcagccucaucuacuccaccgccgcgcuggggguccugaugagcaaccucggcaugccguccuacugcacgggguaccgcgagggcuaccugaacagcaccaacgugaccaucgccaccuacugcacgggcuccauccccugcagcgugugccuguccgggcucgacagccuggacaccuaccccucccuggagaccauccagaucaccaucagcuccuucaagugggaccucacggccuucggccuggucgccgagugguuccuggccuacauccucuucacccgguucuucuacgugcuggggcuggcggccaucaugcagcucuucuucagcuacuucgccgugcacuucaucuccaacagcuggcugauguggcugaucaucaaccugguccagauggcccccaucuccgcgauggugcgcauguacaucuucuucgccagcuucuacuacguguggaagagcuacguccacgugguggacggcugcaacuccagcaccugcaugaugugcuacaagcggaaccgcgccacccgggucgagugcacgaccaucgugaacgggguccgccgguccuucuacguguacgccaacggcggcaagggguucugcaagcuccacaacuggaacugcgugaacugcgacaccuucugcgccggcagcaccuucaucuccgacgaggucgcgcgcgaccugagccugcaguucaagcggccgaucaaccccacggaccaguccagcuacaucguggacuccgugaccgucaagaacgggagcauccaccucuacuucgacaaggccggccagaagaccuacgagcgccacucccugagccacuucgugaaccuggacaaccuccgggccaacaacaccaaggggucccugcccaucaacgugaucgucuucgacggcaagagcaagugcgaggaguccagcgccaaguccgccagcguguacuacucccagcugaugugccagcccauccuccugcuggaccaggcgcucgugagcgacgucggcgacagcgccgagguggccgugaagauguucgacgccuacgucaacacguucuccagcaccuucaacgugccgauggagaagcugaagacccugguggccaccgcggaggccgagcucgccaagaacgucucccuggacaacgugcugagcacguucaucuccgccgcgcgccagggguucguggacagcgacgucgagaccaaggacgugguggagugccucaagcugucccaccagagcgacaucgaggucaccggcgacuccugcaacaacuacaugcugaccuacaacaagguggagaacaugacgccccgggaccucggggccugcaucgacugcagcgcccgccacaucaacgcccagguggccaagucccacaacaucgcgcugaucuggaacgucaaggacuucaugagccuguccgagcagcuccggaagcagauccgcagcgccgccaagaagaacaaccugcccuucaagcugaccugcgccaccacccgccagguggugaacgucgugacgaccaagaucgcccucaagggcgggugaggacuagucccuguucccagagcccacuuuuuuuucuuuuuuugaaauaaaauagccugucuuucagaucucaaaggcucuuuucagagccaccaaaaaaaaaaaaaaaaaaaaaaaaaaaaaaaaaaaaaaaaaaaaaaaaaaaaaaaaaaaaaaaaaaaaaaaaaaaaaaaaaaaaaaaaaaaaaaaaaaaaa

SEQ ID NO: 19927 - RNA, 6113 nt, Artificial Sequence
  SARS-CoV-2__MT641656.1__non-structural protein 3 (NSP3) mRNA gc
aggagagucccgcagucggcguccagcggcucugcuuguucgugugugugucguugcaggccuuauucaagcuuaccauggcccccaccaaggugaccuucggcgacgacacggucaucgaggugcagggguacaagagcgugaacaucaccuucgagcuggacgagcgcaucgacaagguccucaacgagaagugcuccgccuacaccguggagcugggcaccgaggugaacgaguucgcgugcgucguggccgacgccgugaucaagacgcugcagccggucagcgagcuccugaccccccuggggaucgaccucgacgagugguccauggccaccuacuaccuguucgacgagagcggcgaguucaagcuggccucccacauguacugcagcuucuacccccccgacgaggacgaggaggagggggacugcgaggaggaggaguucgagccguccacccaguacgaguacggcacggaggacgacuaccagggcaagccccucgaguucggggcgaccagcgccgcccugcagcccgaggaggagcaggaggaggacuggcuggacgacgacucccagcagaccgugggccagcaggacgggagcgaggacaaccagaccacgaccauccagaccaucguggagguccagccccagcucgagauggagcugaccccgguggugcagacgaucgaggucaacuccuucagcggcuaccugaagcucaccgacaacguguacaucaagaacgccgacaucguggaggaggcgaagaaggucaagcccaccgugguggucaacgccgccaacguguaccugaagcacgggggcggcguggccggggcccugaacaaggcgaccaacaacgccaugcaggucgaguccgacgacuacaucgccacgaacggcccccucaagguggggggcagcugcguccuguccggccacaaccuggccaagcacugccuccacgugguggggcccaacgucaacaagggcgaggacauccagcugcugaagagcgccuacgagaacuucaaccagcacgaggugcuccuggcgccgcugcucuccgccgggaucuucggcgccgaccccauccacagccugcgggugugcgucgacaccgugcgcaccaacguguaccuggccgucuucgacaagaaccucuacgacaagcugguguccagcuuccuggagaugaagagcgagaagcagguggagcagaagaucgccgagauccccaaggaggaggucaagcccuucaucaccgaguccaagccgagcguggagcagcggaagcaggacgacaagaagaucaaggcgugcguggaggaggucacgaccacccucgaggagaccaaguuccugacggagaaccugcuccuguacaucgacaucaacgggaaccugcaccccgacuccgccacccucgugagcgacaucgacaucaccuuccugaagaaggacgcccccuacaucgugggcgacgucgugcaggagggcgugcugaccgccgucgugauccccacgaagaaggccgggggcaccaccgagaugcucgcgaaggcccugcgcaaggugccgaccgacaacuacaucacgaccuaccccgggcagggccugaacggguacaccgucgaggaggccaagaccgugcucaagaagugcaaguccgccuucuacauccugcccagcaucaucuccaacgagaagcaggagauccugggcaccgugagcuggaaccuccgggagaugcuggcgcacgccgaggagacgcgcaagcugaugcccgucugcguggagaccaaggccaucguguccaccauccagcggaaguacaagggcaucaagauccaggagggggucguggacuacggcgcccgcuucuacuucuacaccagcaagacgaccguggucucccugaucaacacccucaacgaccugaacgagacccuggugacgaugccgcucggguacgugacccacggccugaaccuggaggaggccgcgcgguacaugcgcagccucaagguccccgccaccguguccgugagcucccccgacgccgucaccgccuacaacggguaccugacgagcuccagcaagacccccgaggagcacuucaucgagaccaucucccuggccggcagcuacaaggacuggagcuacuccggccagagcacccagcucgggaucgaguuccugaagcggggcgacaaguccguguacuacacgagcaacccgaccaccuuccaccuggacggggaggugaucaccuucgacaaccucaagacgcugcugucccuccgcgagguccggaccaucaagguguucaccaccguggacaacaucaaccugcacacgcaggucguggacaugagcaugaccuacggccagcaguucggccccaccuaccuggacggggcggacgugaccaagaucaagccccacaacucccacgagggcaagacguucuacguccucccgaacgacgacacccugcgcguggaggccuucgaguacuaccacaccaccgaccccagcuuccuggggcgguacauguccgcccucaaccacacgaagaaguggaaguacccccaggugaacggccugaccagcaucaagugggccgacaacaacugcuaccuggccaccgcgcuccugacccugcagcagaucgagcucaaguucaaccccccggcccugcaggacgccuacuaccgcgcccgggcgggggaggccgccaacuucugcgcccugauccucgccuacugcaacaagacggucggcgagcugggcgacgugcgcgagaccauguccuaccuguuccagcacgcgaaccucgacagcugcaagcggguccugaacguggugugcaagaccugcgggcagcagcagaccacccugaagggcgucgaggccgugauguacauggggacgcucuccuacgagcaguucaagaagggcgugcagauccccugcaccugcgggaagcaggccaccaaguaccugguccagcaggagagccccuucgugaugauguccgcccccccggcccaguacgagcugaagcacggcaccuucacgugcgcgagcgaguacaccggcaacuaccagugcgggcacuacaagcacaucaccuccaaggagacccucuacugcaucgacggcgcccugcugacgaagagcagcgaguacaaggggcccaucaccgacguguucuacaaggagaacuccuacaccaccacgaucaagcccgucaccuacaagcucgacggcguggugugcaccgagaucgaccccaagcuggacaacuacuacaagaaggacaacagcuacuucaccgagcagccgaucgaccugguccccaaccagcccuaccccaacgccuccuucgacaacuucaaguucgugugcgacaacaucaaguucgccgacgaccucaaccagcugacgggguacaagaagccggccagccgcgagcugaaggugaccuucuuccccgaccucaacggcgacgucguggcgaucgacuacaagcacuacacccccuccuucaagaagggcgccaagcugcugcacaagcccaucguguggcacgucaacaacgccaccaacaaggccacguacaagccgaacaccuggugcauccggugccucuggagcaccaagcccguggagaccuccaacagcuucgacgugcugaaguccgaggacgcgcaggggauggacaaccuggccugcgaggaccucaagcccgucagcgaggaggugguggagaaccccacgauccagaaggacguccuggagugcaacgugaagaccaccgagguggucggcgacaucauccugaagccggccaacaacucccucaagaucaccgaggagguggggcacacggaccugauggccgccuacguggacaacagcucccugaccaucaagaagcccaacgagcucagccgcguccugggccugaagacccucgcgacccacgggcuggccgccgugaacuccgugcccugggacacgaucgccaacuacgccaagccguuccugaacaaggucgugagcaccaccaccaacaucgugacgcgcugccucaaccgggucugcaccaacuacaugcccuacuucuucacccugcugcuccagcugugcaccuucacccgcuccacgaacagccggaucaaggcguccaugcccaccaccaucgccaagaacaccgugaagagcgugggcaaguucugccuggaggccagcuucaacuaccucaagucccccaacuucagcaagcugaucaacaucaucaucugguuccugcuccuguccgucugccugggcagccucaucuacuccacggccgcccugggggugcugaugagcaaccucggcaugccguccuacugcaccggguaccgcgagggcuaccugaacagcaccaacgugaccaucgcgacguacugcaccggcuccauccccugcagcgucugccuguccgggcucgacagccuggacaccuaccccucccuggagaccauccagaucacgaucagcuccuucaagugggaccucaccgccuucggccugguggccgagugguuccuggccuacauccucuucacccgguucuucuacgugcuggggcuggccgcgaucaugcagcucuucuucagcuacuucgccguccacuucaucuccaacagcuggcugauguggcugaucaucaaccuggugcagauggcccccaucuccgccauggugcgcauguacaucuucuucgcgagcuucuacuacgucuggaagagcuacgugcacguggucgacggcugcaacuccagcaccugcaugaugugcuacaagcggaaccgcgccacgcggguggagugcaccaccaucgucaacggggugcgccgguccuucuacguguacgccaacggcggcaagggguucugcaagcuccacaacuggaacugcgucaacugcgacaccuucugcgccggcagcacguucaucuccgacgagguggcccgcgaccugagccugcaguucaagcggccgaucaaccccaccgaccaguccagcuacaucguggacuccgucaccgugaagaacgggagcauccaccucuacuucgacaaggcgggccagaagaccuacgagcgccacucccugagccacuucgugaaccuggacaaccuccgggccaacaacacgaaggggucccugcccaucaacgucaucguguucgacggcaagagcaagugcgaggaguccagcgccaaguccgccagcguguacuacucccagcugaugugccagcccauccuccugcuggaccaggcccucgucagcgacgugggcgacagcgcggagguggccgucaagauguucgacgccuacgugaacaccuucuccagcaccuucaacgugccgauggagaagcugaagacccuggucgccacggccgaggcggagcucgccaagaacgugucccuggacaacgugcugagcaccuucaucuccgccgcccgccagggguucgucgacagcgacguggagaccaaggacguggucgagugccucaagcugucccaccagagcgacaucgaggugaccggcgacuccugcaacaacuacaugcugacguacaacaagguggagaacaugaccccccgggaccucggggcgugcaucgacugcagcgcccgccacaucaacgcccaggucgccaagucccacaacaucgcccugaucuggaacgugaaggacuucaugagccuguccgagcagcuccggaagcagauccgcagcgcggccaagaagaacaaccugcccuucaagcugaccugcgccaccacgcgccagguggucaacguggugaccaccaagaucgcccucaagggcgggugaggacuagucccuguucccagagcccacuuuuuuuucuuuuuuugaaauaaaauagccugucuuucagaucucaaaggcucuuuucagagccaccaaaaaaaaaaaaaaaaaaaaaaaaaaaaaaaaaaaaaaaaaaaaaaaaaaaaaaaaaaaaaaaaaaaaaaaaaaaaaaaaaaaaaaaaaaaaaaaaaaaaa

SEQ ID NO: 19928 - RNA, 6113 nt, Artificial Sequence
  SARS-CoV-2__MT641665.1__non-structural protein 3 (NSP3) mRNA gc
aggagagucccgcagucggcguccagcggcucugcuuguucgugugugugucguugcaggccuuauucaagcuuaccauggcccccaccaaggugaccuucggcgacgacacggucaucgaggugcagggguacaagagcgugaacaucaccuucgagcuggacgagcgcaucgacaagguccucaacgagaagugcuccgccuacaccguggagcugggcaccgaggugaacgaguucgcgugcgucguggccgacgccgugaucaagacgcugcagccggucagcgagcuccugaccccccuggggaucgaccucgacgagugguccauggccaccuacuaccuguucgacgagagcggcgaguucaagcuggccucccacauguacugcagcuucuacccccccgacgaggacgaggaggagggggacugcgaggaggaggaguucgagccgcucacccaguacgaguacggcacggaggacgacuaccagggcaagccccuggaguucggggcgaccuccgccgcccugcagcccgaggaggagcaggaggaggacuggcucgacgacgacagccagcagaccgugggccagcaggacggguccgaggacaaccagaccacgaccauccagaccaucguggagguccagccccagcuggagauggagcugaccccgguggugcagacgaucgaggucaacagcuucuccggcuaccucaagcugaccgacaacguguacaucaagaacgccgacaucguggaggaggcgaagaaggucaagcccaccgugguggucaacgccgccaacguguaccugaagcacgggggcggcguggccggggcccucaacaaggcgaccaacaacgccaugcaggucgagagcgacgacuacaucgccacgaacggcccccugaagguggucggguccugcgugcugagcggccacaaccucgccaagcacugccugcacguggucggccccaacgugaacaagggggaggacauccagcugcucaaguccgccuacgagaacuucaaccagcacgaggugcugcuggcgccgcuccugagcgccggcaucuucggggccgaccccauccacucccugcgggucugcguggacaccgugcgcaccaacgucuaccucgccguguucgacaagaaccuguacgacaagcuggugagcuccuuccucgagaugaagagcgagaagcaggucgagcagaagaucgccgagauccccaaggaggaggugaagcccuucaucaccgagagcaagccguccguggagcagcggaagcaggacgacaagaagaucaaggcgugcgucgaggaggugacgaccacccuggaggagaccaaguuccugacggagaaccuccugcuguacaucgacaucaacggcaaccuccaccccgacagcgccacccugguguccgacaucgacaucaccuuccugaagaaggacgcccccuacaucgucggggacguggugcaggagggcguccucaccgccguggugauccccacgaagaaggccggcgggaccaccgagaugcuggcgaaggcccugcgcaaggucccgaccgacaacuacaucacgaccuaccccggccaggggcucaacggcuacaccguggaggaggccaagaccgugcugaagaagugcaagagcgccuucuacauccugcccuccaucaucagcaacgagaagcaggagauccucgggaccgucuccuggaaccugcgggagaugcuggcgcacgccgaggagacgcgcaagcugaugcccgugugcguggagaccaaggccaucgucagcaccauccagcggaaguacaagggcaucaagauccaggagggcgugguggacuacggggcccgcuucuacuucuacaccuccaagacgaccgucgccagccucaucaacacccugaacgaccugaacgagacccucgugacgaugccgcugggcuacgugacccacgggcugaaccucgaggaggcggcccgguacaugcgcucccugaagguccccgccaccgugagcguguccagccccgacgccgucaccgccuacaacggcuaccugacguccagcuccaagacccccgaggagcacuucaucgagaccaucagccucgcgggguccuacaaggacuggagcuacagcggccaguccacccagcugggcaucgaguuccugaagcggggggacaagagcguguacuacacguccaacccgaccaccuuccaccucgacggcgaggugaucaccuucgacaaccugaagacgcugcucagccugcgcgagguccggaccaucaagguguucaccaccguggacaacaucaaccugcacacgcaggucguggacauguccaugaccuacgggcagcaguucggccccaccuaccucgacggcgccgacgugaccaagaucaagccccacaacagccacgaggggaagacguucuacguccugccgaacgacgacacccugcgcguggaggccuucgaguacuaccacaccaccgaccccuccuuccucggccgguacaugagcgcccugaaccacacgaagaaguggaaguacccccaggugaacgggcugaccuccaucaagugggccgacaacaacugcuaccucgcgaccgcccugcugacccuccagcagaucgagcugaaguucaaccccccggcccugcaggacgccuacuaccgcgcgcgggccggcgaggccgccaacuucugcgcccucauccuggcguacugcaacaagacggucggggagcugggcgacgugcgcgagaccaugagcuaccucuuccagcacgccaaccuggacuccugcaagcggguccugaacguggugugcaagaccugcggccagcagcagaccacccucaagggggucgaggccgugauguacaugggcacgcugagcuacgagcaguucaagaagggggugcagauccccugcaccugcggcaagcaggccaccaaguaccugguccagcaggagucccccuucgugaugaugagcgcccccccggcgcaguacgagcucaagcacgggaccuucacgugcgccuccgaguacaccggcaacuaccagugcggccacuacaagcacaucaccagcaaggagacccuguacugcaucgacggggcccugcucacgaaguccagcgaguacaagggccccaucaccgacguguucuacaaggagaacagcuacaccaccacgaucaagcccgucaccuacaagcuggacgggguggugugcaccgagaucgaccccaagcuggacaacuacuacaagaaggacaacuccuacuucaccgagcagccgaucgaccucguccccaaccagcccuaccccaacgccagcuucgacaacuucaaguucgugugcgacaacaucaaguucgccgacgaccugaaccagcugacgggcuacaagaagccggcgucccgcgagcucaaggugaccuucuuccccgaccugaacggggacgucguggccaucgacuacaagcacuacacccccagcuucaagaagggcgccaagcugcuccacaagcccaucguguggcacgucaacaacgccaccaacaaggcgacguacaagccgaacaccuggugcauccggugccugugguccaccaagcccguggagaccagcaacuccuucgacgugcugaagagcgaggacgcccagggcauggacaaccucgccugcgaggaccugaagcccgucuccgaggaggugguggagaaccccacgauccagaaggacguccuggagugcaacgugaagaccaccgagguggucggggacaucauccucaagccggccaacaacagccugaagaucaccgaggaggugggccacacggaccugauggccgcguacguggacaacuccagccucaccaucaagaagcccaacgagcugucccgcguccuggggcucaagacccuggccacccacggccuggccgccgugaacagcgugcccugggacacgaucgccaacuacgcgaagccguuccucaacaaggucguguccaccaccaccaacaucgugacgcgcugccugaaccgggucugcaccaacuacaugcccuacuucuucacccugcuccugcagcugugcaccuucacccgcagcacgaacucccggaucaaggccagcaugcccaccaccaucgccaagaacaccgugaaguccguggggaaguucugccucgaggccagcuucaacuaccugaagagccccaacuucuccaagcugaucaacaucaucaucugguuccuccugcugagcgucugccucggcucccugaucuacagcacggccgcgcugggcgugcucauguccaaccuggggaugccgagcuacugcaccggcuaccgcgagggguaccugaacuccaccaacgugaccaucgccacguacugcaccggcagcauccccugcuccgucugccucagcggccuggacucccuggacaccuaccccagccucgagaccauccagaucacgaucuccagcuucaagugggaccugaccgccuucgggcugguggccgagugguuccucgccuacauccuguucacccgguucuucuacgugcugggccucgcggccaucaugcagcuguucuucuccuacuucgccguccacuucaucagcaacuccuggcugauguggcugaucaucaaccucgugcagauggcccccaucagcgcgauggugcgcauguacaucuucuucgccuccuucuacuacgucuggaagagcuacgugcacguggucgacgggugcaacagcuccaccugcaugaugugcuacaagcggaaccgcgccacgcggguggagugcaccaccaucgucaacggcgugcgccggagcuucuacguguacgccaacgggggcaagggcuucugcaagcugcacaacuggaacugcgucaacugcgacaccuucugcgccggguccacguucaucagcgacgagguggcgcgcgaccugucccuccaguucaagcggccgaucaaccccaccgaccagagcuccuacaucguggacagcgucaccgugaagaacggcuccauccaccuguacuucgacaaggccgggcagaagaccuacgagcgccacagccugucccacuucgugaaccucgacaaccugcgggccaacaacacgaagggcagccugcccaucaacgucaucguguucgacgggaaguccaagugcgaggagagcuccgccaagagcgccuccguguacuacagccagcucaugugccagcccauccugcugcucgaccaggcgcuggucuccgacgugggcgacagcgccgagguggccgucaagauguucgacgccuacgugaacaccuucagcuccaccuucaacgugccgauggagaagcugaagacccucgucgccacggcggaggccgagcuggccaagaacgugagccuggacaacgugcucuccaccuucaucagcgccgcgcgccagggcuucgucgacuccgacguggagaccaaggacguggucgagugccugaagcugagccaccaguccgacaucgaggugaccggggacagcugcaacaacuacaugcucacguacaacaagguggagaacaugaccccccgggaccugggcgccugcaucgacugcuccgcccgccacaucaacgcccaggucgccaagagccacaacaucgcgcugaucuggaacgugaaggacuucaugucccucagcgagcagcugcggaagcagauccgcuccgccgccaagaagaacaaccugcccuucaagcucaccugcgccaccacgcgccagguggucaacguggugaccaccaagaucgcccugaaggggggcugaggacuagucccuguucccagagcccacuuuuuuuucuuuuuuugaaauaaaauagccugucuuucagaucucaaaggcucuuuucagagccaccaaaaaaaaaaaaaaaaaaaaaaaaaaaaaaaaaaaaaaaaaaaaaaaaaaaaaaaaaaaaaaaaaaaaaaaaaaaaaaaaaaaaaaaaaaaaaaaaaaaaa

SEQ ID NO: 19929 - RNA, 6113 nt, Artificial Sequence
  SARS-CoV-2__MT641667.1__non-structural protein 3 (NSP3) mRNA gc
aggagagucccgcagucggcguccagcggcucugcuuguucgugugugugucguugcaggccuuauucaagcuuaccauggcccccaccaaggugaccuucggcgacgacacggucaucgaggugcagggguacaagagcgugaacaucaccuucgagcuggacgagcgcaucgacaagguccucaacgagaagugcuccgccuacaccguggagcugggcaccgaggugaacgaguucgcgugcgucguggccgacgccgugaucaagacgcugcagccggucagcgagcuccugaccccccuggggaucgaccucgacgagugguccauggccaccuacuaccuguucgacgagagcggcgaguucaagcuggccucccacauguacugcagcuucuacccccccgacgaggacgaggaggagggggacugcgaggaggaggaguucgagccguccacccaguacgaguacggcacggaggacgacuaccagggcaagccccucgaguucggggcgaccagcgccgcccugcagcccgaggaggagcaggaggaggacuggcuggacgacgacucccagcagaccgugggccagcaggacgggagcgaggacaaccagaccacgaccauccagaccaucguggagguccagccccagcucgagauggagcugaccccgguggugcagacgaucgaggucaacuccuucagcggcuaccugaagcucaccgacaacguguacaucaagaacgccgacaucguggaggaggcgaagaaggucaagcccaccgugguggucaacgccgccaacguguaccugaagcacgggggcggcguggccggggcccugaacaaggcgaccaacaacgccaugcaggucgaguccgacgacuacaucgccacgaacggcccccucaagguggucgggagcugcgugcuguccggccacaaccuggccaagcacugccuccacguggucggccccaacgugaacaagggggaggacauccagcugcugaagagcgccuacgagaacuucaaccagcacgaggugcuccuggcgccgcugcucuccgccggcaucuucggggccgaccccauccacagccugcgggucugcguggacaccgugcgcaccaacgucuaccuggccguguucgacaagaaccucuacgacaagcugguguccagcuuccuggagaugaagagcgagaagcaggucgagcagaagaucgccgagauccccaaggaggaggugaagcccuucaucaccgaguccaagccgagcguggagcagcggaagcaggacgacaagaagaucaaggcgugcgucgaggaggugacgaccacccucgaggagaccaaguuccugacggagaaccugcuccuguacaucgacaucaacggcaaccugcaccccgacuccgccacccucgugagcgacaucgacaucaccuuccugaagaaggacgcccccuacaucgucggggacguggugcaggagggcguccugaccgccguggugauccccacgaagaaggccggcgggaccaccgagaugcucgcgaaggcccugcgcaaggucccgaccgacaacuacaucacgaccuaccccggccaggggcugaacggcuacaccguggaggaggccaagaccgugcucaagaagugcaaguccgccuucuacauccugcccagcaucaucuccaacgagaagcaggagauccuggggaccgucagcuggaaccuccgggagaugcuggcgcacgccgaggagacgcgcaagcugaugcccgugugcguggagaccaaggccaucgucuccaccauccagcggaaguacaagggcaucaagauccaggagggcgugguggacuacggggcccgcuucuacuucuacaccagcaagacgaccgucgccucccugaucaacacccucaacgaccugaacgagacccuggugacgaugccgcucggcuacgugacccacgggcugaaccuggaggaggcggcccgguacaugcgcagccucaagguccccgccaccguguccgugagcucccccgacgccgucaccgccuacaacggcuaccugacgagcuccagcaagacccccgaggagcacuucaucgagaccaucucccuggcggggagcuacaaggacuggagcuacuccggccagagcacccagcucggcaucgaguuccugaagcggggggacaaguccguguacuacacgagcaacccgaccaccuuccaccuggacggcgaggugaucaccuucgacaaccucaagacgcugcugucccuccgcgagguccggaccaucaagguguucaccaccguggacaacaucaaccugcacacgcaggucguggacaugagcaugaccuacgggcagcaguucggccccaccuaccuggacggcgccgacgugaccaagaucaagccccacaacucccacgaggggaagacguucuacguccucccgaacgacgacacccugcgcguggaggccuucgaguacuaccacaccaccgaccccagcuuccugggccgguacauguccgcccucaaccacacgaagaaguggaaguacccccaggugaacgggcugaccagcaucaagugggccgacaacaacugcuaccuggcgaccgcccuccugacccugcagcagaucgagcucaaguucaaccccccggcccugcaggacgccuacuaccgcgcgcgggccggcgaggccgccaacuucugcgcccugauccucgcguacugcaacaagacggucggggagcugggcgacgugcgcgagaccauguccuaccuguuccagcacgccaaccucgacagcugcaagcggguccugaacguggugugcaagaccugcggccagcagcagaccacccugaagggggucgaggccgugauguacaugggcacgcucuccuacgagcaguucaagaagggggugcagauccccugcaccugcggcaagcaggccaccaaguaccugguccagcaggagagccccuucgugaugauguccgcccccccggcgcaguacgagcugaagcacgggaccuucacgugcgccagcgaguacaccggcaacuaccagugcggccacuacaagcacaucaccuccaaggagacccucuacugcaucgacggggcccugcugacgaagagcagcgaguacaagggccccaucaccgacguguucuacaaggagaacuccuacaccaccacgaucaagcccgucaccuacaagcucgacgggguggugugcaccgagaucgaccccaagcuggacaacuacuacaagaaggacaacagcuacuucaccgagcagccgaucgaccugguccccaaccagcccuaccccaacgccuccuucgacaacuucaaguucgugugcgacaacaucaaguucgccgacgaccucaaccagcugacgggcuacaagaagccggcgagccgcgagcugaaggugaccuucuuccccgaccucaacggggacgucguggccaucgacuacaagcacuacacccccuccuucaagaagggcgccaagcugcugcacaagcccaucguguggcacgucaacaacgccaccaacaaggcgacguacaagccgaacaccuggugcauccggugccucuggagcaccaagcccguggagaccuccaacagcuucgacgugcugaaguccgaggacgcccagggcauggacaaccuggccugcgaggaccucaagcccgucagcgaggaggugguggagaaccccacgauccagaaggacguccuggagugcaacgugaagaccaccgagguggucggggacaucauccugaagccggccaacaacucccucaagaucaccgaggaggugggccacacggaccugauggccgcguacguggacaacagcucccugaccaucaagaagcccaacgagcucagccgcguccuggggcugaagacccucgccacccacggccuggccgccgugaacuccgugcccugggacacgaucgccaacuacgcgaagccguuccugaacaaggucgugagcaccaccaccaacaucgugacgcgcugccucaaccgggucugcaccaacuacaugcccuacuucuucacccugcugcuccagcugugcaccuucacccgcuccacgaacagccggaucaaggccuccaugcccaccaccaucgccaagaacaccgugaagagcguggggaaguucugccuggaggccagcuucaacuaccucaagucccccaacuucagcaagcugaucaacaucaucaucugguuccugcuccuguccgucugccugggcagccucaucuacuccacggccgcgcugggcgugcugaugagcaaccucgggaugccguccuacugcaccggcuaccgcgagggguaccugaacagcaccaacgugaccaucgccacguacugcaccggcuccauccccugcagcgucugccuguccggccucgacagccuggacaccuaccccucccuggagaccauccagaucacgaucagcuccuucaagugggaccucaccgccuucgggcugguggccgagugguuccuggccuacauccucuucacccgguucuucuacgugcugggccuggcggccaucaugcagcucuucuucagcuacuucgccguccacuucaucuccaacagcuggcugauguggcugaucaucaaccuggugcagauggcccccaucuccgcgauggugcgcauguacaucuucuucgccagcuucuacuacgucuggaagagcuacgugcacguggucgacgggugcaacuccagcaccugcaugaugugcuacaagcggaaccgcgccacgcggguggagugcaccaccaucgucaacggcgugcgccgguccuucuacguguacgccaacgggggcaagggcuucugcaagcuccacaacuggaacugcgucaacugcgacaccuucugcgccgggagcacguucaucuccgacgagguggcgcgcgaccugagccugcaguucaagcggccgaucaaccccaccgaccaguccagcuacaucguggacuccgucaccgugaagaacggcagcauccaccucuacuucgacaaggccgggcagaagaccuacgagcgccacucccugagccacuucgugaaccuggacaaccuccgggccaacaacacgaagggcucccugcccaucaacgucaucguguucgacgggaagagcaagugcgaggaguccagcgccaaguccgccagcguguacuacucccagcugaugugccagcccauccuccugcuggaccaggcgcucgucagcgacgugggcgacagcgccgagguggccgucaagauguucgacgccuacgugaacaccuucuccagcaccuucaacgugccgauggagaagcugaagacccuggucgccacggcggaggccgagcucgccaagaacgugucccuggacaacgugcugagcaccuucaucuccgccgcgcgccagggcuucgucgacagcgacguggagaccaaggacguggucgagugccucaagcugucccaccagagcgacaucgaggugaccggggacuccugcaacaacuacaugcugacguacaacaagguggagaacaugaccccccgggaccucggcgccugcaucgacugcagcgcccgccacaucaacgcccaggucgccaagucccacaacaucgcgcugaucuggaacgugaaggacuucaugagccuguccgagcagcuccggaagcagauccgcagcgccgccaagaagaacaaccugcccuucaagcugaccugcgccaccacgcgccagguggucaacguggugaccaccaagaucgcccucaaggggggcugaggacuagucccuguucccagagcccacuuuuuuuucuuuuuuugaaauaaaauagccugucuuucagaucucaaaggcucuuuucagagccaccaaaaaaaaaaaaaaaaaaaaaaaaaaaaaaaaaaaaaaaaaaaaaaaaaaaaaaaaaaaaaaaaaaaaaaaaaaaaaaaaaaaaaaaaaaaaaaaaaaaaa

SEQ ID NO: 19930 - RNA, 6113 nt, Artificial Sequence
  SARS-CoV-2__MT641676.1__non-structural protein 3 (NSP3) mRNA gc
aggagagucccgcagucggcguccagcggcucugcuuguucgugugugugucguugcaggccuuauucaagcuuaccauggcccccaccaaggugaccuucggcgacgacacggucaucgaggugcagggguacaagagcgugaacaucaccuucgagcuggacgagcgcaucgacaagguccucaacgagaagugcuccgccuacaccguggagcugggcaccgaggugaacgaguucgcgugcgucguggccgacgccgugaucaagacgcugcagccggucagcgagcuccugaccccccuggggaucgaccucgacgagugguccauggccaccuacuaccuguucgacgagagcggcgaguucaagcuggccucccacauguacugcagcuucuacccccccgacgaggacgaggaggagggggacugcgaggaggaggaguucgagccguccacccaguacgaguacggcacggaggacgacuaccagggcaagccccucgaguucggggcgaccagcgccgcccugcagcccgaggaggagcaggaggaggacuggcuggacgacgacucccagcagaccgugggccagcaggacgggagcgaggacaaccagaccacgaccauccagaccaucguggagguccagccccagcucgagauggagcugaccccgguggugcagacgaucgaggucaacuccuucagcggcuaccugaagcucaccgacaacguguacaucaagaacgccgacaucguggaggaggcgaagaaggucaagcccaccgugguggucaacgccgccaacguguaccugaagcacgggggcggcguggccggggcccugaacaaggcgaccaacaacgccaugcaggucgaguccgacgacuacaucgccacgaacggcccccucaagguggucgggagcugcgugcuguccggccacaaccuggccaagcacugccuccacguggucggccccaacgugaacaagggggaggacauccagcugcugaagagcgccuacgagaacuucaaccagcacgaggugcuccuggcgccgcugcucuccgccggcaucuucggggccgaccccauccacagccugcgggucugcguggacaccgugcgcaccaacgucuaccuggccguguucgacaagaaccucuacgacaagcugguguccagcuuccuggagaugaagagcgagaagcaggucgagcagaagaucgccgagauccccaaggaggaggugaagcccuucaucaccgaguccaagccgagcguggagcagcggaagcaggacgacaagaagaucaaggcgugcgucgaggaggugacgaccacccucgaggagaccaaguuccugacggagaaccugcuccuguacaucgacaucaacggcaaccugcaccccgacuccgccacccucgugagcgacaucgacaucaccuuccugaagaaggacgcccccuacaucgucggggacguggugcaggagggcguccugaccgccguggugauccccacgaagaaggccggcgggaccaccgagaugcucgcgaaggcccugcgcaaggucccgaccgacaacuacaucacgaccuaccccggccaggggcugaacggcuacaccguggaggaggccaagaccgugcucaagaagugcaaguccgccuucuacauccugcccagcaucaucuccaacgagaagcaggagauccuggggaccgucagcuggaaccuccgggagaugcuggcgcacgccgaggagacgcgcaagcugaugcccgugugcguggagaccaaggccaucgucuccaccauccagcggaaguacaagggcaucaagauccaggagggcgugguggacuacggggcccgcuucuacuucuacaccagcaagacgaccgucgccucccugaucaacacccucaacgaccugaacgagacccuggugacgaugccgcucggcuacgugacccacgggcugaaccuggaggaggcggcccgguacaugcgcagccucaagguccccgccaccguguccgugagcucccccgacgccgucaccgccuacaacggcuaccugacgagcuccagcaagacccccgaggagcacuucaucgagaccaucucccuggcggggagcuacaaggacuggagcuacuccggccagagcacccagcucggcaucgaguuccugaagcggggggacaaguccguguacuacacgagcaacccgaccaccuuccaccuggacggcgaggugaucaccuucgacaaccucaagacgcugcugucccuccgcgagguccggaccaucaagguguucaccaccguggacaacaucaaccugcacacgcaggucguggacaugagcaugaccuacgggcagcaguucggccccaccuaccuggacggcgccgacgugaccaagaucaagccccacaacucccacgaggggaagacguucuacguccucccgaacgacgacacccugcgcguggaggccuucgaguacuaccacaccaccgaccccagcuuccugggccgguacauguccgcccucaaccacacgaagaaguggaaguacccccaggugaacgggcugaccagcaucaagugggccgacaacaacugcuaccuggcgaccgcccuccugacccugcagcagaucgagcucaaguucaaccccccggcccugcaggacgccuacuaccgcgcgcgggccggcgaggccgccaacuucugcgcccugauccucgcguacugcaacaagacggucggggagcugggcgacgugcgcgagaccauguccuaccuguuccagcacgccaaccucgacagcugcaagcggguccugaacguggugugcaagaccugcggccagcagcagaccacccugaagggggucgaggccgugauguacaugggcacgcucuccuacgagcaguucaagaagggggugcagauccccugcaccugcggcaagcaggccaccaaguaccugguccagcaggagagccccuucgugaugauguccgcccccccggcgcaguacgagcugaagcacgggaccuucacgugcgccagcgaguacaccggcaacuaccagugcggccacuacaagcacaucaccuccaaggagacccucuacugcaucgacggggcccugcugacgaagagcagcgaguacaagggccccaucaccgacguguucuacaaggagaacuccuacaccaccacgaucaagcccgucaccuacaagcucgacgggguggugugcaccgagaucgaccccaagcuggacaacuacuacaagaaggacaacagcuacuucaccgagcagccgaucgaccugguccccaaccagcccuaccccaacgccuccuucgacaacuucaaguucgugugcgacaacaucaaguucgccgacgaccucaaccagcugacgggcuacaagaagccggcgagccgcgagcugaaggugaccuucuuccccgaccucaacggggacgucguggccaucgacuacaagcacuacacccccuccuucaagaagggcgccaagcugcugcacaagcccaucguguggcacgucaacaacgccaccaacaaggcgacguacaagccgaacaccuggugcauccggugccucuggagcaagaagcccguggagaccuccaacagcuucgacgugcugaaguccgaggacgcccagggcauggacaaccuggccugcgaggaccucaagcccgucagcgaggaggugguggagaaccccaccauccagaaggacguccuggagugcaacgugaagacgaccgagguggucggggacaucauccugaagccggccaacaacucccucaagaucaccgaggaggugggccacaccgaccugauggccgcguacguggacaacagcucccugacgaucaagaagcccaacgagcucagccgcguccuggggcugaagacccucgccacccacggccuggccgccgugaacuccgugcccugggacaccaucgccaacuacgcgaagccguuccugaacaaggucgugagcacgaccaccaacaucgugacccgcugccucaaccgggucugcacgaacuacaugcccuacuucuucacccugcugcuccagcugugcaccuucacccgcuccaccaacagccggaucaaggccuccaugcccacgaccaucgccaagaacaccgugaagagcguggggaaguucugccuggaggccagcuucaacuaccucaagucccccaacuucagcaagcugaucaacaucaucaucugguuccugcuccuguccgucugccugggcagccucaucuacuccaccgccgcgcugggcgugcugaugagcaaccucgggaugccguccuacugcacgggcuaccgcgagggguaccugaacagcaccaacgugaccaucgccaccuacugcacgggcuccauccccugcagcgucugccuguccggccucgacagccuggacaccuaccccucccuggagaccauccagaucaccaucagcuccuucaagugggaccucacggccuucgggcugguggccgagugguuccuggccuacauccucuucacccgguucuucuacgugcugggccuggcggccaucaugcagcucuucuucagcuacuucgccguccacuucaucuccaacagcuggcugauguggcugaucaucaaccuggugcagauggcccccaucuccgcgauggugcgcauguacaucuucuucgccagcuucuacuacgucuggaagagcuacgugcacguggucgacgggugcaacuccagcaccugcaugaugugcuacaagcggaaccgcgccacccggguggagugcacgaccaucgucaacggcgugcgccgguccuucuacguguacgccaacgggggcaagggcuucugcaagcuccacaacuggaacugcgucaacugcgacaccuucugcgccgggagcaccuucaucuccgacgagguggcgcgcgaccugagccugcaguucaagcggccgaucaaccccacggaccaguccagcuacaucguggacuccgucaccgugaagaacggcagcauccaccucuacuucgacaaggccgggcagaagaccuacgagcgccacucccugagccacuucgugaaccuggacaaccuccgggccaacaacaccaagggcucccugcccaucaacgucaucguguucgacgggaagagcaagugcgaggaguccagcgccaaguccgccagcguguacuacucccagcugaugugccagcccauccuccugcuggaccaggcgcucgucagcgacgugggcgacagcgccgagguggccgucaagauguucgacgccuacgugaacacguucuccagcaccuucaacgugccgauggagaagcugaagacccuggucgccaccgcggaggccgagcucgccaagaacgugucccuggacaacgugcugagcacguucaucuccgccgcgcgccagggcuucgucgacagcgacguggagaccaaggacguggucgagugccucaagcugucccaccagagcgacaucgaggugaccggggacuccugcaacaacuacaugcugaccuacaacaagguggagaacaugacgccccgggaccucggcgccugcaucgacugcagcgcccgccacaucaacgcccaggucgccaagucccacaacaucgcgcugaucuggaacgugaaggacuucaugagccuguccgagcagcuccggaagcagauccgcagcgccgccaagaagaacaaccugcccuucaagcugaccugcgccaccacccgccagguggucaacguggugacgaccaagaucgcccucaaggggggcugaggacuagucccuguucccagagcccacuuuuuuuucuuuuuuugaaauaaaauagccugucuuucagaucucaaaggcucuuuucagagccaccaaaaaaaaaaaaaaaaaaaaaaaaaaaaaaaaaaaaaaaaaaaaaaaaaaaaaaaaaaaaaaaaaaaaaaaaaaaaaaaaaaaaaaaaaaaaaaaaaaaaa

SEQ ID NO: 19931 - RNA, 6113 nt, Artificial Sequence
  SARS-CoV-2__MT641692.1__non-structural protein 3 (NSP3) mRNA gc
aggagagucccgcagucggcguccagcggcucugcuuguucgugugugugucguugcaggccuuauucaagcuuaccauggcccccaccaaggugaccuucggcgacgacacggucaucgaggugcagggguacaagagcgugaacaucaccuucgagcuggacgagcgcaucgacaagguccucaacgagaagugcuccgccuacaccguggagcugggcaccgaggugaacgaguucgcgugcgucguggccgacgccgugaucaagacgcugcagccggucagcgagcuccugaccccccuggggaucgaccucgacgagugguccauggccaccuacuaccuguucgacgagagcggcgacuucaagcuggccucccacauguacugcagcuucuacccccccgacgaggacgaggaggagggggacugcgaggaggaggaguucgagccguccacccaguacgaguacggcacggaggacgacuaccagggcaagccccucgaguucggggcgaccagcgccgcccugcagcccgaggaggagcaggaggaggacuggcuggacgacgacucccagcagaccgugggccagcaggacgggagcgaggacaaccagaccacgaccauccagaccaucguggagguccagccccagcucgagauggagcugaccccgguggugcagacgaucgaggucaacuccuucagcggcuaccugaagcucaccgacaacguguacaucaagaacgccgacaucguggaggaggcgaagaaggucaagcccaccgugguggucaacgccgccaacguguaccugaagcacgggggcggcguggccggggcccugaacaaggcgaccaacaacgccaugcaggucgaguccgacgacuacaucgccacgaacggcccccucaagguggucgggagcugcgugcuguccggccacaaccuggccaagcacugccuccacguggucggccccaacgugaacaagggggaggacauccagcugcugaagagcgccuacgagaacuucaaccagcacgaggugcuccuggcgccgcugcucuccgccggcaucuucggggccgaccccauccacagccugcgggucugcguggacaccgugcgcaccaacgucuaccuggccguguucgacaagaaccucuacgacaagcugguguccagcuuccuggagaugaagagcgagaagcaggucgagcagaagaucgccgagauccccaaggaggaggugaagcccuucaucaccgaguccaagccgagcguggagcagcggaagcaggacgacaagaagaucaaggcgugcgucgaggaggugacgaccacccucgaggagaccaaguuccugacggagaaccugcuccuguacaucgacaucaacggcaaccugcaccccgacuccgccacccucgugagcgacaucgacaucaccuuccugaagaaggacgcccccuacaucgucggggacguggugcaggagggcguccugaccgccguggugauccccacgaagaaggccggcgggaccaccgagaugcucgcgaaggcccugcgcaaggucccgaccgacaacuacaucacgaccuaccccggccaggggcugaacggcuacaccguggaggaggccaagaccgugcucaagaagugcaaguccgccuucuacauccugcccagcaucaucuccaacgagaagcaggagauccuggggaccgucagcuggaaccuccgggagaugcuggcgcacgccgaggagacgcgcaagcugaugcccgugugcguggagaccaaggccaucgucuccaccauccagcggaaguacaagggcaucaagauccaggagggcgugguggacuacggggcccgcuucuacuucuacaccagcaagacgaccgucgccucccugaucaacacccucaacgaccugaacgagacccuggugacgaugccgcucggcuacgugacccacgggcugaaccuggaggaggcggcccgguacaugcgcagccucaagguccccgccaccguguccgugagcucccccgacgccgucaccgccuacaacggcuaccugacgagcuccagcaagacccccgaggagcacuucaucgagaccaucucccuggcggggagcuacaaggacuggagcuacuccggccagagcacccagcucggcaucgaguuccugaagcggggggacaaguccguguacuacacgagcaacccgaccaccuuccaccuggacggcgaggugaucaccuucgacaaccucaagacgcugcugucccuccgcgagguccggaccaucaagguguucaccaccguggacaacaucaaccugcacacgcaggucguggacaugagcaugaccuacgggcagcaguucggccccaccuaccuggacggcgccgacgugaccaagaucaagccccacaacucccacgaggggaagacguucuacguccucccgaacgacgacacccugcgcguggaggccuucgaguacuaccacaccaccgaccccagcuuccugggccgguacauguccgcccucaaccacacgaagaaguggaaguacccccaggugaacgggcugaccagcaucaagugggccgacaacaacugcuaccuggcgaccgcccuccugacccugcagcagaucgagcucaaguucaaccccccggcccugcaggacgccuacuaccgcgcgcgggccggcgaggccgccaacuucugcgcccugauccucgcguacugcaacaagacggucggggagcugggcgacgugcgcgagaccauguccuaccuguuccagcacgccaaccucgacagcugcaagcggguccugaacguggugugcaagaccugcggccagcagcagaccacccugaagggggucgaggccgugauguacaugggcacgcucuccuacgagcaguucaagaagggggugcagauccccugcaccugcggcaagcaggccaccaaguaccugguccagcaggagagccccuucgugaugauguccgcccccccggcgcaguacgagcugaagcacgggaccuucacgugcgccagcgaguacaccggcaacuaccagugcggccacuacaagcacaucaccuccaaggagacccucuacugcaucgacggggcccugcugacgaagagcagcgaguacaagggccccaucaccgacguguucuacaaggagaacuccuacaccaccacgaucaagcccgucaccuacaagcucgacgggguggugugcaccgagaucgaccccaagcuggacaacuacuacaagaaggacaacagcuacuucaccgagcagccgaucgaccugguccccaaccagcccuaccccaacgccuccuucgacaacuucaaguucgugugcgacaacaucaaguucgccgacgaccucaaccagcugacgggcuacaagaagccggcgagccgcgagcugaaggugaccuucuuccccgaccucaacggggacgucguggccaucgacuacaagcacuacacccccuccuucaagaagggcgccaagcugcugcacaagcccaucguguggcacgucaacaacgccaccaacaaggcgacguacaagccgaacaccuggugcauccggugccucuggagcaccaagcccguggagaccuccaacagcuucgacgugcugaaguccgaggacgcccagggcauggacaaccuggccugcgaggaccucaagcccgucagcgaggaggugguggagaaccccacgauccagaaggacguccuggagugcaacgugaagaccaccgagguggucggggacaucauccugaagccggccaacaacucccucaagaucaccgaggaggugggccacacggaccugauggccgcguacguggacaacagcucccugaccaucaagaagcccaacgagcucagccgcguccuggggcugaagacccucgccacccacggccuggccgccgugaacuccgugcccugggacacgaucgccaacuacgcgaagccguuccugaacaaggucgugagcaccaccaccaacaucgugacgcgcugccucaaccgggucugcaccaacuacaugcccuacuucuucacccugcugcuccagcugugcaccuucacccgcuccacgaacagccggaucaaggccuccaugcccaccaccaucgccaagaacaccgugaagagcguggggaaguucugccuggaggccagcuucaacuaccucaagucccccaacuucagcaagcugaucaacaucaucaucugguuccugcuccuguccgucugccugggcagccucaucuacuccacggccgcgcugggcgugcugaugagcaaccucgggaugccguccuacugcaccggcuaccgcgagggguaccugaacagcaccaacgugaccaucgccacguacugcaccggcuccauccccugcagcgucugccuguccggccucgacagccuggacaccuaccccucccuggagaccauccagaucacgaucagcuccuucaagugggaccucaccgccuucgggcugguggccgagugguuccuggccuacauccucuucacccgguucuucuacgugcugggccuggcggccaucaugcagcucuucuucagcuacuucgccguccacuucaucuccaacagcuggcugauguggcugaucaucaaccuggugcagauggcccccaucuccgcgauggugcgcauguacaucuucuucgccagcuucuacuacgucuggaagagcuacgugcacguggucgacgggugcaacuccagcaccugcaugaugugcuacaagcggaaccgcgccacgcggguggagugcaccaccaucgucaacggcgugcgccgguccuucuacguguacgccaacgggggcaagggcuucugcaagcuccacaacuggaacugcgucaacugcgacaccuucugcgccgggagcacguucaucuccgacgagguggcgcgcgaccugagccugcaguucaagcggccgaucaaccccaccgaccaguccagcuacaucguggacuccgucaccgugaagaacggcagcauccaccucuacuucgacaaggccgggcagaagaccuacgagcgccacucccugagccacuucgugaaccuggacaaccuccgggccaacaacacgaagggcucccugcccaucaacgucaucguguucgacgggaagagcaagugcgaggaguccagcgccaaguccgccagcguguacuacucccagcugaugugccagcccauccuccugcuggaccaggcgcucgucagcgacgugggcgacagcgccgagguggccgucaagauguucgacgccuacgugaacaccuucuccagcaccuucaacgugccgauggagaagcugaagacccuguucgccacggcggaggccgagcucgccaagaacgucucccuggacaacgugcugagcaccuucaucuccgccgcgcgccagggcuucguggacagcgacgucgagaccaaggacgugguggagugccucaagcugucccaccagagcgacaucgaggucaccggggacuccugcaacaacuacaugcugacguacaacaagguggagaacaugaccccccgggaccucggcgccugcaucgacugcagcgcccgccacaucaacgcccagguggccaagucccacaacaucgcgcugaucuggaacgucaaggacuucaugagccuguccgagcagcuccggaagcagauccgcagcgccgccaagaagaacaaccugcccuucaagcugaccugcgccaccacgcgccagguggugaacgucgugaccaccaagaucgcccucaaggggggcugaggacuagucccuguucccagagcccacuuuuuuuucuuuuuuugaaauaaaauagccugucuuucagaucucaaaggcucuuuucagagccaccaaaaaaaaaaaaaaaaaaaaaaaaaaaaaaaaaaaaaaaaaaaaaaaaaaaaaaaaaaaaaaaaaaaaaaaaaaaaaaaaaaaaaaaaaaaaaaaaaaaaa

SEQ ID NO: 19932 - RNA, 6113 nt, Artificial Sequence
  SARS-CoV-2__MT641693.1__non-structural protein 3 (NSP3) mRNA gc
aggagagucccgcagucggcguccagcggcucugcuuguucgugugugugucguugcaggccuuauucaagcuuaccauggcccccaccaaggugaccuucggcgacgacacggucaucgaggugcagggguacaagagcgugaacaucaccuucgagcuggacgagcgcaucgacaagguccucaacgagaagugcuccgccuacaccguggagcugggcaccgaggugaacgaguucgcgugcgucguggccgacgccgugaucaagacgcugcagccggucagcgagcuccugaccccccuggggaucgaccucgacgagugguccauggccaccuacuaccuguucgacgagagcggcgaguucaagcuggccucccacauguacugcagcuucuacccccccgacgaggacgaggaggagggggacugcgaggaggaggaguucgagccguccacccaguacgaguacggcacggaggacgacuaccagggcaagccccucgaguucggggcgaccagcgccgcccugcagcccgaggaggagcaggaggaggacuggcuggacgacgacucccagcagaccgugggccagcaggacgggagcgaggacaaccagaccacgaccauccagaccaucguggagguccagccccagcucgagauggagcugaccccgguggugcagacgaucgaggucaacuccuucagcggcuaccugaagcucaccgacaacguguacaucaagaacgccgacaucguggaggaggcgaagaaggucaagcccaccgugguggucaacgccgccaacguguaccugaagcacgggggcggcguggccggggcccugaacaaggcgaccaacaacgccaugcaggucgaguccgacgacuacaucgccacgaacggcccccucaagguggucgggagcugcgugcuguccggccacaaccuggccaagcacugccuccacguggucggccccaacgugaacaagggggaggacauccagcugcugaagagcgccuacgagaacuucaaccagcacgaggugcuccuggcgccgcugcucuccgccggcaucuucggggccgaccccauccacagccugcgggucugcguggacaccgugcgcaccaacgucuaccuggccguguucgacaagaaccucuacgacaagcugguguccagcuuccuggagaugaagagcgagaagcaggucgagcagaagaucgccgagauccccaaggaggaggugaagcccuucaucaccgaguccaagccgagcguggagcagcggaagcaggacgacaagaagaucaaggcgugcgucgaggaggugacgaccacccucgaggagaccaaguuccugacggagaaccugcuccuguacaucgacaucaacggcaaccugcaccccgacuccgccacccucgugagcgacaucgacaucaccuuccugaagaaggacgcccccuacaucgucggggacguggugcaggagggcguccugaccgccguggugauccccacgaagaaggccggcgggaccaccgagaugcucgcgaaggcccugcgcaaggucccgaccgacaacuacaucacgaccuaccccggccaggggcugaacggcuacaccguggaggaggccaagaccgugcucaagaagugcaaguccgccuucuacauccugcccagcaucaucuccaacgagaagcaggagauccuggggaccgucagcuggaaccuccgggagaugcuggcgcacgccgaggagacgcgcaagcugaugcccgugugcguggagaccaaggccaucgucuccaccauccagcggaaguacaagggcaucaagauccaggagggcgugguggacuacggggcccgcuucuacuucuacaccagcaagacgaccgucgccucccugaucaacacccucaacgaccugaacgagacccuggugacgaugccgcucggcuacgugacccacgggcugaaccuggaggaggcggcccgguacaugcgcagccucaagguccccgccaccguguccgugagcucccccgacgccgucaccgccuacaacggcuaccugacgagcuccagcaagacccccgaggagcacuucaucgagaccaucucccuggcggggagcuacaaggacuggagcuacuccggccagagcacccagcucggcaucgaguuccugaagcggggggacaaguccguguacuacacgagcaacccgaccaccuuccaccuggacggcgaggugaucaccuucgacaaccucaagacgcugcugucccuccgcgagguccggaccaucaagguguucaccaccguggacaacaucaaccugcacacgcaggucguggacaugagcaugaccuacgggcagcaguucggccccaccuaccuggacggcgccgacgugaccaagaucaagccccacaacucccacgaggggaagacguucuacguccucccgaacgacgacacccugcgcguggaggccuucgaguacuaccacaccaccgaccccagcuuccugggccgguacauguccgcccucaaccacacgaagaaguggaaguacccccaggugaacgggcugaccagcaucaagugggccgacaacaacugcuaccuggcgaccgcccuccugacccugcagcagaucgagcucaaguucaaccccccggcccugcaggacgccuacuaccgcgcgcgggccggcgaggccgccaacuucugcgcccugauccucgcguacugcaacaagacggucggggagcugggcgacgugcgcgagaccauguccuaccuguuccagcacgccaaccucgacagcugcaagcggguccugaacguggugugcaagaccugcggccagcagcagaccacccugaagggggucgaggccgugauguacaugggcacgcucuccuacgagcaguucaagaagggggugcagauccccugcaccugcggcaagcaggccaccaaguaccugguccagcaggagagccccuucgugaugauguccgcccccccggcgcaguacgagcugaagcacgggaccuucacgugcgccagcgaguacaccggcaacuaccagugcggccacuacaagcacaucaccuccaaggagacccucuacugcaucgacggggcccugcugacgaagagcagcgaguacaagggccccaucaccgacguguucuacaaggagaacuccuacaccaccacgaucaagcccgucaccuacaagcucgacgggguggugugcaccgagaucgaccccaagcuggacaacuacuacaagaaggacaacagcuacuucaccgagcagccgaucgaccugguccccaaccagcccuaccccaacgccuccuucgacaacuucaaguucgugugcgacaacaucaaguucgccgacgaccucaaccagcugacgggcuacaagaagccggcgagccgcgagcugaaggugaccuucuuccccgaccucaacggggacgucguggccaucgacuacaagcacuacacccccuccuucaagaagggcgccaagcugcugcacaagcccaucguguggcacgucaacaacgccaccaacaaggcgacguacaagccgaacaccuggugcauccggugccucuggagcaccaagcccguggagaccuccaacagcuucgacgugcugaaguccgaggacgcccagggcauggacaaccuggccugcgaggaccucaagcccgucagcgaggaggugguggagaaccccacgauccagaaggacguccuggagugcaacgugaagaccaccgagguggucggggacaucauccugaagccggccaacaacucccucaagaucaccgaggaggugggccacacggaccugauggccgcguacguggacaacagcucccugaccaucaagaagcccaacgagcucagccgcguccuggggcugaagacccucgccacccacggccuggccgccgugaacuccgugcccugggacacgaucgccaacuacgcgaagccguuccugaacaaggucgugagcaccaccaccaacaucgugacgcgcugccucaaccgggucugcaccaacuacaugcccuacuucuucacccugcugcuccagcugugcaccuucacccgcuccacgaacagccggaucaaggccuccaugcccaccaccaucgccaagaacaccgugaagagcguggggaaguucugccuggaggccagcuucaacuaccucaagucccccaacuucuucaagcugaucaacaucaucaucugguuccugcuccugagcgucugccugggcucccucaucuacagcacggccgcgcugggcgugcugauguccaaccucgggaugccgagcuacugcaccggcuaccgcgagggguaccugaacuccaccaacgugaccaucgccacguacugcaccggcagcauccccugcuccgucugccugagcggccucgacucccuggacaccuaccccagccuggagaccauccagaucacgaucuccagcuucaagugggaccucaccgccuucgggcugguggccgagugguuccuggccuacauccucuucacccgguucuucuacgugcugggccuggcggccaucaugcagcucuucuucuccuacuucgccguccacuucaucagcaacuccuggcugauguggcugaucaucaaccuggugcagauggcccccaucagcgcgauggugcgcauguacaucuucuucgccuccuucuacuacgucuggaagagcuacgugcacguggucgacgggugcaacagcuccaccugcaugaugugcuacaagcggaaccgcgccacgcggguggagugcaccaccaucgucaacggcgugcgccggagcuucuacguguacgccaacgggggcaagggcuucugcaagcuccacaacuggaacugcgucaacugcgacaccuucugcgccggguccacguucaucagcgacgagguggcgcgcgaccugucccugcaguucaagcggccgaucaaccccaccgaccagagcuccuacaucguggacagcgucaccgugaagaacggcuccauccaccucuacuucgacaaggccgggcagaagaccuacgagcgccacagccugucccacuucgugaaccuggacaaccuccgggccaacaacacgaagggcagccugcccaucaacgucaucguguucgacgggaaguccaagugcgaggagagcuccgccaagagcgccuccguguacuacagccagcugaugugccagcccauccuccugcuggaccaggcgcucgucuccgacgugggcgacagcgccgagguggccgucaagauguucgacgccuacgugaacaccuucagcuccaccuucaacgugccgauggagaagcugaagacccuggucgccacggcggaggccgagcucgccaagaacgugagccuggacaacgugcuguccaccuucaucagcgccgcgcgccagggcuucgucgacuccgacguggagaccaaggacguggucgagugccucaagcugagccaccaguccgacaucgaggugaccggggacagcugcaacaacuacaugcugacguacaacaagguggagaacaugaccccccgggaccucggcgccugcaucgacugcuccgcccgccacaucaacgcccaggucgccaagagccacaacaucgcgcugaucuggaacgugaaggacuucaugucccugagcgagcagcuccggaagcagauccgcuccgccgccaagaagaacaaccugcccuucaagcugaccugcgccaccacgcgccagguggucaacguggugaccaccaagaucgcccucaaggggggcugaggacuagucccuguucccagagcccacuuuuuuuucuuuuuuugaaauaaaauagccugucuuucagaucucaaaggcucuuuucagagccaccaaaaaaaaaaaaaaaaaaaaaaaaaaaaaaaaaaaaaaaaaaaaaaaaaaaaaaaaaaaaaaaaaaaaaaaaaaaaaaaaaaaaaaaaaaaaaaaaaaaaa

SEQ ID NO: 19933 - RNA, 6113 nt, Artificial Sequence
  SARS-CoV-2__MT641740.1__non-structural protein 3 (NSP3) mRNA gc
aggagagucccgcagucggcguccagcggcucugcuuguucgugugugugucguugcaggccuuauucaagcuuaccauggcccccaccaaggugaccuucggcgacgacacggucaucgaggugcagggguacaagagcgugaacaucaccuucgagcuggacgagcgcaucgacaagguccucaacgagaagugcuccgccuacaccguggagcugggcaccgaggugaacgaguucgcgugcgucguggccgacgccgugaucaagacgcugcagccggucagcgagcuccugaccccccuggggaucgaccucgacgagugguccauggccaccuacuaccuguucgacgagagcggcgaguucaagcuggccucccacauguacugcagcuucuacccccccgacgaggacgaggaggagggggacugcgaggaggaggaguucgagccguccacccaguacgaguacggcacggaggacgacuaccagggcaagccccucgaguucggggcgaccagcgccgcccugcagcuggaggaggagcaggaggaggacuggcucgacgacgacucccagcagaccgugggccagcaggacgggagcgaggacaaccagaccacgaccauccagaccaucguggagguccagccccagcuggagauggagcugacccccguggugcagacgaucgaggucaacuccuucagcggcuaccucaagcugaccgacaacguguacaucaagaacgccgacaucguggaggaggcgaagaaggucaagccgaccgugguggucaacgccgccaacguguaccugaagcacgggggcggcguggccggggcccucaacaaggcgaccaacaacgccaugcaggucgaguccgacgacuacaucgccacgaacggcccccugaagguggggggcagcugcguccuguccggccacaaccucgccaagcacugccugcacgugguggggcccaacgucaacaagggcgaggacauccagcugcucaagagcgccuacgagaacuucaaccagcacgaggugcugcuggcgccccuccuguccgccgggaucuucggcgccgacccgauccacagccugcgggugugcgucgacaccgugcgcaccaacguguaccucgccgucuucgacaagaaccuguacgacaagcugguguccagcuuccucgagaugaagagcgagaagcagguggagcagaagaucgccgagauccccaaggaggaggucaagcccuucaucaccgaguccaagcccagcguggagcagcggaagcaggacgacaagaagaucaaggcgugcguggaggaggucacgaccacccuggaggagaccaaguuccugacggagaaccuccugcuguacaucgacaucaacgggaaccuccacccggacuccgccacccuggugagcgacaucgacaucaccuuccugaagaaggacgcccccuacaucgugggcgacgucgugcaggagggcgugcucaccgccgucgugauccccacgaagaaggccgggggcaccaccgagaugcuggcgaaggcccugcgcaaggugcccaccgacaacuacaucacgaccuacccggggcagggccucaacggguacaccgucgaggaggccaagaccgugcugaagaagugcaaguccgccuucuacauccugcccagcaucaucuccaacgagaagcaggagauccucggcaccgugagcuggaaccugcgggagaugcuggcgcacgccgaggagacgcgcaagcugaugcccgucugcguggagaccaaggccaucguguccaccauccagcggaaguacaagggcaucaagauccaggagggggucguggacuacggcgcccgcuucuacuucuacaccagcaagacgaccguggccucccucaucaacacccugaacgaccugaacgagacccucgucacgaugccccugggguacgugacccacggccugaaccucgaggaggcggcccgguacaugcgcagccugaaggugccggccaccgucuccgugagcucccccgacgccgugaccgccuacaacggguaccugacgagcuccagcaagacccccgaggagcacuucaucgagaccaucucccucgcgggcagcuacaaggacuggagcuacuccggccagagcacccagcuggggaucgaguuccugaagcggggcgacaaguccgucuacuacacgagcaaccccaccaccuuccaccucgacggggaggugaucaccuucgacaaccugaagacgcugcucucccugcgcgaggugcggaccaucaaggucuucaccaccguggacaacaucaaccugcacacgcagguggucgacaugagcaugaccuacggccagcaguucggcccgaccuaccucgacggggccgacgugaccaagaucaagccccacaacucccacgagggcaagacguucuacgugcugcccaacgacgacacccugcgcgucgaggccuucgaguacuaccacaccaccgacccgagcuuccucgggcgguacauguccgcccugaaccacacgaagaaguggaaguacccccaggugaacggccugaccagcaucaagugggccgacaacaacugcuaccucgcgaccgcccugcugacccuccagcagaucgagcugaaguucaacccccccgcccugcaggacgccuacuaccgcgcgcgggccggggaggccgccaacuucugcgcccucauccuggcguacugcaacaagacggugggcgagcugggcgacguccgcgagaccauguccuaccucuuccagcacgccaaccuggacagcugcaagcgggugcugaacgucgugugcaagaccugcgggcagcagcagaccacccucaagggcguggaggccgucauguacauggggacgcuguccuacgagcaguucaagaagggcgugcagaucccgugcaccugcgggaagcaggccaccaaguaccuggugcagcaggagagccccuucgucaugauguccgccccccccgcgcaguacgagcucaagcacggcaccuucacgugcgccagcgaguacaccggcaacuaccagugcgggcacuacaagcacaucaccuccaaggagacccuguacugcaucgacggcgcccugcucacgaagagcagcgaguacaaggggccgaucaccgacguguucuacaaggagaacuccuacaccaccacgaucaagcccgugaccuacaagcuggacggcgucgugugcaccgagaucgaccccaagcuggacaacuacuacaagaaggacaacagcuacuucaccgagcagcccaucgaccucgugccgaaccagcccuaccccaacgccuccuucgacaacuucaaguucgucugcgacaacaucaaguucgccgacgaccugaaccagcugacgggguacaagaagcccgcgagccgcgagcucaaggugaccuucuucccggaccugaacggcgacguggucgccaucgacuacaagcacuacacccccuccuucaagaagggcgccaagcugcuccacaagcccaucguguggcacgugaacaacgccaccaacaaggcgacguacaagcccaacaucuggugcauccggugccuguggagcaccaagccggucgagaccuccaacagcuucgacgugcugaaguccgaggacgcccaggggauggacaaccucgccugcgaggaccugaagcccgugagcgaggaggucguggagaaccccaccauccagaaggacgugcuggagugcaacgucaagacgaccgagguggugggcgacaucauccucaagcccgccaacaacucccugaagaucaccgaggaggucgggcacaccgaccugauggccgcguacguggacaacagcucccucacgaucaagaagccgaacgagcugagccgcgugcugggccucaagacccuggccacccacgggcuggccgccgucaacuccgugcccugggacaccaucgccaacuacgcgaagcccuuccucaacaagguggucagcacgaccaccaacaucgugacccgcugccugaaccgggugugcacgaacuacaugccguacuucuucacccugcuccugcagcugugcaccuucacccgcuccaccaacagccggaucaaggccuccaugcccacgaccaucgccaagaacaccgucaagagcgugggcaaguucugccucgaggccagcuucaacuaccugaagucccccaacuucagcaagcugaucaacaucaucaucugguuccuccugcuguccgugugccucggcagccugaucuacuccaccgccgcgcuggggguccucaugagcaaccugggcaugcccuccuacugcacgggguaccgcgagggcuaccugaacagcaccaacgugaccaucgccaccuacugcacgggcuccaucccgugcagcgugugccucuccgggcuggacagccuggacaccuaccccucccucgagaccauccagaucaccaucagcuccuucaagugggaccugacggccuucggccuggucgccgagugguuccucgccuacauccuguucacccgguucuucuacgugcuggggcucgcggccaucaugcagcuguucuucagcuacuucgccgugcacuucaucuccaacagcuggcugauguggcugaucaucaaccucguccagauggcccccaucuccgcgauggugcgcauguacaucuucuucgccagcuucuacuacguguggaagagcuacguccacgugguggacggcugcaacuccagcaccugcaugaugugcuacaagcggaaccgcgccacccgggucgagugcacgaccaucgugaacgggguccgccgguccuucuacguguacgccaacggcggcaagggguucugcaagcugcacaacuggaacugcgugaacugcgacaccuucugcgccggcagcaccuucaucuccgacgaggucgcgcgcgaccugagccuccaguucaagcggcccaucaacccgacggaccaguccagcuacaucguggacuccgugaccgucaagaacgggagcauccaccuguacuucgacaaggccggccagaagaccuacgagcgccacucccugagccacuucgugaaccucgacaaccugcgggccaacaacaccaaggggucccugcccaucaacgugaucgucuucgacggcaagagcaagugcgaggaguccagcgccaaguccgccagcguguacuacucccagcucaugugccagcccauccugcugcucgaccaggcgcuggugagcgacgucggcgacagcgccgagguggccgugaagauguucgacgccuacgucaacacguucuccagcaccuucaacgugcccauggagaagcugaagacccucguggccaccgcggaggccgagcuggccaagaacgucucccuggacaacgugcucagcacguucaucuccgccgcgcgccagggguucguggacagcgacgucgagaccaaggacgugguggagugccugaagcugucccaccagagcgacaucgaggucaccggcgacuccugcaacaacuacaugcucaccuacaacaagguggagaacaugacgccgcgggaccugggggccugcaucgacugcagcgcccgccacaucaacgcccagguggccaagucccacaacaucgcgcugaucuggaacgucaaggacuucaugagccucuccgagcagcugcggaagcagauccgcagcgccgccaagaagaacaaccugcccuucaagcucaccugcgccaccacccgccagguggugaacgucgugacgaccaagaucgcccugaagggcgggugaggacuagucccuguucccagagcccacuuuuuuuucuuuuuuugaaauaaaauagccugucuuucagaucucaaaggcucuuuucagagccaccaaaaaaaaaaaaaaaaaaaaaaaaaaaaaaaaaaaaaaaaaaaaaaaaaaaaaaaaaaaaaaaaaaaaaaaaaaaaaaaaaaaaaaaaaaaaaaaaaaaaa

SEQ ID NO: 19934 - RNA, 6113 nt, Artificial Sequence
  SARS-CoV-2__MT641767.1__non-structural protein 3 (NSP3) mRNA gc
aggagagucccgcagucggcguccagcggcucugcuuguucgugugugugucguugcaggccuuauucaagcuuaccauggcccccaccaaggugaccuucggcgacgacacggucaucgaggugcagggguacaagagcgugaacaucaccuucgagcuggacgagcgcaucgacaagguccucaacgagaagugcuccgccuacaccguggagcugggcaccgaggugaacgaguucgcgugcgucguggccgacgccgugaucaagacgcugcagccggucagcgagcuccugaccccccuggggaucgaccucgacgagugguccauggccaccuacuaccuguucgacgagagcggcgaguucaagcuggccucccacauguacugcagcuucuacccccccgacgaggacgaggaggagggggacugcgaggaggaggaguucgagccguccacccaguacgaguacggcacggaggacgacuaccagggcaagccccucgaguucggggcgaccagcgccgcccugcagcccgaggaggagcaggaggaggacuggcuggacgacgacucccagcagaccgugggccagcaggacgggagcgaggacaaccagaccacgaccauccagaccaucguggagguccagccccagcucgagauggagcugaccccgguggugcagacgaucgaggucaacuccuucagcggcuaccugaagcucaccgacaacguguacaucaagaacgccgacaucguggaggaggcgaagaaggucaagcccaccgugguggucaacgccgccaacguguaccugaagcacgggggcggcguggccggggcccugaacaaggcgaccaacaacgccaugcaggucgaguccgacgacuacaucgccacgaacggcccccucaagguggggggcagcugcguccuguccggccacaaccuggccaagcacugccuccacgugguggggcccaacgucaacaagggcgaggacauccagcugcugaagagcgccuacgagaacuucaaccagcacgaggugcuccuggcgccgcugcucuccgccgggaucuucggcgccgaccccauccacagccugcgggugugcgucgacaccgugcgcaccaacguguaccuggccgucuucgacaagaaccucuacgacaagcugguguccagcuuccuggagaugaagagcgagaagcagguggagcagaagaucgccgagauccccaaggaggaggucaagcccuucaucaccgaguccaagccgagcguggagcagcggaagcaggacgacaagaagaucaaggcgugcguggaggaggucacgaccacccucgaggagaccaaguuccugacggagaaccugcuccuguacaucgacaucaacgggaaccugcaccccgacuccgccacccucgugagcgacaucgacaucaccuuccugaagaaggacgcccccuacaucgugggcgacgucgugcaggagggcgugcugaccgccgucgugauccccacgaagaaggccgggggcaccaccgagaugcucgcgaaggcccugcgcaaggugccgaccgacaacuacaucacgaccuaccccgggcagggccugaacggguacaccgucgaggaggccaagaccgugcucaagaagugcaaguccgccuucuacauccugcccagcaucaucuccaacgagaagcaggagauccugggcaccgugagcuggaaccuccgggagaugcuggcgcacgccgaggagacgcgcaagcugaugcccgucugcguggagaccaaggccaucguguccaccauccagcggaaguacaagggcaucaagauccaggagggggucguggacuacggcgcccgcuucuacuucuacaccagcaagacgaccguggccucccugaucaacacccucaacgaccugaacgagacccuggucacgaugccgcucggguacgugacccacggccugaaccuggaggaggcggcccgguacaugcgcagccucaaggugcccgccaccgucuccgugagcucccccgacgccgugaccgccuacaacggguaccugacgagcuccagcaagacccccgaggagcacuucaucgagaccaucucccuggcgggcagcuacaaggacuggagcuacuccggccagagcacccagcucgggaucgaguuccugaagcggggcgacaaguccgucuacuacacgagcaacccgaccaccuuccaccuggacggggaggugaucaccuucgacaaccucaagacgcugcugucccuccgcgaggugcggaccaucaaggucuucaccaccguggacaacaucaaccugcacacgcagguggucgacaugagcaugaccuacggccagcaguucggccccaccuaccuggacggggccgacgugaccaagaucaagccccacaacucccacgagggcaagacguucuacgugcucccgaacgacgacacccugcgcgucgaggccuucgaguacuaccacaccaccgaccccagcuuccuggggcgguacauguccgcccucaaccacacgaagaaguggaaguacccccaggugaacggccugaccagcaucaagugggccgacaacaacugcuaccuggcgaccgcccuccugacccugcagcagaucgagcucaaguucaaccccccggcccugcaggacgccuacuaccgcgcgcgggccggggaggccgccaacuucugcgcccugauccucgcguacugcaacaagacggugggcgagcugggcgacguccgcgagaccauguccuaccuguuccagcacgccaaccucgacagcugcaagcgggugcugaacgucgugugcaagaccugcgggcagcagcagaucacccugaagggcguggaggccgucauguacauggggacccucuccuacgagcaguucaagaagggcgugcagauccccugcacgugcgggaagcaggccaccaaguaccuggugcagcaggagagccccuucgucaugauguccgcccccccggcgcaguacgagcugaagcacggcaccuucaccugcgccagcgaguacacgggcaacuaccagugcgggcacuacaagcacaucaccuccaaggagacccucuacugcaucgacggcgcccugcugaccaagagcagcgaguacaaggggcccaucacggacguguucuacaaggagaacuccuacaccaccaccaucaagcccgugacguacaagcucgacggcgucgugugcaccgagaucgaccccaagcuggacaacuacuacaagaaggacaacagcuacuucaccgagcagccgaucgaccuggugcccaaccagcccuaccccaacgccuccuucgacaacuucaaguucgucugcgacaacaucaaguucgccgacgaccucaaccagcugaccggguacaagaagccggcgagccgcgagcugaaggugacguucuuccccgaccucaacggcgacguggucgccaucgacuacaagcacuacacccccuccuucaagaagggcgccaagcugcugcacaagcccaucguguggcacgugaacaacgccaccaacaaggcgaccuacaagccgaacacguggugcauccggugccucuggagcaagaagcccgucgagaccuccaacagcuucgacgugcugaaguccgaggacgcccaggggauggacaaccuggccugcgaggaccucaagcccgugagcgaggaggucguggagaaccccaccauccagaaggacgugcuggagugcaacgucaagaccacggagguggugggcgacaucauccugaagccggccaacaacucccucaagaucaccgaggaggucgggcacaccgaccugauggccgcguacguggacaacagcucccugaccaucaagaagcccaacgagcucagccgcgugcugggccugaagacgcucgccacccacgggcuggccgccgucaacuccgugcccugggacaccaucgccaacuacgcgaagccguuccugaacaagguggucagcaccacgaccaacaucgugacccgcugccucaaccgggugugcaccaacuacaugcccuacuucuucacgcugcugcuccagcugugcaccuucacccgcuccaccaacagccggaucaaggccuccaugcccaccacgaucgccaagaacaccgucaagagcgugggcaaguucugccuggaggccagcuucaacuaccucaagucccccaacuucagcaagcugaucaacaucaucaucugguuccugcuccuguccgugugccugggcagccucaucuacuccaccgccgcgcuggggguccugaugagcaaccucggcaugccguccuacugcaccggguaccgcgagggcuaccugaacagcacgaacgugaccaucgccaccuacugcaccggcuccauccccugcagcgugugccuguccgggcucgacagccuggacacguaccccucccuggagaccauccagaucaccaucagcuccuucaagugggaccucaccgccuucggccuggucgccgagugguuccuggccuacauccucuucacgcgguucuucuacgugcuggggcuggcggccaucaugcagcucuucuucagcuacuucgccgugcacuucaucuccaacagcuggcugauguggcugaucaucaaccugguccagauggcccccaucuccgcgauggugcgcauguacaucuucuucgccagcuucuacuacguguggaagagcuacguccacgugguggacggcugcaacuccagcaccugcaugaugugcuacaagcggaaccgcgccacccgggucgagugcaccacgaucgugaacgggguccgccgguccuucuacguguacgccaacggcggcaagggguucugcaagcuccacaacuggaacugcgugaacugcgacaccuucugcgccggcagcaccuucaucuccgacgaggucgcgcgcgaccugagccugcaguucaagcggccgaucaaccccaccgaccaguccagcuacaucguggacuccgugacggucaagaacgggagcauccaccucuacuucgacaaggccggccagaagaccuacgagcgccacucccugagccacuucgugaaccuggacaaccuccgggccaacaacaccaaggggucccugcccaucaacgugaucgucuucgacggcaagagcaagugcgaggaguccagcgccaaguccgccagcguguacuacucccagcugaugugccagcccauccuccugcuggaccaggcgcucgugagcgacgucggcgacagcgccgagguggccgugaagauguucgacgccuacgucaacaccuucuccagcacguucaacgugccgauggagaagcugaagacccugguggccaccgcggaggccgagcucgccaagaacgucucccuggacaacgugcugagcaccuucaucuccgccgcgcgccagggguucguggacagcgacgucgagacgaaggacgugguggagugccucaagcugucccaccagagcgacaucgaggucaccggcgacuccugcaacaacuacaugcugaccuacaacaagguggagaacaugaccccccgggaccucggggccugcaucgacugcagcgcccgccacaucaacgcccagguggccaagucccacaacaucgcgcugaucuggaacgucaaggacuucaugagccuguccgagcagcuccggaagcagauccgcagcgccgccaagaagaacaaccugcccuucaagcugacgugcgccaccacccgccagguggugaacgucgugaccacgaagaucgcccucaagggcgggugaggacuagucccuguucccagagcccacuuuuuuuucuuuuuuugaaauaaaauagccugucuuucagaucucaaaggcucuuuucagagccaccaaaaaaaaaaaaaaaaaaaaaaaaaaaaaaaaaaaaaaaaaaaaaaaaaaaaaaaaaaaaaaaaaaaaaaaaaaaaaaaaaaaaaaaaaaaaaaaaaaaaa

SEQ ID NO: 19935 - RNA, 6113 nt, Artificial Sequence
  SARS-CoV-2__MT642085.1__non-structural protein 3 (NSP3) mRNA gc
aggagagucccgcagucggcguccagcggcucugcuuguucgugugugugucguugcaggccuuauucaagcuuaccauggcccccaccaaggugaccuucggcgacgacacggucaucgaggugcagggguacaagagcgugaacaucaccuucgagcuggacgagcgcaucgacaagguccucaacgagaagugcuccgccuacaccguggagcugggcaccgaggugaacgaguucgcgugcgucguggccgacgccgugaucaagacgcugcagccggucagcgagcuccugaccccccuggggaucgaccucgacgagugguccauggccaccuacuaccuguucgacgagagcggcgaguucaagcuggccucccacauguacugcagcuucuacccccccgacgaggacgaggaggagggggacugcgaggaggaggaguucgagccguccacccaguacgaguacggcacggaggacgacuaccagggcaagccccucgaguucggggcgaccagcgccgcccugcagcccgaggaggagcaggaggaggacuggcuggacgacgacucccagcagaccgugggccagcaggacgggagcgaggacaaccagaccacgaccauccagaccaucguggagguccagccccagcucgagauggagcugaccccgguggugcagacgaucgaggucaacuccuucagcggcuaccugaagcucaccgacaacguguacaucaagaacgccgacaucguggaggaggcgaagaaggucaagcccaccgugguggucaacgccgccaacguguaccugaagcacgggggcggcguggccggggcccugaacaaggcgaccaacaacgccaugcaggucgaguccgacgacuacaucgccacgaacggcccccucaagguggggggcagcugcguccuguccggccacaaccuggccaagcacugccuccacgugguggggcccaacgucaacaagggcgaggacauccagcugcugaagagcgccuacgagaacuucaaccagcacgaggugcuccuggcgccgcugcucuccgccgggaucuucggcgccgaccccauccacagccugcgggugugcgucgacaccgugcgcaccaacguguaccuggccgucuucgacaagaaccucuacgacaagcugguguccagcuuccuggagaugaagagcgagaagcagguggagcagaagaucgccgagauccccaaggaggaggucaagcccuucaucaccgaguccaagccgagcguggagcagcggaagcaggacgacaagaagaucaaggcgugcguggaggaggucacgaccacccucgaggagaccaaguuccugacggagaaccugcuccuguacaucgacaucaacgggaaccugcaccccgacuccgccacccucgugagcgacaucgacaucaccuuccugaagaaggacgcccccuacaucgugggcgacgucgugcaggagggcgugcugaccgccgucgugauccccacgaagaaggccgggggcaccaccgagaugcucgcgaaggcccugcgcaaggugccgaccgacaacuacaucacgaccuaccccgggcagggccugaacggguacaccgucgaggaggccaagaccgugcucaagaagugcaaguccgccuucuacauccugcccagcaucaucuccaacgagaagcaggagauccugggcaccgugagcuggaaccuccgggagaugcuggcgcacgccgaggagacgcgcaagcugaugcccgucugcguggagaccaaggccaucguguccaccauccagcggaaguacaagggcaucaagauccaggagggggucguggacuacggcgcccgcuucuacuucuacaccagcaagacgaccguggccucccugaucaacacccucaacgaccugaacgagacccuggucacgaugccgcucggguacgugacccacggccugaaccuggaggaggcggcccgguacaugcgcagccucaaggugcccgccaccgucuccgugagcucccccgacgccgugaccgccuacaacggguaccugacgagcuccagcaagacccccgaggagcacuucaucgagaccaucucccuggcgggcagcuacaaggacuggagcuacuccggccagagcacccagcucgggaucgaguuccugaagcggggcgacaaguccgucuacuacacgagcaacccgaccaccuuccaccuggacggggaggugaucaccuucgacaaccucaagacgcugcugucccuccgcgaggugcggaccaucaaggucuucaccaccguggacaacaucaaccugcacacgcagguggucgacaugagcaugaccuacggccagcaguucggccccaccuaccuggacggggccgacgugaccaagaucaagccccacaacucccacgagggcaagacguucuacgugcucccgaacgacgacacccugcgcgucgaggccuucgaguacuaccacaccaccgaccccagcuuccuggggcgguacauguccgcccucaaccacacgaagaaguggaaguacccccaggugaacggccugaccagcaucaagugggccgacaacaacugcuaccuggcgaccgcccuccugacccugcagcagaucgagcucaaguucaaccccccggcccugcaggacgccuacuaccgcgcgcgggccggggaggccgccaacuucugcgcccugauccucgcguacugcaacaagacggugggcgagcugggcgacguccgcgagaccauguccuaccuguuccagcacgccaaccucgacagcugcaagcgggugcugaacgucgugugcaagaccugcgggcagcagcagaccacccugaagggcguggaggccgucauguacauggggacgcucuccuacgagcaguucaagaagggcgugcagauccccugcaccugcgggaagcaggccaccaaguaccuggugcagcaggagagccccuucgucaugauguccgcccccccggcgcaguacgagcugaagcacggcaccuucacgugcgccagcgaguacaccggcaacuaccagugcgggcacuacaagcacaucaccuccaaggagacccucuacugcaucgacggcgcccugcugacgaagagcagcgaguacaaggggcccaucaccgacguguucuacaaggagaacuccuacaccaccacgaucaagcccgugaccuacaagcucgacggcgucgugugcaccgagaucgaccccaagcuggacaacuacuacaagaaggacaacagcuacuucaccgagcagccgaucgaccuggugcccaaccagcccuaccccaacgccuccuucgacaacuucaaguucgucugcgacaacaucaaguucgccgacgaccucaaccagcugacgggguacaagaagccggcgagccgcgagcugaaggugaccuucuuccccgaccucaacggcgacguggucgccaucgacuacaagcacuacacccccuccuucaagaagggcgccaagcugcugcacaagcccaucguguggcacgugaacaacgccaccaacaaggcgacguacaagccgaacaccuggugcauccggugccucuggagcaccaagcccgucgagaccuccaacagcuucgacgugcugaaguccgaggacgcccaggggauggacaaccuggccugcgaggaccucaagcccgugagcgaggaggucguggagaaccccacgauccagaaggacgugcuggagugcaacgucaagaccaccgagguggugggcgacaucauccugaagccggccaacaacucccucaagaucaccgaggaggucgggcacacggaccugauggccgcguacguggacaacagcucccugaccaucaagaagcccaacgagcucagccgcgugcugggccugaagacccucgccacccacgggcuggccgccgucaacuccgugcccugggacacgaucgccaacuacgcgaagccguuccugaaccgcguggucagcaccaccaccaacaucgugacgcggugccucaaccgcgugugcaccaacuacaugcccuacuucuucacccugcugcuccagcugugcaccuucacccgguccacgaacagccgcaucaaggccuccaugcccaccaccaucgccaagaacaccgucaagagcgugggcaaguucugccuggaggccagcuucaacuaccucaagucccccaacuucagcaagcugaucaacaucaucaucugguuccugcuccuguccgugugccugggcagccucaucuacuccacggccgcgcuggggguccugaugagcaaccucggcaugccguccuacugcaccggguaccgggagggcuaccugaacagcaccaacgugaccaucgccacguacugcaccggcuccauccccugcagcgugugccuguccgggcucgacagccuggacaccuaccccucccuggagaccauccagaucacgaucagcuccuucaagugggaccucaccgccuucggccuggucgccgagugguuccuggccuacauccucuucacccgcuucuucuacgugcuggggcuggcggccaucaugcagcucuucuucagcuacuucgccgugcacuucaucuccaacagcuggcugauguggcugaucaucaaccugguccagauggcccccaucuccgcgauggugcggauguacaucuucuucgccagcuucuacuacguguggaagagcuacguccacgugguggacggcugcaacuccagcaccugcaugaugugcuacaagcgcaaccgggccacgcgcgucgagugcaccaccaucgugaacgggguccggcgcuccuucuacguguacgccaacggcggcaagggguucugcaagcuccacaacuggaacugcgugaacugcgacaccuucugcgccggcagcacguucaucuccgacgaggucgcgcgggaccugagccugcaguucaagcgcccgaucaaccccaccgaccaguccagcuacaucguggacuccgugaccgucaagaacgggagcauccaccucuacuucgacaaggccggccagaagaccuacgagcggcacucccugagccacuucgugaaccuggacaaccuccgcgccaacaacacgaaggggucccugcccaucaacgugaucgucuucgacggcaagagcaagugcgaggaguccagcgccaaguccgccagcguguacuacucccagcugaugugccagcccauccuccugcuggaccaggcgcucgugagcgacgucggcgacagcgccgagguggccgugaagauguucgacgccuacgucaacaccuucuccagcaccuucaacgugccgauggagaagcugaagacccugguggccacggcggaggccgagcucgccaagaacgucucccuggacaacgugcugagcaccuucaucuccgccgcgcggcagggguucguggacagcgacgucgagaccaaggacgugguggagugccucaagcugucccaccagagcgacaucgaggucaccggcgacuccugcaacaacuacaugcugacguacaacaagguggagaacaugaccccccgcgaccucggggccugcaucgacugcagcgcccggcacaucaacgcccagguggccaagucccacaacaucgcgcugaucuggaacgucaaggacuucaugagccuguccgagcagcuccgcaagcagauccgcagcgccgccaagaagaacaaccugcccuucaagcugaccugcgccaccacgcggcagguggugaacgucgugaccaccaagaucgcccucaagggcgggugaggacuagucccuguucccagagcccacuuuuuuuucuuuuuuugaaauaaaauagccugucuuucagaucucaaaggcucuuuucagagccaccaaaaaaaaaaaaaaaaaaaaaaaaaaaaaaaaaaaaaaaaaaaaaaaaaaaaaaaaaaaaaaaaaaaaaaaaaaaaaaaaaaaaaaaaaaaaaaaaaaaaa

SEQ ID NO: 19936 - RNA, 6113 nt, Artificial Sequence
  SARS-CoV-2__MT642087.1__non-structural protein 3 (NSP3) mRNA gc
aggagagucccgcagucggcguccagcggcucugcuuguucgugugugugucguugcaggccuuauucaagcuuaccauggcccccaccaaggugaccuucggcgacgacacggucaucgaggugcagggguacaagagcgugaacaucaccuucgagcuggacgagcgcaucgacaagguccucaacgagaagugcuccgccuacaccguggagcugggcaccgaggugaacgaguucgcgugcgucguggccgacgccgugaucaagacgcugcagccggucagcgagcuccugaccccccuggggaucgaccucgacgagugguccauggccaccuacuaccuguucgacgagagcggcgaguucaagcuggccucccacauguacugcagcuucuacccccccgacgaggacgaggaggagggggacugcgaggaggaggaguucgagccgcucacccaguacgaguacggcacggaggacgacuaccagggcaagccccuggaguucggggcgaccuccgccgcccugcagcccgaggaggagcaggaggaggacuggcucgacgacgacagccagcagaccgugggccagcaggacggguccgaggacaaccagaccacgaccauccagaccaucguggagguccagccccagcuggagauggagcugaccccgguggugcagacgaucgaggucaacagcuucuccggcuaccucaagcugaccgacaacguguacaucaagaacgccgacaucguggaggaggcgaagaaggucaagcccaccgugguggucaacgccgccaacguguaccugaagcacgggggcggcguggccggggcccucaacaaggcgaccaacaacgccaugcaggucgagagcgacgacuacaucgccacgaacggcccccugaagguggggggcuccugcguccugagcggccacaaccucgccaagcacugccugcacgugguggggcccaacgucaacaagggcgaggacauccagcugcucaaguccgccuacgagaacuucaaccagcacgaggugcugcuggcgccgcuccugagcgccgggaucuucggcgccgaccccauccacucccugcgggugugcgucgacaccgugcgcaccaacguguaccucgccgucuucgacaagaaccuguacgacaagcuggugagcuccuuccucgagaugaagagcgagaagcagguggagcagaagaucgccgagauccccaaggaggaggucaagcccuucaucaccgagagcaagccguccguggagcagcggaagcaggacgacaagaagaucaaggcgugcguggaggaggucacgaccacccuggaggagaccaaguuccugacggagaaccuccugcuguacaucgacaucaacgggaaccuccaccccgacagcgccacccugguguccgacaucgacaucaccuuccugaagaaggacgcccccuacaucgugggcgacgucgugcaggagggcgugcucaccgccgucgugauccccacgaagaaggccgggggcaccaccgagaugcuggcgaaggcccugcgcaaggugccgaccgacaacuacaucacgaccuaccccgggcagggccucaacggguacaccgucgaggaggccaagaccgugcugaagaagugcaagagcgccuucuacauccugcccuccaucaucagcaacgagaagcaggagauccucggcaccguguccuggaaccugcgggagaugcuggcgcacgccgaggagacgcgcaagcugaugcccgucugcguggagaccaaggccaucgugagcaccauccagcggaaguacaagggcaucaagauccaggagggggucguggacuacggcgcccgcuucuacuucuacaccuccaagacgaccguggccagccucaucaacacccugaacgaccugaacgagacccucgucacgaugccgcugggguacgugacccacggccugaaccucgaggaggcggcccgguacaugcgcucccugaaggugcccgccaccgucagcguguccagccccgacgccgugaccgccuacaacggguaccugacguccagcuccaagacccccgaggagcacuucaucgagaccaucagccucgcgggcuccuacaaggacuggagcuacagcggccaguccacccagcuggggaucgaguuccugaagcggggcgacaagagcgucuacuacacguccaacccgaccaccuuccaccucgacggggaggugaucaccuucgacaaccugaagacgcugcucagccugcgcgaggugcggaccaucaaggucuucaccaccguggacaacaucaaccugcacacgcagguggucgacauguccaugaucuacggccagcaguucggccccaccuaccucgacggggccgacgugaccaagaucaagccccacaacagccacgagggcaagaccuucuacgugcugccgaacgacgacacgcugcgcgucgaggccuucgaguacuaccacaccaccgaccccuccuuccucgggcgguacaugagcgcccugaaccacaccaagaaguggaaguacccccaggugaacggccugacguccaucaagugggccgacaacaacugcuaccucgcgaccgcccugcugacccuccagcagaucgagcugaaguucaaccccccggcccugcaggacgccuacuaccgcgcgcgggccggggaggccgccaacuucugcgcccucauccuggcguacugcaacaagaccgugggcgagcugggcgacguccgcgagacgaugagcuaccucuuccagcacgccaaccuggacuccugcaagcgggugcugaacgucgugugcaagaccugcgggcagcagcagaccacccucaagggcguggaggccgucauguacauggggacccugagcuacgagcaguucaagaagggcgugcagauccccugcacgugcgggaagcaggccaccaaguaccuggugcagcaggagucccccuucgucaugaugagcgcccccccggcgcaguacgagcucaagcacggcaccuucaccugcgccuccgaguacacgggcaacuaccagugcgggcacuacaagcacaucaccagcaaggagacccuguacugcaucgacggcgcccugcucaccaaguccagcgaguacaaggggcccaucacggacguguucuacaaggagaacagcuacaccaccaccaucaagcccgugacguacaagcuggacggcgucgugugcaccgagaucgaccccaagcuggacaacuacuacaagaaggacaacuccuacuucaccgagcagccgaucgaccucgugcccaaccagcccuaccccaacgccagcuucgacaacuucaaguucgucugcgacaacaucaaguucgccgacgaccugaaccagcugaccggguacaagaagccggcgucccgcgagcucaaggugacguucuuccccgaccugaacggcgacguggucgccaucgacuacaagcacuacacccccagcuucaagaagggcgccaagcugcuccacaagcccaucguguggcacgugaacaacgccaccaacaaggcgaccuacaagccgaacacguggugcauccggugccugugguccaccaagcccgucgagaccagcaacuccuucgacgugcugaagagcgaggacgcccaggggauggacaaccucgccugcgaggaccugaagcccguguccgaggaggucguggagaaccccaccauccagaaggacgugcuggagugcaacgucaagacgaccgagguggugggcgacaucauccucaagccggccaacaacagccugaagaucaccgaggaggucgggcacaccgaccugauggccgcguacguggacaacuccagccucacgaucaagaagcccaacgagcugucccgcgugcugggccucaagacccuggccacccacgggcuggccgccgucaacagcgugcccugggacaccaucgccaacuacgcgaagccguuccucaacaagguggucuccacgaccaccaacaucgugacccgcugccugaaccgggugugcacgaacuacaugcccuacuucuucacccugcuccugcagcugugcaccuucacccgcagcaccaacucccggaucaaggccagcaugcccacgaccaucgccaagaacaccgucaaguccgugggcaaguucugccucgaggccagcuucaacuaccugaagagccccaacuucuccaagcugaucaacaucaucaucugguuccuccugcugagcgugugccucggcucccugaucuacagcaccgccgcgcuggggguccucauguccaaccugggcaugccgagcuacugcacgggguaccgcgagggcuaccugaacuccaccaacgugaccaucgccaccuacugcacgggcagcauccccugcuccgugugccucagcgggcuggacucccuggacaccuaccccagccucgagaccauccagaucaccaucuccagcuucaagugggaccugacggccuucggccuggucgccgagugguuccucgccuacauccuguucacccgguucuucuacgugcuggggcucgcggccaucaugcagcuguucuucuccuacuucgccgugcacuucaucagcaacuccuggcugauguggcugaucaucaaccucguccagauggcccccaucagcgcgauggugcgcauguacaucuucuucgccuccuucuacuacguguggaagagcuacguccacgugguggacggcugcaacagcuccaccugcaugaugugcuacaagcggaaccgcgccacccgggucgagugcacgaccaucgugaacgggguccgccggagcuucuacguguacgccaacggcggcaagggguucugcaagcugcacaacuggaacugcgugaacugcgacaccuucugcgccggcuccaccuucaucagcgacgaggucgcgcgcgaccugucccuccaguucaagcggccgaucaaccccacggaccagagcuccuacaucguggacagcgugaccgucaagaacggguccauccaccuguacuucgacaaggccggccagaagaccuacgagcgccacagccugucccacuucgugaaccucgacaaccugcgggccaacaacaccaaggggagccugcccaucaacgugaucgucuucgacggcaaguccaagugcgaggagagcuccgccaagagcgccuccguguacuacagccagcucaugugccagcccauccugcugcucgaccaggcgcugguguccgacgucggcgacagcgccgagguggccgugaagauguucgacgccuacgucaacacguucagcuccaccuucaacgugccgauggagaagcugaagacccucguggccaccgcggaggccgagcuggccaagaacgucagccuggacaacgugcucuccacguucaucagcgccgcgcgccagggguucguggacuccgacgucgagaccaaggacgugguggagugccugaagcugagccaccaguccgacaucgaggucaccggcgacagcugcaacaacuacaugcucaccuacaacaagguggagaacaugacgccccgggaccugggggccugcaucgacugcuccgcccgccacaucaacgcccagguggccaagagccacaacaucgcgcugaucuggaacgucaaggacuucaugucccucagcgagcagcugcggaagcagauccgcuccgccgccaagaagaacaaccugcccuucaagcucaccugcgccaccacccgccagguggugaacgucgugacgaccaagaucgcccugaagggcgggugaggacuagucccuguucccagagcccacuuuuuuuucuuuuuuugaaauaaaauagccugucuuucagaucucaaaggcucuuuucagagccaccaaaaaaaaaaaaaaaaaaaaaaaaaaaaaaaaaaaaaaaaaaaaaaaaaaaaaaaaaaaaaaaaaaaaaaaaaaaaaaaaaaaaaaaaaaaaaaaaaaaaa

SEQ ID NO: 19937 - RNA, 6113 nt, Artificial Sequence
  SARS-CoV-2__MT642093.1__non-structural protein 3 (NSP3) mRNA gc
aggagagucccgcagucggcguccagcggcucugcuuguucgugugugugucguugcaggccuuauucaagcuuaccauggcccccaccaaggugaccuucggcgacgacacggucaucgaggugcagggguacaagagcgugaacaucaccuucgagcuggacgagcgcaucgacaagguccucaacgagaagugcuccgccuacaccguggagcugggcaccgaggugaacgaguucgcgugcgucguggccgacgccgugaucaagacgcugcagccggucagcgagcuccugaccccccuggggaucgaccucgacgagugguccauggccaccuacuaccuguucgacgagagcggcgaguucaagcuggccucccacauguacugcagcuucuacccccccgacgaggacgaggaggagggggacugcgaggaggaggaguucgagccguccacccaguacgaguacggcacggaggacgacuaccagggcaagccccucgaguucggggcgaccagcgccgcccugcagcccgaggaggagcaggaggaggacuggcuggacgacgacucccagcagaccgugggccagcaggacgggagcgaggacaaccagaccacgaccauccagaccaucguggagguccagccccagcucgagauggagcugaccccgguggugcagacgaucgaggucaacuccuucagcggcuaccugaagcucaccgacaacguguacaucaagaacgccgacaucguggaggaggcgaagaaggucaagcccaccgugguggucaacgccgccaacguguaccugaagcacgggggcggcguggccggggcccugaacaaggcgaccaacaacgccaugcaggucgaguccgacgacuacaucgccacgaacggcccccucaagguggggggcagcugcguccuguccggccacaaccuggccaagcacugccuccacgugguggggcccaacgucaacaagggcgaggacauccagcugcugaagagcgccuacgagaacuucaaccagcacgaggugcuccuggcgccgcugcucuccgccgggaucuucggcgccgaccccauccacagccugcgggugugcgucgacaccgugcgcaccaacguguaccuggccgucuucgacaagaaccucuacgacaagcugguguccagcuuccuggagaugaagagcgagaagcagguggagcagaagaucgccgagauccccaaggaggaggucaagcccuucaucaccgaguccaagccgagcguggagcagcggaagcaggacgacaagaagaucaaggcgugcguggaggaggucacgaccacccucgaggagaccaaguuccugacggagaaccugcuccuguacaucgacaucaacgggaaccugcaccccgacuccgccacccucgugagcgacaucgacaucaccuuccugaagaaggacgcccccuacaucgugggcgacgucgugcaggagggcgugcugaccgccgucgugauccccacgaagaaggccgggggcaccaccgagaugcucgcgaaggcccugcgcaaggugccgaccgacaacuacaucacgaccuaccccgggcagggccugaacggguacaccgucgaggaggccaagaccgugcucaagaagugcaaguccgccuucuacauccugcccagcaucaucuccaacgagaagcaggagauccugggcaccgugagcuggaaccuccgggagaugcuggcgcacgccgaggagacgcgcaagcugaugcccgucugcguggagaccaaggccaucguguccaccauccagcggaaguacaagggcaucaagauccaggagggggucguggacuacggcgcccgcuucuacuucuacaccagcaagacgaccguggccucccugaucaacacccucaacgaccugaacgagacccuggucacgaugccgcucggguacgugacccacggccugaaccuggaggaggcggcccgguacaugcgcagccucaaggugcccgccaccgucuccgugagcucccccgacgccgugaccgccuacaacggguaccugacgagcuccagcaagacccccgaggagcacuucaucgagaccaucucccuggcgggcagcuacaaggacugguucuacagcggccaguccacccagcucgggaucgaguuccugaagcggggcgacaagagcgucuacuacacguccaacccgaccaccuuccaccuggacggggaggugaucaccuucgacaaccucaagacgcugcugagccuccgcgaggugcggaccaucaaggucuucaccaccguggacaacaucaaccugcacacgcagguggucgacauguccaugaccuacggccagcaguucggccccaccuaccuggacggggccgacgugaccaagaucaagccccacaacagccacgagggcaagacguucuacgugcucccgaacgacgacacccugcgcgucgaggccuucgaguacuaccacaccaccgaccccuccuuccuggggcgguacaugagcgcccucaaccacacgaagaaguggaaguacccccaggugaacggccugaccuccaucaagugggccgacaacaacugcuaccuggcgaccgcccuccugacccugcagcagaucgagcucaaguucaaccccccggcccugcaggacgccuacuaccgcgcgcgggccggggaggccgccaacuucugcgcccugauccucgcguacugcaacaagacggugggcgagcugggcgacguccgcgagaccaugagcuaccuguuccagcacgccaaccucgacuccugcaagcgggugcugaacgucgugugcaagaccugcgggcagcagcagaccacccugaagggcguggaggccgucauguacauggggacgcucagcuacgagcaguucaagaagggcgugcagauccccugcaccugcgggaagcaggccaccaaguaccuggugcagcaggagucccccuucgucaugaugagcgcccccccggcgcaguacgagcugaagcacggcaccuucacgugcgccuccgaguacaccggcaacuaccagugcgggcacuacaagcacaucaccagcaaggagacccucuacugcaucgacggcgcccugcugacgaaguccagcgaguacaaggggcccaucaccgacguguucuacaaggagaacagcuacaccaccacgaucaagcccgugaccuacaagcucgacggcgucgugugcaccgagaucgaccccaagcuggacaacuacuacaagaaggacaacuccuacuucaccgagcagccgaucgaccuggugcccaaccagcccuaccccaacgccagcuucgacaacuucaaguucgucugcgacaacaucaaguucgccgacgaccucaaccagcugacgggguacaagaagccggcgucccgcgagcugaaggugaccuucuuccccgaccucaacggcgacguggucgccaucgacuacaagcacuacacccccagcuucaagaagggcgccaagcugcugcacaagcccaucguguggcacgugaacaacgccaccaacaaggcgacguacaagccgaacaccuggugcauccggugccucugguccaccaagcccgucgagaccagcaacuccuucgacgugcugaagagcgaggacgcccaggggauggacaaccuggccugcgaggaccucaagcccguguccgaggaggucguggagaaccccacgauccagaaggacgugcuggagugcaacgucaagaccaccgagguggugggcgacaucauccugaagccggccaacaacagccucaagaucaccgaggaggucgggcacacggaccugauggccgcguacguggacaacuccagccugaccaucaagaagcccaacgagcucucccgcgugcugggccugaagacccucgccacccacgggcuggccgccgucaacagcgugcccugggacacgaucgccaacuacgcgaagccguuccugaacaagguggucuccaccaccaccaacaucgugacgcgcugccucaaccgggugugcaccaacuacaugcccuacuucuucacccugcugcuccagcugugcaccuucacccgcagcacgaacucccggaucaaggccagcaugcccaccaccaucgccaagaacaccgucaaguccgugggcaaguucugccuggaggccagcuucaacuaccucaagagccccaacuucuccaagcugaucaacaucaucaucugguuccugcuccugagcgugugccugggcucccucaucuacagcacggccgcgcuggggguccugauguccaaccucggcaugccgagcuacugcaccggguaccgcgagggcuaccugaacuccaccaacgugaccaucgccacguacugcaccggcagcauccccugcuccgugugccugagcgggcucgacucccuggacaccuaccccagccuggagaccauccagaucacgaucuccagcuucaagugggaccucaccgccuucggccuggucgccgagugguuccuggccuacauccucuucacccgguucuucuacgugcuggggcuggcggccaucaugcagcucuucuucuccuacuucgccgugcacuucaucagcaacuccuggcugauguggcugaucaucaaccugguccagauggcccccaucagcgcgauggugcgcauguacaucuucuucgccuccuucuacuacguguggaagagcuacguccacgugguggacggcugcaacagcuccaccugcaugaugugcuacaagcggaaccgcgccacgcgggucgagugcaccaccaucgugaacgggguccgccggagcuucuacguguacgccaacggcggcaagggguucugcaagcuccacaacuggaacugcgugaacugcgacaccuucugcgccggcuccacguucaucagcgacgaggucgcgcgcgaccugucccugcaguucaagcggccgaucaaccccaccgaccagagcuccuacaucguggacagcgugaccgucaagaacggguccauccaccucuacuucgacaaggccggccagaagaccuacgagcgccacagccugucccacuucgugaaccuggacaaccuccgggccaacaacacgaaggggagccugcccaucaacgugaucgucuucgacggcaaguccaagugcgaggagagcuccgccaagagcgccuccguguacuacagccagcugaugugccagcccauccuccugcuggaccaggcgcucguguccgacgucggcgacagcgccgagguggccgugaagauguucgacgccuacgucaacaccuucagcuccaccuucaacgugccgauggagaagcugaagacccugguggccacggcggaggccgagcucgccaagaacgucagccuggacaacgugcuguccaccuucaucagcgccgcgcgccagggguucguggacuccgacgucgagaccaaggacgugguggagugccucaagcugagccaccaguccgacaucgaggucaccggcgacagcugcaacaacuacaugcugacguacaacaagguggagaacaugaccccccgggaccucggggccugcaucgacugcuccgcccgccacaucaacgcccagguggccaagagccacaacaucgcgcugaucuggaacgucaaggacuucaugucccugagcgagcagcuccggaagcagauccgcuccgccgccaagaagaacaaccugcccuucaagcugaccugcgccaccacgcgccagguggugaacgucgugaccaccaagaucgcccucaagggcgggugaggacuagucccuguucccagagcccacuuuuuuuucuuuuuuugaaauaaaauagccugucuuucagaucucaaaggcucuuuucagagccaccaaaaaaaaaaaaaaaaaaaaaaaaaaaaaaaaaaaaaaaaaaaaaaaaaaaaaaaaaaaaaaaaaaaaaaaaaaaaaaaaaaaaaaaaaaaaaaaaaaaaa

SEQ ID NO: 19938 - RNA, 6113 nt, Artificial Sequence
  SARS-CoV-2__MT642111.1__non-structural protein 3 (NSP3) mRNA gc
aggagagucccgcagucggcguccagcggcucugcuuguucgugugugugucguugcaggccuuauucaagcuuaccauggcccccaccaaggugaccuucggcgacgacacggucaucgaggugcagggguacaagagcgugaacaucaccuucgagcuggacgagcgcaucgacaagguccucaacgagaagugcuccgccuacaccguggagcugggcaccgaggugaacgaguucgcgugcgucguggccgacgccgugaucaagacgcugcagccggucagcgagcuccugaccccccuggggaucgaccucgacgagugguccauggccaccuacuaccuguucgacgagagcggcgaguucaagcuggccucccacauguacugcagcuucuacccccccgacgaggacgaggaggagggggacugcgaggaggaggaguucgagccguccacccaguacgaguacggcacggaggacgacuaccagggcaagccccucgaguucggggcgaccagcgccgcccugcagcccgaggaggagcaggaggaggacuggcuggacgacgacucccagcagaccgugggccagcaggacgggagcgaggacaaccagaccacgaccauccagaccaucguggagguccagccccagcucgagauggagcugaccccgguggugcagacgaucgaggucaacuccuucagcggcuaccugaagcucaccgacaacguguacaucaagaacgccgacaucguggaggaggcgaagaaggucaagcccaccgugguggucaacgccgccaacguguaccugaagcacgggggcggcguggccggggcccugaacaaggcgaccaacaacgccaugcaggucgaguccgacgacuacaucgccacgaacggcccccucaagguggggggcagcugcguccuguccggccacaaccuggccaagcacugccuccacgugguggggcccaacgucaacaagggcgaggacauccagcugcugaagagcgccuacgagaacuucaaccagcacgaggugcuccuggcgccgcugcucuccgccgggaucuucggcgccgaccccauccacagccugcgggugugcgucgacaccgugcgcaccaacguguaccuggccgucuucgacaagaaccucuacgacaagcugguguccagcuuccuggagaugaagagcgagaagcagguggagcagaagaucgccgagauccccaaggaggaggucaagcccuucaucaccgaguccaagccgagcguggagcagcggaagcaggacgacaagaagaucaaggcgugcguggaggaggucacgaccacccucgaggagaccaaguuccugacggagaaccugcuccuguacaucgacaucaacgggaaccugcaccccgacuccgccacccucgugagcgacaucgacaucaccuuccugaagaaggacgcccccuacaucgugggcgacgucgugcaggagggcgugcugaccgccgucgugauccccacgaagaaggccgggggcaccaccgagaugcucgcgaaggcccugcgcaaggugccgaccgacaacuacaucacgaccuaccccgggcagggccugaacggguacaccgucgaggaggccaagaccgugcucaagaagugcaaguccgccuucuacauccugcccagcaucaucuccaacgagaagcaggagauccugggcaccgugagcuggaaccuccgggagaugcuggcgcacgccgaggagacgcgcaagcugaugcccgucugcguggagaccaaggccaucguguccaccauccagcggaaguacaagggcaucaagauccaggagggggucguggacuacggcgcccgcuucuacuucuacaccagcaagacgaccguggccucccugaucaacacccucaacgaccugaacgagacccuggucacgaugccgcucggguacgugacccacggccugaaccuggaggaggcggcccgguacaugcgcagccucaaggugcccgccaccgucuccgugagcucccccgacgccgugaccgccuacaacggguaccugacgagcuccagcaagacccccgaggagcacuucaucgagaccaucucccuggcgggcagcuacaaggacuggagcuacuccggccagagcacccagcucgggaucgaguuccugaagcggggcgacaaguccgucuacuacacgagcaacuccaccaccuuccaccuggacggggaggugaucaccuucgacaaccucaagacgcugcugagccuccgcgaggugcggaccaucaaggucuucaccaccguggacaacaucaaccugcacacgcagguggucgacauguccaugaccuacggccagcaguucggcccgaccuaccuggacggggccgacgugaccaagaucaagccccacaacagccacgagggcaagacguucuacgugcuccccaacgacgacacccugcgcgucgaggccuucgaguacuaccacaccaccgacccguccuuccuggggcgguacaugagcgcccucaaccacacgaagaaguggaaguacccccaggugaacggccugaccuccaucaagugggccgacaacaacugcuaccuggcgaccgcccuccugacccugcagcagaucgagcucaaguucaacccccccgcccugcaggacgccuacuaccgcgcgcgggccggggaggccgccaacuucugcgcccugauccucgcguacugcaacaagacggugggcgagcugggcgacguccgcgagaccaugagcuaccuguuccagcacgccaaccucgacuccugcaagcgggugcugaacgucgugugcaagaccugcgggcagcagcagaccacccugaagggcguggaggccgucauguacauggggacgcucagcuacgagcaguucaagaagggcgugcagaucccgugcaccugcgggaagcaggccaccaaguaccuggugcagcaggagucccccuucgucaugaugagcgccccccccgcgcaguacgagcugaagcacggcaccuucacgugcgccuccgaguacaccggcaacuaccagugcgggcacuacaagcacaucaccagcaaggagacccucuacugcaucgacggcgcccugcugacgaagagcuccgaguacaaggggccgaucaccgacguguucuacaaggagaacagcuacaccaccacgaucaagcccgugaccuacaagcucgacggcgucgugugcaccgagaucgaccccaagcuggacaacuacuacaagaaggacaacuccuacuucaccgagcagcccaucgaccuggugccgaaccagcccuaccccaacgccagcuucgacaacuucaaguucgucugcgacaacaucaaguucgccgacgaccucaaccagcugacgggguacaagaagcccgcgucccgcgagcugaaggugaccuucuucccggaccucaacggcgacguggucgccaucgacuacaagcacuacacccccagcuucaagaagggcgccaagcugcugcacaagcccaucguguggcacgugaacaacgccaccaacaaggcgacguacaagcccaacaccuggugcauccggugccucugguccaccaagccggucgagaccagcaacuccuucgacgugcugaagagcgaggacgcccaggggauggacaaccuggccugcgaggaccucaagcccguguccgaggaggucguggagaaccccacgauccagaaggacgugcuggagugcaacgucaagaccaccgagguggugggcgacaucauccugaagcccgccaacaacagccucaagaucaccgaggaggucgggcacacggaccugauggccgcguacguggacaacuccagccugaccaucaagaagccgaacgagcucucccgcgugcugggccugaagacccucgccacccacgggcuggccgccgucaacagcgugcccugggacacgaucgccaacuacgcgaagcccuuccugaacaagguggucuccaccaccaccaacaucgugacgcgcugccucaaccgggugugcaccaacuacaugccguacuucuucacccugcugcuccagcugugcaccuucacccgcagcacgaacucccggaucaaggccagcaugcccaccaccaucgccaagaacaccgucaagagcgugggcaaguucugccuggaggccuccuucaacuaccucaagagccccaacuucuccaagcugaucaacaucaucaucugguuccugcuccugagcgugugccugggcucccucaucuacagcacggccgcgcuggggguccugauguccaaccucggcaugcccagcuacugcaccggguaccgcgagggcuaccugaacuccaccaacgugaccaucgccacguacugcaccggcagcaucccgugcuccgugugccugagcgggcucgacucccuggacaccuaccccagccuggagaccauccagaucacgaucuccagcuucaagugggaccucaccgccuucggccuggucgccgagugguuccuggccuacauccucuucacccgguucuucuacgugcuggggcuggcggccaucaugcagcucuucuucuccuacuucgccgugcacuucaucagcaacuccuggcugauguggcugaucaucaaccugguccagauggcccccaucagcgcgauggugcgcauguacaucuucuucgccagcuucuacuacguguggaaguccuacguccacgugguggacggcugcaacagcuccaccugcaugaugugcuacaagcggaaccgcgccacgcgggucgagugcaccaccaucgugaacgggguccgccggagcuucuacguguacgccaacggcggcaagggguucugcaagcuccacaacuggaacugcgugaacugcgacaccuucugcgccggcuccacguucaucagcgacgaggucgcgcgcgaccugucccugcaguucaagcggcccaucaacccgaccgaccagagcuccuacaucguggacagcgugaccgucaagaacggguccauccaccucuacuucgacaaggccggccagaagaccuacgagcgccacagccugucccacuucgugaaccuggacaaccuccgggccaacaacacgaaggggagccugcccaucaacgugaucgucuucgacggcaaguccaagugcgaggagagcuccgccaagagcgccuccguguacuacagccagcugaugugccagcccauccuccugcuggaccaggcgcucgugagcgacgucggcgacuccgccgagguggccgugaagauguucgacgccuacgucaacaccuucagcuccaccuucaacgugcccauggagaagcugaagacccugguggccacggcggaggccgagcucgccaagaacgucagccuggacaacgugcuguccaccuucaucagcgccgcgcgccagggguucguggacuccgacgucgagaccaaggacgugguggagugccucaagcugagccaccaguccgacaucgaggucaccggcgacagcugcaacaacuacaugcugacguacaacaagguggagaacaugaccccgcgggaccucggggccugcaucgacugcuccgcccgccacaucaacgcccagguggccaagagccacaacaucgcgcugaucuggaacgucaaggacuucaugucccugagcgagcagcuccggaagcagauccgcuccgccgccaagaagaacaaccugcccuucaagcugaccugcgccaccacgcgccagguggugaacgucgugaccaccaagaucgcccucaagggcgggugaggacuagucccuguucccagagcccacuuuuuuuucuuuuuuugaaauaaaauagccugucuuucagaucucaaaggcucuuuucagagccaccaaaaaaaaaaaaaaaaaaaaaaaaaaaaaaaaaaaaaaaaaaaaaaaaaaaaaaaaaaaaaaaaaaaaaaaaaaaaaaaaaaaaaaaaaaaaaaaaaaaaa

SEQ ID NO: 19939 - RNA, 6113 nt, Artificial Sequence
  SARS-CoV-2__MT642138.1__non-structural protein 3 (NSP3) mRNA gc
aggagagucccgcagucggcguccagcggcucugcuuguucgugugugugucguugcaggccuuauucaagcuuaccauggcccccaccaaggugaccuucggcgacgacacggucaucgaggugcagggguacaagagcgugaacaucaccuucgagcuggacgagcgcaucgacaagguccucaacgagaagugcuccgccuacaccguggagcugggcaccgaggugaacgaguucgcgugcgucguggccgacgccgugaucaagacgcugcagccggucagcgagcuccugaccccccuggggaucgaccucgacgagugguccauggccaccuacuaccuguucgacgagagcggcgaguucaagcuggccucccacauguacugcagcuucuacccccccgacgaggacgaggaggagggggacugcgaggaggaggaguucgagccguccacccaguacgaguacggcacggaggacgacuaccagggcaagccccucgaguucggggcgaccagcgccgcccugcagcccgaggaggagcaggaggaggacuggcuggacgacgacucccagcagaccgugggccagcaggacgggagcgaggacaaccagaccacgaccauccagaccaucguggagguccagccccagcucgagauggagcugaccccgguggugcagacgaucgaggucaacuccuucagcggcuaccugaagcucaccgacaacguguacaucaagaacgccgacaucguggaggaggcgaagaaggucaagcccaccgugguggucaacgccgccaacguguaccugaagcacgggggcggcguggccggggcccugaacaaggcgaccaacaacgccaugcaggucgaguccgacgacuacaucgccacgaacggcccccucaagguggggggcagcugcguccuguccggccacaaccuggccaagcacugccuccacgugguggggcccaacgucaacaagggcgaggacauccagcugcugaagagcgccuacgagaacuucaaccagcacgaggugcuccuggcgccgcugcucuccgccgggaucuucggcgccgaccccauccacagccugcgggugugcgucgacaccgugcgcaccaacguguaccuggccgucuucgacaagaaccucuacgacaagcugguguccagcuuccuggagaugaagagcgagaagcagguggagcagaagaucgccgagauccccaaggaggaggucaagcccuucaucaccgaguccaagccgagcguggagcagcggaagcaggacgacaagaagaucaaggcgugcguggaggaggucacgaccacccucgaggagaccaaguuccugacggagaaccugcuccuguacaucgacaucaacgggaaccugcaccccgacuccgccacccucgugagcgacaucgacaucaccuuccugaagaaggacgcccccuacaucgugggcgacgucgugcaggagggcgugcugaccgccgucgugauccccacgaagaaggccgggggcaccaccgagaugcucgcgaaggcccugcgcaaggugccgaccgacaacuacaucacgaccuaccccgggcagggccugaacggguacaccgucgaggaggccaagaccgugcucaagaagugcaaguccgccuucuacauccugcccagcaucaucuccaacgagaagcaggagauccugggcaccgugagcuggaaccuccgggagaugcuggcgcacgccgaggagacgcgcaagcugaugcccgucugcguggagaccaaggccaucguguccaccauccagcggaaguacaagggcaucaagauccaggagggggucguggacuacggcgcccgcuucuacuucuacaccagcaagacgaccguggccucccugaucaacacccucaacgaccugaacgagacccuggucacgaugccgcucggguacgugacccacggccugaaccuggaggaggcggcccgguacaugcgcagccucaaggugcccgccaccgucuccgugagcucccccgacgccgugaccgccuacaacggguaccugacgagcuccagcaagacccccgaggagcgguucaucgagaccaucucccuggcgggcagcuacaaggacuggagcuacuccggccagagcacccagcucgggaucgaguuccugaagcgcggcgacaaguccgucuacuacacgagcaacccgaccaccuuccaccuggacggggaggugaucaccuucgacaaccucaagacgcugcugucccuccgggaggugcgcaccaucaaggucuucaccaccguggacaacaucaaccugcacacgcagguggucgacaugagcaugaccuacggccagcaguucggccccaccuaccuggacggggccgacgugaccaagaucaagccccacaacucccacgagggcaagacguucuacgugcucccgaacgacgacacccugcgggucgaggccuucgaguacuaccacaccaccgaccccagcuuccuggggcgcuacauguccgcccucaaccacacgaagaaguggaaguacccccaggugaacggccugaccagcaucaagugggccgacaacaacugcuaccuggcgaccgcccuccugacccugcagcagaucgagcucaaguucaaccccccggcccugcaggacgccuacuaccgggcgcgcgccggggaggccgccaacuucugcgcccugauccucgcguacugcaacaagacggugggcgagcugggcgacguccgggagaccauguccuaccuguuccagcacgccaaccucgacagcugcaagcgcgugcugaacgucgugugcaagaccugcgggcagcagcagaccacccugaagggcguggaggccgucauguacauggggacgcucuccuacgagcaguucaagaagggcgugcagauccccugcaccugcgggaagcaggccaccaaguaccuggugcagcaggagagccccuucgucaugauguccgcccccccggcgcaguacgagcugaagcacggcaccuucacgugcgccagcgaguacaccggcaacuaccagugcgggcacuacaagcacaucaccuccaaggagacccucuacugcaucgacggcgcccugcugacgaagagcagcgaguacaaggggcccaucaccgacguguucuacaaggagaacuccuacaccaccacgaucaagcccgugaccuacaagcucgacggcgucgugugcaccgagaucgaccccaagcuggacaacuacuacaagaaggacaacagcuacuucaccgagcagccgaucgaccuggugcccaaccagcccuaccccaacgccuccuucgacaacuucaaguucgucugcgacaacaucaaguucgccgacgaccucaaccagcugacgggguacaagaagccggcgagccgggagcugaaggugaccuucuuccccgaccucaacggcgacguggucgccaucgacuacaagcacuacacccccuccuucaagaagggcgccaagcugcugcacaagcccaucguguggcacgugaacaacgccaccaacaaggcgacguacaagccgaacaccuggugcauccgcugccucuggagcaccaagcccgucgagaccuccaacagcuucgacgugcugaaguccgaggacgcccaggggauggacaaccuggccugcgaggaccucaagcccgugagcgaggaggucguggagaaccccacgauccagaaggacgugcuggagugcaacgucaagaccaccgagguggugggcgacaucauccugaagccggccaacaacucccucaagaucaccgaggaggucgggcacacggaccugauggccgcguacguggacaacagcucccugaccaucaagaagcccaacgagcucagccgcgugcugggccugaagacccucgccacccacgggcuggccgccgucaacuccgugcccugggacacgaucgccaacuacgcgaagccguuccugaacaagguggucagcaccaccaccaacaucgugacgcggugccucaaccgcgugugcaccaacuacaugcccuacuucuucacccugcugcuccagcugugcaccuucacccgguccacgaacagccgcaucaaggccuccaugcccaccaccaucgccaagaacaccgucaagagcgugggcaaguucugccuggaggccagcuucaacuaccucaagucccccaacuucagcaagcugaucaacaucaucaucugguuccugcuccuguccgugugccugggcagccucaucuacuccacggccgcgcuggggguccugaugagcaaccucggcaugccguccuacugcaccggguaccgggagggcuaccugaacagcaccaacgugaccaucgccacguacugcaccggcuccauccccugcagcgugugccuguccgggcucgacagccuggacaccuaccccucccuggagaccauccagaucacgaucagcuccuucaagugggaccucaccgccuucggccuggucgccgagugguuccuggccuacauccucuucacccgcuucuucuacgugcuggggcuggcggccaucaugcagcucuucuucagcuacuucgccgugcacuucaucuccaacagcuggcugauguggcugaucaucaaccugguccagauggcccccaucuccgcgauggugcggauguacaucuucuucgccagcuucuacuacguguggaagagcuacguccacgugguggacggcugcaacuccagcaccugcaugaugugcuacaagcgcaaccgggccacgcgcgucgagugcaccaccaucgugaacgggguccggcgcuccuucuacguguacgccaacggcggcaagggguucugcaagcuccacaacuggaacugcgugaacugcgacaccuucugcgccggcagcacguucaucuccgacgaggucgcgcgggaccugagccugcaguucaagcgcccgaucaaccccaccgaccaguccagcuacaucguggacuccgugaccgucaagaacgggagcauccaccucuacuucgacaaggccggccagaagaccuacgagcggcacucccugagccacuucgugaaccuggacaaccuccgcgccaacaacacgaaggggucccugcccaucaacgugaucgucuucgacggcaagagcaagugcgaggaguccagcgccaaguccgccagcguguacuacucccagcugaugugccagcccauccuccugcuggaccaggcgcucgugagcgacgucggcgacagcgccgagguggccgugaagauguucgacgccuacgucaacaccuucuccagcaccuucaacgugccgauggagaagcugaagacccugguggccacggcggaggccgagcucgccaagaacgucucccuggacaacgugcugagcaccuucaucuccgccgcgcggcagggguucguggacagcgacgucgagaccaaggacgugguggagugccucaagcugucccaccagagcgacaucgaggucaccggcgacuccugcaacaacuacaugcugacguacaacaagguggagaacaugaccccccgcgaccucggggccugcaucgacugcagcgcccggcacaucaacgcccagguggccaagucccacaacaucgcgcugaucuggaacgucaaggacuucaugagccuguccgagcagcuccgcaagcagauccgcagcgccgccaagaagaacaaccugcccuucaagcugaccugcgccaccacgcggcagguggugaacgucgugaccaccaagaucgcccucaagggcgggugaggacuagucccuguucccagagcccacuuuuuuuucuuuuuuugaaauaaaauagccugucuuucagaucucaaaggcucuuuucagagccaccaaaaaaaaaaaaaaaaaaaaaaaaaaaaaaaaaaaaaaaaaaaaaaaaaaaaaaaaaaaaaaaaaaaaaaaaaaaaaaaaaaaaaaaaaaaaaaaaaaaaa

SEQ ID NO: 19940 - RNA, 6113 nt, Artificial Sequence
  SARS-CoV-2__MT642144.1__non-structural protein 3 (NSP3) mRNA gc
aggagagucccgcagucggcguccagcggcucugcuuguucgugugugugucguugcaggccuuauucaagcuuaccauggcccccaccaaggugaccuucggcgacgacacggucaucgaggugcagggguacaagagcgugaacaucaccuucgagcuggacgagcgcaucgacaagguccucaacgagaagugcuccgccuacaccguggagcugggcaccgaggugaacgaguucgcgugcgucguggccgacgccgugaucaagacgcugcagccggucagcgagcuccugaccccccuggggaucgaccucgacgagugguccauggccaccuacuaccuguucgacgagagcggcgaguucaagcuggccucccacauguacugcagcuucuacccccccgacgaggacgaggaggagggggacugcgaggaggaggaguucgagccguccacccaguacgaguacggcacggaggacgacuaccagggcaagccccucgaguucggggcgaccagcgccgcccugcagcccgaggaggagcaggaggaggacuggcuggacgacgacucccagcagaccgugggccagcaggacgggagcgaggacaaccagaccacgaccauccagaccaucguggagguccagccccagcucgagaccgagcugacgccgguggugcagaccaucgaggucaacuccuucagcggcuaccugaagcucaccgacaacguguacaucaagaacgccgacaucguggaggaggcgaagaaggucaagcccaccgugguggucaacgccgccaacguguaccugaagcacgggggcggcguggccggggcccugaacaaggcgacgaacaacgccaugcaggucgaguccgacgacuacaucgccaccaacggcccccucaagguggggggcagcugcguccuguccggccacaaccuggccaagcacugccuccacgugguggggcccaacgucaacaagggcgaggacauccagcugcugaagagcgccuacgagaacuucaaccagcacgaggugcuccuggcgccgcugcucuccgccgggaucuucggcgccgaccccauccacagccugcgggugugcgucgacaccgugcgcaccaacguguaccuggccgucuucgacaagaaccucuacgacaagcugguguccagcuuccuggagaugaagagcgagaagcagguggagcagaagaucgccgagauccccaaggaggaggucaagcccuucaucacggaguccaagccgagcguggagcagcggaagcaggacgacaagaagaucaaggcgugcguggaggaggucaccaccacccucgaggagacgaaguuccugaccgagaaccugcuccuguacaucgacaucaacgggaaccugcaccccgacuccgccacccucgugagcgacaucgacaucaccuuccugaagaaggacgcccccuacaucgugggcgacgucgugcaggagggcgugcugacggccgucgugauccccaccaagaaggccgggggcaccaccgagaugcucgcgaaggcccugcgcaaggugccgacggacaacuacaucaccaccuaccccgggcagggccugaacggguacaccgucgaggaggccaagaccgugcucaagaagugcaaguccgccuucuacauccugcccagcaucaucuccaacgagaagcaggagauccugggcacggugagcuggaaccuccgggagaugcuggcgcacgccgaggagacccgcaagcugaugcccgucugcguggagaccaaggccaucguguccaccauccagcggaaguacaagggcaucaagauccaggagggggucguggacuacggcgcccgcuucuacuucuacacgagcaagaccaccguggccucccugaucaacacccucaacgaccugaacgagacgcuggucaccaugccgcucggguacgugacccacggccugaaccuggaggaggcggcccgguacaugcgcagccucaaggugcccgccaccgucuccgugagcucccccgacgccgugacggccuacaacggguaccugaccagcuccagcaagacccccgaggagcgguucaucgagaccaucucccuggcgggcagcuacaaggacuggagcuacuccggccagagcacgcagcucgggaucgaguuccugaagcgcggcgacaaguccgucuacuacaccagcaacccgaccaccuuccaccuggacggggaggugaucacguucgacaaccucaagacccugcugucccuccgggaggugcgcaccaucaaggucuucaccacgguggacaacaucaaccugcacacccagguggucgacaugagcaugaccuacggccagcaguucggccccaccuaccuggacggggccgacgugacgaagaucaagccccacaacucccacgagggcaagaccuucuacgugcucccgaacgacgacacccugcgggucgaggccuucgaguacuaccacaccacggaccccagcuuccuggggcgcuacauguccgcccucaaccacaccaagaaguggaaguacccccaggugaacggccugaccagcaucaagugggccgacaacaacugcuaccuggcgaccgcccuccugacgcugcagcagaucgagcucaaguucaaccccccggcccugcaggacgccuacuaccgggcgcgcgccggggaggccgccaacuucugcgcccugauccucgcguacugcaacaagaccgugggcgagcugggcgacguccgggagaccauguccuaccuguuccagcacgccaaccucgacagcugcaagcgcgugcugaacgucgugugcaagaccugcgggcagcagcagaccacgcugaagggcguggaggccgucauguacauggggacccucuccuacgagcaguucaagaagggcgugcagauccccugcaccugcgggaagcaggccaccaaguaccuggugcagcaggagagccccuucgucaugauguccgcccccccggcgcaguacgagcugaagcacggcacguucaccugcgccagcgaguacaccggcaacuaccagugcgggcacuacaagcacaucaccuccaaggagacgcucuacugcaucgacggcgcccugcugaccaagagcagcgaguacaaggggcccaucaccgacguguucuacaaggagaacuccuacaccacgaccaucaagcccgugaccuacaagcucgacggcgucgugugcaccgagaucgaccccaagcuggacaacuacuacaagaaggacaacagcuacuucacggagcagccgaucgaccuggugcccaaccagcccuaccccaacgccuccuucgacaacuucaaguucgucugcgacaacaucaaguucgccgacgaccucaaccagcugaccggguacaagaagccggcgagccgggagcugaaggugaccuucuuccccgaccucaacggcgacguggucgccaucgacuacaagcacuacacccccuccuucaagaagggcgccaagcugcugcacaagcccaucguguggcacgugaacaacgccacgaacaaggcgaccuacaagccgaacaccuggugcauccgcugccucuggagcaccaagcccgucgagacguccaacagcuucgacgugcugaaguccgaggacgcccaggggauggacaaccuggccugcgaggaccucaagcccgugagcgaggaggucguggagaaccccaccauccagaaggacgugcuggagugcaacgucaagaccaccgagguggugggcgacaucauccugaagccggccaacaacucccucaagaucacggaggaggucgggcacaccgaccugauggccgcguacguggacaacagcucccugaccaucaagaagcccaacgagcucagccgcgugcugggccugaagacccucgccacgcacgggcuggccgccgucaacuccgugcccugggacaccaucgccaacuacgcgaagccguuccugaacaagguggucagcaccaccacgaacaucgugacccggugccucaaccgcgugugcaccaacuacaugcccuacuucuucacccugcugcuccagcugugcaccuucacgcgguccaccaacagccgcaucaaggccuccaugcccaccaccaucgccaagaacacggucaagagcgugggcaaguucugccuggaggccagcuucaacuaccucaagucccccaacuucagcaagcugaucaacaucaucaucugguuccugcuccuguccgugugccugggcagccucaucuacuccaccgccgcgcuggggguccugaugagcaaccucggcaugccguccuacugcaccggguaccgggagggcuaccugaacagcaccaacgugacgaucgccaccuacugcaccggcuccauccccugcagcgugugccuguccgggcucgacagccuggacaccuaccccucccuggagacgauccagaucaccaucagcuccuucaagugggaccucaccgccuucggccuggucgccgagugguuccuggccuacauccucuucacccgcuucuucuacgugcuggggcuggcggccaucaugcagcucuucuucagcuacuucgccgugcacuucaucuccaacagcuggcugauguggcugaucaucaaccugguccagauggcccccaucuccgcgauggugcggauguacaucuucuucgccagcuucuacuacguguggaagagcuacguccacgugguggacggcugcaacuccagcacgugcaugaugugcuacaagcgcaaccgggccacccgcgucgagugcaccaccaucgugaacgggguccggcgcuccuucuacguguacgccaacggcggcaagggguucugcaagcuccacaacuggaacugcgugaacugcgacacguucugcgccggcagcaccuucaucuccgacgaggucgcgcgggaccugagccugcaguucaagcgcccgaucaaccccaccgaccaguccagcuacaucguggacuccgugaccgucaagaacgggagcauccaccucuacuucgacaaggccggccagaagacguacgagcggcacucccugagccacuucgugaaccuggacaaccuccgcgccaacaacaccaaggggucccugcccaucaacgugaucgucuucgacggcaagagcaagugcgaggaguccagcgccaaguccgccagcguguacuacucccagcugaugugccagcccauccuccugcuggaccaggcgcucgugagcgacgucggcgacagcgccgagguggccgugaagauguucgacgccuacgucaacaccuucuccagcaccuucaacgugccgauggagaagcugaagacgcugguggccaccgcggaggccgagcucgccaagaacgucucccuggacaacgugcugagcaccuucaucuccgccgcgcggcagggguucguggacagcgacgucgagaccaaggacgugguggagugccucaagcugucccaccagagcgacaucgaggucacgggcgacuccugcaacaacuacaugcugaccuacaacaagguggagaacaugaccccccgcgaccucggggccugcaucgacugcagcgcccggcacaucaacgcccagguggccaagucccacaacaucgcgcugaucuggaacgucaaggacuucaugagccuguccgagcagcuccgcaagcagauccgcagcgccgccaagaagaacaaccugcccuucaagcugaccugcgccacgacccggcagguggugaacgucgugaccaccaagaucgcccucaagggcgggugaggacuagucccuguucccagagcccacuuuuuuuucuuuuuuugaaauaaaauagccugucuuucagaucucaaaggcucuuuucagagccaccaaaaaaaaaaaaaaaaaaaaaaaaaaaaaaaaaaaaaaaaaaaaaaaaaaaaaaaaaaaaaaaaaaaaaaaaaaaaaaaaaaaaaaaaaaaaaaaaaaaaa

SEQ ID NO: 19941 - RNA, 6113 nt, Artificial Sequence
  SARS-CoV-2__MT642158.1__non-structural protein 3 (NSP3) mRNA gc
aggagagucccgcagucggcguccagcggcucugcuuguucgugugugugucguugcaggccuuauucaagcuuaccauggcccccaccaaggugaccuucggcgacgacacggucaucgaggugcagggguacaagagcgugaacaucaccuucgagcuggacgagcgcaucgacaagguccucaacgagaagugcuccgccuacaccguggagcugggcaccgaggugaacgaguucgcgugcgucguggccgacgccgugaucaagacgcugcagccggucagcgagcuccugaccccccuggggaucgaccucgacgagugguccauggccaccuacuaccuguucgacgagagcggcgaguucaagcuggccucccacauguacugcagcuucuacccccccgacgaggacgaggaggagggggacugcgaggaggaggaguucgagccguccacccaguacgaguacggcacggaggacgacuaccagggcaagccccucgaguucggggcgaccagcgccgcccugcagcccgaggaggagcaggaggaggacuggcuggacgacgacucccagcagaccgugggccagcaggacgggagcgaggacaaccagaccacgaccauccagaccaucguggagguccagccccagcucgagauggagcugaccccgguggugcagacgaucgaggucaacuccuucagcggcuaccugaagcucaccgacaacguguacaucaagaacgccgacaucguggaggaggcgaagaaggucaagcccaccgugguggucaacgccgccaacguguaccugaagcacgggggcggcguggccggggcccugaacaaggcgaccaacaacgccaugcaggucgaguccgacgacuacaucgccacgaacggcccccucaagguggggggcagcugcguccuguccggccacaaccuggccaagcacugccuccacgugguggggcccaacgucaacaagggcgaggacauccagcugcugaagagcgccuacgagaacuucaaccagcacgaggugcuccuggcgccgcugcucuccgccgggaucuucggcgccgaccccauccacagccugcgggugugcgucgacaccgugcgcaccaacguguaccuggccgucuucgacaagaaccucuacgacaagcugguguccagcuuccuggagaugaagagcgagaagcagguggagcagaagaucgccgagauccccaaggaggaggucaagcccuucaucaccgaguccaagccgagcguggagcagcggaagcaggacgacaagaagaucaaggcgugcguggaggaggucacgaccacccucgaggagaccaaguuccugacggagaaccugcuccuguacaucgacaucaacgggaaccugcaccccgacuccgccacccucgugagcgacaucgacaucaccuuccugaagaaggacgcccccuacaucgugggcgacgucgugcaggagggcgugcugaccgccgucgugauccccacgaagaaggccgggggcaccaccgagaugcucgcgaaggcccugcgcaaggugccgaccgacaacuacaucacgaccuaccccgggcagggccugaacggguacaccgucgaggaggccaagaccgugcucaagaagugcaaguccgccuucuacauccugcccagcaucaucuccaacgagaagcaggagauccugggcaccgugagcuggaaccuccgggagaugcuggcgcacgccgaggagacgcgcaagcugaugcccgucugcguggagaccaaggccaucguguccaccauccagcggaaguacaagggcaucaagauccaggagggggucguggacuacggcgcccgcuucuacuucuacaccagcaagacgaccguggccucccugaucaacacccucaacgaccugaacgagacccuggucacgaugccgcucggguacgugacccacggccugaaccuggaggaggcggcccgguacaugcgcagccucaaggugcccgccaccgucuccgugagcucccccgacgccgugaccgccuacaacggguaccugacgagcuccagcaagacccccgaggagcacuucaucgagaccaucucccuggcgggcagcuacaaggacuggagcuacuccggccagagcacccagcucgggaucgaguuccugaagcggggcgacaaguccgucuacuacacgagcaacccgaccaccuuccaccuggacggggaggugaucaccuucgacaaccucaagacgcugcugucccuccgcgaggugcggaccaucaaggucuucaccaccguggacaacaucaaccugcacacgcagguggucgacaugagcaugaccuacggccagcaguucggccccaccuaccuggacggggccgacgugaccaagaucaagccccacaacucccacgagggcaagacguucuacgugcucccgaacgacgacacccugcgcgucgaggccuucgaguacuaccacaccaccgaccccagcuuccuggggcgguacauguccgcccucaaccacacgaagaaguggaaguacccccaggugaacggccugaccagcaucaagugggccgacaacaacugcuaccuggcgaccgcccuccugacccugcagcagaucgagcucaaguucaaccccccggcccugcaggacgccuacuaccgcgcgcgggccggggaggccgccaacuucugcgcccugauccucgcguacugcaacaagacggugggcgagcugggcgacguccgcgagaccauguccuaccuguuccagcacgccaaccucgacagcugcaagcgggugcugaacgucgugugcaagaccugcgggcagcagcagaccacccugaagggcguggaggccgucauguacauggggacgcucuccuacgagcaguucaagaagggcgugcagauccccugcaccugcgggaagcaggccaccaaguaccuggugcagcaggagagccccuucgucaugauguccgcccccccggcgcaguacgagcugaagcacggcaccuucacgugcgccagcgaguacaccggcaacuaccagugcgggcacuacaagcacaucaccuccaaggagacccucuacugcaucgacggcgcccugcugacgaagagcagcgaguacaaggggcccaucaccgacguguucuacaaggagaacuccuacaccaccacgaucaagcccgugaccuacaagcucgacggcgucgugugcaccgagaucgaccccaagcuggacaacuacuacaagaaggacaacagcuacuucaccgagcagccgaucgaccuggugcccaaccagcccuaccccaacgccuccuucgacaacuucaaguucgucugcgacaacaucaaguucgccgacgaccucaaccagcugacgggguacaagaagccggcgagccgcgagcugaaggugaccuucuuccccgaccucaacggcgacguggucgccaucgacuacaagcacuacacccccuccuucaagaagggcgccaagcugcugcacaagcccaucguguggcacgugaacaacgccaccaacaaggcgacguacaagccgaacaccuggugcauccggugccucuggagcaccaagcccgucgagaccuccaacagcuucgacgugcugaaguccgaggacgcccaggggauggacaaccuggccugcgaggaccucaagcccgugagcgaggaggucguggagaaccccacgauccagaaggacgugcuggagugcaacgucaagaccaccgagguggugggcgacaucauccugaagccggccaacaacucccucaagaucaccgaggaggucgggcacacggaccugauggccgcguacguggacaacagcucccugaccaucaagaagcccaacgagcucagccgcgugcugggccugaagacccucgccacccacgggcuggccgccgucaacuccgugcccugggacacgaucgccaacuacgcgaagccguuccugaacaagguggucagcaccaccaccaacaucgugacgcgcugccucaaccgggugugcaccaacuacaugcccuacuucuucacccugcugcuccagcugugcaccuucacccgcuccacgaacagccggaucaaggccuccaugcccaccaccaucgccaagaacaccgucaagagcgugggcaaguucugccuggaggccagcuucaacuaccucaagucccccaacuucagcaagcugaucaacaucaucaucugguuccugcuccuguccgugugccugggcagccucaucuacuccacggccgcgcuggggguccugaugagcaaccucggcaugccguccagcugcaccggguaccgcgagggcuaccugaacuccaccaacgugaccaucgccacguacugcaccggcagcauccccugcuccgugugccugagcgggcucgacucccuggacaccuaccccagccuggagaccauccagaucacgaucuccagcuucaagugggaccucaccgccuucggccuggucgccgagugguuccuggccuacauccucuucacccgguucuucuacgugcuggggcuggcggccaucaugcagcucuucuucuccuacuucgccgugcacuucaucagcaacuccuggcugauguggcugaucaucaaccugguccagauggcccccaucagcgcgauggugcgcauguacaucuucuucgccagcuucuacuacguguggaaguccuacguccacgugguggacggcugcaacagcuccaccugcaugaugugcuacaagcggaaccgcgccacgcgggucgagugcaccaccaucgugaacgggguccgccggagcuucuacguguacgccaacggcggcaagggguucugcaagcuccacaacuggaacugcgugaacugcgacaccuucugcgccggcuccacguucaucagcgacgaggucgcgcgcgaccugucccugcaguucaagcggccgaucaaccccaccgaccagagcuccuacaucguggacagcgugaccgucaagaacggguccauccaccucuacuucgacaaggccggccagaagaccuacgagcgccacagccugucccacuucgugaaccuggacaaccuccgggccaacaacacgaaggggagccugcccaucaacgugaucgucuucgacggcaaguccaagugcgaggagagcuccgccaagagcgccuccguguacuacagccagcugaugugccagcccauccuccugcuggaccaggcgcucgugagcgacgucggcgacuccgccgagguggccgugaagauguucgacgccuacgucaacaccuucagcuccaccuucaacgugccgauggagaagcugaagacccugguggccacggcggaggccgagcucgccaagaacgucagccuggacaacgugcuguccaccuucaucagcgccgcgcgccagggguucguggacuccgacgucgagaccaaggacgugguggagugccucaagcugagccaccaguccgacaucgaggucaccggcgacagcugcaacaacuacaugcugacguacaacaagguggagaacaugaccccccgggaccucggggccugcaucgacugcuccgcccgccacaucaacgcccagguggccaagagccacaacaucgcgcugaucuggaacgucaaggacuucaugucccugagcgagcagcuccggaagcagauccgcuccgccgccaagaagaacaaccugcccuucaagcugaccugcgccaccacgcgccagguggugaacgucgugaccaccaagaucgcccucaagggcgggugaggacuagucccuguucccagagcccacuuuuuuuucuuuuuuugaaauaaaauagccugucuuucagaucucaaaggcucuuuucagagccaccaaaaaaaaaaaaaaaaaaaaaaaaaaaaaaaaaaaaaaaaaaaaaaaaaaaaaaaaaaaaaaaaaaaaaaaaaaaaaaaaaaaaaaaaaaaaaaaaaaaaa

SEQ ID NO: 19942 - RNA, 6113 nt, Artificial Sequence
  SARS-CoV-2__MT642161.1__non-structural protein 3 (NSP3) mRNA gc
aggagagucccgcagucggcguccagcggcucugcuuguucgugugugugucguugcaggccuuauucaagcuuaccauggcccccaccaaggugaccuucggcgacgacacggucaucgaggugcagggguacaagagcgugaacaucaccuucgagcuggacgagcgcaucgacaagguccucaacgagaagugcuccgccuacaccguggagcugggcaccgaggugaacgaguucgcgugcgucguggccgacgccgugaucaagacgcugcagccggucagcgagcuccugaccccccuggggaucgaccucgacgagugguccauggccaccuacuaccuguucgacgagagcggcgaguucaagcuggccucccacauguacugcagcuucuacccccccgacgaggacgaggaggagggggacugcgaggaggaggaguucgagccguccacccaguacgaguacggcacggaggacgacuaccagggcaagccccucgaguucggggcgaccagcgccgcccugcagcccgaggaggagcaggaggaggacuggcuggacgacgacucccagcagaccgugggccagcaggacgggagcgaggacaaccagaccacgaccauccagaccaucguggagguccagccccagcucgagauggagcugaccccgguggugcagacgaucgaggucaacuccuucagcggcuaccugaagcucaccgacaacguguacaucaagaacgccgacaucguggaggaggcgaagaaggucaagcccaccgugguggucaacgccgccaacguguaccugaagcacgggggcggcguggccggggcccugaacaaggcgaccaacaacgccaugcaggucgaguccgacgacuacaucgccacgaacggcccccucaagguggggggcagcugcguccuguccggccacaaccuggccaagcacugccuccacgugguggggcccaacgucaacaagggcgaggacauccagcugcugaagagcgccuacgagaacuucaaccagcacgaggugcuccuggcgccgcugcucuccgccgggaucuucggcgccgaccccauccacagccugcgggugugcgucgacaccgugcgcaccaacguguaccuggccgucuucgacaagaaccucuacgacaagcugguguccagcuuccuggagaugaagagcgagaagcagguggagcagaagaucgccgagauccccaaggaggaggucaagcccuucaucaccgaguccaagccgagcguggagcagcggaagcaggacgacaagaagaucaaggcgugcguggaggaggucacgaccacccucgaggagaccaaguuccugacggagaaccugcuccuguacaucgacaucaacgggaaccugcaccccgacuccgccacccucgugagcgacaucgacaucaccuuccugaagaaggacgcccccuacaucgugggcgacgucgugcaggagggcgugcugaccgccgucgugauccccacgaagaaggccgggggcaccaccgagaugcucgcgaaggcccugcgcaaggugccgaccgacaacuacaucacgaccuaccccgggcagggccugaacggguacaccgucgaggaggccaagaccgugcucaagaagugcaaguccgccuucuacauccugcccagcaucaucuccaacgagaagcaggagauccugggcaccgugagcuggaaccuccgggagaugcuggcgcacgccgaggagacgcgcaagcugaugcccgucugcguggagaccaaggccaucguguccaccauccagcggaaguacaagggcaucaagauccaggagggggucguggacuacggcgcccgcuucuacuucuacaccagcaagacgaccguggccucccugaucaacacccucaacgaccugaacgagacccuggucacgaugccgcucggguacgugacccacggccugaaccuggaggaggcggcccgguacaugcgcagccucaaggugcccgccaccgucuccgugagcucccccgacgccgugaccgccuacaacggguaccugacgagcuccagcaagacccccgaggagcacuucaucgagaccaucucccuggcgggcagcuacaaggacuggagcuacuccggccagagcacccagcucgggaucgaguuccugaagcggggcgacaaguccgucuacuacacgagcaacccgaccaccuuccaccuggacggggaggugaucaccuucgacaaccucaagacgcugcugucccuccgcgaggugcggaccaucaaggucuucaccaccguggacaacaucaaccugcacacgcagguggucgacaugagcaugaccuacggccagcaguucggccccaccuaccuggacggggccgacgugaccaagaucaagccccacaacucccacgagggcaagacguucuacgugcucccgaacgacgacacccugcgcgucgaggccuucgaguacuaccacaccaccgaccccagcuuccuggggcgguacauguccgcccucaaccacacgaagaaguggaaguacccccaggugaacggccugaccagcaucaagugggccgacaacaacugcuaccuggcgaccgcccuccugacccugcagcagaucgagcucaaguucaaccccccggcccugcaggacgccuacuaccgcgcgcgggccggggaggccgccaacuucugcgcccugauccucgcguacugcaacaagacggugggcgagcugggcgacguccgcgagaccauguccuaccuguuccagcacgccaaccucgacagcugcaagcgggugcugaacgucgugugcaagaccugcgggcagcagcagaccacccugaagggcguggaggccgucauguacauggggacgcucuccuacgagcaguucaagaagggcgugcagauccccugcaccugcgggaagcaggccaccaaguaccuggugcagcaggagagccccuucgucaugauguccgcccccccggcgcaguacgagcugaagcacggcaccuucacgugcgccagcgaguacaccggcaacuaccagugcgggcacuacaagcacaucaccuccaaggagacccucuacugcaucgacggcgcccugcugacgaagagcagcgaguacaaggggcccaucaccgacguguucuacaaggagaacuccuacaccaccacgaucaagcccgugaccuacaagcucgacggcgucgugugcaccgagaucgaccccaagcuggacaacuacuacaagaaggacaacagcuacuucaccgagcagccgaucgaccuggugcccaaccagcccuaccccaacgccuccuucgacaacuucaaguucgucugcgacaacaucaaguucgccgacgaccucaaccagcugacgggguacaagaagccggcgagccgcgagcugaaggugaccuucuuccccgaccucaacggcgacguggucgccaucgacuacaagcacuacacccccuccuucaagaagggcgccaagcugcugcacaagcccaucguguggcacgugaacaacgccaccaacaaggcgacguacaagccgaacaccuggugcauccggugccucuggagcaccaagcccgucgagaccuccaacagcuucgacgugcugaaguccgaggacgcccaggggauggacaaccuggccugcgaggaccucaagcccgugagcgaggaggucguggagaaccccacgauccagaaggacgugcuggagugcaacgucaagaccaccgagguggugggcgacaucauccugaagccggccaacaacucccucaagaucaccgaggaggucgggcacacggaccugauggccgcguacguggacaacagcucccugaccaucaagaagcccaacgagcucagccgcgugcugggccugaagacccucgccacccacgggcuggccgccgucaacuccgugcccugggacacgaucgccaacuacgcgaagccguuccugaacaagguggucagcaccaccaccaacaucgugacgcgcugccucaaccgggugugcaccaacuacaugcccuacuucuucacccugcugcuccagcugugcaccuucacccgcuccacgaacagccggaucaaggccuccaugcccaccaccaucgccaagaacaccgucaagagcgugggcaaguucugccuggaggccagcuucaacuaccucaagucccccaacuucagcaagcugaucaacaucaucaucugguuccugcuccuguccgugugccugggcagccucaucuacuccacggccgcgcuggggguccugaugagcaaccucggcaugccguccuacugcaccggguaccgcgagggcuaccugaacagcaccaacgugaccaucgccacguacugcaccggcuccauccccugcagcgugugccuguccgggcucgacagccuggacaccuaccccucccuggagaccauccagaucacgaucagcuccuucaagugggaccucaccgccuucggccuggucgccgagugguuccuggccuacauccucuucacccgguucuucuacgugcuggggcuggcggccaucaugcagcucuucuucagcuacuucgccgugcacuucaucuccaacagcuggcugauguggcugaucaucaaccugguccagauggcccccaucuccgcgauggugcgcauguacaucuucuucgccagcuucuacuacguguggaagagcuacguccacgugguggacggcugcaacuccagcaccugcaugaugugcuacaagcggaaccgcgccacgcgggucgagugcaccaccaucgugaacgggguccgccgguccuucuacguguacgccaacggcggcaagggguucugcaagcuccacaacuggaacugcgugaacugcgacaccuucugcgccggcagcacguucaucuccgacgaggucgcgcgcgaccugagccugcaguucaagcggccgaucaaccccaccgaccaguccagcuacaucguggacuccgugaccgucaagaacgggagcauccaccucuacuucgacaaggccggccagaagaccuacgagcgccacucccugagccacuucgugaaccuguacaaccuccgggccaacaacacgaaggggucccugcccaucaacgugaucgucuucgacggcaagagcaagugcgaggaguccagcgccaaguccgccagcguguacuacucccagcugaugugccagcccauccuccugcuggaccaggcgcucgugagcgacgucggcgacagcgccgagguggccgugaagauguucgacgccuacgucaacaccuucuccagcaccuucaacgugccgauggagaagcugaagacccugguggccacggcggaggccgagcucgccaagaacgucucccuggacaacgugcugagcaccuucaucuccgccgcgcgccagggguucguggacagcgacgucgagaccaaggacgugguggagugccucaagcugucccaccagagcgacaucgaggucaccggcgacuccugcaacaacuacaugcugacguacaacaagguggagaacaugaccccccgggaccucggggccugcaucgacugcagcgcccgccacaucaacgcccagguggccaagucccacaacaucgcgcugaucuggaacgucaaggacuucaugagccuguccgagcagcuccggaagcagauccgcagcgccgccaagaagaacaaccugcccuucaagcugaccugcgccaccacgcgccagguggugaacgucgugaccaccaagaucgcccucaagggcgggugaggacuagucccuguucccagagcccacuuuuuuuucuuuuuuugaaauaaaauagccugucuuucagaucucaaaggcucuuuucagagccaccaaaaaaaaaaaaaaaaaaaaaaaaaaaaaaaaaaaaaaaaaaaaaaaaaaaaaaaaaaaaaaaaaaaaaaaaaaaaaaaaaaaaaaaaaaaaaaaaaaaaa

SEQ ID NO: 19943 - RNA, 6113 nt, Artificial Sequence
  SARS-CoV-2__MT642173.1__non-structural protein 3 (NSP3) mRNA gc
aggagagucccgcagucggcguccagcggcucugcuuguucgugugugugucguugcaggccuuauucaagcuuaccauggcccccaccaaggugaccuucggcgacgacacggucaucgaggugcagggguacaagagcgugaacaucaccuucgagcuggacgagcgcaucgacaagguccucaacgagaagugcuccgccuacaccguggagcugggcaccgaggugaacgaguucgcgugcgucguggccgacgccgugaucaagacgcugcagccggucagcgagcuccugaccccccuggggaucgaccucgacgagugguccauggccaccuacuaccuguucgacgagagcggcgaguucaagcuggccucccacauguacugcagcuucuacccccccgacgaggacgaggaggagggggacugcgaggaggaggaguucgagccguccacccaguacgaguacggcacggaggacgacuaccagggcaagccccucgaguucggggcgaccagcgccgcccugcagcccgaggaggagcaggaggaggacuggcuggacgacgacucccagcagaccgugggccagcaggacgggagcgaggacaaccagaccacgaccauccagaccaucguggagguccagccccagcucgagauggagcugaccccgguggugcagacgaucgaggucaacuccuucagcggcuaccugaagcucaccgacaacguguacaucaagaacgccgacaucguggaggaggcgaagaaggucaagcccaccgugguggucaacgccgccaacguguaccugaagcacgggggcggcguggccggggcccugaacaaggcgaccaacaacgccaugcaggucgaguccgacgacuacaucgccacgaacggcccccucaagguggggggcagcugcguccuguccggccacaaccuggccaagcacugccuccacgugguggggcccaacgucaacaagggcgaggacauccagcugcugaagagcgccuacgagaacuucaaccagcacgaggugcuccuggcgccgcugcucuccgccgggaucuucggcgccgaccccauccacagccugcgggugugcgucgacaccgugcgcaccaacguguaccuggccgucuucgacaagaaccucuacgacaagcugguguccagcuuccuggagaugaagagcgagaagcagguggagcagaagaucgccgagauccccaaggaggaggucaagcccuucaucaccgaguccaagccgagcguggagcagcggaagcaggacgacaagaagaucaaggcgugcguggaggaggucacgaccacccucgaggagaccaaguuccugacggagaaccugcuccuguacaucgacaucaacgggaaccugcaccccgacuccgccacccucgugagcgacaucgacaucaccuuccugaagaaggacgcccccuacaucgugggcgacgucgugcaggagggcgugcugaccgccgucgugauccccacgaagaaggccgggggcaccaccgagaugcucgcgaaggcccugcgcaaggugccgaccgacaacuacaucacgaccuaccccgggcagggccugaacggguacaccgucgaggaggccaagaccgugcucaagaagugcaaguccgccuucuacauccugcccagcaucaucuccaacgagaagcaggagauccugggcaccgugagcuggaaccuccgggagaugcuggcgcacgccgaggagacgcgcaagcugaugcccgucugcguggagaccaaggccaucguguccaccauccagcggaaguacaagggcaucaagauccaggagggggucguggacuacggcgcccgcuucuacuucuacaccagcaagacgaccguggccucccugaucaacacccucaacgaccugaacgagacccuggucacgaugccgcucggguacgugacccacggccugaaccuggaggaggcggcccgguacaugcgcagccucaaggugcccgccaccgucuccgugagcucccccgacgccgugaccgccuacaacggguaccugacgagcuccagcaagacccccgaggagcacuucaucgagaccaucucccuggcgggcagcuacaaggacuggagcuacuccggccagagcacccagcucgggaucgaguuccugaagcggggcgacaaguccgucuacuacacgagcaacccgaccaccuuccaccuggacggggaggugaucaccuucgacaaccucaagacgcugcugucccuccgcgaggugcggaccaucaaggucuucaccaccguggacaacaucaaccugcacacgcagguggucgacaugagcaugaccuacggccagcaguucggccccaccuaccuggacggggccgacgugaccaagaucaagccccacaacucccacgagggcaagacguucuacgugcucccgaacgacgacacccugcgcgucgaggccuucgaguacuaccacaccaccgaccccagcuuccuggggcgguacauguccgcccucaaccacacgaagaaguggaaguacccccaggugaacggccugaccagcaucaagugggccgacaacaacugcuaccuggcgaccgcccuccugacccugcagcagaucgagcucaaguucaaccccccggcccugcaggacgccuacuaccgcgcgcgggccggggaggccgccaacuucugcgcccugauccucgcguacugcaacaagacggugggcgagcugggcgacguccgcgagaccauguccuaccuguuccagcacgccaaccucgacagcugcaagcgggugcugaacgucgugugcaagaccugcgggcagcagcagaccacccugaagggcguggaggccgucauguacauggggacgcucuccuacgagcaguucaagaagggcgugcagauccccugcaccugcgggaagcaggccaccaaguaccuggugcagcaggagagccccuucgucaugauguccgcccccccggcgcaguacgagcugaagcacggcaccuucacgugcgccagcgaguacaccggcaacuaccagugcgggcacuacaagcacaucaccuccaaggagacccucuacugcaucgacggcgcccugcugacgaagagcagcgaguacaaggggcccaucaccgacguguucuacaaggagaacuccuacaccaccacgaucaagcccgugaccuacaagcucgacggcgucgugugcaccgagaucgaccccaagcuggacaacuacuacaagaaggacaacagcuacuucaccgagcagccgaucgaccuggugcccaaccagcccuaccccaacgccuccuucgacaacuucaaguucgucugcgacaacaucaaguucgccgacgaccucaaccagcugacgggguacaagaagccggcgagccgcgagcugaaggugaccuucuuccccgaccucaacggcgacguggucgccaucgacuacaagcacuacacccccuccuucaagaagggcgccaagcugcugcacaagcccaucguguggcacgugaacaacgccaccaacaaggcgacguacaagccgaacaccuggugcauccggugccucuggagcaccaagcccgucgagaccuccaacagcuucgacgugcugaaguccgaggacgcccaggggauggacaaccuggccugcgaggaccucaagcccgugagcgaggaggucguggagaaccccacgauccagaaggacgugcuggagugcaacgucaagaccaccgagguggugggcgacaucauccugaagccggccaacaacucccucaagaucaccgaggaggucgggcacacggaccugauggccgcguacguggacaacagcucccugaccauccgcaagcccaacgagcucagccgcgugcugggccugaagacccucgccacccacgggcuggccgccgucaacuccgugcccugggacacgaucgccaacuacgcgaagccguuccugaacaagguggucagcaccaccaccaacaucgugacgcggugccucaaccgcgugugcaccaacuacaugcccuacuucuucacccugcugcuccagcugugcaccuucacccgguccacgaacagccgcaucaaggccuccaugcccaccaccaucgccaagaacaccgucaagagcgugggcaaguucugccuggaggccagcuucaacuaccucaagucccccaacuucagcaagcugaucaacaucaucaucugguuccugcuccuguccgugugccugggcagccucaucuacuccacggccgcgcuggggguccugaugagcaaccucggcaugccguccuacugcaccggguaccgggagggcuaccugaacagcaccaacgugaccaucgccacguacugcaccggcuccauccccugcagcgugugccuguccgggcucgacagccuggacaccuaccccucccuggagaccauccagaucacgaucagcuccuucaagugggaccucaccgccuucggccuggucgccgagugguuccuggccuacauccucuucacccgcuucuucuacgugcuggggcuggcggccaucaugcagcucuucuucagcuacuucgccgugcacuucaucuccaacagcuggcugauguggcugaucaucaaccugguccagauggcccccaucuccgcgauggugcggauguacaucuucuucgccagcuucuacuacguguggaagagcuacguccacgugguggacggcugcaacuccagcaccugcaugaugugcuacaagcgcaaccgggccacgcgcgucgagugcaccaccaucgugaacgggguccggcgcuccuucuacguguacgccaacggcggcaagggguucugcaagcuccacaacuggaacugcgugaacugcgacaccuucugcgccggcagcacguucaucuccgacgaggucgcgcgggaccugagccugcaguucaagcgcccgaucaaccccaccgaccaguccagcuacaucguggacuccgugaccgucaagaacgggagcauccaccucuacuucgacaaggccggccagaagaccuacgagcggcacucccugagccacuucgugaaccuggacaaccuccgcgccaacaacacgaaggggucccugcccaucaacgugaucgucuucgacggcaagagcaagugcgaggaguccagcgccaaguccgccagcguguacuacucccagcugaugugccagcccauccuccugcuggaccaggcgcucgugagcgacgucggcgacagcgccgagguggccgugaagauguucgacgccuacgucaacaccuucuccagcaccuucaacgugccgauggagaagcugaagacccugguggccacggcggaggccgagcucgccaagaacgucucccuggacaacgugcugagcaccuucaucuccgccgcgcggcagggguucguggacagcgacgucgagaccaaggacgugguggagugccucaagcugucccaccagagcgacaucgaggucaccggcgacuccugcaacaacuacaugcugacguacaacaagguggagaacaugaccccccgcgaccucggggccugcaucgacugcagcgcccggcacaucaacgcccagguggccaagucccacaacaucgcgcugaucuggaacgucaaggacuucaugagccuguccgagcagcuccgcaagcagauccgcagcgccgccaagaagaacaaccugcccuucaagcugaccugcgccaccacgcggcagguggugaacgucgugaccaccaagaucgcccucaagggcgggugaggacuagucccuguucccagagcccacuuuuuuuucuuuuuuugaaauaaaauagccugucuuucagaucucaaaggcucuuuucagagccaccaaaaaaaaaaaaaaaaaaaaaaaaaaaaaaaaaaaaaaaaaaaaaaaaaaaaaaaaaaaaaaaaaaaaaaaaaaaaaaaaaaaaaaaaaaaaaaaaaaaaa

SEQ ID NO: 19944 - RNA, 6113 nt, Artificial Sequence
  SARS-CoV-2__MT642178.1__non-structural protein 3 (NSP3) mRNA gc
aggagagucccgcagucggcguccagcggcucugcuuguucgugugugugucguugcaggccuuauucaagcuuaccauggcccccaccaaggugaccuucggcgacgacacggucaucgaggugcagggguacaagagcgugaacaucaccuucgagcuggacgagcgcaucgacaagguccucaacgagaagugcuccgccuacaccguggagcugggcaccgaggugaacgaguucgcgugcgucguggccgacgccgugaucaagacgcugcagccggucagcgagcuccugaccccccuggggaucgaccucgacgagugguccauggccaccuacuaccuguucgacgagagcggcgaguucaagcuggccucccacauguacugcagcuucuacccccccgacgaggacgaggaggagggggacugcgaggaggaggaguucgagccguccacccaguacgaguacggcacggaggacgacuaccagggcaagccccucgaguucggggcgaccagcgccgcccugcagcccgaggaggagcaggaggaggacuggcuggacgacgacucccagcagaccgugggccagcaggacgggagcgaggacaaccagaccacgaccauccagaccaucguggagguccagccccagcucgagauggagcugaccccgguggugcagacgaucgaggucaacuccuucagcggcuaccugaagcucaccgacaacguguacaucaagaacgccgacaucguggaggaggcgaagaaggucaagcccaccgugguggucaacgccgccaacguguaccugaagcacgggggcggcguggccggggcccugaacaaggcgaccaacaacgccaugcaggucgaguccgacgacuacaucgccacgaacggcccccucaagguggggggcagcugcguccuguccggccacaaccuggccaagcacugccuccacgugguggggcccaacgucaacaagggcgaggacauccagcugcugaagagcgccuacgagaacuucaaccagcacgaggugcuccuggcgccgcugcucuccgccgggaucuucggcgccgaccccauccacagccugcgggugugcgucgacaccgugcgcaccaacguguaccuggccgucuucgacaagaaccucuacgacaagcugguguccagcuuccuggagaugaagagcgagaagcagguggagcagaagaucgccgagauccccaaggaggaggucaagcccuucaucaccgaguccaagccgagcguggagcagcggaagcaggacgacaagaagaucaaggcgugcguggaggaggucacgaccauccucgaggagaccaaguuccugaccgagaaccugcuccuguacaucgacaucaacgggaaccugcaccccgacuccgccacgcucgugagcgacaucgacaucaccuuccugaagaaggacgcccccuacaucgugggcgacgucgugcaggagggcgugcugaccgccgucgugauccccaccaagaaggccgggggcacgaccgagaugcucgcgaaggcccugcgcaaggugccgaccgacaacuacaucaccacguaccccgggcagggccugaacggguacaccgucgaggaggccaagaccgugcucaagaagugcaaguccgccuucuacauccugcccagcaucaucuccaacgagaagcaggagauccugggcaccgugagcuggaaccuccgggagaugcuggcgcacgccgaggagacccgcaagcugaugcccgucugcguggagacgaaggccaucguguccaccauccagcggaaguacaagggcaucaagauccaggagggggucguggacuacggcgcccgcuucuacuucuacaccagcaagaccacgguggccucccugaucaacacccucaacgaccugaacgagacccuggucaccaugccgcucggguacgugacgcacggccugaaccuggaggaggcggcccgguacaugcgcagccucaaggugcccgccaccgucuccgugagcucccccgacgccgugaccgccuacaacggguaccugaccagcuccagcaagacgcccgaggagcacuucaucgagaccaucucccuggcgggcagcuacaaggacuggagcuacuccggccagagcacccagcucgggaucgaguuccugaagcggggcgacaaguccgucuacuacaccagcaacccgacgaccuuccaccuggacggggaggugaucaccuucgacaaccucaagacccugcugucccuccgcgaggugcggacgaucaaggucuucaccaccguggacaacaucaaccugcacacccagguggucgacaugagcaugacguacggccagcaguucggccccaccuaccuggacggggccgacgugaccaagaucaagccccacaacucccacgagggcaagaccuucuacgugcucccgaacgacgacacgcugcgcgucgaggccuucgaguacuaccacaccaccgaccccagcuuccuggggcgguacauguccgcccucaaccacaccaagaaguggaaguacccccaggugaacggccugacgagcaucaagugggccgacaacaacugcuaccuggcgaccgcccuccugacccugcagcagaucgagcucaaguucaaccccccggcccugcaggacgccuacuaccgcgcgcgggccggggaggccgccaacuucugcgcccugauccucgcguacugcaacaagaccgugggcgagcugggcgacguccgcgagacgauguccuaccuguuccagcacgccaaccucgacagcugcaagcgggugcugaacgucgugugcaagaccugcgggcagcugcagaccacccucaagggcguggaggccgucauguacauggggacccuguccuacgagcaguucaagaagggcgugcagauccccugcacgugcgggaagcaggccaccaaguaccuggugcagcaggagagccccuucgucaugauguccgcccccccggcgcaguacgagcucaagcacggcaccuucaccugcgccagcgaguacacgggcaacuaccagugcgggcacuacaagcacaucaccuccaaggagacccuguacugcaucgacggcgcccugcucaccaagagcagcgaguacaaggggcccaucacggacguguucuacaaggagaacuccuacaccaccaccaucaagcccgugacguacaagcuggacggcgucgugugcaccgagaucgaccccaagcuggacaacuacuacaagaaggacaacagcuacuucaccgagcagccgaucgaccucgugcccaaccagcccuaccccaacgccuccuucgacaacuucaaguucgucugcgacaacaucaaguucgccgacgaccugaaccagcugaccggguacaagaagccggcgagccgcgagcucaaggugacguucuuccccgaccugaacggcgacguggucgccaucgacuacaagcacuacacccccuccuucaagaagggcgccaagcugcuccacaagcccaucguguggcacgugaacaacgccaccaacaaggcgaccuacaagccgaacacguggugcauccggugccuguggagcaccaagcccgucgagaccuccaacagcuucgacgugcugaaguccgaggacgcccaggggauggacaaccucgccugcgaggaccugaagcccgugagcgaggaggucguggagaaccccaccauccagaaggacgugcuggagugcaacgucaagacgaccgagguggugggcgacaucauccucaagccggccaacaacucccugaagaucaccgaggaggucgggcacaccgaccugauggccgcguacguggacaacagcucccucacgaucaagaagcccaacgagcugagccgcgugcugggccucaagacccuggccacccacgggcuggccgccgucaacuccgugcccugggacaccaucgccaacuacgcgaagccguuccucaacaagguggucagcacgaccaccaacaucgugacccgcugccugaaccgggugugcacgaacuacaugcccuacuucuucacccugcuccugcagcugugcaccuucacccgcuccaccaacagccggaucaaggccuccaugcccacgaccaucgccaagaacaccgucaagagcgugggcaaguucugccucgaggccagcuucaacuaccugaagucccccaacuucagcaagcugaucaacaucaucaucugguuccuccugcuguccgugugccucggcagccugaucuacuccaccgccgcgcuggggguccucaugagcaaccugggcaugccguccuacugcacgggguaccgcgagggcuaccugaacagcaccaacgugaccaucgccaccuacugcacgggcuccauccccugcagcgugugccucuccgggcuggacagccuggacaccuaccccucccucgagaccauccagaucaccaucagcuccuucaagugggaccugacggccuucggccuggucgccgagugguuccucgccuacauccuguucacccgguucuucuacgugcuggggcucgcggccaucaugcagcuguucuucagcuacuucgccgugcacuucaucuccaacagcuggcugauguggcugaucaucaaccucguccagauggcccccaucuccgcgauggugcgcauguacaucuucuucgccagcuucuacuacguguggaagagcuacguccacgugguggacggcugcaacuccagcaccugcaugaugugcuacaagcggaaccgcgccacccgggucgagugcacgaccaucgugaacgggguccgccgguccuucuacguguacgccaacggcggcaagggguucugcaagcugcacaacuggaacugcgugaacugcgacaccuucugcgccggcagcaccuucaucuccgacgaggucgcgcgcgaccugagccuccaguucaagcggccgaucaaccccacggaccaguccagcuacaucguggacuccgugaccgucaagaacgggagcauccaccuguacuucgacaaggccggccagaagaccuacgagcgccacucccugagccacuucgugaaccucgacaaccugcgggccaacaacaccaaggggucccugcccaucaacgugaucgucuucgacggcaagagcaagugcgaggaguccagcgccaaguccgccagcguguacuacucccagcucaugugccagcccauccugcugcucgaccaggcgcuggugagcgacgucggcgacagcgccgagguggccgugaagauguucgacgccuacgucaacacguucuccagcaccuucaacgugccgauggagaagcugaagacccucguggccaccgcggaggccgagcuggccaagaacgucucccuggacaacgugcucagcacguucaucuccgccgcgcgccagggguucguggacagcgacgucgagaccaaggacgugguggagugccugaagcugucccaccagagcgacaucgaggucaccggcgacuccugcaacaacuacaugcucaccuacaacaagguggagaacaugacgccccgggaccugggggccugcaucgacugcagcgcccgccacaucaacgcccagguggccaagucccacaacaucgcgcugaucuggaacgucaaggacuucaugagccucuccgagcagcugcggaagcagauccgcagcgccgccaagaagaacaaccugcccuucaagcucaccugcgccaccacccgccagguggugaacgucgugacgaccaagaucgcccugaagggcgggugaggacuagucccuguucccagagcccacuuuuuuuucuuuuuuugaaauaaaauagccugucuuucagaucucaaaggcucuuuucagagccaccaaaaaaaaaaaaaaaaaaaaaaaaaaaaaaaaaaaaaaaaaaaaaaaaaaaaaaaaaaaaaaaaaaaaaaaaaaaaaaaaaaaaaaaaaaaaaaaaaaaaa

SEQ ID NO: 19945 - RNA, 6113 nt, Artificial Sequence
  SARS-CoV-2__MT642270.1__non-structural protein 3 (NSP3) mRNA gc
aggagagucccgcagucggcguccagcggcucugcuuguucgugugugugucguugcaggccuuauucaagcuuaccauggcccccaccaaggugaccuucggcgacgacacggucaucgaggugcagggguacaagagcgugaacaucaccuucgagcuggacgagcgcaucgacaagguccucaacgagaagugcuccgccuacaccguggagcugggcaccgaggugaacgaguucgcgugcgucguggccgacgccgugaucaagacgcugcagccggucagcgagcuccugaccccccuggggaucgaccucgacgagugguccauggccaccuacuaccuguucgacgagagcggcgaguucaagcuggccucccacauguacugcagcuucuacccccccgacgaggacgaggaggagggggacugcgaggaggaggaguucgagccguccacccaguacgaguacggcacggaggacgacuaccagggcaagccccucgaguucggggcgaccagcgccgcccugcagcccgaggaggagcaggaggaggacuggcuggacgacgacucccagcagaccgugggccagcaggacgggagcgaggacaaccagaccacgaccauccagaccaucguggagguccagccccagcucgagauggagcugaccccgguggugcagacgaucgaggucaacuccuucagcggcuaccugaagcucaccgacaacguguacaucaagaacgccgacaucguggaggaggcgaagaaggucaagcccaccgugguggucaacgccgccaacguguaccugaagcacgggggcggcguggccggggcccugaacaaggcgaccaacaacgccaugcaggucgaguccgacgacuacaucgccacgaacggcccccucaagguggggggcagcugcguccuguccggccacaaccuggccaagcacugccuccacgugguggggcccaacgucaacaagggcgaggacauccagcugcugaagagcgccuacgagaacuucaaccagcacgaggugcuccuggcgccgcugcucuccgccgggaucuucggcgccgaccccauccacagccugcgggugugcgucgacaccgugcgcaccaacguguaccuggccgucuucgacaagaaccucuacgacaagcugguguccagcuuccuggagaugaagagcgagaagcagguggagcagaagaucgccgagauccccaaggaggaggucaagcccuucaucaccgaguccaagccgagcguggagcagcggaagcaggacgacaagaagaucaaggcgugcguggaggaggucacgaccacccucgaggagaccaaguuccugacggagaaccugcuccuguacaucgacaucaacgggaaccugcaccccgacuccgccacccucgugagcgacaucgacaucaccuuccugaagaaggacgcccccuacaucgugggcgacgucgugcaggagggcgugcugaccgccgucgugauccccacgaagaaggccgggggcaccaccgagaugcucgcgaaggcccugcgcaaggugccgaccgacaacuacaucacgaccuaccccgggcagggccugaacggguacaccgucgaggaggccaagaccgugcucaagaagugcaaguccgccuucuacauccugcccagcaucaucuccaacgagaagcaggagauccugggcaccgugagcuggaaccuccgggagaugcuggcgcacgccgaggagacgcgcaagcugaugcccgucugcguggagaccaaggccaucguguccaccauccagcggaaguacaagggcaucaagauccaggagggggucguggacuacggcgcccgcuucuacuucuacaccagcaagacgaccguggccucccugaucaacacccucaacgaccugaacgagacccuggucacgaugccgcucggguacgugacccacggccugaaccuggaggaggcggcccgguacaugcgcagccucaaggugcccgccaccgucuccgugagcucccccgacgccgugaccgccuacaacggguaccugacgagcuccagcaagacccccgaggagcacuucaucgagaccaucucccuggcgggcagcuacaaggacuggagcuacuccggccagagcacccagcucgggaucgaguuccugaagcggggcgacaaguccgucuacuacacgagcaacccgaccaccuuccaccuggacggggaggugaucaccuucgacaaccucaagacgcugcugucccuccgcgaggugcggaccaucaaggucuucaccaccguggacaacaucaaccugcacacgcagguggucgacaugagcaugaccuacggccagcaguucggccccaccuaccuggacggggccgacgugaccaagaucaagccccacaacucccacgagggcaagacguucuacgugcucccgaacgacgacacccugcgcgucgaggccuucgaguacuaccacaccaccgaccccagcuuccuggggcgguacauguccgcccucaaccacacgaagaaguggaaguacccccaggugaacggccugaccagcaucaagugggccgacaacaacugcuaccuggcgaccgcccuccugacccugcagcagaucgagcucaaguucaaccccccggcccugcaggacgccuacuaccgcgcgcgggccggggaggccgccaacuucugcgcccugauccucgcguacugcaacaagacggugggcgagcugggcgacguccgcgagaccauguccuaccuguuccagcacgccaaccucgacagcugcaagcgggugcugaacgucgugugcaagaccugcgggcagcagcagaccacccugaagggcguggaggccgucauguacauggggacgcucuccuacgagcaguucaagaagggcgugcagauccccugcaccugcgggaagcaggccaccaaguaccuggugcagcaggagagccccuucgucaugauguccgcccccccggcgcaguacgagcugaagcacggcaccuucacgugcgccagcgaguacaccggcaacuaccagugcgggcacuacaagcacaucaccuccaaggagacccucuacugcaucgacggcgcccugcugacgaagagcagcgaguacaaggggcccaucaccgacguguucuacaaggagaacuccuacaccaccacgaucaagcccgugaccuacaagcucgacggcgucgugugcaccgagaucgaccccaagcuggacaacuacuacaagaaggacaacagcuacuucaccgagcagccgaucgaccuggugcccaaccagcccuaccccaacgccuccuucgacaacuucaaguucgucugcgacaacaucaaguucgccgacgaccucaaccagcugacgggguacaagaagccggcgagccgcgagcugaaggugaccuucuuccccgaccucaacggcgacguggucgccaucgacuacaagcacuacacccccuccuucaagaagggcgccaagcugcugcacaagcccaucguguggcacgugaacaacgccaccaacaaggcgacguacaagccgaacaccuggugcauccggugccucuggagcaccaagcccgucgagaccuccaacagcuucgacgugcugaaguccgaggacgcccaggggauggacaaccuggccugcgaggaccucaagcccgugagcgaggaggucguggagaaccccacgauccagaaggacgugcuggagugcaacgucaagaccaccgagguggugggcgacaucauccugaagccggccaacaacucccucaagaucaccgaggaggucgggcacacggaccugauggccgcguacguggacaacagcucccugaccaucaagaagcccaacgagcucagccgcgugcugggccugaagacccucgccacccacgggcuggccgccgucaacuccgugcccugggacacgaucgccaacuacgcgaagccguuccugaacaagguggucagcaccaccaccaacaucgugacgcgcugccucaaccgggugugcaccaacuacaugcccuacuucuucacccugcugcuccagcugugcaccuucacccgcuccacgaacagccggaucaaggccuccaugcccaccaccaucgccaagaacaccgucaagagcgugggcaaguucugccuggaggccagcuucaacuaccucaagucccccaacuucagcaagcugaucaacaucaucaucugguuccugcuccuguccgugugccugggcagccucaucuacuccacggccgcgcuggggguccugaugagcaaccucggcaugccguccuacugcaccggguaccgcgagggcuaccugaacagcaccaacgugaccaucgccacguacugcaccggcuccauccccugcagcgugugccuguccgggcucgacagccuggacaccuaccccucccuggagaccauccagaucacgaucagcuccuucaagugggaccucaccgccuucggccuggucgccgagugguuccuggccuacauccucuucacccgguucuucuacgugcuggggcuggcggccaucaugcagcucuucuucagcuacuucgccgugcacuucaucuccaacagcuggcugauguggcugaucaucaaccugguccagauggcccccaucuccgcgauggugcgcauguacaucuucuucgccagcuucuacuacguguggaagagcuacguccacgugguggacggcugcaacuccagcaccugcaugaugugcuacaagcggaaccgcgccacgcgggucgagugcaccaccaucgugaacgggguccgccgguccuucuacguguacgccaacggcggcaagggguucugcaagcuccacaacuggaacugcgugaacugcgacaccuucugcgccggcagcacguucaucuccgacgaggucgcgcgcgaccugagccugcaguucaagcggccgaucaaccccaccgaccaguccagcuacaucguggacuccgugaccgucaagaacgggagcauccaccucuacuucgacaaggccggccagaagaccuacgagcgccacucccugagccacuucgugaaccuggacaaccuccgggccaacaacacgaaggggucccugcccaucaacgugaucgucuucgacggcaagagcaagugcgaggaguccagcgccaaguccgccagcguguacuacucccagcugaugugccagcccauccuccugcuggaccaggcgcucgugagcgacgucggcgacagcgccgagguggccgugaagauguucgacgccuacgucaacaccuucuccagcaccuucaacgugccgauggagaagcugaagacccugguggccacggcggaggccgagcucgccaagaacgucucccuggacaacgugcugagcaccuucaucuccgccgcgcgccagggguucguggacagcgacgucgagaccaaggacgugguggagugccucaagcugucccaccagagcgacaucgaggucaccggcgacuccugcaacaacuacaugcugacguacaacaagguggagaacaugaccccccgggaccucggggccugcaucgacugcagcgugcgccacaucaacgcccaggucgccaagucccacaacaucgcccugaucuggaacgugaaggacuucaugagccuguccgagcagcuccggaagcagauccgcagcgcggccaagaagaacaaccugcccuucaagcugaccugcgccaccacgcgccagguggucaacguggugaccaccaagaucgcccucaagggcgggugaggacuagucccuguucccagagcccacuuuuuuuucuuuuuuugaaauaaaauagccugucuuucagaucucaaaggcucuuuucagagccaccaaaaaaaaaaaaaaaaaaaaaaaaaaaaaaaaaaaaaaaaaaaaaaaaaaaaaaaaaaaaaaaaaaaaaaaaaaaaaaaaaaaaaaaaaaaaaaaaaaaaa

SEQ ID NO: 19946 - RNA, 6113 nt, Artificial Sequence
  SARS-CoV-2__MT642356.1__non-structural protein 3 (NSP3) mRNA gc
aggagagucccgcagucggcguccagcggcucugcuuguucgugugugugucguugcaggccuuauucaagcuuaccauggcccccaccaaggugaccuucggcgacgacacggucaucgaggugcagggguacaagagcgugaacaucaccuucgagcuggacgagcgcaucgacaagguccucaacgagaagugcuccaccuacaccguggagcugggcacggaggugaacgaguucgccugcgucguggcggacgccgugaucaagacccugcagccggucagcgagcuccugaccccccuggggaucgaccucgacgagugguccauggccaccuacuaccuguucgacgagagcggcgaguucaagcuggccucccacauguacugcagcuucuacccccccgacgaggacgaggaggagggggacugcgaggaggaggaguucgagccguccacgcaguacgaguacggcaccgaggacgacuaccagggcaagccccucgaguucggggccaccagcgcggcccugcagcccgaggaggagcaggaggaggacuggcuggacgacgacucccagcagaccgugggccagcaggacgggagcgaggacaaccagacgaccaccauccagaccaucguggagguccagccccagcucgagauggagcugacgccgguggugcagaccaucgaggucaacuccuucagcggcuaccugaagcucaccgacaacguguacaucaagaacgccgacaucguggaggaggccaagaaggucaagcccaccgugguggucaacgcggccaacguguaccugaagcacgggggcggcguggccggggcccugaacaaggccacgaacaacgcgaugcaggucgaguccgacgacuacaucgccaccaacggcccccucaagguggggggcagcugcguccuguccggccacaaccuggccaagcacugccuccacgugguggggcccaacgucaacaagggcgaggacauccagcugcugaagagcgccuacgagaacuucaaccagcacgaggugcuccuggccccgcugcucuccgcggggaucuucggcgccgaccccauccacagccugcgggugugcgucgacaccgugcgcaccaacguguaccuggccgucuucgacaagaaccucuacgacaagcugguguccagcuuccuggagaugaagagcgagaagcagguggagcagaagaucgccgagauccccaaggaggaggucaagcccuucaucacggaguccaagccgagcguggagcagcggaagcaggacgacaagaagaucaaggccugcguggaggaggucaccaccacccucgaggagacgaaguuccugaccgagaaccugcuccuguacaucgacaucaacgggaaccugcaccccgacuccgcgacccucgugagcgacaucgacaucaccuuccugaagaaggacgcccccuacaucgugggcgacgucgugcaggagggcgugcugacggccgucgugauccccaccaagaaggccgggggcaccaccgagaugcucgccaaggcgcugcgcaaggugccgacggacaacuacaucaccaccuaccccgggcagggccugaacggguacaccgucgaggaggccaagaccgugcucaagaagugcaaguccgccuucuacauccugcccagcaucaucuccaacgagaagcaggagauccugggcacggugagcuggaaccuccgggagaugcuggcccacgcggaggagacccgcaagcugaugcccgucugcguggagaccaaggccaucguguccaccauccagcggaaguacaagggcaucaagauccaggagggggucguggacuacggcgcccgcuucuacuucuacacgagcaagaccaccguggccucccugaucaacacccucaacgaccugaacgagacgcuggucaccaugccgcucggguacgugacccacggccugaaccuggaggaggccgcgcgguacaugcgcagccucaaggugcccgccaccgucuccgugagcucccccgacgccgugacggccuacaacggguaccugaccagcuccagcaagacccccgaggagcacuucaucgagaccaucucccuggccggcagcuacaaggacuggagcuacuccggccagagcacgcagcucgggaucgaguuccugaagcggggcgacaaguccgucuacuacaccagcaacccgaccaccuuccaccuggacggggaggugaucacguucgacaaccucaagacccugcugucccuccgcgaggugcggaccaucaaggucuucaccacgguggacaacaucaaccugcacacccagguggucgacaugagcaugaccuacggccagcaguucggccccaccuaccuggacggggcggacgugacgaagaucaagccccacaacucccacgagggcaagaccuucuacgugcucccgaacgacgacacccugcgcgucgaggccuucgaguacuaccacaccacggaccccagcuuccuggggcgguacauguccgcccucaaccacaccaagaaguggaaguacccccaggugaacggccugaccagcaucaagugggccgacaacaacugcuaccuggccaccgcgcuccugacgcugcagcagaucgagcucaaguucaaccccccggcccugcaggacgccuacuaccgcgcccgggcgggggaggccgccaacuucugcgcccugauccucgccuacugcaacaagaccgugggcgagcugggcgacguccgcgagaccauguccuaccuguuccagcacgcgaaccucgacagcugcaagcgggugcugaacgucgugugcaagaccugcgggcagcagcagaccacgcugaagggcguggaggccgucauguacauggggacccucuccuacgagcaguucaagaagggcgugcagauccccugcaccugcgggaagcaggccaccaaguaccuggugcagcaggagagccccuucgucaugauguccgcccccccggcccaguacgagcugaagcacggcacguucaccugcgcgagcgaguacaccggcaacuaccagugcgggcacuacaagcacaucaccuccaaggagacgcucuacugcaucgacggcgcccugcugaccaagagcagcgaguacaaggggcccaucaccgacguguucuacaaggagaacuccuacaccacgaccaucaagcccgugaccuacaagcucgacggcgucgugugcaccgagaucgaccccaagcuggacaacuacuacaagaaggacaacagcuacuucacggagcagccgaucgaccuggugcccaaccagcccuaccccaacgccuccuucgacaacuucaaguucgucugcgacaacaucaaguucgccgacgaccucaaccagcugaccggguacaagaagccggccagccgcgagcugaaggugaccuucuuccccgaccucaacggcgacguggucgcgaucgacuacaagcacuacacccccuccuucaagaagggcgccaagcugcugcacaagcccaucguguggcacgugaacaacgccacgaacaaggccaccuacaagccgaacaccuggugcauccggugccucuggagcaccaagcccgucgagacguccaacagcuucgacgugcugaaguccgaggacgcgcaggggauggacaaccuggccugcgaggaccucaagcccgugagcgaggaggucguggagaaccccaccauccagaaggacgugcuggagugcaacgucaagaccaccgagguggugggcgacaucauccugaagccggccaacaacucccucaagaucacggaggaggucgggcacaccgaccugauggccgccuacguggacaacagcucccugaccaucaagaagcccaacgagcucagccgcgugcugggccugaagacccucgcgacgcacgggcuggccgccgucaacuccgugcccugggacaccaucgccaacuacgccaagccguuccugaacaagguggucagcaccaccacgaacaucgugacccgcugccucaaccgggugugcaccaacuacaugcccuacuucuucacccugcugcuccagcugugcaccuucacgcgcuccaccaacagccggaucaaggcguccaugcccaccaccaucgccaagaacacggucaagagcgugggcaaguucugccuggaggccagcuucaacuaccucaagucccccaacuucagcaagcugaucaacaucaucaucugguuccugcuccuguccgugugccugggcagccucaucuacuccaccgccgcccuggggguccugaugagcaaccucggcaugccguccuacugcaccggguaccgcgagggcuaccugaacagcaccaacgugacgaucgcgaccuacugcaccggcuccauccccugcagcgugugccuguccgggcucgacagccuggacaccuaccccucccuggagacgauccagaucaccaucagcuccuucaagugggaccucaccgccuucggccuggucgccgagugguuccuggccuacauccucuucacccgguucuucuacgugcuggggcuggccgcgaucaugcagcucuucuucagcuacuucgccgugcacuucaucuccaacagcuggcugauguggcugaucaucaaccugguccagauggcccccaucuccgccauggugcgcauguacaucuucuucgcgagcuucuacuacguguggaagagcuacguccacgugguggacggcugcaacuccagcacgugcaugaugugcuacaagcggaaccgcgccacccgggucgagugcaccaccaucgugaacgggguccgccgguccuucuacguguacgccaacggcggcaagggguucugcaagcuccacaacuggaacugcgugaacugcgacacguucugcgccggcagcaccuucaucuccgacgaggucgcccgcgaccugagccugcaguucaagcggccgaucaaccccaccgaccaguccagcuacaucguggacuccgugaccgucaagaacgggagcauccaccucuacuucgacaaggcgggccagaagacguacgagcgccacucccugagccacuucgugaaccuggacaaccuccgggccaacaacaccaaggggucccugcccaucaacgugaucgucuucgacggcaagagcaagugcgaggaguccagcgccaaguccgccagcguguacuacucccagcugaugugccagcccauccuccugcuggaccaggcccucgugagcgacgucggcgacagcgcggagguggccgugaagauguucgacgccuacgucaacaccuucuccagcaccuucaacgugccgauggagaagcugaagacgcugguggccaccgccgaggcggagcucgccaagaacgucucccuggacaacgugcugagcaccuucaucuccgccgcccgccagggguucguggacagcgacgucgagaccaaggacgugguggagugccucaagcugucccaccagagcgacaucgaggucacgggcgacuccugcaacaacuacaugcugaccuacaacaagguggagaacaugaccccccgggaccucggggcgugcaucgacugcagcgcccgccacaucaacgcccagguggccaagucccacaacaucgcccugaucuggaacgucaaggacuucaugagccuguccgagcagcuccggaagcagauccgcagcgcggccaagaagaacaaccugcccuucaagcugaccugcgccacgacccgccagguggugaacgucgugaccaccaagaucgcccucaagggcgggugaggacuagucccuguucccagagcccacuuuuuuuucuuuuuuugaaauaaaauagccugucuuucagaucucaaaggcucuuuucagagccaccaaaaaaaaaaaaaaaaaaaaaaaaaaaaaaaaaaaaaaaaaaaaaaaaaaaaaaaaaaaaaaaaaaaaaaaaaaaaaaaaaaaaaaaaaaaaaaaaaaaaa

SEQ ID NO: 19947 - RNA, 6113 nt, Artificial Sequence
  SARS-CoV-2__MT642365.1__non-structural protein 3 (NSP3) mRNA gc
aggagagucccgcagucggcguccagcggcucugcuuguucgugugugugucguugcaggccuuauucaagcuuaccauggcccccaccaaggugaccuucggcgacgacacggucaucgaggugcagggguacaagagcgugaacaucaccuucgagcuggacgagcgcaucgacaagguccucaacgagaagugcuccgccuacaccguggagcugggcaccgaggugaacgaguucgcgugcgucguggccgacgccgugaucaagacgcugcagccggucagcgagcuccugaccccccuggggaucgaccucgacgagugguccauggccaccuacuaccuguucgacgagagcggcgaguucaagcuggccucccacauguacugcagcuucuacccccccgacgaggacgaggaggagggggacugcgaggaggaggaguucgagccguccacccaguacgaguacggcacggaggacgacuaccagggcaagccccucgaguucggggcgaccagcgccgcccugcagcccgaggaggagcaggaggaggacuggcuggacgacgacucccagcagaccgugggccagcaggacgggagcgaggacaaccagaccacgaccauccagaccaucguggagguccagccccagcucgagauggagcugaccccgguggugcagacgaucgaggucaacuccuucagcggcuaccugaagcucaccgacaacguguacaucaagaacgccgacaucguggaggaggcgaagaaggucaagcccaccgugguggucaacgccgccaacguguaccugaagcacgggggcggcguggccggggcccugaacaaggcgaccaacaacgccaugcaggucgaguccgacgacuacaucgccacgaacggcccccucaagguggggggcagcugcguccuguccggccacaaccuggccaagcacugccuccacgugguggggcccaacgucaacaagggcgaggacauccagcugcugaagagcgccuacgagaacuucaaccagcacgaggugcuccuggcgccgcugcucuccgccgggaucuucggcgccgaccccauccacagccugcgggugugcgucgacaccgugcgcaccaacguguaccuggccgucuucgacaagaaccucuacgacaagcugguguccagcuuccuggagaugaagagcgagaagcagguggagcagaagaucgccgagauccccaaggaggaggucaagcccuucaucaccgaguccaagccgagcguggagcagcggaagcaggacgacaagaagaucaaggcgugcguggaggaggucacgaccacccucgaggagaccaaguuccugacggagaaccugcuccuguacaucgacaucaacgggaaccugcaccccgacuccgccacccucgugagcgacaucgacaucaccuuccugaagaaggacgcccccuacaucgugggcgacgucgugcaggagggcgugcugaccgccgucgugauccccacgaagaaggccgggggcaccaccgagaugcucgcgaaggcccugcgcaaggugccgaccgacaacuacaucacgaccuaccccgggcagggccugaacggguacaccgucgaggaggccaagaccgugcucaagaagugcaaguccgccuucuacauccugcccagcaucaucuccaacgagaagcaggagauccugggcaccgugagcuggaaccuccgggagaugcuggcgcacgccgaggagacgcgcaagcugaugcccgucugcguggagaccaaggccaucguguccaccauccagcggaaguacaagggcaucaagauccaggagggggucguggacuacggcgcccgcuucuacuucuacaccagcaagacgaccguggccucccugaucaacacccucaacgaccugaacgagacccuggucacgaugccgcucggguacgugacccacggccugaaccuggaggaggcggcccgguacaugcgcagccucaaggugcccgccaccgucuccgugagcucccccgacgccgugaccgccuacaacggguaccugacgagcuccagcaagacccccgaggagcacuucaucgagaccaucucccuggcgggcagcuacaaggacuggagcuacuccggccagagcacccagcucgggaucgaguuccugaagcggggcgacaaguccgucuacuacacgagcaacccgaccaccuuccaccuggacggggaggugaucaccuucgacaaccucaagacgcugcugucccuccgcgaggugcggaccaucaaggucuucaccaccguggacaacaucaaccugcacacgcagguggucgacaugagcaugaccuacggccagcaguucggccccaccuaccuggacggggccgacgugaccaagaucaagccccacaacucccacgagggcaagacguucuacgugcucccgaacgacgacacccugcgcaucgaggccuucgaguacuaccacaccaccgaccccagcuuccuggggcgguacauguccgcccucaaccacacgaagaaguggaaguacccccaggucaacggccugaccagcaucaagugggccgacaacaacugcuaccuggcgaccgcccuccugacccugcagcagaucgagcucaaguucaaccccccggcccugcaggacgccuacuaccgcgcgcgggccggggaggccgccaacuucugcgcccugauccucgcguacugcaacaagacggugggcgagcugggcgacgugcgcgagaccauguccuaccuguuccagcacgccaaccucgacagcugcaagcggguccugaacguggucugcaagaccugcgggcagcagcagaccacccugaagggcguggaggccgugauguacauggggacgcucuccuacgagcaguucaagaagggcguccagauccccugcaccugcgggaagcaggccaccaaguaccuggugcagcaggagagccccuucgugaugauguccgcccccccggcgcaguacgagcugaagcacggcaccuucacgugcgccagcgaguacaccggcaacuaccagugcgggcacuacaagcacaucaccuccaaggagacccucuacugcaucgacggcgcccugcugacgaagagcagcgaguacaaggggcccaucaccgacgucuucuacaaggagaacuccuacaccaccacgaucaagcccgugaccuacaagcucgacggcguggucugcaccgagaucgaccccaagcuggacaacuacuacaagaaggacaacagcuacuucaccgagcagccgaucgaccuggugcccaaccagcccuaccccaacgccuccuucgacaacuucaaguucgugugcgacaacaucaaguucgccgacgaccucaaccagcugacgggguacaagaagccggcgagccgcgagcugaaggucaccuucuuccccgaccucaacggcgacgugguggccaucgacuacaagcacuacacccccuccuucaagaagggcgccaagcugcugcacaagcccaucgucuggcacgugaacaacgccaccaacaaggcgacguacaagccgaacaccuggugcauccggugccucuggagcaccaagcccguggagaccuccaacagcuucgacguccugaaguccgaggacgcccaggggauggacaaccuggccugcgaggaccucaagcccgugagcgaggagguggucgagaaccccacgauccagaaggacgugcuggagugcaacgugaagaccaccgaggucgugggcgacaucauccugaagccggccaacaacucccucaagaucaccgaggagguggggcacacggaccugauggccgcguacgucgacaacagcucccugaccaucaagaagcccaacgagcucagccgcgugcugggccugaagacccucgccacccacgggcuggccgccgugaacuccguccccugggacacgaucgccaacuacgcgaagccguuccugaacaagguggugagcaccaccaccaacaucgucacgcgcugccucaaccgggugugcaccaacuacaugcccuacuucuucacccugcugcuccagcugugcaccuucacccgcuccacgaacagccggaucaaggccuccaugcccaccaccaucgccaagaacaccgugaagagcgucggcaaguucugccuggaggccagcuucaacuaccucaagucccccaacuucagcaagcugaucaacaucaucaucugguuccugcuccuguccgugugccugggcagccucaucuacuccacggccgcgcugggggugcugaugagcaaccucggcaugccguccuacugcaccggguaccgcgagggcuaccugaacagcaccaacgucaccaucgccacguacugcaccggcuccauccccugcagcgugugccuguccgggcucgacagccuggacaccuaccccucccuggagaccauccagaucacgaucagcuccuucaagugggaccucaccgccuucggccugguggccgagugguuccuggccuacauccucuucacccgguucuucuacguccuggggcuggcggccaucaugcagcucuucuucagcuacuucgccgugcacuucaucuccaacagcuggcugauguggcugaucaucaaccuggugcagauggcccccaucuccgcgaugguccgcauguacaucuucuucgccagcuucuacuacguguggaagagcuacgugcacgucguggacggcugcaacuccagcaccugcaugaugugcuacaagcggaaccgcgccacgcggguggagugcaccaccaucgucaacggggugcgccgguccuucuacgucuacgccaacggcggcaagggguucugcaagcuccacaacuggaacugcgugaacugcgacaccuucugcgccggcagcacguucaucuccgacgagguggcgcgcgaccugagccugcaguucaagcggccgaucaaccccaccgaccaguccagcuacaucgucgacuccgugaccgugaagaacgggagcauccaccucuacuucgacaaggccggccagaagaccuacgagcgccacucccugagccacuucgucaaccuggacaaccuccgggccaacaacacgaaggggucccugcccaucaacgugaucguguucgacggcaagagcaagugcgaggaguccagcgccaaguccgccagcgucuacuacucccagcugaugugccagcccauccuccugcuggaccaggcgcucgugagcgacgugggcgacagcgccgaggucgccgugaagauguucgacgccuacgugaacaccuucuccagcaccuucaacgucccgauggagaagcugaagacccugguggccacggcggaggccgagcucgccaagaacgugucccuggacaacguccugagcaccuucaucuccgccgcgcgccagggguucguggacagcgacguggagaccaaggacgucguggagugccucaagcugucccaccagagcgacaucgaggugaccggcgacuccugcaacaacuacaugcugacguacaacaaggucgagaacaugaccccccgggaccucggggccugcaucgacugcagcgcccgccacaucaacgcccagguggccaagucccacaacaucgcgcugaucuggaacgugaaggacuucaugagccuguccgagcagcuccggaagcagauccgcagcgccgccaagaagaacaaccugcccuucaagcugaccugcgccaccacgcgccaggucgugaacguggucaccaccaagaucgcccucaagggcgggugaggacuagucccuguucccagagcccacuuuuuuuucuuuuuuugaaauaaaauagccugucuuucagaucucaaaggcucuuuucagagccaccaaaaaaaaaaaaaaaaaaaaaaaaaaaaaaaaaaaaaaaaaaaaaaaaaaaaaaaaaaaaaaaaaaaaaaaaaaaaaaaaaaaaaaaaaaaaaaaaaaaaa

SEQ ID NO: 19948 - RNA, 6113 nt, Artificial Sequence
  SARS-CoV-2__MT642428.1__non-structural protein 3 (NSP3) mRNA gc
aggagagucccgcagucggcguccagcggcucugcuuguucgugugugugucguugcaggccuuauucaagcuuaccauggcccccaccaaggugaccuucggcgacgacacggucaucgaggugcagggguacaagagcgugaacaucaccuucgagcuggacgagcgcaucgacaagguccucaacgagaagugcuccgccuacaccguggagcugggcaccgaggugaacgaguucgcgugcgucguggccgacgccgugaucaagacgcugcagccggucagcgagcuccugaccccccuggggaucgaccucgacgagugguccauggccaccuacuaccuguucgacgagagcggcgaguucaagcuggccucccacauguacugcagcuucuacccccccgacgaggacgaggaggagggggacugcgaggaggaggaguucgagccguccacccaguacgaguacggcacggaggacgacuaccagggcaagccccucgaguucggggcgaccagcgccgcccugcagcccgaggaggagcaggaggaggacuggcuggacgacgacucccagcagaccgugggccagcaggacgggagcgaggacaaccagaccacgaccauccagaccaucguggagguccagccccagcucgagauggagcugaccccgguggugcagacgaucgaggucaacuccuucagcggcuaccugaagcucaccgacaacguguacaucaagaacgccgacaucguggaggaggcgaagaaggucaagcccaccgugguggucaacgccgccaacguguaccugaagcacgggggcggcguggccggggcccugaacaaggcgaccaacaacgccaugcaggucgaguccgacgacuacaucgccacgaacggcccccucaagguggggggcagcugcguccuguccggccacaaccuggccaagcacugccuccacgugguggggcccaacgucaacaagggcgaggacauccagcugcugaagagcgccuacgagaacuucaaccagcacgaggugcuccuggcgccgcugcucuccgccgggaucuucggcgccgaccccauccacagccugcgggugugcgucgacaccgugcgcaccaacguguaccuggccgucuucgacaagaaccucuacgacaagcugguguccagcuuccuggagaugaagagcgagaagcagguggagcagaagaucgccgagauccccaaggaggaggucaagcccuucaucaccgaguccaagccgagcguggagcagcggaagcaggacgacaagaagaucaaggcgugcguggaggaggucacgaccacccucgaggagaccaaguuccugacggagaaccugcuccuguacaucgacaucaacgggaaccugcaccccgacuccgccacccucgugagcgacaucgacaucaccuuccugaagaaggacgcccccuacaucgugggcgacgucgugcaggagggcgugcugaccgccgucgugauccccacgaagaaggccgggggcaccaccgagaugcucgcgaaggcccugcgcaaggugccgaccgacaacuacaucacgaccuaccccgggcagggccugaacggguacaccgucgaggaggccaagaccgugcucaagaagugcaaguccgccuucuacauccugcccagcaucaucuccaacgagaagcaggagauccugggcaccgugagcuggaaccuccgggagaugcuggcgcacgccgaggagacgcgcaagcugaugcccgucugcguggagaccaaggccaucguguccaccauccagcggaaguacaagggcaucaagauccaggagggggucguggacuacggcgcccgcuucuacuucuacaccagcaagacgaccguggccucccugaucaacacccucaacgaccugaacgagacccuggucacgaugccgcucggguacgugacccacggccugaaccuggaggaggcggcccgguacaugcgcagccucaaggugcccgccaccgucuccgugagcucccccgacgccgugaccgccuacaacggguaccugacgagcuccagcaagacccccgaggagcacuucaucgagaccaucucccuggcgggcagcuacaaggacuggagcuacuccggccagagcacccagcucgggaucgaguuccugaagcggggcgacaaguccgucuacuacacgagcaacccgaccaccuuccaccuggacggggaggugaucaccuucgacaaccucaagacgcugcugucccuccgcgaggugcggaccaucaaggucuucaccaccguggacaacaucaaccugcacacgcagguggucgacaugagcaugaccuacggccagcaguucggccccaccuaccuggacggggccgacgugaccaagaucaagccccacaacucccacgagggcaagacguucuacgugcucccgaacgacgacacccugcgcgucgaggccuucgaguacuaccacaccaccgaccccagcuuccuggggcgguacauguccgcccucaaccacacgaagaaguggaaguacccccaggugaacggccugaccagcaucaagugggccgacaacaacugcuaccuggcgaccgcccuccugacccugcagcagaucgagcucaaguucaaccccccggcccugcaggacgccuacuaccgcgcgcgggccggggaggccgccaacuucugcgcccugauccucgcguacugcaacaagacggugggcgagcugggcgacguccgcgagaccauguccuaccuguuccagcacgccaaccucgacagcugcaagcgggugcugaacgucgugugcaagaccugcgggcagcagcagaccacccugaagggcguggaggccgucauguacauggggacgcucuccuacgagcaguucaagaagggcgugcagauccccugcaccugcgggaagcaggccaccaaguaccuggugcagcaggagagccccuucgucaugauguccgcccccccggcgcaguacgagcugaagcacggcaccuucacgugcgccagcgaguacaccggcaacuaccagugcgggcacuacaagcacaucaccuccaaggagacccucuacugcaucgacggcgcccugcugacgaagagcagcgaguacaaggggcccaucaccgacguguucuacaaggagaacuccuacaccaccacgaucaagcccgugaccuacaagcucgacggcgucgugugcaccgagaucgaccccaagcuggacaacuacuacaagaaggacaacagcuacuucaccgagcagccgaucgaccuggugcccaaccagcccuaccccaacgccuccuucgacaacuucaaguucgucugcgacaacaucaaguucgccgacgaccucaaccagcugacgggguacaagaagccggcgagccgcgagcugaaggugaccuucuuccccgaccucaacggcgacguggucgccaucgacuacaagcacuacacccccuccuucaagaagggcgccaagcugcugcacaagcccaucguguggcacgugaacaacgccaccaacaaggcgacguacaagccgaacaucuggugcauccggugccucuggagcaccaagcccgucgagaccuccaacagcuucgacgugcugaaguccgaggacgcccaggggauggacaaccuggccugcgaggaccucaagcccgugagcgaggaggucguggagaaccccaccauccagaaggacgugcuggagugcaacgucaagacgaccgagguggugggcgacaucauccugaagccggccaacaacucccucaagaucaccgaggaggucgggcacaccgaccugauggccgcguacguggacaacagcucccugacgaucaagaagcccaacgagcucagccgcgugcugggccugaagacccucgccacccacgggcuggccgccgucaacuccgugcccugggacaccaucgccaacuacgcgaagccguuccugaacaagguggucagcacgaccaccaacaucgugacccgcugccucaaccgggugugcacgaacuacaugcccuacuucuucacccugcugcuccagcugugcaccuucacccgcuccaccaacagccggaucaaggccuccaugcccacgaccaucgccaagaacaccgucaagagcgugggcaaguucugccuggaggccagcuucaacuaccucaagucccccaacuucagcaagcugaucaacaucaucaucugguuccugcuccuguccgugugccugggcagccucaucuacuccaccgccgcgcuggggguccugaugagcaaccucggcaugccguccuacugcacgggguaccgcgagggcuaccugaacagcaccaacgugaccaucgccaccuacugcacgggcuccauccccugcagcgugugccuguccgggcucgacagccuggacaccuaccccucccuggagaccauccagaucaccaucagcuccuucaagugggaccucacggccuucggccuggucgccgagugguuccuggccuacauccucuucacccgguucuucuacgugcuggggcuggcggccaucaugcagcucuucuucagcuacuucgccgugcacuucaucuccaacagcuggcugauguggcugaucaucaaccugguccagauggcccccaucuccgcgauggugcgcauguacaucuucuucgccagcuucuacuacguguggaagagcuacguccacgugguggacggcugcaacuccagcaccugcaugaugugcuacaagcggaaccgcgccacccgggucgagugcacgaccaucgugaacgggguccgccgguccuucuacguguacgccaacggcggcaagggguucugcaagcuccacaacuggaacugcgugaacugcgacaccuucugcgccggcagcaccuucaucuccgacgaggucgcgcgcgaccugagccugcaguucaagcggccgaucaaccccacggaccaguccagcuacaucguggacuccgugaccgucaagaacgggagcauccaccucuacuucgacaaggccggccagaagaccuacgagcgccacucccugagccacuucgugaaccuggacaaccuccgggccaacaacaccaaggggucccugcccaucaacgugaucgucuucgacggcaagagcaagugcgaggaguccagcgccaaguccgccagcguguacuacucccagcugaugugccagcccauccuccugcuggaccaggcgcucgugagcgacgucggcgacagcgccgagguggccgugaagauguucgacgccuacgucaacacguucuccagcaccuucaacgugccgauggagaagcugaagacccugguggccaccgcggaggccgagcucgccaagaacgucucccuggacaacgugcugagcacguucaucuccgccgcgcgccagggguucguggacagcgacgucgagaucaaggacgugguggagugccucaagcugucccaccagagcgacaucgaggucaccggcgacuccugcaacaacuacaugcugaccuacaacaagguggagaacaugaccccccgggaccucggggccugcaucgacugcagcgcccgccacaucaacgcccagguggccaagucccacaacaucgcgcugaucuggaacgucaaggacuucaugagccuguccgagcagcuccggaagcagauccgcagcgccgccaagaagaacaaccugcccuucaagcugacgugcgccaccacccgccagguggugaacgucgugaccacgaagaucgcccucaagggcgggugaggacuagucccuguucccagagcccacuuuuuuuucuuuuuuugaaauaaaauagccugucuuucagaucucaaaggcucuuuucagagccaccaaaaaaaaaaaaaaaaaaaaaaaaaaaaaaaaaaaaaaaaaaaaaaaaaaaaaaaaaaaaaaaaaaaaaaaaaaaaaaaaaaaaaaaaaaaaaaaaaaaaa

SEQ ID NO: 19949 - RNA, 6113 nt, Artificial Sequence
  SARS-CoV-2__MT635408.1__non-structural protein 3 (NSP3) mRNA gc
aggagagucccgcagucggcguccagcggcucugcuuguucgugugugugucguugcaggccuuauucaagcuuaccauggcccccaccaaggugaccuucggcgacgacacggucaucgaggugcagggguacaagagcgugaacaucaccuucgagcuggacgagcgcaucgacaagguccucaacgagaagugcuccgccuacaccguggagcugggcaccgaggugaacgaguucgcgugcgucguggccgacgccgugaucaagacgcugcagccggucagcgagcuccugaccccccuggggaucgaccucgacgagugguccauggccaccuacuaccuguucgacgagagcggcgaguucaagcuggccucccacauguacugcagcuucuacccccccgacgaggacgaggaggagggggacugcgaggaggaggaguucgagccguccacccaguacgaguacggcacggaggacgacuaccagggcaagccccucgaguucggggcgaccagcgccgcccugcagcccgaggaggagcaggaggaggacuggcuggacgacgacucccagcagaccgugggccagcaggacgggagcgaggacaaccagaccacgaccauccagaccaucguggagguccagccccagcucgagauggagcugaccccgguggugcagacgaucgaggucaacuccuucagcggcuaccugaagcucaccgacaacguguacaucaagaacgccgacaucguggaggaggcgaagaaggucaagcccaccgugguggucaacgccgccaacguguaccugaagcacgggggcggcguggccggggcccugaacaaggcgaccaacaacgccaugcaggucgaguccgacgacuacaucgccacgaacggcccccucaagguggggggcagcugcguccuguccggccacaaccuggccaagcacugccuccacgugguggggcccaacgucaacaagggcgacgacauccagcugcugaagagcgccuacgagaacuucaaccagcacgaggugcuccuggcgccgcugcucuccgccgggaucuucggcgccgaccccauccacagccugcgggugugcgucgacaccgugcgcaccaacguguaccuggccgucuucgacaagaaccucuacgacaagcugguguccagcuuccuggagaugaagagcgagaagcagguggagcagaagaucgccgagauccccaaggaggaggucaagcccuucaucaccgaguccaagccgagcguggagcagcggaagcaggacgacaagaagaucaaggcgugcguggaggaggucacgaccacccucgaggagaccaaguuccugacggagaaccugcuccuguacaucgacaucaacgggaaccugcaccccgacuccgccacccucgugagcgacaucgacaucaccuuccugaagaaggacgcccccuacaucgugggcgacgucgugcaggagggcgugcugaccgccgucgugauccccacgaagaaggccgggggcaccaccgagaugcucgcgaaggcccugcgcaaggugccgaccgacaacuacaucacgaccuaccccgggcagggccugaacggguacaccgucgaggaggccaagaccgugcucaagaagugcaaguccgccuucuacauccugcccagcaucaucuccaacgagaagcaggagauccugggcaccgugagcuggaaccuccgggagaugcuggcgcacgccgaggagacgcgcaagcugaugcccgucugcguggagaccaaggccaucguguccaccauccagcggaaguacaagggcaucaagauccaggagggggucguggacuacggcgcccgcuucuacuucuacaccagcaagacgaccguggccucccugaucaacacccucaacgaccugaacgagacccuggucacgaugccgcucggguacgugacccacggccugaaccuggaggaggcggcccgguacaugcgcagccucaaggugcccgccaccgucuccgugagcucccccgacgccgugaccgccuacaacggguaccugacgagcuccagcaagacccccgaggagcacuucaucgagaccaucucccuggcgggcagcuacaaggacuggagcuacuccggccagagcacccagcucgggaucgaguuccugaagcggggcgacaaguccgucuacuacacgagcaacccgaccaccuuccaccuggacggggaggugaucaccuucgacaaccucaagacgcugcugucccuccgcgaggugcggaccaucaaggucuucaccaccguggacaacaucaaccugcacacgcagguggucgacaugagcaugaccuacggccagcaguucggccccaccuaccuggacggggccgacgugaccaagaucaagccccacaacucccacgagggcaagacguucuacgugcucccgaacgacgacacccugcgcgucgaggccuucgaguacuaccacaccaccgaccccagcuuccuggggcgguacauguccgcccucaaccacacgaagaaguggaaguacccccaggugaacggccugaccagcaucaagugggccgacaacaacugcuaccuggcgaccgcccuccugacccugcagcagaucgagcucaaguucaaccccccggcccugcaggacgccuacuaccgcgcgcgggccggggaggccgccaacuucugcgcccugauccucgcguacugcaacaagacggugggcgagcugggcgacguccgcgagaccauguccuaccuguuccagcacgccaaccucgacagcugcaagcgggugcugaacgucgugugcaagaccugcgggcagcagcagaccacccugaagggcguggaggccgucauguacauggggacgcucuccuacgagcaguucaagaagggcgugcagauccccugcaccugcgggaagcaggccaccaaguaccuggugcagcaggagagccccuucgucaugauguccgcccccccggcgcaguacgagcugaagcacggcaccuucacgugcgccagcgaguacaccggcaacuaccagugcgggcacuacaagcacaucaccuccaaggagacccucuacugcaucgacggcgcccugcugacgaagagcagcgaguacaaggggcccaucaccgacguguucuacaaggagaacuccuacaccaccacgaucaagcccgugaccuacaagcucgacggcgucgugugcaccgagaucgaccccaagcuggacaacuacuacaagaaggacaacagcuacuucaccgagcagccgaucgaccuggugcccaaccagcccuaccccaacgccuccuucgacaacuucaaguucgucugcgacaacaucaaguucgccgacgaccucaaccagcugacgggguacaagaagccggcgagccgcgagcugaaggugaccuucuuccccgaccucaacggcgacguggucgccaucgacuacaagcacuacacccccuccuucaagaagggcgccaagcugcugcacaagcccaucguguggcacgugaacaacgccaccaacaaggcgacguacaagccgaacaccuggugcauccggugccucuggagcaccaagcccgucgagaccuccaacagcuucgacgugcugaaguccgaggacgcccaggggauggacaaccuggccugcgaggaccucaagcccgugagcgaggaggucguggagaaccccacgauccagaaggacgugcuggagugcaacgucaagaccaccgagguggugggcgacaucauccugaagccggccaacaacucccucaagaucaccgaggaggucgggcacacggaccugauggccgcguacguggacaacagcucccugaccaucaagaagcccaacgagcucagccgcgugcugggccugaagacccucgccacccacgggcuggccgccgucaacuccgugcccugggacacgaucgccaacuacgcgaagccguuccugaacaagguggucagcaccaccaccaacaucgugacgcgcugccucaaccgggugugcaccaacuacaugcccuacuucuucacccugcugcuccagcugugcaccuucacccgcuccacgaacagccggaucaaggccuccaugcccaccaccaucgccaagaacaccgucaagagcgugggcaaguucugccuggaggccagcuucaacuaccucaagucccccaacuucagcaagcugaucaacaucaucaucugguuccugcuccuguccgugugccugggcagccucaucuacuccacggccgcgcuggggguccugaugagcaaccucggcaugccguccuacugcaccggguaccgcgagggcuaccugaacagcaccaacgugaccaucgccacguacugcaccggcuccauccccugcagcgugugccuguccgggcucgacagccuggacaccuaccccucccuggagaccauccagaucacgaucagcuccuucaagugggaccucaccgccuucggccuggucgccgagugguuccuggccuacauccucuucacccgguucuucuacgugcuggggcuggcggccaucaugcagcucuucuucagcuacuucgccgugcacuucaucuccaacagcuggcugauguggcugaucaucaaccugguccagauggcccccaucuccgcgauggugcgcauguacaucuucuucgccagcuucuacuacguguggaagagcuacguccacgugguggacggcugcaacuccagcaccugcaugaugugcuacaagcggaaccgcgccacgcgggucgagugcaccaccaucgugaacgggguccgccgguccuucuacguguacgccaacggcggcaagggguucugcaagcuccacaacuggaacugcgugaacugcgacaccuucugcgccggcagcacguucaucuccgacgaggucgcgcgcgaccugagccugcaguucaagcggccgaucaaccccaccgaccaguccagcuacaucguggacuccgugaccgucaagaacgggagcauccaccucuacuucgacaaggccggccagaagaccuacgagcgccacucccugagccacuucgugaaccuggacaaccuccgggccaacaacacgaaggggucccugcccaucaacgugaucgucuucgacggcaagagcaagugcgaggaguccagcgccaaguccgccagcguguacuacucccagcugaugugccagcccauccuccugcuggaccaggcgcucgugagcgacgucggcgacagcgccgagguggccgugaagauguucgacgccuacgucaacaccuucuccagcaccuucaacgugccgauggagaagcugaagacccugguggccacggcggaggccgagcucgccaagaacgucucccuggacaacgugcugagcaccuucaucuccgccgcgcgccagggguucguggacagcgacgucgagaccaaggacgugguggagugccucaagcugucccaccagagcgacaucgaggucaccggcgacuccugcaacaacuacaugcugacguacaacaagguggagaacaugaccccccgggaccucggggccugcaucgacugcagcgcccgccacaucaacgcccagguggccaagucccacaacaucgcgcugaucuggaacgucaaggacuucaugagccuguccgagcagcuccggaagcagauccgcagcgccgccaagaagaacaaccugcccuucaagcugaccugcgccaccacgcgccagguggugaacgucgugaccaccaagaucgcccucaagggcgggugaggacuagucccuguucccagagcccacuuuuuuuucuuuuuuugaaauaaaauagccugucuuucagaucucaaaggcucuuuucagagccaccaaaaaaaaaaaaaaaaaaaaaaaaaaaaaaaaaaaaaaaaaaaaaaaaaaaaaaaaaaaaaaaaaaaaaaaaaaaaaaaaaaaaaaaaaaaaaaaaaaaaa

SEQ ID NO: 19950 - RNA, 6113 nt, Artificial Sequence
  SARS-CoV-2__MT635648.1__non-structural protein 3 (NSP3) mRNA gc
aggagagucccgcagucggcguccagcggcucugcuuguucgugugugugucguugcaggccuuauucaagcuuaccauggcccccaccaaggugaccuucggcgacgacacggucaucgaggugcagggguacaagagcgugaacaucaccuucgagcuggacgagcgcaucgacaagguccucaacgagaagugcuccgccuacaccguggagcugggcaccgaggugaacgaguucgcgugcgucguggccgacgccgugaucaagacgcugcagccggucagcgagcuccugaccccccuggggaucgaccucgacgagugguccauggccaccuacuaccuguucgacgagagcggcgaguucaagcuggccucccacauguacugcagcuucuacccccccgacgaggacgaggaggagggggacugcgaggaggaggaguucgagccguccacccaguacgaguacggcacggaggacgacuaccagggcaagccccucgaguucggggcgaccagcgccgcccugcagcccgaggaggagcaggaggaggacuggcuggacgacgacucccagcagaccgugggccagcaggacgggagcgaggacaaccagaccacgaccauccagaccaucguggagguccagccccagcucgagauggagcugaccccgguggugcagacgaucgaggucaacuccuucagcggcuaccugaagcucaccgacaacguguacaucaagaacgccgacaucguggaggaggcgaagaaggucaagcccaccgugguggucaacgccgccaacguguaccugaagcacgggggcggcguggccggggcccugaacaaggcgaccaacaacgccaugcaggucgaguccgacgacuacaucgccacgaacggcccccucaagguggggggcagcugcguccuguccggccacaaccuggccaagcacugccuccacgugguggggcccaacgucaacaagggcgaggacauccagcugcugaagagcgccuacgagaacuucaaccagcacgaggugcuccuggcgccgcugcucuccgccgggaucuucggcgccgaccccauccacagccugcgggugugcgucgacaccgugcgcaccaacguguaccuggccgucuucgacaagaaccucuacgacaagcugguguccagcuuccuggagaugaagagcgagaagcagguggagcagaagaucgccgagauccccaaggaggaggucaagcccuucaucaccgaguccaagccgagcguggagcagcggaagcaggacgacaagaagaucaaggcgugcguggaggaggucacgaccacccucgaggagaccaaguuccugacggagaaccugcuccuguacaucgacaucaacgggaaccugcaccccgacuccgccacccucgugagcgacaucgacaucaccuuccugaagaaggacgcccccuacaucgugggcgacgucgugcaggagggcgugcugaccgccgucgugauccccacgaagaaggccgggggcaccaccgagaugcucgcgaaggcccugcgcaaggugccgaaggacaacuacaucaccacguaccccgggcagggccugaacggguacaccgucgaggaggccaagaccgugcucaagaagugcaaguccgccuucuacauccugcccagcaucaucuccaacgagaagcaggagauccugggcaccgugagcuggaaccuccgggagaugcuggcgcacgccgaggagacccgcaagcugaugcccgucugcguggagacgaaggccaucguguccaccauccagcggaaguacaagggcaucaagauccaggagggggucguggacuacggcgcccgcuucuacuucuacaccagcaagaccacgguggccucccugaucaacacccucaacgaccugaacgagacccuggucaccaugccgcucggguacgugacgcacggccugaaccuggaggaggcggcccgguacaugcgcagccucaaggugcccgccaccgucuccgugagcucccccgacgccgugaccgccuacaacggguaccugaccagcuccagcaagacgcccgaggagcacuucaucgagaccaucucccuggcgggcagcuacaaggacuggagcuacuccggccagagcacccagcucgggaucgaguuccugaagcggggcgacaaguccgucuacuacaccagcaacccgacgaccuuccaccuggacggggaggugaucaccuucgacaaccucaagacccugcugucccuccgcgaggugcggacgaucaaggucuucaccaccguggacaacaucaaccugcacacccagguggucgacaugagcaugacguacggccagcaguucggccccaccuaccuggacggggccgacgugaccaagaucaagccccacaacucccacgagggcaagaccuucuacgugcucccgaacgacgacacgcugcgcgucgaggccuucgaguacuaccacaccaccgaccccagcuuccuggggcgguacauguccgcccucaaccacaccaagaaguggaaguacccccaggugaacggccugacgagcaucaagugggccgacaacaacugcuaccuggcgaccgcccuccugacccugcagcagaucgagcucaaguucaaccccccggcccugcaggacgccuacuaccgcgcgcgggccggggaggccgccaacuucugcgcccugauccucgcguacugcaacaagaccgugggcgagcugggcgacguccgcgagacgauguccuaccuguuccagcacgccaaccucgacagcugcaagcgggugcugaacgucgugugcaagaccugcgggcagcagcagaccacccugaagggcguggaggccgucauguacauggggacccucuccuacgagcaguucaagaagggcgugcagauccccugcacgugcgggaagcaggccaccaaguaccuggugcagcaggagagccccuucgucaugauguccgcccccccggcgcaguacgagcugaagcacggcaccuucaccugcgccagcgaguacacgggcaacuaccagugcgggcacuacaagcacaucaccuccaaggagacccucuacugcaucgacggcgcccugcugaccaagagcagcgaguacaaggggcccaucacggacguguucuacaaggagaacuccuacaccaccaccaucaagcccgugacguacaagcucgacggcgucgugugcaccgagaucgaccccaagcuggacaacuacuacaagaaggacaacagcuacuucaccgagcagccgaucgaccuggugcccaaccagcccuaccccaacgccuccuucgacaacuucaaguucgucugcgacaacaucaaguucgccgacgaccucaaccagcugaccggguacaagaagccggcgagccgcgagcugaaggugacguucuuccccgaccucaacggcgacguggucgccaucgacuacaagcacuacacccccuccuucaagaagggcgccaagcugcugcacaagcccaucguguggcacgugaacaacgccaccaacaaggcgaccuacaagccgaacacguggugcauccggugccucuggagcaccaagcccgucgagaccuccaacagcuucgacgugcugaaguccgaggacgcccaggggauggacaaccuggccugcgaggaccucaagcccgugagcgaggaggucguggagaaccccaccauccagaaggacgugcuggagugcaacgucaagacgaccgagguggugggcgacaucauccugaagccggccaacaacucccucaagaucaccgaggaggucgggcacaccgaccugauggccgcguacguggacaacagcucccugacgaucaagaagcccaacgagcucagccgcgugcugggccugaagacccucgccacccacgggcuggccgccgucaacuccgugcccugggacaccaucgccaacuacgcgaagccguuccugaacaagguggucagcacgaccaccaacaucgugacccgcugccucaaccgggugugcacgaacuacaugcccuacuucuucacccugcugcuccagcugugcaccuucacccgcuccaccaacagccggaucaaggccuccaugcccacgaccaucgccaagaacaccgucaagagcgugggcaaguucugccuggaggccagcuucaacuaccucaagucccccaacuucagcaagcugaucaacaucaucaucugguuccugcuccuguccgugugccugggcagccucaucuacuccaccgccgcgcuggggguccugaugagcaaccucggcaugccguccuacugcacgggguaccgcgagggcuaccugaacagcaccaacgugaccaucgccaccuacugcacgggcuccauccccugcagcgugugccuguccgggcucgacagccuggacaccuaccccucccuggagaccauccagaucaccaucagcuccuucaagugggaccucacggccuucggccuggucgccgagugguuccuggccuacauccucuucacccgguucuucuacgugcuggggcuggcggccaucaugcagcucuucuucagcuacuucgccgugcacuucaucuccaacagcuggcugauguggcugaucaucaaccugguccagauggcccccaucuccgcgauggugcgcauguacaucuucuucgccagcuucuacuacguguggaagagcuacguccacgugguggacggcugcaacuccagcaccugcaugaugugcuacaagcggaaccgcgccacccgggucgagugcacgaccaucgugaacgggguccgccgguccuucuacguguacgccaacggcggcaagggguucugcaagcuccacaacuggaacugcgugaacugcgacaccuucugcgccggcagcaccuucaucuccgacgaggucgcgcgcgaccugagccugcaguucaagcggccgaucaaccccacggaccaguccagcuacaucguggacuccgugaccgucaagaacgggagcauccaccucuacuucgacaaggccggccagaagaccuacgagcgccacucccugagccacuucgugaaccuggacaaccuccgggccaacaacaccaaggggucccugcccaucaacgugaucgucuucgacggcaagagcaagugcgaggaguccagcgccaaguccgccagcguguacuacucccagcugaugugccagcccauccuccugcuggaccaggcgcucgugagcgacgucggcgacagcgccgagguggccgugaagauguucgacgccuacgucaacacguucuccagcaccuucaacgugccgauggagaagcugaagacccugguggccaccgcggaggccgagcucgccaagaacgucucccuggacaacgugcugagcacguucaucuccgccgcgcgccagggguucguggacagcgacgucgagaccaaggacgugguggagugccucaagcugucccaccagagcgacaucgaggucaccggcgacuccugcaacaacuacaugcugaccuacaacaagguggagaacaugacgccccgggaccucggggccugcaucgacugcagcgcccgccacaucaacgcccagguggccaagucccacaacaucgcgcugaucuggaacgucaaggacuucaugagccuguccgagcagcuccggaagcagauccgcagcgccgccaagaagaacaaccugcccuucaagcugaccugcgccaccacccgccagguggugaacgucgugacgaccaagaucgcccucaagggcgggugaggacuagucccuguucccagagcccacuuuuuuuucuuuuuuugaaauaaaauagccugucuuucagaucucaaaggcucuuuucagagccaccaaaaaaaaaaaaaaaaaaaaaaaaaaaaaaaaaaaaaaaaaaaaaaaaaaaaaaaaaaaaaaaaaaaaaaaaaaaaaaaaaaaaaaaaaaaaaaaaaaaaa

SEQ ID NO: 19951 - RNA, 6113 nt, Artificial Sequence
  SARS-CoV-2__MT627263.1__non-structural protein 3 (NSP3) mRNA gc
aggagagucccgcagucggcguccagcggcucugcuuguucgugugugugucguugcaggccuuauucaagcuuaccauggcccccaccaaggugaccuucggcgacgacacggucaucgaggugcagggguacaagagcgugaacaucaccuucgagcuggacgagcgcaucgacaagguccucaacgagaagugcuccgccuacaccguggagcugggcaccgaggugaacgaguucgcgugcgucguggccgacgccgugaucaagacgcugcagccggucagcgagcuccugaccccccuggggaucgaccucgacgagugguccauggccaccuacuaccuguucgacgagagcggcgaguucaagcuggccucccacauguacugcagcuucuacccccccgacgaggacgaggaggagggggacugcgaggaggaggaguucgagccguccacccaguacgaguacggcacggaggacgacuaccagggcaagccccucgaguucggggcgaccagcgccgcccugcagcccgaggaggagcaggaggaggacuggcuggacgacgacucccagcagaccgugggccagcaggacgggagcgaggacaaccagaccacgaccauccagaccaucguggagguccagccccagcucgagauggagcugaccccgguggugcagacgaucgaggucaacuccuucagcggcuaccugaagcucaccgacaacguguacaucaagaacgccgacaucguggaggaggcgaagaaggucaagcccaccgugguggucaacgccgccaacguguaccugaagcacgggggcggcguggccggggcccugaacaaggcgaccaacaacgccaugcaggucgaguccgacgacuacaucgccacgaacggcccccucaagguggggggcagcugcguccuguccggccacaaccuggccaagcacugccuccacgugguggggcccaacgucaacaagggcgaggacauccagcugcugaagagcgccuacgagaacuucaaccagcacgaggugcuccuggcgccgcugcucuccgccgggaucuucggcgccgaccccauccacagccugcgggugugcgucgacaccgugcgcaccaacguguaccuggccgucuucgacaagaaccucuacgacaagcugguguccagcuuccuggagaugaagagcgagaagcagguggagcagaagaucgccgagauccccaaggaggaggucaagcccuucaucaccgaguccaagccgagcguggagcagcggaagcaggacgacaagaagaucaaggcgugcguggaggaggucacgaccacccucgaggagaccaaguuccugacggagaaccugcuccuguacaucgacaucaacgggaaccugcaccccgacuccgccacccucgugagcgacaucgacaucaccuuccugaagaaggacgcccccuacaucgugggcgacgucgugcaggagggcgugcugaccgccgucgugauccccacgaagaaggccgggggcaccaccgagaugcucgcgaaggcccugcgcaaggugccgaccgacaacuacaucacgaccuaccccgggcagggccugaacggguacaccgucgaggaggccaagaccgugcucaagaagugcaaguccgccuucuacauccugcccagcaucaucuccaacgagaagcaggagauccugggcaccgugagcuggaaccuccgggagaugcuggcgcacgccgaggagacgcgcaagcugaugcccgucugcguggagaccaaggccaucguguccaccauccagcggaaguacaagggcauccgcauccaggagggggucguggacuacggcgcccgguucuacuucuacaccagcaagacgaccguggccucccugaucaacacccucaacgaccugaacgagacccuggucacgaugccgcucggguacgugacccacggccugaaccuggaggaggcggcccgcuacaugcggagccucaaggugcccgccaccgucuccgugagcucccccgacgccgugaccgccuacaacggguaccugacgagcuccagcaagacccccgaggagcacuucaucgagaccaucucccuggcgggcagcuacaaggacuggagcuacuccggccagagcacccagcucgggaucgaguuccugaagcgcggcgacaaguccgucuacuacacgagcaacccgaccaccuuccaccuggacggggaggugaucaccuucgacaaccucaagacgcugcugucccuccgggaggugcgcaccaucaaggucuucaccaccguggacaacaucaaccugcacacgcagguggucgacaugagcaugaccuacggccagcaguucggccccaccuaccuggacggggccgacgugaccaagaucaagccccacaacucccacgagggcaagacguucuacgugcucccgaacgacgacacccugcgggucgaggccuucgaguacuaccacaccaccgaccccagcuuccuggggcgcuacauguccgcccucaaccacacgaagaaguggaaguacccccaggugaacggccugaccagcaucaagugggccgacaacaacugcuaccuggcgaccgcccuccugacccugcagcagaucgagcucaaguucaaccccccggcccugcaggacgccuacuaccgggcgcgcgccggggaggccgccaacuucugcgcccugauccucgcguacugcaacaagacggugggcgagcugggcgacguccgggagaccauguccuaccuguuccagcacgccaaccucgacagcugcaagcgcgugcugaacgucgugugcaagaccugcgggcagcagcagaccacccugaagggcguggaggccgucauguacauggggacgcucuccuacgagcaguucaagaagggcgugcagauccccugcaccugcgggaagcaggccaccaaguaccuggugcagcaggagagccccuucgucaugauguccgcccccccggcgcaguacgagcugaagcacggcaccuucacgugcgccagcgaguacaccggcaacuaccagugcgggcacuacaagcacaucaccuccaaggagacccucuacugcaucgacggcgcccugcugacgaagagcagcgaguacaaggggcccaucaccgacguguucuacaaggagaacuccuacaccaccacgaucaagcccgugaccuacaagcucgacggcgucgugugcaccgagaucgaccccaagcuggacaacuacuacaagaaggacaacagcuacuucaccgagcagccgaucgaccuggugcccaaccagcccuaccccaacgccuccuucgacaacuucaaguucgucugcgacaacaucaaguucgccgacgaccucaaccagcugacgggguacaagaagccggcgagccgggagcugaaggugaccuucuuccccgaccucaacggcgacguggucgccaucgacuacaagcacuacacccccuccuucaagaagggcgccaagcugcugcacaagcccaucguguggcacgugaacaacgccaccaacaaggcgacguacaagccgaacaccuggugcauccgcugccucuggagcaccaagcccgucgagaccuccaacagcuucgacgugcugaaguccgaggacgcccaggggauggacaaccuggccugcgaggaccucaagcccgugagcgaggaggucguggagaaccccacgauccagaaggacgugcuggagugcaacgucaagaccaccgagguggugggcgacaucauccugaagccggccaacaacucccucaagaucaccgaggaggucgggcacacggaccugauggccgcguacguggacaacagcucccugaccaucaagaagcccaacgagcucagccgcgugcugggccugaagacccucgccacccacgggcuggccgccgucaacuccgugcccugggacacgaucgccaacuacgcgaagccguuccugaacaagguggucagcaccaccaccaacaucgugacgcggugccucaaccgcgugugcaccaacuacaugcccuacuucuucacccugcugcuccagcugugcaccuucacccgguccacgaacagccgcaucaaggccuccaugcccaccaccaucgccaagaacaccgucaagagcgugggcaaguucugccuggaggccagcuucaacuaccucaagucccccaacuucagcaagcugaucaacaucaucaucugguuccugcuccuguccgugugccugggcagccucaucuacuccacggccgcgcuggggguccugaugagcaaccucggcaugccguccuacugcaccggguaccgggagggcuaccugaacagcaccaacgugaccaucgccacguacugcaccggcuccauccccugcagcgugugccuguccgggcucgacagccuggacaccuaccccucccuggagaccauccagaucacgaucagcuccuucaagugggaccucaccgccuucggccuggucgccgagugguuccuggccuacauccucuucacccgcuucuucuacgugcuggggcuggcggccaucaugcagcucuucuucagcuacuucgccgugcacuucaucuccaacagcuggcugauguggcugaucaucaaccugguccagauggcccccaucuccgcgauggugcggauguacaucuucuucgccagcuucuacuacguguggaagagcuacguccacgugguggacggcugcaacuccagcaccugcaugaugugcuacaagcgcaaccgggccacgcgcgucgagugcaccaccaucgugaacgggguccggcgcuccuucuacguguacgccaacggcggcaagggguucugcaagcuccacaacuggaacugcgugaacugcgacaccuucugcgccggcagcacguucaucuccgacgaggucgcgcgggaccugagccugcaguucaagcgcccgaucaaccccaccgaccaguccagcuacaucguggacuccgugaccgucaagaacgggagcauccaccucuacuucgacaaggccggccagaagaccuacgagcggcacucccugagccacuucgugaaccuggacaaccuccgcgccaacaacacgaaggggucccugcccaucaacgugaucgucuucgacggcaagagcaagugcgaggaguccagcgccaaguccgccagcguguacuacucccagcugaugugccagcccauccuccugcuggaccaggcgcucgugagcgacgucggcgacagcgccgagguggccgugaagauguucgacgccuacgucaacaccuucuccagcaccuucaacgugccgauggagaagcugaagacccugguggccacggcggaggccgagcucgccaagaacgucucccuggacaacgugcugagcaccuucaucuccgccgcgcggcagggguucguggacagcgacgucgagaccaaggacgugguggagugccucaagcugucccaccagagcgacaucgaggucaccggcgacuccugcaacaacuacaugcugacguacaacaagguggagaacaugaccccccgcgaccucggggccugcaucgacugcagcgcccggcacaucaacgcccagguggccaagucccacaacaucgcgcugaucuggaacgucaaggacuucaugagccuguccgagcagcuccgcaagcagauccgcagcgccgccaagaagaacaaccugcccuucaagcugaccugcgccaccacgcggcagguggugaacgucgugaccaccaagaucgcccucaagggcgggugaggacuagucccuguucccagagcccacuuuuuuuucuuuuuuugaaauaaaauagccugucuuucagaucucaaaggcucuuuucagagccaccaaaaaaaaaaaaaaaaaaaaaaaaaaaaaaaaaaaaaaaaaaaaaaaaaaaaaaaaaaaaaaaaaaaaaaaaaaaaaaaaaaaaaaaaaaaaaaaaaaaaa

SEQ ID NO: 19952 - RNA, 6113 nt, Artificial Sequence
  SARS-CoV-2__MT627414.1__non-structural protein 3 (NSP3) mRNA gc
aggagagucccgcagucggcguccagcggcucugcuuguucgugugugugucguugcaggccuuauucaagcuuaccauggcccccaccaaggugaccuucggcgacgacacggucaucgaggugcagggguacaagagcgugaacaucaccuucgagcuggacgagcgcaucgacaagguccucaacgagaagugcuccgccuacaccguggagcugggcaccgaggugaacgaguucgcgugcgucguggccgacgccgugaucaagacgcugcagccggucagcgagcuccugaccccccuggggaucgaccucgacgagugguccauggccaccuacuaccuguucgacgagagcggcgaguucaagcuggccucccacauguacugcagcuucuacccccccgacgaggacgaggaggagggggacugcgaggaggaggaguucgagccguccacccaguacgaguacggcacggaggacgacuaccagggcaagccccucgaguucggggcgaccagcgccgcccugcagcccgaggaggagcaggaggaggacuggcuggacgacgacucccagcagaccgugggccagcaggacgggagcgaggacaaccagaccacgaccauccagaccaucguggagguccagccccagcucgagauggagcugaccccgguggugcagacgaucgaggucaacuccuucagcggcuaccugaagcucaccgacaacguguacaucaagaacgccgacaucguggaggaggcgaagaaggucaagcccaccgugguggucaacgccgccaacguguaccugaagcacgggggcggcguggccggggcccugaacaaggcgaccaacaacgccaugcaggucgaguccgacgacuacaucgccacgaacggcccccucaagguggggggcagcugcguccuguccggccacaaccuggccaagcacugccuccacgugguggggcccaacgucaacaagggcgaggacauccagcugcugaagagcgccuacgagaacuucaaccagcacgaggugcuccuggcgccgcugcucuccgccgggaucuucggcgccgaccccauccacagccugcgggugugcgucgacaccgugcgcaccaacguguaccuggccgucuucgacaagaaccucuacgacaagcugguguccagcuuccuggagaugaagagcgagaagcagguggagcagaagaucgccgagauccccaaggaggaggucaagcccuucaucaccgaguccaagccgagcguggagcagcggaagcaggacgacaagaagaucaaggcgugcguggaggaggucacgaccacccucgaggagaccaaguuccugacggagaaccugcuccuguacaucgacaucaacgggaaccugcaccccgacuccgccacccucgugagcgacaucgacaucaccuuccugaagaaggacgccuccuacaucgugggcgacgucgugcaggagggcgugcugaccgccgucgugauccccacgaagaaggccgggggcaccaccgagaugcucgcgaaggcccugcgcaaggugcccaccgacaacuacaucacgaccuacccggggcagggccugaacggguacaccgucgaggaggccaagaccgugcucaagaagugcaagagcgccuucuacauccugcccuccaucaucagcaacgagaagcaggagauccugggcaccguguccuggaaccuccgggagaugcuggcgcacgccgaggagacgcgcaagcugaugcccgucugcguggagaccaaggccaucgugagcaccauccagcggaaguacaagggcaucaagauccaggagggggucguggacuacggcgcccgcuucuacuucuacaccuccaagacgaccguggccagccugaucaacacccucaacgaccugaacgagacccuggucacgaugccccucggguacgugacccacggccugaaccuggaggaggcggcccgguacaugcgcucccucaaggugccggccaccgucagcguguccagccccgacgccgugaccgccuacaacggguaccugacguccagcuccaagacccccgaggagcacuucaucgagaccaucagccuggcgggcagcuacaaggacugguccuacagcggccaguccacccagcucgggaucgaguuccugaagcggggcgacaagagcgucuacuacacguccaaccccaccaccuuccaccuggacggggaggugaucaccuucgacaaccucaagacgcugcugagccuccgcgaggugcggaccaucaaggucuucaccaccguggacaacaucaaccugcacacgcagguggucgacauguccaugaccuacggccagcaguucggcccgaccuaccuggacggggccgacgugaccaagaucaagccccacaacagccacgagggcaagacguucuacgugcuccccaacgacgacacccugcgcgucgaggccuucgaguacuaccacaccaccgacccguccuuccuggggcgguacaugagcgcccucaaccacacgaagaaguggaaguacccccaggugaacggccugaccuccaucaagugggccgacaacaacugcuaccuggcgaccgcccuccugacccugcagcagaucgagcucaaguucaacccccccgcccugcaggacgccuacuaccgcgcgcgggccggggaggccgccaacuucugcgcccugauccucgcguacugcaacaagacggugggcgagcugggcgacguccgcgagaccaugagcuaccuguuccagcacgccaaccucgacuccugcaagcgggugcugaacgucgugugcaagaccugcgggcagcagcagaccacccugaagggcguggaggccgucauguacauggggacgcucagcuacgagcaguucaagaagggcgugcagaucccgugcaccugcgggaagcaggccaccaaguaccuggugcagcaggagucccccuucgucaugaugagcgccccccccgcgcaguacgagcugaagcacggcaccuucacgugcgccuccgaguacaccggcaacuaccagugcgggcacuacaagcacaucaccagcaaggagacccucuacugcaucgacggcgcccugcugacgaagagcuccgaguacaaggggccgaucaccgacguguucuacaaggagaacagcuacaccaccacgaucaagcccgugaccuacaagcucgacggcgucgugugcaccgagaucgaccccaagcuggacaacuacuacaagaaggacaacuccuacuucaccgagcagcccaucgaccuggugccgaaccagcccuaccccaacgccagcuucgacaacuucaaguucgucugcgacaacaucaaguucgccgacgaccucaaccagcugacgggguacaagaagcccgcgucccgcgagcugaaggugaccuucuucccggaccucaacggcgacguggucgccaucgacuacaagcacuacacccccagcuucaagaagggcgccaagcugcugcacaagcccaucguguggcacgugaacaacgccaccaacaaggcgacguacaagcccaacaccuggugcauccggugccucugguccaccaagccggucgagaccagcaacuccuucgacgugcugaagagcgaggacgcccaggggauggacaaccuggccugcgaggaccucaagcccguguccgaggaggucguggagaaccccacgauccagaaggacgugcuggagugcaacgucaagaccaccgagguggugggcgacaucauccugaagcccgccaacaacagccucaagaucaccgaggaggucgggcacacggaccugauggccgcguacguggacaacuccagccugaccaucaagaagccgaacgagcucucccgcgugcugggccugaagacccucgccacccacgggcuggccgccgucaacagcgugcccugggacacgaucgccaacuacgcgaagcccuuccugaacaagguggucuccaccaccaccaacaucgugacgcgcugccucaaccgggugugcaccaacuacaugccguacuucuucacccugcugcuccagcugugcaccuucacccgcagcacgaacucccggaucaaggccagcaugcccaccaccaucgccaagaacaccgucaagagcgugggcaaguucugccuggaggccuccuucaacuaccucaagagccccaacuucuccaagcugaucaacaucaucaucugguuccugcuccugagcgugugccugggcucccucaucuacagcacggccgcgcuggggguccugauguccaaccucggcaugcccagcuacugcaccggguaccgcgagggcuaccugaacuccaccaacgugaccaucgccacguacugcaccggcagcaucccgugcuccgugugccugagcgggcucgacucccuggacaccuaccccagccuggagaccauccagaucacgaucuccagcuucaagugggaccucaccgccuucggccuggucgccgagugguuccuggccuacauccucuucacccgguucuucuacgugcuggggcuggcggccaucaugcagcucuucuucuccuacuucgccgugcacuucaucagcaacuccuggcugauguggcugaucaucaaccugguccagauggcccccaucagcgcgauggugcgcauguacaucuucuucgccagcuucuacuacguguggaaguccuacguccacgugguggacggcugcaacagcuccaccugcaugaugugcuacaagcggaaccgcgccacgcgggucgagugcaccaccaucgugaacgggguccgccggagcuucuacguguacgccaacggcggcaagggguucugcaagcuccacaacuggaacugcgugaacugcgacaccuucugcgccggcuccacguucaucagcgacgaggucgcgcgcgaccugucccugcaguucaagcggcccaucaacccgaccgaccagagcuccuacaucguggacagcgugaccgucaagaacggguccauccaccucuacuucgacaaggccggccagaagaccuacgagcgccacagccugucccacuucgugaaccuggacaaccuccgggccaacaacacgaaggggagccugcccaucaacgugaucgucuucgacggcaaguccaagugcgaggagagcuccgccaagagcgccuccguguacuacagccagcugaugugccagcccauccuccugcuggaccaggcgcucgugagcgacgucggcgacuccgccgagguggccgugaagauguucgacgccuacgucaacaccuucagcuccaccuucaacgugcccauggagaagcugaagacccugguggccacggcggaggccgagcucgccaagaacgucagccuggacaacgugcuguccaccuucaucagcgccgcgcgccagggguucguggacuccgacgucgagaccaaggacgugguggagugccucaagcugagccaccaguccgacaucgaggucaccggcgacagcugcaacaacuacaugcugacguacaacaagguggagaacaugaccccgcgggaccucggggccugcaucgacugcuccgcccgccacaucaacgcccagguggccaagagccacaacaucgcgcugaucuggaacgucaaggacuucaugucccugagcgagcagcuccggaagcagauccgcuccgccgccaagaagaacaaccugcccuucaagcugaccugcgccaccacgcgccagguggugaacgucgugaccaccaagaucgcccucaagggcgggugaggacuagucccuguucccagagcccacuuuuuuuucuuuuuuugaaauaaaauagccugucuuucagaucucaaaggcucuuuucagagccaccaaaaaaaaaaaaaaaaaaaaaaaaaaaaaaaaaaaaaaaaaaaaaaaaaaaaaaaaaaaaaaaaaaaaaaaaaaaaaaaaaaaaaaaaaaaaaaaaaaaaa

SEQ ID NO: 19953 - RNA, 6113 nt, Artificial Sequence
  SARS-CoV-2__MT627437.1__non-structural protein 3 (NSP3) mRNA gc
aggagagucccgcagucggcguccagcggcucugcuuguucgugugugugucguugcaggccuuauucaagcuuaccauggcccccaccaaggugaccuucggcgacgacacggucaucgaggugcagggguacaagagcgugaacaucaccuucgagcuggacgagcgcaucgacaagguccucaacgagaagugcuccgccuacaccguggagcugggcaccgaggugaacgaguucgcgugcgucguggccgacgccgugaucaagacgcugcagccggucagcgagcuccugaccccccuggggaucgaccucgacgagugguccauggccaccuacuaccuguucgacgagagcggcgaguucaagcuggccucccacauguacugcagcuucuacccccccgacgaggacgaggaggagggggacugcgaggaggaggaguucgagccguccacccaguacgaguacggcacggaggacgacuaccagggcaagccccucgaguucggggcgaccagcgccgcccugcagcccgaggaggagcaggaggaggacuggcuggacgacgacucccagcagaccgugggccagcaggacgggagcgaggacaaccagaccacgaccauccagaccaucguggagguccagccccagcucgagauggagcugaccccgguggugcagacgaucgaggucaacuccuucagcggcuaccugaagcucaccgacaacguguacaucaagaacgccgacaucguggaggaggcgaagaaggucaagcccaccgugguggucaacgccgccaacguguaccugaagcacgggggcggcguggccggggcccugaacaaggcgaccaacaacgccaugcaggucgaguccgacgacuacaucgccacgaacggcccccucaagguggggggcagcugcguccuguccggccacaaccuggccaagcacugccuccacgugguggggcccaacgucaacaagggcgaggacauccagcugcugaagagcgccuacgagaacuucaaccagcacgaggugcuccuggcgccgcugcucuccgccgggaucuucggcgccgaccccauccacagccugcgggugugcgucgacaccgugcgcaccaacguguaccuggccgucuucgacaagaaccucuacgacaagcugguguccagcuuccuggagaugaagagcgagaagcagguggagcagaagaucgccgagauccccaaggaggaggucaagcccuucaucaccgaguccaagccgagcguggagcagcggaagcaggacgacaagaagaucaaggcgugcguggaggaggucacgaccacccucgaggagaccaaguuccugacggagaaccugcuccuguacaucgacaucaacgggaaccugcaccccgacuccgccacccucgugagcgacaucgacaucaccuuccugaagaaggacgcccccuacaucgugggcgacgucgugcaggagggcgugcugaccgccgucgugauccccacgaagaaggccgggggcaccaccgagaugcucgcgaaggcccugcgcaaggugccgaccgacaacuacaucacgaccuaccccgggcagggccugaacggguacaccgucgaggaggccaagaccgugcucaagaagugcaaguccgccuucuacauccugcccagcaucaucuccaacgagaagcaggagauccugggcaccgugagcuggaaccuccgggagaugcuggcgcacgccgaggagacgcgcaagcugaugcccgucugcguggagaccaaggccaucguguccaccauccagcggaaguacaagggcaucaagauccaggagggggucguggacuacggcgcccgcuucuacuucuacaccagcaagacgaccguggccucccugaucaacacccucaacgaccugagcgagacccuggucacgaugccgcucggguacgugacccacggccugaaccuggaggaggcggcccgguacaugcgcucccucaaggugcccgccaccgucagcguguccagccccgacgccgugaccgccuacaacggguaccugacguccagcuccaagacccccgaggagcacuucaucgagaccaucagccuggcgggcagcuacaaggacugguccuacagcggccaguccacccagcucgggaucgaguuccugaagcggggcgacaagagcgucuacuacacguccaacccgaccaccuuccaccuggacggggaggugaucaccuucgacaaccucaagacgcugcugagccuccgcgaggugcggaccaucaaggucuucaccaccguggacaacaucaaccugcacacgcagguggucgacauguccaugaccuacggccagcaguucggccccaccuaccuggacggggccgacgugaccaagaucaagccccacaacagccacgagggcaagacguucuacgugcucccgaacgacgacacccugcgcgucgaggccuucgaguacuaccacaccaccgaccccuccuuccuggggcgguacaugagcgcccucaaccacacgaagaaguggaaguacccccaggugaacggccugaccuccaucaagugggccgacaacaacugcuaccuggcgaccgcccuccugacccugcagcagaucgagcucaaguucaaccccccggcccugcaggacgccuacuaccgcgcgcgggccggggaggccgccaacuucugcgcccugauccucgcguacugcaacaagacggugggcgagcugggcgacguccgcgagaccaugagcuaccuguuccagcacgccaaccucgacuccugcaagcgggugcugaacgucgugugcaagaccugcgggcagcagcagaccacccugaagggcguggaggccgucauguacauggggacgcucagcuacgagcaguucaagaagggcgugcagauccccugcaccugcgggaagcaggccaccaaguaccuggugcagcaggagucccccuucgucaugaugagcgcccccccggcgcaguacgagcugaagcacggcaccuucacgugcgccuccgaguacaccggcaacuaccagugcgggcacuacaagcacaucaccagcaaggagacccucuacugcaucgacggcgcccugcugacgaagagcuccgaguacaaggggcccaucaccgacguguucuacaaggagaacagcuacaccaccacgaucaagcccgugaccuacaagcucgacggcgucgugugcaccgagaucgaccccaagcuggacaacuacuacaagaaggacaacuccuacuucaccgagcagccgaucgaccuggugcccaaccagcccuaccccaacgccagcuucgacaacuucaaguucgucugcgacaacaucaaguucgccgacgaccucaaccagcugacgggguacaagaagccggcgucccgcgagcugaaggugaccuucuuccccgaccucaacggcgacguggucgccaucgacuacaagcacuacacccccagcuucaagaagggcgccaagcugcugcacaagcccaucguguggcacgugaacaacgccaccaacaaggcgacguacaagccgaacaccuggugcauccggugccucugguccaccaagcccgucgagaccagcaacuccuucgacgugcugaagagcgaggacgcccaggggauggacaaccuggccugcgaggaccucaagcccguguccgaggaggucguggagaaccccacgauccagaaggacgugcuggagugcaacgucaagaccaccgagguggugggcgacaucauccugaagccggccaacaacagccucaagaucaccgaggaggucgggcacacggaccugauggccgcguacguggacaacuccagccugaccaucaagaagcccaacgagcucucccgcgugcugggccugaagacccucgccacccacgggcuggccgccgucaacagcgugcccugggacacgaucgccaacuacgcgaagccguuccugaacaagguggucuccaccaccaccaacaucgugacgcgcugccucaaccgggugugcaccaacuacaugcccuacuucuucacccugcugcuccagcugugcaccuucacccgcagcacgaacucccggaucaaggccagcaugcccaccaccaucgccaagaacaccgucaagagcgugggcaaguucugccuggaggccuccuucaacuaccucaagagccccaacuucuccaagcugaucaacaucaucaucugguuccugcuccugagcgugugccugggcucccucaucuacagcacggccgcgcuggggguccugauguccaaccucggcaugccgagcuacugcaccggguaccgcgagggcuaccugaacuccaccaacgugaccaucgccacguacugcaccggcagcauccccugcuccgugugccugagcgggcucgacucccuggacaccuaccccagccuggagaccauccagaucacgaucuccagcuucaagugggaccucaccgccuucggccuggucgccgagugguuccuggccuacauccucuucacccgguucuucuacgugcuggggcuggcggccaucaugcagcucuucuucuccuacuucgccgugcacuucaucagcaacuccuggcugauguggcugaucaucaaccugguccagauggcccccaucagcgcgauggugcgcauguacaucuucuucgccagcuucuacuacguguggaaguccuacguccacgugguggacggcugcaacagcuccaccugcaugaugugcuacaagcggaaccgcgccacgcgggucgagugcaccaccaucgugaacgggguccgccggagcuucuacguguacgccaacggcggcaagggguucugcaagcuccacaacuggaacugcgugaacugcgacaccuucugcgccggcuccacguucaucagcgacgaggucgcgcgcgaccugucccugcaguucaagcggccgaucaaccccaccgaccagagcuccuacaucguggacagcgugaccgucaagaacggguccauccaccucuacuucgacaaggccggccagaagaccuacgagcgccacagccugucccacuucgugaaccuggacaaccuccgggccaacaacacgaaggggagccugcccaucaacgugaucgucuucgacggcaaguccaagugcgaggagagcuccgccaagagcgccuccguguacuacagccagcugaugugccagcccauccuccugcuggaccaggcgcucgugagcgacgucggcgacuccgccgagguggccgugaagauguucgacgccuacgucaacaccuucagcuccaccuucaacgugccgauggagaagcugaagacccugguggccacggcggaggccgagcucgccaagaacgucagccuggacaacgugcuguccaccuucaucagcgccgcgcgccagggguucguggacuccgacgucgagaccaaggacgugguggagugccucaagcugagccaccaguccgacaucgaggucaccggcgacagcugcaacaacuacaugcugacguacaacaagguggagaacaugaccccccgggaccucggggccugcaucgacugcuccgcccgccacaucaacgcccagguggccaagagccacaacaucgcgcugaucuggaacgucaaggacuucaugucccugagcgagcagcuccggaagcagauccgcuccgccgccaagaagaacaaccugcccuucaagcugaccugcgccaccacgcgccagguggugaacgucgugaccaccaagaucgcccucaagggcgggugaggacuagucccuguucccagagcccacuuuuuuuucuuuuuuugaaauaaaauagccugucuuucagaucucaaaggcucuuuucagagccaccaaaaaaaaaaaaaaaaaaaaaaaaaaaaaaaaaaaaaaaaaaaaaaaaaaaaaaaaaaaaaaaaaaaaaaaaaaaaaaaaaaaaaaaaaaaaaaaaaaaaa

SEQ ID NO: 19954 - RNA, 6113 nt, Artificial Sequence
  SARS-CoV-2__MT627748.1__non-structural protein 3 (NSP3) mRNA gc
aggagagucccgcagucggcguccagcggcucugcuuguucgugugugugucguugcaggccuuauucaagcuuaccauggcccccaccaaggugaccuucggcgacgacacggucaucgaggugcagggguacaagagcgugaacaucaccuucgagcuggacgagcgcaucgacaagguccucaacgagaagugcuccgccuacaccguggagcugggcaccgaggugaacgaguucgcgugcgucguggccgacgccgugaucaagacgcugcagccggucagcgagcuccugaccccccuggggaucgaccucgacgagugguccauggccaccuacuaccuguucgacgagagcggcgaguucaagcuggccucccacauguacugcagcuucuacccccccgacgaggacgaggaggagggggacugcgaggaggaggaguucgagccguccacccaguacgaguacggcacggaggacgacuaccagggcaagccccucgaguucggggcgaccagcgccgcccugcagcccgaggaggagcaggaggaggacuggcuggacgacgacucccagcagaccgugggccagcaggacgggagcgaggacaaccagaccacgaccauccagaccaucguggagguccagccccagcucgagauggagcugaccccgguggugcagacgaucgaggucaacuccuucagcggcuaccugaagcucaccgacaacguguacaucaagaacgccgacaucguggaggaggcgaagaaggucaagcccaccgugguggucaacgccgccaacguguaccugaagcacgggggcggcguggccggggcccugaacaaggcgaccaacaacgccaugcaggucgaguccgacgacuacaucgccacgaacggcccccucaagguggggggcagcugcguccuguccggccacaaccuggccaagcacugccuccacgugguggggcccaacgucaacaagggcgaggacauccagcugcugaagagcgccuacgagaacuucaaccagcacgaggugcuccuggcgccgcugcucuccgccgggaucuucggcgccgaccccauccacagccugcgggugugcgucgacaccgugcgcaccaacguguaccuggccgucuucgacaagaaccucuacgacaagcugguguccagcuuccuggagaugaagagcgagaagcagguggagcagaagaucgccgagauccccaaggaggaggucaagcccuucaucaccgaguccaagccgagcguggagcagcggaagcaggacgacaagaagaucaaggcgugcguggaggaggucacgaccacccucgaggagaccaaguuccugacggagaaccugcuccuguacaucgacaucaacgggaaccugcaccccgacuccgccacccucgugagcgacaucgacaucaccuuccugaagaaggacgcccccuacaucgugggcgacgucgugcaggagggcgugcugaccgccgucgugauccccacgaagaaggccgggggcaccaccgagaugcucgcgaaggcccugcgcaaggugccgaccgacaacuacaucacgaccuaccccgggcagggccugaacggguacaccgucgaggaggccaagaccgugcucaagaagugcaaguccgccuucuacauccugcccagcaucaucuccaacgagaagcaggagauccugggcaccgugagcuggaaccuccgggagaugcuggcgcacgccgaggagacgcgcaagcugaugcccgucugcguggagaccaaggccaucguguccaccauccagcggaaguacaagggcaucaagauccaggagggggucguggacuacggcgcccgcuucuacuucuacaccagcaagacgaccguggccucccugaucaacacccucaacgaccugaacgagacccuggucacgaugccgcucggguacgugacccacggccugaaccuggaggaggcggcccgguacaugcgcagccucaaggugcccgccaccgucuccgugagcucccccgacgccgugaccgccuacaacggguaccugacgagcuccagcaagacccccgaggagcacuucaucgagaccaucucccuggcgggcagcuacaaggacuggagcuacuccggccagagcacccagcucgggaucgaguuccugaagcggggcgacaaguccgucuacuacacgagcaacccgaccaccuuccaccuggacggggaggugaucaccuucgacaaccucaagacgcugcugucccuccgcgaggugcggaccaucaaggucuucaccaccguggacaacaucaaccugcacacgcagguggucgacaugagcaugaccuacggccagcaguucggccccaccuaccuggacggggccgacgugaccaagaucaagccccacaacucccacgagggcaagacguucuacgugcucccgaacgacgacacccugcgcgucgaggccuucgaguacuaccacaccaccgaccccagcuuccuggggcgguacauguccgcccucaaccacacgaagaaguggaaguacccccaggugaacggccugaccagcaucaagugggccgacaacaacugcuaccuggcgaccgcccuccugacccugcagcagaucgagcucaaguucaaccccccggcccugcaggacgccuacuaccgcgcgcgggccggggaggccgccaacuucugcgcccugauccucgcguacugcaacaagacggugggcgagcugggcgacguccgcgagaccauguccuaccuguuccagcacgccaaccucgacagcugcaagcgggugcugaacgucgugugcaagaccugcgggcagcagcagaccacccugaagggcguggaggccgucauguacauggggacgcucuccuacgagcaguucaagaagggcgugcagauccccugcaccugcgggaagcaggccaccaaguaccuggugcagcaggagagccccuucgucaugauguccgcccccccggcgcaguacgagcugaaguacggcaccuucacgugcgccagcgaguacaccggcaacuaccagugcgggcacuacaagcacaucaccuccaaggagacccucuacugcaucgacggcgcccugcugacgaagagcagcgaguacaaggggcccaucaccgacguguucuacaaggagaacuccuacaccaccacgaucaagcccgugaccuacaagcucgacggcgucgugugcaccgagaucgaccccaagcuggacaacuacuacaagaaggacaacagcuacuucaccgagcagccgaucgaccuggugcccaaccagcccuaccccaacgccuccuucgacaacuucaaguucgucugcgacaacaucaaguucgccgacgaccucaaccagcugacgggguacaagaagccggcgagccgcgagcugaaggugaccuucuuccccgaccucaacggcgacguggucgccaucgacuacaagcacuacacccccuccuucaagaagggcgccaagcugcugcacaagcccaucguguggcacgugaacaacgccaccaacaaggcgacguacaagccgaacaccuggugcauccggugccucuggagcaccaagcccgucgagaccuccaacagcuucgacgugcugaaguccgaggacgcccaggggauggacaaccuggccugcgaggaccucaagcccgugagcgaggaggucguggagaaccccacgauccagaaggacgugcuggagugcaacgucaagaccaccgagguggugggcgacaucauccugaagccggccaacaacucccucaagaucaccgaggaggucgggcacacggaccugauggccgcguacguggacaacagcucccugaccaucaagaagcccaacgagcucagccgcgugcugggccugaagacccucgccacccacgggcuggccgccgucaacuccgugcccugggacacgaucgccaacuacgcgaagccguuccugaacaagguggucagcaccaccaccaacaucgugacgcgcugccucaaccgggugugcaccaacuacaugcccuacuucuucacccugcugcuccagcugugcaccuucacccgcuccacgaacagccggaucaaggccuccaugcccaccaccaucgccaagaacaccgucaagagcgugggcaaguucugccuggaggccagcuucaacuaccucaagucccccaacuucagcaagcugaucaacaucaucaucugguuccugcuccuguccgugugccugggcagccucaucuacuccacggccgcgcuggggguccugaugagcaaccucggcaugccguccuacugcaccggguaccgcgagggcuaccugaacagcaccaacgugaccaucgccacguacugcaccggcuccauccccugcagcgugugccuguccgggcucgacagccuggacaccuaccccucccuggagaccauccagaucacgaucagcuccuucaagugggaccucaccgccuucggccuggucgccgagugguuccuggccuacauccucuucacccgguucuucuacgugcuggggcuggcggccaucaugcagcucuucuucagcuacuucgccgugcacuucaucuccaacagcuggcugauguggcugaucaucaaccugguccagauggcccccaucuccgcgauggugcgcauguacaucuucuucgccagcuucuacuacguguggaagagcuacguccacgugguggacggcugcaacuccagcaccugcaugaugugcuacaagcggaaccgcgccacgcgggucgagugcaccaccaucgugaacgggguccgccgguccuucuacguguacgccaacggcggcaagggguucugcaagcuccacaacuggaacugcgugaacugcgacaccuucugcgccggcagcacguucaucuccgacgaggucgcgcgcgaccugagccugcaguucaagcggccgaucaaccccaccgaccaguccagcuacaucguggacuccgugaccgucaagaacgggagcauccaccucuacuucgacaaggccggccagaagaccuacgagcgccacucccugagccacuucgugaaccuggacaaccuccgggccaacaacacgaaggggucccugcccaucaacgugaucgucuucgacggcaagagcaagugcgaggaguccagcgccaaguccgccagcguguacuacucccagcugaugugccagcccauccuccugcuggaccaggcgcucgugagcgacgucggcgacagcgccgagguggccgugaagauguucgacgccuacgucaacaccuucuccagcaccuucaacgugccgauggagaagcugaagacccugguggccacggcggaggccgagcucgccaagaacgucucccuggacaacgugcugagcaccuucaucuccgccgcgcgccagggguucguggacagcgacgucgagaccaaggacgugguggagugccucaagcugucccaccagagcgacaucgaggucaccggcgacuccugcaacaacuacaugcugacguacaacaagguggagaacaugaccccccgggaccucggggccugcaucgacugcagcgcccgccacaucaacgcccagguggccaagucccacaacaucgcgcugaucuggaacgucaaggacuucaugagccuguccgagcagcuccggaagcagauccgcagcgccgccaagaagaacaaccugcccuucaagcugaccugcgccaccacgcgccagguggugaacgucgugaccaccaagaucgcccucaagggcgggugaggacuagucccuguucccagagcccacuuuuuuuucuuuuuuugaaauaaaauagccugucuuucagaucucaaaggcucuuuucagagccaccaaaaaaaaaaaaaaaaaaaaaaaaaaaaaaaaaaaaaaaaaaaaaaaaaaaaaaaaaaaaaaaaaaaaaaaaaaaaaaaaaaaaaaaaaaaaaaaaaaaaa

SEQ ID NO: 19955 - RNA, 6113 nt, Artificial Sequence
  SARS-CoV-2__MT627757.1__non-structural protein 3 (NSP3) mRNA gc
aggagagucccgcagucggcguccagcggcucugcuuguucgugugugugucguugcaggccuuauucaagcuuaccauggcccccaccaaggugaccuucggcgacgacacggucaucgaggugcagggguacaagagcgugaacaucaccuucgagcuggacgagcgcaucgacaagguccucaacgagaagugcuccgccuacaccguggagcugggcaccgaggugaacgaguucgcgugcgucguggccgacgccgugaucaagacgcugcagccggucagcgagcuccugaccccccuggggaucgaccucgacgagugguccauggccaccuacuaccuguucgacgagagcggcgaguucaagcuggccucccacauguacugcagcuucuacccccccgacgaggacgaggaggagggggacugcgaggaggaggaguucgagccguccacccaguacgaguacggcacggaggacgacuaccagggcaagccccucgaguucggggcgaccagcgccgcccugcagcccgaggaggagcaggaggaggacuggcuggacgacgacucccagcagaccguggugcagcaggacggcagcgaggacaaccagaccacgaccauccagaccaucgucgaggugcagccccagcucgagauggagcugaccccggugguccagacgaucgaggugaacuccuucagcggguaccugaagcucaccgacaacguguacaucaagaacgccgacaucgucgaggaggcgaagaaggugaagcccaccguggucgugaacgccgccaacguguaccugaagcacggcgggggcgucgccggcgcccugaacaaggcgaccaacaacgccaugcagguggaguccgacgacuacaucgccacgaacgggccccucaaggucggcgggagcugcgugcuguccggccacaaccuggccaagcacugccuccacguggucggccccaacgugaacaagggggaggacauccagcugcugaagagcgccuacgagaacuucaaccagcacgaggugcuccuggcgccgcugcucuccgccggcaucuucggggccgaccccauccacagccugcgggucugcguggacaccgugcgcaccaacgucuaccuggccguguucgacaagaaccucuacgacaagcugguguccagcuuccuggagaugaagagcgagaagcaggucgagcagaagaucgccgagauccccaaggaggaggugaagcccuucaucaccgaguccaagccgagcguggagcagcggaagcaggacgacaagaagaucaaggcgugcgucgaggaggugacgaccacccucgaggagaccaaguuccugacggagaaccugcuccuguacaucgacaucaacggcaaccugcaccccgacuccgccacccucgugagcgacaucgacaucaccuuccugaagaaggacgcccccuacaucgucggggacguggugcaggagggcguccugaccgccguggugauccccacgaagaaggccggcgggaccaccgagaugcucgcgaaggcccugcgcaaggucccgaccgacaacuacaucacgaccuaccccggccaggggcugaacggcuacaccguggaggaggccaagaccgugcucaagaagugcaaguccgccuucuacauccugcccagcaucaucuccaacgagaagcaggagauccuggggaccgucagcuggaaccuccgggagaugcuggcgcacgccgaggagacgcgcaagcugaugcccgugugcguggagaccaaggccaucgucuccaccauccagcggaaguacaagggcaucaagauccaggagggcgugguggacuacggggcccgcuucuacuucuacaccagcaagacgaccgucgccucccugaucaacacccucaacgaccugaacgagacccuggugacgaugccgcucggcuacgugacccacgggcugaaccuggaggaggcggcccgguacaugcgcagccucaagguccccgccaccguguccgugagcucccccgacgccgucaccgccuacaacggcuaccugacgagcuccagcaagacccccgaggagcacuucaucgagaccaucucccuggcggggagcuacaaggacuggagcuacuccggccagagcacccagcucggcaucgaguuccugaagcggggggacaaguccguguacuacacgagcaacccgaccaccuuccaccuggacggcgaggugaucaccuucgacaaccucaagacgcugcugucccuccgcgagguccggaccaucaagguguucaccaccguggacaacaucaaccugcacacgcaggucguggacaugagcaugaccuacgggcagcaguucggccccaccuaccuggacggcgccgacgugaccaagaucaagccccacaacucccacgaggggaagacguucuacguccucccgaacgacgacacccugcgcguggaggccuucgaguacuaccacaccaccgaccccagcuuccugggccgguacauguccgcccucaaccacacgaagaaguggaaguacccccaggugaacgggcugaccagcaucaagugggccgacaacaacugcuaccuggcgaccgcccuccugacccugcagcagaucgagcucaaguucaaccccccggcccugcaggacgccuacuaccgcgcgcgggccggcgaggccgccaacuucugcgcccugauccucgcguacugcaacaagacggucggggagcugggcgacgugcgcgagaccauguccuaccuguuccagcacgccaaccucgacagcugcaagcggguccugaacguggugugcaagaccugcggccagcagcagaccacccugaagggggucgaggccgugauguacaugggcacgcucuccuacgagcaguucaagaagggggugcagauccccugcaccugcggcaagcaggccaccaaguaccugguccagcaggagagccccuucgugaugauguccgcccccccggcgcaguacgagcugaagcacgggaccuucacgugcgccagcgaguacaccggcaacuaccagugcggccacuacaagcacaucaccuccaaggagacccucuacugcaucgacggggcccugcugacgaagagcagcgaguacaagggccccaucaccgacguguucuacaaggagaacuccuacaccaccacgaucaagcccgucaccuacaagcucgacgggguggugugcaccgagaucgaccccaagcuggacaacuacuacaagaaggacaacagcuacuucaccgagcagccgaucgaccugguccccaaccagcccuaccccaacgccuccuucgacaacuucaaguucgugugcgacaacaucaaguucgccgacgaccucaaccagcugacgggcuacaagaagccggcgagccgcgagcugaaggugaccuucuuccccgaccucaacggggacgucguggccaucgacuacaagcacuacacccccuccuucaagaagggcgccaagcugcugcacaagcccaucguguggcacgucaacaacgccaccaacaaggcgacguacaagccgaacaccuggugcauccggugccucuggagcaccaagcccguggagaccuccaacagcuucgacgugcugaaguccgaggacgcccagggcauggacaaccuggccugcgaggaccucaagcccgucagcgaggaggugguggagaaccccacgauccagaaggacguccuggagugcaacgugaagaccaccgagguggucggggacaucauccugaagccggccaacaacucccucaagaucaccgaggaggugggccacacggaccugauggccgcguacguggacaacagcucccugaccaucaagaagcccaacgagcucagccgcguccuggggcugaagacccucgccacccacggccuggccgccgugaacuccgugcccugggacacgaucgccaacuacgcgaagccguuccugaacaaggucgugagcaccaccaccaacaucgugacgcgcugccucaaccgggucugcaccaacuacaugcccuacuucuucacccugcugcuccagcugugcaccuucacccgcuccacgaacagccggaucaaggccuccaugcccaccaccaucgccaagaacaccgugaagagcguggggaaguucugccuggaggccagcuucaacuaccucaagucccccaacuucagcaagcugaucaacaucaucaucugguuccugcuccuguccgucugccugggcagccucaucuacuccacggccgcgcugggcgugcugaugagcaaccucgggaugccguccuacugcaccggcuaccgcgagggguaccugaacagcaccaacgugaccaucgccacguacugcaccggcuccauccccugcagcgucugccuguccggccucgacagccuggacaccuaccccucccuggagaccauccagaucacgaucagcuccuucaagugggaccucaccgccuucgggcugguggccgagugguuccuggccuacauccucuucacccgguucuucuacgugcugggccuggcggccaucaugcagcucuucuucagcuacuucgccguccacuucaucuccaacagcuggcugauguggcugaucaucaaccuggugcagauggcccccaucuccgcgauggugcgcauguacaucuucuucgccagcuucuacuacgucuggaagagcuacgugcacguggucgacgggugcaacuccagcaccugcaugaugugcuacaagcggaaccgcgccacgcggguggagugcaccaccaucgucaacggcgugcgccgguccuucuacguguacgccaacgggggcaagggcuucugcaagcuccacaacuggaacugcgucaacugcgacaccuucugcgccgggagcacguucaucuccgacgagguggcgcgcgaccugagccugcaguucaagcggccgaucaaccccaccgaccaguccagcuacaucguggacuccgucaccgugaagaacggcagcauccaccucuacuucgacaaggccgggcagaagaccuacgagcgccacucccugagccacuucgugaaccuggacaaccuccgggccaacaacacgaagggcucccugcccaucaacgucaucguguucgacgggaagagcaagugcgaggaguccagcgccaaguccgccagcguguacuacucccagcugaugugccagcccauccuccugcuggaccaggcgcucgucagcgacgugggcgacagcgccgagguggccgucaagauguucgacgccuacgugaacaccuucuccagcaccuucaacgugccgauggagaagcugaagacccuggucgccacggcggaggccgagcucgccaagaacgugucccuggacaacgugcugagcaccuucaucuccgccgcgcgccagggcuucgucgacagcgacguggagaccaaggacguggucgagugccucaagcugucccaccagagcgacaucgaggugaccggggacuccugcaacaacuacaugcugacguacaacaagguggagaacaugaccccccgggaccucggcgccugcaucgacugcagcgcccgccacaucaacgcccaggucgccaagucccacaacaucgcgcugaucuggaacgugaaggacuucaugagccuguccgagcagcuccggaagcagauccgcagcgccgccaagaagaacaaccugcccuucaagcugaccugcgccaccacgcgccagguggucaacguggugaccaccaagaucgcccucaaggggggcugaggacuagucccuguucccagagcccacuuuuuuuucuuuuuuugaaauaaaauagccugucuuucagaucucaaaggcucuuuucagagccaccaaaaaaaaaaaaaaaaaaaaaaaaaaaaaaaaaaaaaaaaaaaaaaaaaaaaaaaaaaaaaaaaaaaaaaaaaaaaaaaaaaaaaaaaaaaaaaaaaaaaa

SEQ ID NO: 19956 - RNA, 6113 nt, Artificial Sequence
  SARS-CoV-2__MT628061.1__non-structural protein 3 (NSP3) mRNA gc
aggagagucccgcagucggcguccagcggcucugcuuguucgugugugugucguugcaggccuuauucaagcuuaccauggcccccaccaaggugaccuucggcgacgacacggucaucgaggugcagggguacaagagcgugaacaucaccuucgagcuggacgagcgcaucgacaagguccucaacgagaagugcuccgccuacaccguggagcugggcaccgaggugaacgaguucgcgugcgucguggccgacgccgugaucaagacgcugcagccggucagcgagcuccugaccccccuggggaucgaccucgacgagugguccauggccaccuacuaccuguucgacgagagcggcgaguucaagcuggccucccacauguacugcagcuucuacccccccgacgaggacgaggaggagggggacugcgaggaggaggaguucgagccguccacccaguacgaguacggcacggaggacgacuaccagggcaagccccucgaguucggggcgaccagcgccgcccugcagcccgaggaggagcaggaggaggacuggcuggacgacgacucccagcagaccgugggccagcaggacgggagcgaggacaaccagaccacgaccauccagaccaucguggagguccagccccagcucgagauggagcugaccccgguggugcagacgaucgaggucaacuccuucagcggcuaccugaagcucaccgacaacguguacaucaagaacgccgacaucguggaggaggcgaagaaggucaagcccaccgugguggucaacgccgccaacguguaccugaagcacgggggcggcguggccggggcccugaacaaggcgaccaacaacgccaugcaggucgaguccgacgacuacaucgccacgaacggcccccucaagguggggggcagcugcguccuguccggccacaaccuggccaagcacugccuccacgugguggggcccaacgucaacaagggcgaggacauccagcugcugaagagcgccuacgagaacuucaaccagcacgaggugcuccuggcgccgcugcucuccgccgggaucuucggcgccgaccccauccacagccugcgggugugcgucgacaccgugcgcaccaacguguaccuggccgucuucgacaagaaccucuacgacaagcugguguccagcuuccuggagaugaagagcgagaagcagguggagcagaagaucgccgagauccccaaggaggaggucaagcccuucaucaccgaguccaagccgagcguggagcagcggaagcaggacgacaagaagaucaaggcgugcguggaggaggucacgaccacccucgaggagaccaaguuccugacggagaaccugcuccuguacaucgacaucaacgggaaccugcaccccgacuccgccacccucgugagcgacaucgacaucaccuuccugaagaaggacgcccccuacaucgugggcgacgucgugcaggagggcgugcugaccgccgucgugauccccacgaagaaggccgggggcaccaccgagaugcucgcgaaggcccugcgcaaggugccgaccgacaacuacaucacgaccuaccccgggcagggccugaacggguacaccgucgaggaggccaagaccgugcucaagaagugcaaguccgccuucuacauccugcccagcaucaucuccaacgagaagcaggagauccugggcaccgugagcuggaaccuccgggagaugcuggcgcacgccgaggagacgcgcaagcugaugcccgucugcguggagaccaaggccaucguguccaccauccagcggaaguacaagggcaucaagauccaggagggggucguggacuacggcgcccgcuucuacuucuacaccagcaagacgaccguggccucccugaucaacacccucaacgaccugaacgagacccuggucacgaugccgcucggguacgugacccacggccugaaccuggaggaggcggcccgguacaugcgcagccucaaggugcccgccaccgucuccgugagcucccccgacgccgugaccgccuacaacggguaccugacgagcuccagcaagacccccgaggagcacuucaucgagaccaucucccuggcgggcagcuacaaggacuggagcuacuccggccagagcacccagcucgggaucgaguuccugaagcggggcgacaaguccgucuacuacacgagcaacccgaccaccuuccaccuggacggggaggugaucaccuucgacaaccucaagacgcugcugucccuccgcgaggugcggaccaucaaggucuucaccaccguggacaacaucaaccugcacacgcagguggucgacaugagcaugaccuacggccagcaguucggccccaccuaccuggacggggccgacgugaccaagaucaagccccacaacucccacgagggcaagacguucuacgugcucccgaacgacgacacccugcgcgucgaggccuucgaguacuaccacaccaccgaccccagcuuccuggggcgguacauguccgcccucaaccacacgaagaaguggaaguacccccaggugaacggccugaccagcaucaagugggccgacaacaacugcuaccuggcgaccgcccuccugacccugcagcagaucgagcucaaguucaaccccccggcccugcaggacgccuacuaccgcgcgcgggccggggaggccgccaacuucugcgcccugauccucgcguacugcaacaagacggugggcgagcugggcgacguccgcgagaccauguccuaccuguuccagcacgccaaccucgacagcugcaagcgggugcugaacgucgugugcaagaccugcgggcagcagcagaccacccugaagggcguggaggccgucauguacauggggacgcucuccuacgagcaguucaagaagggcgugcagauccccugcaccugcgggaagcaggccaccaaguaccuggugcagcaggagagccccuucgucaugauguccgcccccccggcgcaguacgagcugaagcacggcaccuucacgugcgccagcgaguacaccggcaacuaccagugcgggcacuacaagcacaucaccuccaaggagacccucuacugcaucgacggcgcccugcugacgaagagcagcgaguacaaggggcccaucaccgacguguucuacaaggagaacuccuacaccaccacgaucaagcccgugaccuacaagcucgacggcgucgugugcaccgagaucgaccccaagcuggacaacuacuacaagaaggacaacagcuacuucaccgagcagccgaucgaccuggugcccaaccagcccuaccccaacgccuccuucgacaacuucaaguucgucugcgacaacaucaaguucgccgacgaccucaaccagcugacgggguacaagaagccggcgagccgcgagcugaaggugaccuucuuccccgaccucaacggcgacguggucgccaucgacuacaagcacuacacccccuccuucaagaagggcgccaagcugcugcacaagcccaucguguggcacgugaacaacgccaccaacaaggcgacguacaagccgaacaccuggugcauccggugccucuggagcaccaagcccgucgagaccuccaacagcuucgacgugcugaaguccgaggacgcccaggggauggacaaccuggccugcgaggaccucaagcccgugagcgaggaggucguggagaaccccacgauccagaaggacgugcuggagugcaacgucaagaccaccgagguggugggcgacaucauccugaagccggccaacaacucccucaagaucaccgaggaggucgggcacacggaccugauggccgcguacguggacaacagcucccugaccaucaagaagcccaacgagcucagccgcgugcugggccugaagacccucgccacccacgggcuggccgccgucaacuccgugcccugggacacgaucgccaacuacgcgaagccguuccugaacaagguggucagcaccaccaccaacaucgugacgcgcugccucaaccgggugugcaccaacuacaugcccuacuucuucacccugcugcuccagcugugcaccuucacccgcuccacgaacagccggaucaaggccuccaugcccaccaccaucgccaagaacaccgucaagagcgugggcaaguucugccuggaggccagcuucaacuaccucaagucccccaacuucagcaagcugaucaacaucaucaucugguuccugcuccuguccgugugccugggcagccucaucuacuccacggccgcgcuggggguccugaugagcaaccucggcaugccguucuacugcaccggguaccgcgagggcuaccugaacuccaccaacgugaccaucgccacguacugcaccggcagcauccccugcuccgugugccugagcgggcucgacucccuggacaccuaccccagccuggagaccauccagaucacgaucuccagcuucaagugggaccucaccgccuucggccuggucgccgagugguuccuggccuacauccucuucacccgguucuucuacgugcuggggcuggcggccaucaugcagcucuucuucuccuacuucgccgugcacuucaucagcaacuccuggcugauguggcugaucaucaaccugguccagauggcccccaucagcgcgauggugcgcauguacaucuucuucgccuccuucuacuacguguggaagagcuacguccacgugguggacggcugcaacagcuccaccugcaugaugugcuacaagcggaaccgcgccacgcgggucgagugcaccaccaucgugaacgggguccgccggagcuucuacguguacgccaacggcggcaagggguucugcaagcuccacaacuggaacugcgugaacugcgacaccuucugcgccggcuccacguucaucagcgacgaggucgcgcgcgaccugucccugcaguucaagcggccgaucaaccccaccgaccagagcuccuacaucguggacagcgugaccgucaagaacggguccauccaccucuacuucgacaaggccggccagaagaccuacgagcgccacagccugucccacuucgugaaccuggacaaccuccgggccaacaacacgaaggggagccugcccaucaacgugaucgucuucgacggcaaguccaagugcgaggagagcuccgccaagagcgccuccguguacuacagccagcugaugugccagcccauccuccugcuggaccaggcgcucguguccgacgucggcgacagcgccgagguggccgugaagauguucgacgccuacgucaacaccuucagcuccaccuucaacgugccgauggagaagcugaagacccugguggccacggcggaggccgagcucgccaagaacgucagccuggacaacgugcuguccaccuucaucagcgccgcgcgccagggguucguggacuccgacgucgagaccaaggacgugguggagugccucaagcugagccaccaguccgacaucgaggucaccggcgacagcugcaacaacuacaugcugacguacaacaagguggagaacaugaccccccgggaccucggggccugcaucgacugcuccgcccgccacaucaacgcccagguggccaagagccacaacaucgcgcugaucuggaacgucaaggacuucaugucccugagcgagcagcuccggaagcagauccgcuccgccgccaagaagaacaaccugcccuucaagcugaccugcgccaccacgcgccagguggugaacgucgugaccaccaagaucgcccucaagggcgggugaggacuagucccuguucccagagcccacuuuuuuuucuuuuuuugaaauaaaauagccugucuuucagaucucaaaggcucuuuucagagccaccaaaaaaaaaaaaaaaaaaaaaaaaaaaaaaaaaaaaaaaaaaaaaaaaaaaaaaaaaaaaaaaaaaaaaaaaaaaaaaaaaaaaaaaaaaaaaaaaaaaaa

SEQ ID NO: 19957 - RNA, 6113 nt, Artificial Sequence
  SARS-CoV-2__MT628098.1__non-structural protein 3 (NSP3) mRNA gc
aggagagucccgcagucggcguccagcggcucugcuuguucgugugugugucguugcaggccuuauucaagcuuaccauggcccccaccaaggugaccuucggcgacgacacggucaucgaggugcagggguacaagagcgugaacaucaccuucgagcuggacgagcgcaucgacaagguccucaacgagaagugcuccgccuacaccguggagcugggcaccgaggugaacgaguucgcgugcgucguggccgacgccgugaucaagacgcugcagccggucagcgagcuccugaccccccuggggaucgaccucgacgagugguccauggccaccuacuaccuguucgacgagagcggcgaguucaagcuggccucccacauguacugcagcuucuacccccccgacgaggacgaggaggagggggacugcgaggaggaggaguucgagccguccacccaguacgaguacggcacggaggacgacuaccagggcaagccccucgaguucggggcgaccagcgccgcccugcagcccgaggaggagcaggaggaggacuggcuggacgacgacucccagcagaccgugggccagcaggacgggagcgaggacaaccagaccacgaccauccagaccaucguggagguccagccccagcucgagauggagcugaccccgguggugcagacgaucgaggucaacuccuucagcggcuaccugaagcucaccgacaacguguacaucaagaacgccgacaucguggaggaggcgaagaaggucaagcccaccgugguggucaacgccgccaacguguaccugaagcacgggggcggcguggccggggcccugaacaaggcgaccaacaacgccaugcaggucgaguccgacgacuacaucgccacgaacggcccccucaagguggggggcagcugcguccuguccggccacaaccuggccaagcacugccuccacgugguggggcccaacgucaacaagggcgaggacauccagcugcugaagagcgccuacgagaacuucaaccagcacgaggugcuccuggcgccgcugcucuccgccgggaucuucggcgccgaccccauccacagccugcgggugugcgucgacaccgugcgcaccaacguguaccuggccgucuucgacaagaaccucuacgacaagcugguguccagcuuccuggagaugaagagcgagaagcagguggagcagaagaucgccgagauccccaaggaggaggucaagcccuucaucaccgaguccaagccgagcguggagcagcggaagcaggacgacaagaagaucaaggcgugcguggaggaggucacgaccacccucgaggagaccaaguuccugacggagaaccugcuccuguacaucgacaucaacgggaaccugcaccccgacuccgccacccucgugagcgacaucgacaucaccuuccugaagaaggacgcccccuacaucgugggcgacgucgugcaggagggcgugcugaccgccgucgugauccccacgaagaaggccgggggcaccaccgagaugcucgcgaaggcccugcgcaaggugccgaccgacaacuacaucacgaccuaccccgggcagggccugaacggguacaccgucgaggaggccaagaccgugcucaagaagugcaaguccgccuucuacauccugcccagcaucaucuccaacgagaagcaggagauccugggcaccgugagcuggaaccuccgggagaugcuggcgcacgccgaggagacgcgcaagcugaugcccgucugcguggagaccaaggccaucguguccaccauccagcggaaguacaagggcaucaagauccaggagggggucguggacuacggcgcccgcuucuacuucuacaccagcaagacgaccguggccucccugaucaacacccucaacgaccugaacgagacccuggucacgaugccgcucggguacgugacccacggccugaaccuggaggaggcggcccgguacaugcgcagccucaaggugcccgccaccgucuccgugagcucccccgacgccgugaccgccuacaacggguaccugacgagcuccagcaagacccccgaggagcacuucaucgagaccaucucccuggcgggcagcuacaaggacuggagcuacuccggccagagcacccagcucgggaucgaguuccugaagcggggcgacaaguccgucuacuacacgagcaacccgaccaccuuccaccuggacggggaggugaucaccuucgacaaccucaagacgcugcugucccuccgcgaggugcggaccaucaaggucuucaccaccguggacaacaucaaccugcacacgcagguggucgacaugagcaugaccuacggccagcaguucggccccaccuaccuggacggggccgacgugaccaagaucaagccccacaacucccacgagggcaagacguucuacgugcucccgaacgacgacacccugcgcgucgaggccuucgaguacuaccacaccaccgaccccagcuuccuggggcgguacauguccgcccucaaccacacgaagaaguggaaguacccccaggugaacggccugaccagcaucaagugggccgacaacaacugcuaccuggcgaccgcccuccugacccugcagcagaucgagcucaaguucaaccccccggcccugcaggacgccuacuaccgcgcgcgggccggggaggccgccaacuucugcgcccugauccucgcguacugcaacaagacggugggcgagcugggcgacguccgcgagaccauguccuaccuguuccagcacgccaaccucgacagcugcaagcgggugcugaacgucgugugcaagaccugcgggcagcagcagaccacccugaagggcguggaggccgucauguacauggggacgcucuccuacgagcaguucaagaagggcgugcagauccccugcaccugcgggaagcaggccaccaaguaccuggugcagcaggagagccccuucgucaugauguccgcccccccggcgcaguacgagcugaagcacggcaccuucacgugcgccagcgaguacaccggcaacuaccagugcgggcacuacaagcacaucaccuccaaggagacccucuacugcaucgacggcgcccugcugacgaagagcagcgaguacaaggggcccaucaccgacguguucuacaaggagaacuccuacaccaccacgaucaagcccgugaccuacaagcucgacggcgucgugugcaccgagaucgaccccaagcuggacaacuacuacaagaaggacaacagcuacuucaccgagcagccgaucgaccuggugcccaaccagcccuaccccaacgccuccuucgacaacuucaaguucgucugcgacaacaucaaguucgccgacgaccucaaccagcugacgggguacaagaagccggcgagccgcgagcugaaggugaccuucuuccccgaccucaacggcgacguggucgccaucgacuacaagcacuacacccccuccuucaagaagggcgccaagcugcugcacaagcccaucguguggcacgugaacaacgccaccaacaaggcgacguacaagccgaacaccuggugcauccggugccucuggagcaccaagcccgucgagaccuccaacagcuucgacgugcugaaguccgaggacgcccaggggauggacaaccuggccugcgaggaccucaagcccgugagcgaggaggucguggagaaccccacgauccagaaggacgugcuggagugcaacgucaagaccaccgagguggugggcgacaucauccugaagccggccaacaacucccucaagaucaccgaggaggucgggcacacggaccugauggccgcguacguggacaacagcucccugaccaucaagaagcccaacgagcucagccgcgugcugggccugaagacccucgccacccacgggcuggccgccgucaacuccgugcccugggacacgaucgccaacuacgcgaagccguuccugaacaagguggucagcaccaccaccaacaucgugacgcgcugccucaaccgggugugcaccaacuacaugcccuacuucuucacccugcugcuccagcugugcaccuucacccgcuccacgaacagccggaucaaggccuccaugcccaccaccaucgccaagaacaccgucaagagcgugggcaaguucugccuggaggccagcuucaacuaccucaagucccccaacuucagcaagcugaucaacaucaucaucugguuccugcuccuguccgugugccugggcagccucaucuacuccacggccgcgcuggggguccugaugagcaaccucggcaugccguccuacugcaccggguaccgcgagggcuaccugaacagcaccaacgugaccaucgccacguacugcaccggcuccauccccugcagcgugugccuguccgggcucgacagccuggacaccuaccccucccuggagaccauccagaucacgaucagcuccuucaagugggaccucaccgccuucggccuggucgccgagugguuccuggccuacauccucuucacccgguucuucuacgugcuggggcuggcggccaucaugcagcucuucuucagcuacuucgccgugcacuucaucuccaacagcuggcugauguggcugaucaucaaccugguccagauggcccccaucuccgcgauggugcgcauguacaucuucuucgccagcuucuacuacguguggaagagcuacguccacgugguggacggcugcaacuccagcaccugcaugaugugcuacaagcggaaccgcgccacgcgggucgagugcaccaccaucgugaacgggguccgccgguccuucuacguguacgccaacggcggcaagggguucugcaagcuccacaacuggaacugcgugaacugcgacaccuucugcgccggcagcacguucaucuccgacgaggucgcgcgcgaccugagccugcaguucaagcggccgaucaaccccaccgaccaguccagcuacaucguggacuccgugaccgucaagaacgggagcauccaccucuacuucgacaaggccggccagaagaccuacgagcgccacucccugagccacuucgugaaccuggacaaccuccgggccaacaacacgaaggggucccugcccaucaacgugaucgucuucgacggcaagagcaagugcgaggaguccagcgccaaguccgccagcguguacuacucccagcugaugugccagcccauccuccugcuggaccaggcgcucgugagcgacgucggcgacagcgccgagguggccgugaagauguucgacgccuacgucaacaccuucuccagcaccuucaacgugccgauggagaagcugaagacccugguggccacggcggaggccgagcucgccaagaacgucucccuggacaacgugcugagcaccuucaucuccgccgcgcgccagggguucguggacagcgacgucgagaccaaggacgugguggagugccucaagcugucccaccagagcgacaucgaggucaccggcgacuccugcaacaacuacaugcugacguacaacaagguggagaacaugaccccccgggaccucggggccugcaucgacugcagcgcccgccacaucaacgcccagguggccaagucccacaacaucgcgcugaucuggaacgucaaggacuucaugagccuguccgagcagcuccggaagcagauccgcagcgccgccaagaagaacaaccugcccuucaagcugaccugcgccaccacgcgccagguggugaacgucaucaccaccaagaucgcccucaagggcgggugaggacuagucccuguucccagagcccacuuuuuuuucuuuuuuugaaauaaaauagccugucuuucagaucucaaaggcucuuuucagagccaccaaaaaaaaaaaaaaaaaaaaaaaaaaaaaaaaaaaaaaaaaaaaaaaaaaaaaaaaaaaaaaaaaaaaaaaaaaaaaaaaaaaaaaaaaaaaaaaaaaaaa

SEQ ID NO: 19958 - RNA, 6113 nt, Artificial Sequence
  SARS-CoV-2__MT628104.1__non-structural protein 3 (NSP3) mRNA gc
aggagagucccgcagucggcguccagcggcucugcuuguucgugugugugucguugcaggccuuauucaagcuuaccauggcccccaccaaggugaccuucggcgacgacacggucaucgaggugcagggguacaagagcgugaacaucaccuucgagcuggacgagcgcaucgacaagguccucaacgagaagugcuccgccuacaccguggagcugggcaccgaggugaacgaguucgcgugcgucguggccgacgccgugaucaagacgcugcagccggucagcgagcuccugaccccccuggggaucgaccucgacgagugguccauggccaccuacuaccuguucgacgagagcggcgaguucaagcuggccucccacauguacugcagcuucuacccccccgacgaggacgaggaggagggggacugcgaggaggaggaguucgagccguccacccaguacgaguacggcacggaggacgacuaccagggcaagccccucgaguucggggcgaccagcgccgcccugcagcccgaggaggagcaggaggaggacuggcuggacgacgacucccagcagaccgugggccagcaggacgggagcgaggacaaccagaccacgaccauccagaccaucguggagguccagccccagcucgagauggagcugaccccgguggugcagacgaucgaggucaacuccuucagcggcuaccugaagcucaccgacaacguguacaucaagaacgccgacaucguggaggaggcgaagaaggucaagcccaccgugguggucaacgccgccaacguguaccugaagcacgggggcggcguggccggggcccugaacaaggcgaccaacaacgccaugcaggucgaguccgacgacuacaucgccacgaacggcccccucaagguggggggcagcugcguccuguccggccacaaccuggccaagcacugccuccacgugguggggcccaacgucaacaagggcgaggacauccagcugcugaagagcgccuacgagaacuucaaccagcacgaggugcuccuggcgccgcugcucuccgccgggaucuucggcgccgaccccauccacagccugcgggugugcgucgacaccgugcgcaccaacguguaccuggccgucuucgacaagaaccucuacgacaagcugguguccagcuuccuggagaugaagagcgagaagcagguggagcagaagaucgccgagauccccaaggaggaggucaagcccuucaucaccgaguccaagccgagcguggagcagcggaagcaggacgacaagaagaucaaggcgugcguggaggaggucacgaccacccucgaggagaccaaguuccugacggagaaccugcuccuguacaucgacaucaacgggaaccugcaccccgacuccgccacccucgugagcgacaucgacaucaccuuccugaagaaggacgcccccuacaucgugggcgacgucgugcaggagggcgugcugaccgccgucgugauccccacgaagaaggccgggggcaccaccgagaugcucgcgaaggcccugcgcaaggugccgaccgacaacuacaucacgaccuaccccgggcagggccugaacggguacaccgucgaggaggccaagaccgugcucaagaagugcaaguccgccuucuacauccugcccagcaucaucuccaacgagaagcaggagauccugggcaccgugagcuggaaccuccgggagaugcuggcgcacgccgaggagacgcgcaagcugaugcccgucugcguggagaccaaggccaucguguccaccauccagcggaaguacaagggcaucaagauccaggagggggucguggacuacggcgcccgcuucuacuucuacaccagcaagacgaccguggccucccugaucaacacccucaacgaccugaacgagacccuggucacgaugccgcucggguacgugacccacggccugaaccuggaggaggcggcccgguacaugcgcagccucaaggugcccgccaccgucuccgugagcucccccgacgccgugaccgccuacaacggguaccugacgagcuccagcaagacccccgaggagcacuucaucgagaucaucucccuggcgggcagcuacaaggacuggagcuacuccggccagagcacccagcucgggaucgaguuccugaagcggggcgacaaguccgucuacuacaccagcaacccgacgaccuuccaccuggacggggaggugaucaccuucgacaaccucaagacccugcugucccuccgcgaggugcggacgaucaaggucuucaccaccguggacaacaucaaccugcacacccagguggucgacaugagcaugacguacggccagcaguucggccccaccuaccuggacggggccgacgugaccaagaucaagccccacaacucccacgagggcaagaccuucuacgugcucccgaacgacgacacgcugcgcgucgaggccuucgaguacuaccacaccaccgaccccagcuuccuggggcgguacauguccgcccucaaccacaccaagaaguggaaguacccccaggugaacggccugacgagcaucaagugggccgacaacaacugcuaccuggcgaccgcccuccugacccugcagcagaucgagcucaaguucaaccccccggcccugcaggacgccuacuaccgcgcgcgggccggggaggccgccaacuucugcgcccugauccucgcguacugcaacaagaccgugggcgagcugggcgacguccgcgagacgauguccuaccuguuccagcacgccaaccucgacagcugcaagcgggugcugaacgucgugugcaagaccugcgggcagcagcagaccacccugaagggcguggaggccgucauguacauggggacccucuccuacgagcaguucaagaagggcgugcagauccccugcacgugcgggaagcaggccaccaaguaccuggugcagcaggagagccccuucgucaugauguccgcccccccggcgcaguacgagcugaagcacggcaccuucaccugcgccagcgaguacacgggcaacuaccagugcgggcacuacaagcacaucaccuccaaggagacccucuacugcaucgacggcgcccugcugaccaagagcagcgaguacaaggggcccaucacggacguguucuacaaggagaacuccuacaccaccaccaucaagcccgugacguacaagcucgacggcgucgugugcaccgagaucgaccccaagcuggacaacuacuacaagaaggacaacagcuacuucaccgagcagccgaucgaccuggugcccaaccagcccuaccccaacgccuccuucgacaacuucaaguucgucugcgacaacaucaaguucgccgacgaccucaaccagcugaccggguacaagaagccggcgagccgcgagcugaaggugacguucuuccccgaccucaacggcgacguggucgccaucgacuacaagcacuacacccccuccuucaagaagggcgccaagcugcugcacaagcccaucguguggcacgugaacaacgccaccaacaaggcgaccuacaagccgaacacguggugcauccggugccucuggagcaccaagcccgucgagaccuccaacagcuucgacgugcugaaguccgaggacgcccaggggaugggcaaccuggccugcgaggaccucaagcccgugagcgaggaggucguggagaaccccaccauccagaaggacgugcuggagugcaacgucaagacgaccgagguggugggggacaucauccugaagccggccaacaacucccucaagaucaccgaggaggucggccacaccgaccugauggccgcguacguggacaacagcucccugacgaucaagaagcccaacgagcucagccgcgugcuggggcugaagacccucgccauccacggccuggccgccgucaacuccgugcccugggacaccaucgccaacuacgcgaagccguuccugaacaagguggucagcaccacgaccaacaucgugacccgcugccucaaccgggugugcaccaacuacaugcccuacuucuucacgcugcugcuccagcugugcaccuucacccgcuccaccaacagccggaucaaggccuccaugcccaccacgaucgccaagaacaccgucaagagcgugggcaaguucugccuggaggccagcuucaacuaccucaagucccccaacuucagcaagcugaucaacaucaucaucugguuccugcuccuguccgugugccuggggagccucaucuacuccaccgccgcgcugggcguccugaugagcaaccucgggaugccguccuacugcaccggcuaccgcgagggcuaccugaacagcacgaacgugaccaucgccaccuacugcaccggguccauccccugcagcgugugccuguccggccucgacagccuggacacguaccccucccuggagaccauccagaucaccaucagcuccuucaagugggaccucaccgccuucgggcuggucgccgagugguuccuggccuacauccucuucacgcgguucuucuacgugcugggccuggcggccaucaugcagcucuucuucagcuacuucgccgugcacuucaucuccaacagcuggcugauguggcugaucaucaaccugguccagauggcccccaucuccgcgauggugcgcauguacaucuucuucgccagcuucuacuacguguggaagagcuacguccacgugguggacgggugcaacuccagcaccugcaugaugugcuacaagcggaaccgcgccacccgggucgagugcaccacgaucgugaacggcguccgccgguccuucuacguguacgccaacggcgggaagggcuucugcaagcuccacaacuggaacugcgugaacugcgacaccuucugcgccgggagcaccuucaucuccgacgaggucgcgcgcgaccugagccugcaguucaagcggccgaucaaccccaccgaccaguccagcuacaucguggacuccgugacggucaagaacggcagcauccaccucuacuucgacaaggccgggcagaagaccuacgagcgccacucccugagccacuucgugaaccuggacaaccuccgggccaacaacaccaagggcucccugcccaucaacgugaucgucuucgacggcaagagcaagugcgaggaguccagcgccaaguccgccagcguguacuacucccagcugaugugccagcccauccuccugcuggaccaggcgcucgugagcgacgucggggacagcgccgagguggccgugaagauguucgacgccuacgucaacaccuucuccagcacguucaacgugccgauggagaagcugaagacccugguggccaccgcggaggccgagcucgccaagaacgucucccuggacaacgugcugagcaccuucaucuccgccgcgcgccagggcuucguggacagcgacgucgagacgaaggacgugguggagugccucaagcugucccaccagagcgacaucgaggucaccggggacuccugcaacaacuacaugcugaccuacaacaagguggagaacaugaccccccgggaccucggcgccugcaucgacugcagcgcccgccacaucaacgcccagguggccaagucccacaacaucgcgcugaucuggaacgucaaggacuucaugagccuguccgagcagcuccggaagcagauccgcagcgccgccaagaagaacaaccugcccuucaagcugacgugcgccaccacccgccagguggugaacgucgugaccacgaagaucgcccucaaggggggcugaggacuagucccuguucccagagcccacuuuuuuuucuuuuuuugaaauaaaauagccugucuuucagaucucaaaggcucuuuucagagccaccaaaaaaaaaaaaaaaaaaaaaaaaaaaaaaaaaaaaaaaaaaaaaaaaaaaaaaaaaaaaaaaaaaaaaaaaaaaaaaaaaaaaaaaaaaaaaaaaaaaaa

SEQ ID NO: 19959 - RNA, 6113 nt, Artificial Sequence
  SARS-CoV-2__MT628127.1__non-structural protein 3 (NSP3) mRNA gc
aggagagucccgcagucggcguccagcggcucugcuuguucgugugugugucguugcaggccuuauucaagcuuaccauggcccccaccaaggugaccuucggcgacgacacggucaucgaggugcagggguacaagagcgugaacaucaccuucgagcuggacgagcgcaucgacaagguccucaacgagaagugcuccgccuacaccguggagcugggcaccgaggugaacgaguucgcgugcgucguggccgacgccgugaucaagacgcugcagccggucagcgagcuccugaccccccuggggaucgaccucgacgagugguccauggccaccuacuaccuguucgacgagagcggcgaguucaagcuggccucccacauguacugcagcuucuacccccccgacgaggacgaggaggagggggacugcgaggaggaggaguucgagccguccacccaguacgaguacggcacggaggacgacuaccagggcaagccccucgaguucggggcgaccagcgccgcccugcagcccgaggaggagcaggaggaggacuggcuggacgacgacucccagcagaccgugggccagcaggacgggagcgaggacaaccagaccacgaccauccagaccaucguggagguccagccccagcucgagauggagcugaccccgguggugcagacgaucgaggucaacuccuucagcggcuaccugaagcucaccgacaacguguacaucaagaacgccgacaucguggaggaggcgaagaaggucaagcccaccgugguggucaacgccgccaacguguaccugaagcacgggggcggcguggccggggcccugaacaaggcgaccaacaacgccaugcaggucgaguccgacgacuacaucgccacgaacggcccccucaagguggggggcagcugcguccuguccggccacaaccuggccaagcacugccuccacgugguggggcccaacgucaacaagggcgaggacauccagcugcugaagagcgccuacgagaacuucaaccagcacgaggugcuccuggcgccgcugcucuccgccgggaucuucggcgccgaccccauccacagccugcgggugugcgucgacaccgugcgcaccaacguguaccuggccgucuucgacaagaaccucuacgacaagcugguguccagcuuccuggagaugaagagcgagaagcagguggagcagaagaucgccgagauccccaaggaggaggucaagcccuucaucaccgaguccaagccgagcguggagcagcggaagcaggacgacaagaagaucaaggcgugcguggaggaggucacgaccacccucgaggagaccaaguuccugacggagaaccugcuccuguacaucgacaucaacgggaaccugcaccccgacuccgccacccucgugagcgacaucgacaucaccuuccugaagaaggacgcccccuacaucgugggcgacgucgugcaggagggcgugcugaccgccgucgugauccccacgaagaaggccgggggcaccaccgagaugcucgcgaaggcccugcgcaaggugccgaccgacaacuacaucacgaccuaccccgggcagggccugaacggguacaccgucgaggaggccaagaccgugcucaagaagugcaaguccgccuucuacauccugcccagcaucaucuccaacgagaagcaggagauccugggcaccgugagcuggaaccuccgggagaugcuggcgcacgccgaggagacgcgcaagcugaugcccgucugcguggagaccaaggccaucguguccaccauccagcggaaguacaagggcaucaagauccaggagggggucguggacuacggcgcccgcuucuacuucuacaccagcaagacgaccguggccucccugaucaacacccucaacgaccugaacgagacccuggucacgaugccgcucggguacgugacccacggccugaaccuggaggaggcggcccgguacaugcgcagccucaaggugcccgccaccgucuccgugagcucccccgacgccgugaccgccuacaacggguaccugacgagcuccagcaagacccccgaggagcacuucaucgagaccaucucccuggcgggcagcuacaaggacuggagcuacuccggccagagcacccagcucgggaucgaguuccugaagcggggcgacaaguccgucuacuacacgagcaacccgaccaccuuccaccuggacggggaggugaucaccuucgacaaccucaagacgcugcugucccuccgcgaggugcggaccaucaaggucuucaccaccguggacaacaucaaccugcacacgcagguggucgacaugagcaugaccuacggccagcaguucggccccaccuaccuggacggggccgacgugaccaagaucaagccccacaacucccacgagggcaagacguucuacgugcucccgaacgacgacacccugcgcgucgaggccuucgaguacuaccacaccaccgaccccagcuuccuggggcgguacauguccgcccucaaccacacgaagaaguggaaguacccccaggugaacggccugaccagcaucaagugggccgacaacaacugcuaccuggcgaccgcccuccugacccugcagcagaucgagcucaaguucaaccccccggcccugcaggacgccuacuaccgcgcgcgggccggggaggccgccaacuucugcgcccugauccucgcguacugcaacaagacggugggcgagcugggcgacguccgcgagaccauguccuaccuguuccagcacgccaaccucgacagcugcaagcgggugcugaacgucgugugcaagaccugcgggcagcagcagaccacccugaagggcguggaggccgucauguacauggggacgcucuccuacgagcaguucaagaagggcgugcagauccccugcaccugcgggaagcaggccaccaaguaccuggugcagcaggagagccccuucgucaugauguccgcccccccggcgcaguacgagcugaagcacggcaccuucacgugcgccagcgaguacaccggcaacuaccagugcgggcacuacaagcacaucaccuccaaggagacccucuacugcaucgacggcgcccugcugacgaagagcagcgaguacaaggggcccaucaccgacguguucuacaaggagaacuccuacaccaccacgaucaagcccgugaccuacaagcucgacggcgucgugugcaccgagaucgaccccaagcuggacaacuacuacaagaaggacaacagcuacuucaccgagcagccgaucgaccuggugcccaaccagcccuaccccaacgccuccuucgacaacuucaaguucgucugcgacaacaucaaguucgccgacgaccucaaccagcugacgggguacaagaagccggcgagccgcgagcugaaggugaccuucuuccccgaccucaacggcgacguggucgccaucgacuacaagcacuacacccccuccuucaagaagggcgccaagcugcugcacaagcccaucguguggcacgugaacaacgccaccaacaaggcgacguacaagccgaacaccuggugcauccggugccucuggagcaccaagcccgucgagaccuccaacagcuucgacgugcugaaguccgaggacgcccaggggauggacaaccuggccugcgaggaccuccagcccgugagcgaggaggucguggagaaccccacgauccagaaggacgugcuggagugcaacgucaagaccaccgagguggugggcgacaucauccugaagccggccaacaacucccucaagaucaccgaggaggucgggcacacggaccugauggccgcguacguggacaacagcucccugaccaucaagaagcccaacgagcucagccgcgugcugggccugaagacccucgccacccacgggcuggccgccgucaacuccgugcccugggacacgaucgccaacuacgcgaagccguuccugaacaagguggucagcaccaccaccaacaucgugacgcgcugccucaaccgggugugcaccaacuacaugcccuacuucuucacccugcugcuccagcugugcaccuucacccgcuccacgaacagccggaucaaggccuccaugcccaccaccaucgccaagaacaccgucaagagcgugggcaaguucugccuggaggccagcuucaacuaccucaagucccccaacuucagcaagcugaucaacaucaucaucugguuccugcuccuguccgugugccugggcagccucaucuacuccacggccgcgcuggggguccugaugagcaaccucggcaugccguccuacugcaccggguaccgcgagggcuaccugaacagcaccaacgugaccaucgccacguacugcaccggcuccauccccugcagcgugugccuguccgggcucgacagccuggacaccuaccccucccuggagaccauccagaucacgaucagcuccuucaagugggaccucaccgccuucggccuggucgccgagugguuccuggccuacauccucuucacccgguucuucuacgugcuggggcuggcggccaucaugcagcucuucuucagcuacuucgccgugcacuucaucuccaacagcuggcugauguggcugaucaucaaccugguccagauggcccccaucuccgcgauggugcgcauguacaucuucuucgccagcuucuacuacguguggaagagcuacguccacgugguggacggcugcaacuccagcaccugcaugaugugcuacaagcggaaccgcgccacgcgggucgagugcaccaccaucgugaacgggguccgccgguccuucuacguguacgccaacggcggcaagggguucugcaagcuccacaacuggaacugcgugaacugcgacaccuucugcgccggcagcacguucaucuccgacgaggucgcgcgcgaccugagccugcaguucaagcggccgaucaaccccaccgaccaguccagcuacaucguggacuccgugaccgucaagaacgggagcauccaccucuacuucgacaaggccggccagaagaccuacgagcgccacucccugagccacuucgugaaccuggacaaccuccgggccaacaacacgaaggggucccugcccaucaacgugaucgucuucgacggcaagagcaagugcgaggaguccagcgccaaguccgccagcguguacuacucccagcugaugugccagcccauccuccugcuggaccaggcgcucgugagcgacgucggcgacagcgccgagguggccgugaagauguucgacgccuacgucaacaccuucuccagcaccuucaacgugccgauggagaagcugaagacccugguggccacggcggaggccgagcucgccaagaacgucucccuggacaacgugcugagcaccuucaucuccgccgcgcgccagggguucguggacagcgacgucgagaccaaggacgugguggagugccucaagcugucccaccagagcgacaucgaggucaccggcgacuccugcaacaacuacaugcugacguacaacaagguggagaacaugaccccccgggaccucggggccugcaucgacugcagcgcccgccacaucaacgcccagguggccaagucccacaacaucgcgcugaucuggaacgucaaggacuucaugagccuguccgagcagcuccggaagcagauccgcagcgccgccaagaagaacaaccugcccuucaagcugaccugcgccaccacgcgccagguggugaacgucgugaccaccaagaucgcccucaagggcgggugaggacuagucccuguucccagagcccacuuuuuuuucuuuuuuugaaauaaaauagccugucuuucagaucucaaaggcucuuuucagagccaccaaaaaaaaaaaaaaaaaaaaaaaaaaaaaaaaaaaaaaaaaaaaaaaaaaaaaaaaaaaaaaaaaaaaaaaaaaaaaaaaaaaaaaaaaaaaaaaaaaaaa

SEQ ID NO: 19960 - RNA, 6113 nt, Artificial Sequence
  SARS-CoV-2__MT628152.1__non-structural protein 3 (NSP3) mRNA gc
aggagagucccgcagucggcguccagcggcucugcuuguucgugugugugucguugcaggccuuauucaagcuuaccauggcccccaccaaggugaccuucggcgacgacacggucaucgaggugcagggguacaagagcgugaacaucaccuucgagcuggacgagcgcaucgacaagguccucaacgagaagugcuccgccuacaccguggagcugggcaccgaggugaacgaguucgcgugcgucguggccgacgccgugaucaagacgcugcagccggucagcgagcuccugaccccccuggggaucgaccucgacgagugguccauggccaccuacuaccuguucgacgagagcggcgaguucaagcuggccucccacauguacugcagcuucuacccccccgacgaggacgaggaggagggggacugcgaggaggaggaguucgagccguccacccaguacgaguacggcacggaggacgacuaccagggcaagccccucgaguucggggcgaccagcgccgcccugcagcccgaggaggagcaggaggaggacuggcuggacgacgacucccagcagaccgugggccagcaggacgggagcgaggacaaccagaccacgaccauccagaccaucguggagguccagccccagcucgagauggagcugaccccgguggugcagacgaucgaggucaacuccuucagcggcuaccugaagcucaccgacaacguguacaucaagaacgccgacaucguggaggaggcgaagaaggucaagcccaccgugguggucaacgccgccaacguguaccugaagcacgggggcggcguggccggggcccugaacaaggcgaccaacaacgccaugcaggucgaguccgacgacuacaucgccacgaacggcccccucaagguggggggcagcugcguccuguccggccacaaccuggccaagcacugccuccacgugguggggcccaacgucaacaagggcgaggacauccagcugcugaagagcgccuacgagaacuucaaccagcacgaggugcuccuggcgccgcugcucuccgccgggaucuucggcgccgaccccauccacagccugcgggugugcgucgacaccgugcgcaccaacguguaccuggccgucuucgacaagaaccucuacgacaagcugguguccagcuuccuggagaugaagagcgagaagcagguggagcagaagaucgccgagauccccaaggaggaggucaagcccuucaucaccgaguccaagccgagcguggagcagcggaagcaggacgacaagaagaucaaggcgugcguggaggaggucacgaccacccucgaggagaccaaguuccugacggagaaccugcuccuguacaucgacaucaacgggaaccugcaccccgacuccgccacccucgugagcgacaucgacaucaccuuccugaagaaggacgcccccuacaucgugggcgacgucgugcaggagggcgugcugaccgccgucgugauccccacgaagaaggccgggggcaccaccgagaugcucgcgaaggcccugcgcaaggugccgaccgacaacuacaucacgaccuaccccgggcagggccugaacggguacaccgucgaggaggccaagaccgugcucaagaagugcaaguccgccuucuacauccugcccagcaucaucuccaacgagaagcaggagauccugggcaccgugagcuggaaccuccgggagaugcuggcgcacgccgaggagacgcgcaagcugaugcccgucugcguggagaccaaggccaucguguccaccauccagcggaaguacaagggcaucaagauccaggagggggucguggacuacggcgcccgcuucuacuucuacaccagcaagacgaccguggccucccugaucaacacccucaacgaccugaacgagacccuggucacgaugccgcucggguacgugacccacggccugaaccuggaggaggcggcccgguacaugcgcagccucaaggugcccgccaccgucuccgugagcucccccgacgccgugaccgccuacaacggguaccugacgagcuccagcaagacccccgaggagcacuucaucgagaccaucucccuggcgggcagcuacaaggacuggagcuacuccggccagagcacccagcucgggaucgaguuccugaagcggggcgacaaguccgucuacuacacgagcaacccgaccaccuuccaccuggacggggaggugaucaccuucgacaaccucaagacgcugcugucccuccgcgaggugcggaccaucaaggucuucaccaccguggacaacaucaaccugcacacgcagguggucgacaugagcaugaccuacggccagcaguucggccccaccuaccuggacggggccgacgugaccaagaucaagccccacaacucccacgagggcaagacguucuacgugcucccgaacgacgacacccugcgcgucgaggccuucgaguacuaccacaccaccgaccccagcuuccuggggcgguacauguccgcccucaaccacacgaagaaguggaaguacccccaggugaacggccugaccagcaucaagugggccgacaacaacugcuaccuggcgaccgcccuccugacccugcagcagaucgagcucaaguucaaccccccggcccugcaggacgccuacuaccgcgcgcgggccggggaggccgccaacuucugcgcccugauccucgcguacugcaacaagacggugggcgagcugggcgacguccgcgagaccauguccuaccuguuccagcacgccaaccucgacagcugcaagcgggugcugaacgucgugugcaagaccugcgggcagcagcagaccacccugaagggcguggaggccgucauguacauggggacgcucuccuacgagcaguucaagaagggcgugcagauccccugcaccugcgggaagcaggccaccaaguaccuggugcagcaggagagccccuucgucaugauguccgcccccccggcgcaguacgagcugaagcacggcaccuucacgugcgccagcgaguacaccggcaacuaccagugcgggcacuacaagcacaucaccuccaaggagacccucuacugcaucgacggcgcccugcugacgaagagcagcgaguacaaggggcccaucaccgacguguucuacaaggagaacuccuacaccaccacgaucaagcccgugaccuacaagcucgacggcgucgugugcaccgagaucgaccccaagcuggacaacuacuacaagaaggacaacagcuacuucaccgagcagccgaucgaccugguguccaaccagcccuaccccaacgccagcuucgacaacuucaaguucgucugcgacaacaucaaguucgccgacgaccucaaccagcugacgggguacaagaagcccgcgucccgcgagcugaaggugaccuucuucccggaccucaacggcgacguggucgccaucgacuacaagcacuacacccccagcuucaagaagggcgccaagcugcugcacaagcccaucguguggcacgugaacaacgccaccaacaaggcgacguacaagcccaacaccuggugcauccggugccucugguccaccaagccggucgagaccagcaacuccuucgacgugcugaagagcgaggacgcccaggggauggacaaccuggccugcgaggaccucaagcccguguccgaggaggucguggagaaccccacgauccagaaggacgugcuggagugcaacgucaagaccaccgagguggugggcgacaucauccugaagcccgccaacaacagccucaagaucaccgaggaggucgggcacacggaccugauggccgcguacguggacaacuccagccugaccaucaagaagccgaacgagcucucccgcgugcugggccugaagacccucgccacccacgggcuggccgccgucaacagcgugcccugggacacgaucgccaacuacgcgaagcccuuccugaacaagguggucuccaccaccaccaacaucgugacgcgcugccucaaccgggugugcaccaacuacaugccguacuucuucacccugcugcuccagcugugcaccuucacccgcagcacgaacucccggaucaaggccagcaugcccaccaccaucgccaagaacaccgucaagagcgugggcaaguucugccuggaggccuccuucaacuaccucaagagccccaacuucuccaagcugaucaacaucaucaucugguuccugcuccugagcgugugccugggcucccucaucuacagcacggccgcgcuggggguccugauguccaaccucggcaugcccagcuacugcaccggguaccgcgagggcuaccugaacuccaccaacgugaccaucgccacguacugcaccggcagcaucccgugcuccgugugccugagcgggcucgacucccuggacaccuaccccagccuggagaccauccagaucacgaucuccagcuucaagugggaccucaccgccuucggccuggucgccgagugguuccuggccuacauccucuucacccgguucuucuacgugcuggggcuggcggccaucaugcagcucuucuucuccuacuucgccgugcacuucaucagcaacuccuggcugauguggcugaucaucaaccugguccagauggcccccaucagcgcgauggugcgcauguacaucuucuucgccagcuucuacuacguguggaaguccuacguccacgugguggacggcugcaacagcuccaccugcaugaugugcuacaagcggaaccgcgccacgcgggucgagugcaccaccaucgugaacgggguccgccggagcuucuacguguacgccaacggcggcaagggguucugcaagcuccacaacuggaacugcgugaacugcgacaccuucugcgccggcuccacguucaucagcgacgaggucgcgcgcgaccugucccugcaguucaagcggcccaucaacccgaccgaccagagcuccuacaucguggacagcgugaccgucaagaacggguccauccaccucuacuucgacaaggccggccagaagaccuacgagcgccacagccugucccacuucgugaaccuggacaaccuccgggccaacaacacgaaggggagccugcccaucaacgugaucgucuucgacggcaaguccaagugcgaggagagcuccgccaagagcgccuccguguacuacagccagcugaugugccagcccauccuccugcuggaccaggcgcucgugagcgacgucggcgacuccgccgagguggccgugaagauguucgacgccuacgucaacaccuucagcuccaccuucaacgugcccauggagaagcugaagacccugguggccacggcggaggccgagcucgccaagaacgucagccuggacaacgugcuguccaccuucaucagcgccgcgcgccagggguucguggacuccgacgucgagaccaaggacgugguggagugccucaagcugagccaccaguccgacaucgaggucaccggcgacagcugcaacaacuacaugcugacguacaacaagguggagaacaugaccccgcgggaccucggggccugcaucgacugcuccgcccgccacaucaacgcccagguggccaagagccacaacaucgcgcugaucuggaacgucaaggacuucaugucccugagcgagcagcuccggaagcagauccgcuccgccgccaagaagaacaaccugcccuucaagcugaccugcgccaccacgcgccagguggugaacgucgugaccaccaagaucgcccucaagggcgggugaggacuagucccuguucccagagcccacuuuuuuuucuuuuuuugaaauaaaauagccugucuuucagaucucaaaggcucuuuucagagccaccaaaaaaaaaaaaaaaaaaaaaaaaaaaaaaaaaaaaaaaaaaaaaaaaaaaaaaaaaaaaaaaaaaaaaaaaaaaaaaaaaaaaaaaaaaaaaaaaaaaaa

SEQ ID NO: 19961 - RNA, 6113 nt, Artificial Sequence
  SARS-CoV-2__MT628204.1__non-structural protein 3 (NSP3) mRNA gc
aggagagucccgcagucggcguccagcggcucugcuuguucgugugugugucguugcaggccuuauucaagcuuaccauggcccccaccaaggugaccuucggcgacgacacggucaucgaggugcagggguacaagagcgugaacaucaccuucgagcuggacgagcgcaucgacaagguccucaacgagaagugcuccgccuacaccguggagcugggcaccgaggugaacgaguucgcgugcgucguggccgacgccgugaucaagacgcugcagccggucagcgagcuccugaccccccuggggaucgaccucgacgagugguccauggccaucuacuaccuguucgacgagagcggcgaguucaagcuggccucccacauguacugcagcuucuacccccccgacgaggacgaggaggagggggacugcgaggaggaggaguucgagccguccacccaguacgaguacggcaccgaggacgacuaccagggcaagccccucgaguucggggcgacgagcgccgcccugcagcccgaggaggagcaggaggaggacuggcuggacgacgacucccagcagaccgugggccagcaggacgggagcgaggacaaccagaccaccacgauccagaccaucguggagguccagccccagcucgagauggagcugaccccgguggugcagaccaucgaggucaacuccuucagcggcuaccugaagcucacggacaacguguacaucaagaacgccgacaucguggaggaggcgaagaaggucaagcccaccgugguggucaacgccgccaacguguaccugaagcacgggggcggcguggccggggcccugaacaaggcgaccaacaacgccaugcaggucgaguccgacgacuacaucgccaccaacggcccccucaagguggggggcagcugcguccuguccggccacaaccuggccaagcacugccuccacgugguggggcccaacgucaacaagggcgaggacauccagcugcugaagagcgccuacgagaacuucaaccagcacgaggugcuccuggcgccgcugcucuccgccgggaucuucggcgccgaccccauccacagccugcgggugugcgucgacacggugcgcaccaacguguaccuggccgucuucgacaagaaccucuacgacaagcugguguccagcuuccuggagaugaagagcgagaagcagguggagcagaagaucgccgagauccccaaggaggaggucaagcccuucaucaccgaguccaagccgagcguggagcagcggaagcaggacgacaagaagaucaaggcgugcguggaggaggucaccacgacccucgaggagaccaaguuccugaccgagaaccugcuccuguacaucgacaucaacgggaaccugcaccccgacuccgccacgcucgugagcgacaucgacaucaccuuccugaagaaggacgcccccuacaucgugggcgacgucgugcaggagggcgugcugaccgccgucgugauccccaccaagaaggccgggggcacgaccgagaugcucgcgaaggcccugcgcaaggugccgaccgacaacuacaucaccacguaccccgggcagggccugaacggguacaccgucgaggaggccaagaccgugcucaagaagugcaaguccgccuucuacauccugcccagcaucaucuccaacgagaagcaggagauccugggcaccgugagcuggaaccuccgggagaugcuggcgcacgccgaggagacccgcaagcugaugcccgucugcguggagacgaaggccaucguguccaccauccagcggaaguacaagggcaucaagauccaggagggggucguggacuacggcgcccgcuucuacuucuacaccagcaagaccacgguggccucccugaucaacacccucaacgaccugaacgagacccuggucaccaugccgcucggguacgugacgcacggccugaaccuggaggaggcggcccgguacaugcgcagccucaaggugcccgccaccgucuccgugagcucccccgacgccgugaccgccuacaacggguaccugaccagcuccagcaagacgcccgaggagcacuucaucgagaccaucucccuggcgggcagcuacaaggacuggagcuacuccggccagagcacccagcucgggaucgaguuccugaagcggggcgacaaguccgucuacuacaccagcaacccgacgaccuuccaccuggacggggaggugaucaccuucgacaaccucaagacccugcugucccuccgcgaggugcggacgaucaaggucuucaccaccguggacaacaucaaccugcacacccagguggucgacaugagcaugacguacggccagcaguucggccccaccuaccuggacggggccgacgugaccaagaucaagccccacaacucccacgagggcaagaccuucuacgugcucccgaacgacgacacgcugcgcgucgaggccuucgaguacuaccacaccaccgaccccagcuuccuggggcgguacauguccgcccucaaccacaccaagaaguggaaguacccccaggugaacggccugacgagcaucaagugggccgacaacaacugcuaccuggcgaccgcccuccugacccugcagcagaucgagcucaaguucaaccccccggcccugcaggacgccuacuaccgcgcgcgggccggggaggccgccaacuucugcgcccugauccucgcguacugcaacaagaccgugggcgagcugggcgacguccgcgagacgauguccuaccuguuccagcacgccaaccucgacagcugcaagcgggugcugaacgucgugugcaagaccugcgggcagcagcagaccacccugaagggcguggaggccgucauguacauggggacccucuccuacgagcaguucaagaagggcgugcagauccccugcacgugcgggaagcaggccaccaaguaccuggugcagcaggagagccccuucgucaugauguccgcccccccggcgcaguacgagcugaagcacggcaccuucaccugcgccagcgaguacacgggcaacuaccagugcgggcacuacaagcacaucaccuccaaggagacccucuacugcaucgacggcgcccugcugaccaagagcagcgaguacaaggggcccaucacggacguguucuacaaggagaacuccuacaccaccaccaucaagcccgugacguacaagcucgacggcgucgugugcaccgagaucgaccccaagcuggacaacuacuacaagaaggacaacagcuacuucaccgagcagccgaucgaccuggugcccaaccagcccuaccccaacgccuccuucgacaacuucaaguucgucugcgacaacaucaaguucgccgacgaccucaaccagcugaccggguacaagaagccggcgagccgcgagcugaaggugacguucuuccccgaccucaacggcgacguggucgccaucgacuacaagcacuacacccccuccuucaagaagggcgccaagcugcugcacaagcccaucguguggcacgugaacaacgccaccaacaaggcgaccuacaagccgaacacguggugcauccggugccucuggagcaccaagcccgucgagaccuccaacagcuucgacgugcugaaguccgaggacgcccaggggauggacaaccuggccugcgaggaccucaagcccgugagcgaggaggucguggagaaccccaccauccagaaggacgugcuggagugcaacgucaagacgaccgagguggugggcgacaucauccugaagccggccaacaacucccucaagaucaccgaggaggucgggcacaccgaccugauggccgcguacguggacaacagcucccugacgaucaagaagcccaacgagcucagccgcgugcugggccugaagacccucgccacccacgggcuggccgccgucaacuccgugcccugggacaccaucgccaacuacgcgaagccguuccugaacaagguggucagcacgaccaccaacaucgugacccgcugccucaaccgggugugcacgaacuacaugcccuacuucuucacccugcugcuccagcugugcaccuucacccgcuccaccaacagccggaucaaggccuccaugcccacgaccaucgccaagaacaccgucaagagcgugggcaaguucugccuggaggccagcuucaacuaccucaagucccccaacuucagcaagcugaucaacaucaucaucugguuccugcuccuguccgugugccugggcagccucaucuacuccaccgccgcgcuggggguccugaugagcaaccucggcaugccguccuacugcacgggguaccgcgagggcuaccugaacagcaccaacgugaccaucgccaccuacugcacgggcuccauccccugcagcgugugccuguccgggcucgacagccuggacaccuaccccucccuggagaccauccagaucaccaucagcuccuucaagugggaccucacggccuucggccuggucgccgagugguuccuggccuacauccucuucacccgguucuucuacgugcuggggcuggcggccaucaugcagcucuucuucagcuacuucgccgugcacuucaucuccaacagcuggcugauguggcugaucaucaaccugguccagauggcccccaucuccgcgauggugcgcauguacaucuucuucgccagcuucuacuacguguggaagagcuacguccacgugguggacggcugcaacuccagcaccugcaugaugugcuacaagcggaaccgcgccacccgggucgagugcacgaccaucgugaacgggguccgccgguccuucuacguguacgccaacggcggcaagggguucugcaagcuccacaacuggaacugcgugaacugcgacaccuucugcgccggcagcaccuucaucuccgacgaggucgcgcgcgaccugagccugcaguucaagcggccgaucaaccccacggaccaguccagcuacaucguggacuccgugaccgucaagaacgggagcauccaccucuacuucgacaaggccggccagaagaccuacgagcgccacucccugagccacuucgugaaccuggacaaccuccgggccaacaacaccaaggggucccugcccaucaacgugaucgucuucgacggcaagagcaagugcgaggaguccagcgccaaguccgccagcguguacuacucccagcugaugugccagcccauccuccugcuggaccaggcgcucgugagcgacgucggcgacagcgccgagguggccgugaagauguucgacgccuacgucaacacguucuccagcaccuucaacgugccgauggagaagcugaagacccugguggccaccgcggaggccgagcucgccaagaacgucucccuggacaacgugcugagcacguucaucuccgccgcgcgccagggguucguggacagcgacgucgagaccaaggacgugguggagugccucaagcugucccaccagagcgacaucgaggucaccggcgacuccugcaacaacuacaugcugaccuacaacaagguggagaacaugacgccccgggaccucggggccugcaucgacugcagcgcccgccacaucaacgcccagguggccaagucccacaacaucgcgcugaucuggaacgucaaggacuucaugagccuguccgagcagcuccggaagcagauccgcagcgccgccaagaagaacaaccugcccuucaagcugaccugcgccaccacccgccagguggugaacgucgugacgaccaagaucgcccucaagggcgggugaggacuagucccuguucccagagcccacuuuuuuuucuuuuuuugaaauaaaauagccugucuuucagaucucaaaggcucuuuucagagccaccaaaaaaaaaaaaaaaaaaaaaaaaaaaaaaaaaaaaaaaaaaaaaaaaaaaaaaaaaaaaaaaaaaaaaaaaaaaaaaaaaaaaaaaaaaaaaaaaaaaaa

SEQ ID NO: 19962 - RNA, 6113 nt, Artificial Sequence
  SARS-CoV-2__MT628215.1__non-structural protein 3 (NSP3) mRNA gc
aggagagucccgcagucggcguccagcggcucugcuuguucgugugugugucguugcaggccuuauucaagcuuaccauggcccccaccaaggugaccuucggcgacgacacggucaucgaggugcagggguacaagagcgugaacaucaccuucgagcuggacgagcgcaucgacaagguccucaacgagaagugcuccgccuacaccguggagcugggcaccgaggugaacgaguucgcgugcgucguggccgacgccgugaucaagacgcugcagccggucagcgagcuccugaccccccuggggaucgaccucgacgagugguccauggccaccuacuaccuguucgacgagagcggcgaguucaagcuggccucccacauguacugcagcuucuacccccccgacgaggacgaggaggagggggacugcgaggaggaggaguucgagccguccacccaguacgaguacggcacggaggacgacuaccagggcaagccccucgaguucggggcgaccagcgccgcccugcagcccgaggaggagcaggaggaggacuggcuggacgacgacucccagcagaccgugggccagcaggacgggagcgaggacaaccagaccacgaccauccagaccaucguggagguccagccccagcucgagauggagcugaccccgguggugcagacgaucgaggucaacuccuucagcggcuaccugaagcucaccgacaacguguacaucaagaacgccgacaucguggaggaggcgaagaaggucaagcccaccgugguggucaacgccgccaacguguaccugaagcacgggggcggcguggccggggcccugaacaaggcgaccaacaacgccaugcaggucgaguccgacgacuacaucgccacgaacggcccccucaagguggggggcagcugcguccuguccggccacaaccuggccaagcacugccuccacgugguggggcccaacgucaacaagggcgaggacauccagcugcugaagagcgccuacgagaacuucaaccagcacgaggugcuccuggcgccgcugcucuccgccgggaucuucggcgccgaccccauccacagccugcgggugugcgucgacaccgugcgcaccaacguguaccuggccgucuucgacaagaaccucuacgacaagcugguguccagcuuccuggagaugaagagcgagaagcagguggagcagaagaucgccgagauccccaaggaggaggucaagcccuucaucaccgaguccaagccgagcguggagcagcggaagcaggacgacaagaagaucaaggcgugcguggaggaggucacgaccacccucgaggagaccaaguuccugacggagaaccugcuccuguacaucgacaucaacgggaaccugcaccccgacuccgccacccucgugagcgacaucgacaucaccuuccugaagaaggacgcccccuacaucgugggcgacgucgugcaggagggcgugcugaccgccgucgugauccccacgaagaaggccgggggcaccaccgagaugcucgcgaaggcccugcgcaaggugccgaccgacaacuacaucacgaccuaccccgggcagggccugaacggguacaccgucgaggaggccaagaccgugcucaagaagugcaaguccgccuucuacauccugcccagcaucaucuccaacgagaagcaggagauccugggcaccgugagcuggaaccuccgggagaugcuggcgcacgccgaggagacgcgcaagcugaugcccgucugcguggagaccaaggccaucguguccaccauccagcggaaguacaagggcaucaagauccaggagggggucguggacuacggcgcccgcuucuacuucuacaccagcaagacgaccguggccucccugaucaacacccucaacgaccugaacgagacccuggucacgaugccgcucggguacgugacccacggccugaaccuggaggaggcggcccgguacaugcgcagccucaaggugcccgccaccgucuccgugagcucccccgacgccgugaccgccuacaacggguaccugacgagcuccagcaagacccccgaggagcacuucaucgagaccaucucccuggcgggcagcuacaaggacuggagcuacuccggccagagcacccagcucgggaucgaguuccugaagcggggcgacaaguccgucuacuacacgagcaacccgaccaccuuccaccuggacggggaggugaucaccuucgacaaccucaagacgcugcugucccuccgcgaggugcggaccaucaaggucuucaccaccguggacaacaucaaccugcacacgcagguggucgacaugagcaugaccuacggccagcaguucggccccaccuaccuggacggggccgacgugaccaagaucaagccccacaacucccacgagggcaagacguucuacgugcucccgaacgacgacacccugcgcgucgaggccuucgaguacuaccacaccaccgaccccagcuuccuggggcgguacauguccgcccucaaccacacgaagaaguggaaguacccccaggugaacggccugaccagcaucaagugggccgacaacaacugcuaccuggcgaccgcccuccugacccugcagcagaucgagcucaaguucaaccccccggcccugcaggacgccuacuaccgcgcgcgggccggggaggccgccaacuucugcgcccugauccucgcguacugcaacaagacggugggcgagcugggcgacguccgcgagaccauguccuaccuguuccagcacgccaaccucgacagcugcaagcgggugcugaacgucgugugcaagaccugcgggcagcagcagaccacccugaagggcguggaggccgucauguacauggggacgcucuccuacgagcaguucaagaagggcgugcagauccccugcaccugcgggaagcaggccaccaaguaccuggugcagcaggagagccccuucgucaugauguccgcccccccggcgcaguacgagcugaagcacggcaccuucacgugcgccagcgaguacaccggcaacuaccagugcgggcacuacaagcacaucaccuccaaggagacccucuacugcaucgacggcgcccugcugacgaagagcagcgaguacaaggggcccaucaccgacguguucuacaaggagaacuccuacaccaccacgaucaagcccgugaccuacaagcucgacggcgucgugugcaccgagaucgaccccaagcuggacaacuacuacaagaaggacaacagcuacuucaccgagcagccgaucgaccuggugcccaaccagcccuaccccaacgccuccuucgacaacuucaaguucgucugcgacaacaucaaguucgccgacgaccucaaccagcugacgggguacaagaagccggcgagccgcgagcugaaggugaccuucuuccccgaccucaacggcgacguggucgccaucgacuacaagcacuacacccccuccuucaagaagggcgccaagcugcugcacaagcccaucguguggcacgugaacaacagcaccaacaaggccacguacaagccgaacaccuggugcauccggugccucugguccaccaagcccgucgagaccagcaacuccuucgacgugcugaagagcgaggacgcgcaggggauggacaaccuggccugcgaggaccucaagcccguguccgaggaggucguggagaaccccacgauccagaaggacgugcuggagugcaacgucaagaccaccgagguggugggcgacaucauccugaagccggccaacaacagccucaagaucaccgaggaggucgggcacacggaccugauggccgccuacguggacaacuccagccugaccaucaagaagcccaacgagcucucccgcgugcugggccugaagacccucgcgacccacgggcuggccgccgucaacagcgugcccugggacacgaucgccaacuacgccaagccguuccugaacaagguggucuccaccaccaccaacaucgugacgcgcugccucaaccgggugugcaccaacuacaugcccuacuucuucacccugcugcuccagcugugcaccuucacccgcagcacgaacucccggaucaaggcgagcaugcccaccaccaucgccaagaacaccgucaagagcgugggcaaguucugccuggaggccuccuucaacuaccucaagagccccaacuucuccaagcugaucaacaucaucaucugguuccugcuccugagcgugugccugggcucccucaucuacagcacggccgcccuggggguccugauguccaaccucggcaugccgagcuacugcaccggguaccgcgagggcuaccugaacuccaccaacgugaccaucgcgacguacugcaccggcagcauccccugcuccgugugccugagcgggcucgacucccuggacaccuaccccagccuggagaccauccagaucacgaucuccagcuucaagugggaccucaccgccuucggccuggucgccgagugguuccuggccuacauccucuucacccgguucuucuacgugcuggggcuggccgcgaucaugcagcucuucuucuccuacuucgccgugcacuucaucagcaacuccuggcugauguggcugaucaucaaccugguccagauggcccccaucagcgccauggugcgcauguacaucuucuucgcgagcuucuacuacguguggaaguccuacguccacgugguggacggcugcaacagcuccaccugcaugaugugcuacaagcggaaccgcgccacgcgggucgagugcaccaccaucgugaacgggguccgccggagcuucuacguguacgccaacggcggcaagggguucugcaagcuccacaacuggaacugcgugaacugcgacaccuucugcgccggcuccacguucaucagcgacgaggucgcccgcgaccugucccugcaguucaagcggccgaucaaccccaccgaccagagcuccuacaucguggacagcgugaccgucaagaacggguccauccaccucuacuucgacaaggcgggccagaagaccuacgagcgccacagccugucccacuucgugaaccuggacaaccuccgggccaacaacacgaaggggagccugcccaucaacgugaucgucuucgacggcaaguccaagugcgaggagagcuccgccaagagcgccuccguguacuacagccagcugaugugccagcccauccuccugcuggaccaggcccucgugagcgacgucggcgacuccgcggagguggccgugaagauguucgacgccuacgucaacaccuucagcuccaccuucaacgugccgauggagaagcugaagacccugguggccacggccgaggcggagcucgccaagaacgucagccuggacaacgugcuguccaccuucaucagcgccgcccgccagggguucguggacuccgacgucgagaccaaggacgugguggagugccucaagcugagccaccaguccgacaucgaggucaccggcgacagcugcaacaacuacaugcugacguacaacaagguggagaacaugaccccccgggaccucggggcgugcaucgacugcuccgcccgccacaucaacgcccagguggccaagagccacaacaucgcccugaucuggaacgucaaggacuucaugucccugagcgagcagcuccggaagcagauccgcuccgcggccaagaagaacaaccugcccuucaagcugaccugcgccaccacgcgccagguggugaacgucgugaccaccaagaucgcccucaagggcgggugaggacuagucccuguucccagagcccacuuuuuuuucuuuuuuugaaauaaaauagccugucuuucagaucucaaaggcucuuuucagagccaccaaaaaaaaaaaaaaaaaaaaaaaaaaaaaaaaaaaaaaaaaaaaaaaaaaaaaaaaaaaaaaaaaaaaaaaaaaaaaaaaaaaaaaaaaaaaaaaaaaaaa

SEQ ID NO: 19963 - RNA, 6113 nt, Artificial Sequence
  SARS-CoV-2__MT628218.1__non-structural protein 3 (NSP3) mRNA gc
aggagagucccgcagucggcguccagcggcucugcuuguucgugugugugucguugcaggccuuauucaagcuuaccauggcccccaccaaggugaccuucggcgacgacacggucaucgaggugcagggguacaagagcgugaacaucaccuucgagcuggacgagcgcaucgacaagguccucaacgagaagugcuccgccuacaccguggagcugggcaccgaggugaacgaguucgcgugcgucguggccgacgccgugaucaagacgcugcagccggucagcgagcuccugaccccccuggggaucgaccucgacgagugguccauggccaccuacuaccuguucgacgagagcggcgaguucaagcuggccucccacauguacugcagcuucuacccccccgacgaggacgaggaggagggggacugcgaggaggaggaguucgagccguccacccaguacgaguacggcacggaggacgacuaccagggcaagccccucgaguucggggcgaccagcgccgcccugcagcccgaggaggagcaggaggaggacuggcuggacgacgacucccagcagaccgugggccagcaggacgggagcgaggacaaccagaccacgaccauccagaccaucguggagguccagccccagcucgagauggagcugaccccgguggugcagacgaucgaggucaacuccuucagcggcuaccugaagcucaccgacaacguguacaucaagaacgccgacaucguggaggaggcgaagaaggucaagcccaccgugguggucaacgccgccaacguguaccugaagcacgggggcggcguggccggggcccugaacaaggcgaccaacaacgccaugcaggucgaguccgacgacuacaucgccacgaacggcccccucaagguggggggcagcugcguccuguccggccacaaccuggccaagcacugccuccacgugguggggcccaacgucaacaagggcgaggacauccagcugcugaagagcgccuacgagaacuucaaccagcacgaggugcuccuggcgccgcugcucuccgccgggaucuucggcgccgaccccauccacagccugcgggugugcgucgacaccgugcgcaccaacguguaccuggccgucuucgacaagaaccucuacgacaagcugguguccagcuuccuggagaugaagagcgagaagcagguggagcagaagaucgccgagauccccaaggaggaggucaagcccuucaucaccgaguccaagccgagcguggagcagcggaagcaggacgacaagaagaucaaggcgugcguggaggaggucacgaccacccucgaggagaccaaguuccugacggagaaccugcuccuguacaucgacaucaacgggaaccugcaccccgacuccgccacccucgugagcgacaucgacaucaccuuccugaagaaggacgcccccuacaucgugggcgacgucgugcaggagggcgugcugaccgccgucgugauccccacgaagaaggccgggggcaccaccgagaugcucgcgaaggcccugcgcaaggugccgaccgacaacuacaucacgaccuaccccgggcagggccugaacggguacaccgucgaggaggccaagaccgugcucaagaagugcaaguccgccuucuacauccugcccagcaucaucuccaacgagaagcaggagauccugggcaccgugagcuggaaccuccgggagaugcuggcgcacgccgaggagacgcgcaagcugaugcccgucugcguggagaccaaggccaucguguccaccauccagcggaaguacaagggcaucaagauccaggagggggucguggacuacggcgcccgcuucuacuucuacaccagcaagacgaccguggccucccugaucaacacccucaacgaccugaacgagacccuggucacgaugccgcucggguacgugacccacagccugaaccuggaggaggcggcccgguacaugcgcucccucaaggugcccgccaccgucagcguguccagccccgacgccgugaccgccuacaacggcuaccugacguccagcuccaagacccccgaggagcacuucaucgagaccaucagccuggcggggagcuacaaggacugguccuacagcggccaguccacccagcucggcaucgaguuccugaagcggggggacaagagcgucuacuacacguccaacccgaccaccuuccaccuggacggcgaggugaucaccuucgacaaccucaagacgcugcugagccuccgcgaggugcggaccaucaaggucuucaccaccguggacaacaucaaccugcacacgcagguggucgacauguccaugaccuacgggcagcaguucggccccaccuaccuggacggcgccgacgugaccaagaucaagccccacaacagccacgaggggaagacguucuacgugcucccgaacgacgacacccugcgcgucgaggccuucgaguacuaccacaccaccgaccccuccuuccugggccgguacaugagcgcccucaaccacacgaagaaguggaaguacccccaggugaacgggcugaccuccaucaagugggccgacaacaacugcuaccuggcgaccgcccuccugacccugcagcagaucgagcucaaguucaaccccccggcccugcaggacgccuacuaccgcgcgcgggccggcgaggccgccaacuucugcgcccugauccucgcguacugcaacaagacggugggggagcugggcgacguccgcgagaccaugagcuaccuguuccagcacgccaaccucgacuccugcaagcgggugcugaacgucgugugcaagaccugcggccagcagcagaccacccugaaggggguggaggccgucauguacaugggcacgcucagcuacgagcaguucaagaagggggugcagauccccugcaccugcggcaagcaggccaccaaguaccuggugcagcaggagucccccuucgucaugaugagcgcccccccggcgcaguacgagcugaagcacgggaccuucacgugcgccuccgaguacaccggcaacuaccagugcggccacuacaagcacaucaccagcaaggagacccucuacugcaucgacggggcccugcugacgaagagcuccgaguacaagggccccaucaccgacguguucuacaaggagaacagcuacaccaccacgaucaagcccgugaccuacaagcucgacggggucgugugcaccgagaucgaccccaagcuggacaacuacuacaagaaggacaacuccuacuucaccgagcagccgaucgaccuggugcccaaccagcccuaccccaacgccagcuucgacaacuucaaguucgucugcgacaacaucaaguucgccgacgaccucaaccagcugacgggcuacaagaagccggcgucccgcgagcugaaggugaccuucuuccccgaccucaacggggacguggucgccaucgacuacaagcacuacacccccagcuucaagaagggcgccaagcugcugcacaagcccaucguguggcacgugaacaacgccaccaacaaggcgacguacaagccgaacaccuggugcauccggugccucugguccaccaagcccgucgagaccagcaacuccuucgacgugcugaagagcgaggacgcccagggcauggacaaccuggccugcgaggaccucaagcccguguccgaggaggucguggagaaccccacgauccagaaggacgugcuggagugcaacgucaagaccaccgagguggugggggacaucauccugaagccggccaacaacagccucaagaucaccgaggaggucggccacacggaccugauggccgcguacguggacaacuccagccugaccaucaagaagcccaacgagcucucccgcgugcuggggcugaagacccucgccacccacggccuggccgccgucaacagcgugcccugggacacgaucgccaacuacgcgaagccguuccugaacaagguggucuccaccaccaccaacaucgugacgcgcugccucaaccgggugugcaccaacuacaugcccuacuucuucacccugcugcuccagcugugcaccuucacccgcagcacgaacucccggaucaaggccagcaugcccaccaccaucgccaagaacaccgucaagagcguggggaaguucugccuggaggccuccuucaacuaccucaagagccccaacuucuccaagcugaucaacaucaucaucugguuccugcuccugagcgugugccugggcucccucaucuacagcacggccgcgcugggcguccugauguccaaccucgggaugccgagcuacugcaccggcuaccgcgagggguaccugaacuccaccaacgugaccaucgccacguacugcaccggcagcauccccugcuccgugugccugagcggccucgacucccuggacaccuaccccagccuggagaccauccagaucacgaucuccagcuucaagugggaccucaccgccuucgggcuggucgccgagugguuccuggccuacauccucuucacccgguucuucuacgugcugggccuggcggccaucaugcagcucuucuucuccuacuucgccgugcacuucaucagcaacuccuggcugauguggcugaucaucaaccugguccagauggcccccaucagcgcgauggugcgcauguacaucuucuucgccagcuucuacuacguguggaaguccuacguccacgugguggacgggugcaacagcuccaccugcaugaugugcuacaagcggaaccgcgccacgcgggucgagugcaccaccaucgugaacggcguccgccggagcuucuacguguacgccaacgggggcaagggcuucugcaagcuccacaacuggaacugcgugaacugcgacaccuucugcgccggguccacguucaucagcgacgaggucgcgcgcgaccugucccugcaguucaagcggccgaucaaccccaccgaccagagcuccuacaucguggacagcgugaccgucaagaacggcuccauccaccucuacuucgacaaggccgggcagaagaccuacgagcgccacagccugucccacuucgugaaccuggacaaccuccgggccaacaacacgaagggcagccugcccaucaacgugaucgucuucgacgggaaguccaagugcgaggagagcuccgccaagagcgccuccguguacuacagccagcugaugugccagcccauccuccugcuggaccaggcgcucgugagcgacgucggcgacuccgccgagguggccgugaagauguucgacgccuacgucaacaccuucagcuccaccuucaacgugccgauggagaagcugaagacccugguggccacggcggaggccgagcucgccaagaacgucagccuggacaacgugcuguccaccuucaucagcgccgcgcgccagggcuucguggacuccgacgucgagaccaaggacgugguggagugccucaagcugagccaccaguccgacaucgaggucaccggggacagcugcaacaacuacaugcugacguacaacaagguggagaacaugaccccccgggaccucggcgccugcaucgacugcuccgcccgccacaucaacgcccagguggccaagagccacaacaucgcgcugaucuggaacgucaaggacuucaugucccugagcgagcagcuccggaagcagauccgcuccgccgccaagaagaacaaccugcccuucaagcugaccugcgccaccacgcgccagguggugaacgucgugaccaccaagaucgcccucaaggggggcugaggacuagucccuguucccagagcccacuuuuuuuucuuuuuuugaaauaaaauagccugucuuucagaucucaaaggcucuuuucagagccaccaaaaaaaaaaaaaaaaaaaaaaaaaaaaaaaaaaaaaaaaaaaaaaaaaaaaaaaaaaaaaaaaaaaaaaaaaaaaaaaaaaaaaaaaaaaaaaaaaaaaa

SEQ ID NO: 19964 - RNA, 6113 nt, Artificial Sequence
  SARS-CoV-2__MT628230.1__non-structural protein 3 (NSP3) mRNA gc
aggagagucccgcagucggcguccagcggcucugcuuguucgugugugugucguugcaggccuuauucaagcuuaccauggcccccaccaaggugaccuucggcgacgacacggucaucgaggugcagggguacaagagcgugaacaucaccuucgagcuggacgagcgcaucgacaagguccucaacgagaagugcuccgccuacaccguggagcugggcaccgaggugaacgaguucgcgugcgucguggccgacgccgugaucaagacgcugcagccggucagcgagcuccugaccccccuggggaucgaccucgacgagugguccauggccaccuacuaccuguucgacgagagcggcgaguucaagcuggccucccacauguacugcagcuucuacccccccgacgaggacgaggaggagggggacugcgaggaggaggaguucgagccguccacccaguacgaguacggcacggaggacgacuaccagggcaagccccucgaguucggggcgaccagcgccgcccugcagcccgaggaggagcaggaggaggacuggcuggacgacgacucccagcagaccgugggccagcaggacgggagcgaggacaaccagaccacgaccauccagaccaucguggagguccagccccagcucgagauggagcugaccccgguggugcagacgaucgaggucaacuccuucagcggcuaccugaagcucaccgacaacguguacaucaagaacgccgacaucguggaggaggcgaagaaggucaagcccaccgugguggucaacgccgccaacguguaccugaagcacgggggcggcguggccggggcccugaacaaggcgaccaacaacgccaugcaggucgaguccgacgacuacaucgccacgaacggcccccucaagguggggggcagcugcguccuguccggccacaaccuggccaagcacugccuccacgugguggggcccaacgucaacaagggcgaggacauccagcugcugaagagcgccuacgagaacuucaaccagcacgaggugcuccuggcgccgcugcucuccgccgggaucuucggcgccgaccccauccacagccugcgggugugcgucgacaccgugcgcaccaacguguaccuggccgucuucgacaagaaccucuacgacaagcugguguccagcuuccuggagaugaagagcgagaagcagguggagcagaagaucgccgagauccccaaggaggaggucaagcccuucaucaccgaguccaagccgagcguggagcagcggaagcaggacgacaagaagaucaaggcgugcguggaggaggucacgaccacccucgaggagaccaaguuccugacggagaaccugcuccuguacaucgacaucaacgggaaccugcaccccgacuccgccacccucgugagcgacaucgacaucaccuuccugaagaaggacgcccccuacaucgugggcgacgucgugcaggagggcgugcugaccgccgucgugauccccacgaagaaggccgggggcaccaccgagaugcucgcgaaggcccugcgcaaggugccgaccgacaacuacaucacgaccuaccccgggcagggccugaacggguacaccgucgaggaggccaagaccgugcucaagaagugcaaguccgccuucuacauccugcccagcaucaucuccaacgagaagcaggagauccugggcaccgugagcuggaaccuccgggagaugcuggcgcacgccgaggagacgcgcaagcugaugcccgucugcguggagaccaaggccaucguguccaccauccagcggaaguacaagggcaucaagauccaggagggggucguggacuacggcgcccgcuucuacuucuacaccagcaagacgaccguggccucccugaucaacacccucaacgaccugaacgagacccuggucacgaugccgcucggguacgugacccacggccugaaccuggaggaggcggcccgguacaugcgcagccucaaggugcccgccaccgucuccgugagcucccccgacgccgugaccgccuacaacggguaccugacgagcuccagcaagacccccgaggagcacuucaucgagaucaucucccuggcgggcagcuacaaggacuggagcuacuccggccagagcacccagcucgggaucgaguuccugaagcggggcgacaaguccgucuacuacaccagcaacccgacgaccuuccaccuggacggggaggugaucaccuucgacaaccucaagacccugcugucccuccgcgaggugcggacgaucaaggucuucaccaccguggacaacaucaaccugcacacccagguggucgacaugagcaugacguacggccagcaguucggccccaccuaccuggacggggccgacgugaccaagaucaagccccacaacucccacgagggcaagaccuucuacgugcucccgaacgacgacacgcugcgcgucgaggccuucgaguacuaccacaccaccgaccccagcuuccuggggcgguacauguccgcccucaaccacaccaagaaguggaaguacccccaggugaacggccugacgagcaucaagugggccgacaacaacugcuaccuggcgaccgcccuccugacccugcagcagaucgagcucaaguucaaccccccggcccugcaggacgccuacuaccgcgcgcgggccggggaggccgccaacuucugcgcccugauccucgcguacugcaacaagaccgugggcgagcugggcgacguccgcgagacgauguccuaccuguuccagcacgccaaccucgacagcugcaagcgggugcugaacgucgugugcaagaccugcgggcagcagcagaccacccugaagggcguggaggccgucauguacauggggacccucuccuacgagcaguucaagaagggcgugcagauccccugcacgugcgggaagcaggccaccaaguaccuggugcagcaggagagccccuucgucaugauguccgcccccccggcgcaguacgagcugaagcacggcaccuucaccugcgccagcgaguacacgggcaacuaccagugcgggcacuacaagcacaucaccuccaaggagacccucuacugcaucgacggcgcccugcugaccaagagcagcgaguacaaggggcccaucacggacguguucuacaaggagaacuccuacaccaccaccaucaagcccgugacguacaagcucgacggcgucgugugcaccgagaucgaccccaagcuggacaacuacuacaagaaggacaacagcuacuucaccgagcagccgaucgaccuggugcccaaccagcccuaccccaacgccuccuucgacaacuucaaguucgucugcgacaacaucaaguucgccgacgaccucaaccagcugaccggguacaagaagccggcgagccgcgagcugaaggugacguucuuccccgaccucaacggcgacguggucgccaucgacuacaagcacuacacccccuccuucaagaagggcgccaagcugcugcacaagcccaucguguggcacgugaacaacgccaccaacaaggcgaccuacaagccgaacacguggugcauccggugccucuggagcaccaagcccgucgagaccuccaacagcuucgacgugcugaaguccgaggacgcccaggggauggacaaccuggccugcgaggaccucaagcccgugagcgaggaggucguggagaaccccaccauccagaaggacgugcuggagugcaacgucaagacgaccgagguggugggcgacaucauccugaagccggccaacaacucccucaagaucaccgaggaggucgggcacaccgaccugauggccgcguacguggacaacagcucccugacgaucaagaagcccaacgagcucagccgcgugcugggccugaagacccucgccacccacgggcuggccgccgucaacuccgugcccugggacaccaucgccaacuacgcgaagccguuccugaacaagguggucagcacgaccaccaacaucgugacccgcugccucaaccgggugugcacgaacuacaugcccuacuucuucacccugcugcuccagcugugcaccuucacccgcuccaccaacagccggaucaaggccuccaugcccacgaccaucgccaagagcaccgucaagagcgugggcaaguucugccuggaggccuccuucaacuaccucaagagccccaacuucuccaagcugaucaacaucaucaucugguuccugcuccugagcgugugccugggcucccucaucuacagcaccgccgcgcuggggguccugauguccaaccucggcaugccgagcuacugcacgggguaccgcgagggcuaccugaacuccaccaacgugaccaucgccaccuacugcacgggcagcauccccugcuccgugugccugagcgggcucgacucccuggacaccuaccccagccuggagaccauccagaucaccaucuccagcuucaagugggaccucacggccuucggccuggucgccgagugguuccuggccuacauccucuucacccgguucuucuacgugcuggggcuggcggccaucaugcagcucuucuucuccuacuucgccgugcacuucaucagcaacuccuggcugauguggcugaucaucaaccugguccagauggcccccaucagcgcgauggugcgcauguacaucuucuucgccagcuucuacuacguguggaaguccuacguccacgugguggacggcugcaacagcuccaccugcaugaugugcuacaagcggaaccgcgccacccgggucgagugcacgaccaucgugaacgggguccgccggagcuucuacguguacgccaacggcggcaagggguucugcaagcuccacaacuggaacugcgugaacugcgacaccuucugcgccggcuccaccuucaucagcgacgaggucgcgcgcgaccugucccugcaguucaagcggccgaucaaccccacggaccagagcuccuacaucguggacagcgugaccgucaagaacggguccauccaccucuacuucgacaaggccggccagaagaccuacgagcgccacagccugucccacuucgugaaccuggacaaccuccgggccaacaacaccaaggggagccugcccaucaacgugaucgucuucgacggcaaguccaagugcgaggagagcuccgccaagagcgccuccguguacuacagccagcugaugugccagcccauccuccugcuggaccaggcgcucgugagcgacgucggcgacuccgccgagguggccgugaagauguucgacgccuacgucaacacguucagcuccaccuucaacgugccgauggagaagcugaagacccugguggccaccgcggaggccgagcucgccaagaacgucagccuggacaacgugcuguccacguucaucagcgccgcgcgccagggguucguggacuccgacgucgagaccaaggacgugguggagugccucaagcugagccaccaguccgacaucgaggucaccggcgacagcugcaacaacuacaugcugaccuacaacaagguggagaacaugacgccccgggaccucggggccugcaucgacugcuccgcccgccacaucaacgcccagguggccaagagccacaacaucgcgcugaucuggaacgucaaggacuucaugucccugagcgagcagcuccggaagcagauccgcuccgccgccaagaagaacaaccugcccuucaagcugaccugcgccaccacccgccagguggugaacgucgugacgaccaagaucgcccucaagggcgggugaggacuagucccuguucccagagcccacuuuuuuuucuuuuuuugaaauaaaauagccugucuuucagaucucaaaggcucuuuucagagccaccaaaaaaaaaaaaaaaaaaaaaaaaaaaaaaaaaaaaaaaaaaaaaaaaaaaaaaaaaaaaaaaaaaaaaaaaaaaaaaaaaaaaaaaaaaaaaaaaaaaaa

SEQ ID NO: 19965 - RNA, 6113 nt, Artificial Sequence
  SARS-CoV-2__MT628231.1__non-structural protein 3 (NSP3) mRNA gc
aggagagucccgcagucggcguccagcggcucugcuuguucgugugugugucguugcaggccuuauucaagcuuaccauggcccccaccaaggugaccuucggcgacgacacggucaucgaggugcagggguacaagagcgugaacaucaccuucgagcuggacgagcgcaucgacaagguccucaacgagaagugcuccgccuacaccguggagcugggcaccgaggugaacgaguucgcgugcgucguggccgacgccgugaucaagacgcugcagccggucagcgagcuccugaccccccuggggaucgaccucgacgagugguccauggccaccuacuaccuguucgacgagagcggcgaguucaagcuggccucccacauguacugcagcuucuacccccccgacgaggacgaggaggagggggacugcgaggaggaggaguucgagccguccacccaguacgaguacggcacggaggacgacuaccagggcaagccccucgaguucggggcgaccagcgccgcccugcagcccgaggaggagcaggaggaggacuggcuggacgacgacucccagcagaccgugggccagcaggacgggagcgaggacaaccagaccacgaccauccagaccaucguggagguccagccccagcucgagauggagcugaccccgguggugcagacgaucgaggucaacuccuucagcggcuaccugaagcucaccgacaacguguacaucaagaacgccgacaucguggaggaggcgaagaaggucaagcccaccgugguggucaacgccgccaacguguaccugaagcacgggggcggcguggccggggcccugaacaaggcgaccaacaacgccaugcaggucgaguccgacgacuacaucgccacgaacggcccccucaagguggggggcagcugcguccuguccggccacaaccuggccaagcacugccuccacgugguggggcccaacgucaacaagggcgaggacauccagcugcugaagagcgccuacgagaacuucaaccagcacgaggugcuccuggcgccgcugcucuccgccgggaucuucggcgccgaccccauccacagccugcgggugugcgucgacaccgugcgcaccaacguguaccuggccgucuucgacaagaaccucuacgacaagcugguguccagcuuccuggagaugaagagcgagaagcagguggagcagaagaucgccgagauccccaaggaggaggucaagcccuucaucaccgaguccaagccgagcguggagcagcggaagcaggacgacaagaagaucaaggcgugcguggaggaggucacgaccacccucgaggagaccaaguuccugacggagaaccugcuccuguacaucgacaucaacgggaaccugcaccccgacuccgccacccucgugagcgacaucgacaucaccuuccugaagaaggacgcccccuacaucgugggcgacgucgugcaggagggcgugcugaccgccgucgugauccccacgaagaaggccgggggcaccaccgagaugcucgcgaaggcccugcgcaaggugccgaccgacaacuacaucacgaccuaccccgggcagggccugaacggguacaccgucgaggaggccaagaccgugcucaagaagugcaaguccgccuucuacauccugcccagcaucaucuccaacgagaagcaggagauccugggcaccgugagcuggaaccuccgggagaugcuggcgcacgccgaggagacgcgcaagcugaugcccgucugcguggagaccaaggccaucguguccaccauccagcggaaguacaagggcaucaagauccaggagggggucguggacuacggcgcccgcuucuacuucuacaccagcaagacgaccguggccucccugaucaacacccucaacgaccugaacgagacccuggucacgaugccgcucggguacgugacccacggccugaaccuggaggaggcggcccgguacaugcgcagccucaaggugcccgccaccgucuccgugagcucccccgacgccgugaccgccuacaacggguaccugacgagcuccagcaagacccccgaggagcacuucaucgagaucaucucccuggcgggcagcuacaaggacuggagcuacuccggccagagcacccagcucgggaucgaguuccugaagcggggcgacaaguccgucuacuacaccagcaacccgacgaccuuccaccuggacggggaggugaucaccuucgacaaccucaagacccugcugucccuccgcgaggugcggacgaucaaggucuucaccaccguggacaacaucaaccugcacacccagguggucgacaugagcaugacguacggccagcaguucggccccaccuaccuggacggggccgacgugaccaagaucaagccccacaacucccacgagggcaagaccuucuacgugcucccgaacgacgacacgcugcgcgucgaggccuucgaguacuaccacaccaccgaccccagcuuccuggggcgguacauguccgcccucaaccacaccaagaaguggaaguacccccaggugaacggccugacgagcaucaagugggccgacaacaacugcuaccuggcgaccgcccuccugacccugcagcagaucgagcucaaguucaaccccccggcccugcaggacgccuacuaccgcgcgcgggccggggaggccgccaacuucugcgcccugauccucgcguacugcaacaagaccgugggcgagcugggcgacguccgcgagacgauguccuaccuguuccagcacgccaaccucgacagcugcaagcgggugcugaacgucgugugcaagaccugcgggcagcagcagaccacccugaagggcguggaggccgucauguacauggggacccucuccuacgagcaguucaagaagggcgugcagauccccugcacgugcgggaagcaggccaccaaguaccuggugcagcaggagagccccuucgucaugauguccgcccccccggcgcaguacgagcugaagcacggcaccuucaccugcgccagcgaguacacgggcaacuaccagugcgggcacuacaagcacaucaccuccaaggagacccucuacugcaucgacggcgcccugcugaccaagagcagcgaguacaaggggcccaucacggacguguucuacaaggagaacuccuacaccaccaccaucaagcccgugacguacaagcucgacggcgucgugugcaccgagaucgaccccaagcuggacaacuacuacaagaaggacaacagcuacuucaccgagcagccgaucgaccuggugcccaaccagcccuaccccaacgccuccuucgacaacuucaaguucgucugcgacaacaucaaguucgccgacgaccucaaccagcugaccggguacaagaagccggcgagccgcgagcugaaggugacguucuuccccgaccucaacggcgacguggucgccaucgacuacaagcacuacacccccuccuucaagaagggcgccaagcugcugcacaagcccaucguguggcacgugaacaacgccaccaacaaggcgaccuacaagccgaacacguggugcauccggugccucuggagcaccaagcccgucgagaccuccaacagcuucgacgugcugaaguccgaggacgcccaggggauggacaaccuggccugcgaggaccucaagcccgugagcgaggaggucguggagaaccccaccauccagaaggacgugcuggagugcaacgucaagacgaccgagguggugggcgacaucauccugaagccggccaacaacucccucaagaucaccgaggaggucgggcacaccgaccugauggccgcguacguggacaacagcucccugacgaucaagaagcccaacgagcucagccgcgugcugggccugaagacccucgccacccacgggcuggccgccgucaacuccgugcccugggacaccaucgccaacuacgcgaagccguuccugaacaagguggucagcacgaccaccaacaucgugacccgcugccucaaccgggugugcacgaacuacaugcccuacuucuucacccugcugcuccagcugugcaccuucacccgcuccaccaacagccggaucaaggccuccaugcccacgaccaucgccaagaacaccgucaagagcgugggcaaguucugccuggaggccagcuucaacuaccucaagucccccaacuucagcaagcugaucaacaucaucaucugguuccugcuccuguccgugugccugggcagccucaucuacuccaccgccgcgcuggggguccugaugagcaaccucggcaugccguccuacugcacgggguaccgcgagggcuaccugaacagcaccaacgugaccaucgccaccuacugcacgggcuccauccccugcagcgugugccuguccgggcucgacagccuggacaccuaccccucccuggagaccauccagaucaccaucagcuccuucaagugggaccucacggccuucggccuggucgccgagugguuccuggccuacauccucuucacccgguucuucuacgugcuggggcuggcggccaucaugcagcucuucuucagcuacuucgccgugcacuucaucuccaacagcuggcugauguggcugaucaucaaccugguccagauggcccccaucuccgcgauggugcgcauguacaucuucuucgccagcuucuacuacguguggaagagcuacguccacgugguggacggcugcaacuccagcaccugcaugaugugcuacaagcggaaccgcgccacccgggucgagugcacgaccaucgugaacgggguccgccgguccuucuacguguacgccaacggcggcaagggguucugcaagcuccacaacuggaacugcgugaacugcgacaccuucugcgccggcagcaccuucaucuccgacgaggucgcgcgcgaccugagccugcaguucaagcggccgaucaaccccacggaccaguccagcuacaucguggacuccgugaccgucaagaacgggagcauccaccucuacuucgacaaggccggccagaagaccuacgagcgccacucccugagccacuucgugaaccuggacaaccuccgggccaacaacaccaaggggucccugcccaucaacgugaucgucuucgacggcaagagcaagugcgaggaguccagcgccaaguccgccagcguguacuacucccagcugaugugccagcccauccuccugcuggaccaggcgcucgugagcgacgucggcgacagcgccgagguggccgugaagauguucgacgccuacgucaacacguucuccagcaccuucaacgugccgauggagaagcugaagacccugguggccaccgcggaggccgagcucgccaagaacgucucccuggacaacgugcugagcacguucaucuccgccgcgcgccagggguucguggacagcgacgucgagaccaaggacgugguggagugccucaagcugucccaccagagcgacaucgaggucaccggcgacuccugcaacaacuacaugcugaccuacaacaagguggagaacaugacgccccgggaccucggggccugcaucgacugcagcgcccgccacaucaacgcccagguggccaagucccacaacaucgcgcugaucuggaacgucaaggacuucaugagccuguccgagcagcuccggaagcagauccgcagcgccgccaagaagaacaaccugcccuucaagcugaccugcgccaccacccgccagguggugaacgucgugacgaccaagaucgcccucaagggcgggugaggacuagucccuguucccagagcccacuuuuuuuucuuuuuuugaaauaaaauagccugucuuucagaucucaaaggcucuuuucagagccaccaaaaaaaaaaaaaaaaaaaaaaaaaaaaaaaaaaaaaaaaaaaaaaaaaaaaaaaaaaaaaaaaaaaaaaaaaaaaaaaaaaaaaaaaaaaaaaaaaaaaa

SEQ ID NO: 19966 - RNA, 6113 nt, Artificial Sequence
  SARS-CoV-2__MT628273.1__non-structural protein 3 (NSP3) mRNA gc
aggagagucccgcagucggcguccagcggcucugcuuguucgugugugugucguugcaggccuuauucaagcuuaccauggcccccaccaaggugaccuucggcgacgacacggucaucgaggugcagggguacaagagcgugaacaucaccuucgagcuggacgagcgcaucgacaagguccucaacgagaagugcuccgccuacaccguggagcugggcaccgaggugaacgaguucgcgugcgucguggccgacgccgugaucaagacgcugcagccggucagcgagcuccugaccccccuggggaucgaccucgacgagugguccauggccaccuacuaccuguucgacgagagcggcgaguucaagcuggccucccacauguacugcagcuucuacccccccgacgaggacgaggaggagggggacugcgaggaggaggaguucgagccguccacccaguacgaguacggcacggaggacgacuaccagggcaagccccucgaguucggggcgaccagcgccgcccugcagcccgaggaggagcaggaggaggacuggcuggacgacgacucccagcagaccgugggccagcaggacgggagcgaggacaaccagaccacgaccauccagaccaucguggagguccagccccagcucgagauggagcugaccccgguggugcagacgaucgaggucaacuccuucagcggcuaccugaagcucaccgacaacguguacaucaagaacgccgacaucguggaggaggcgaagaaggucaagcccaccgugguggucaacgccgccaacguguaccugaagcacgggggcggcguggccggggcccugaacaaggcgaccaacaacgccaugcaggucgaguccgacgacuacaucgccacgaacggcccccucaagguggggggcagcugcguccuguccggccacaaccuggccaagcacugccuccacgugguggggcccaacgucaacaagggcgaggacauccagcugcugaagagcgccuacgagaacuucaaccagcacgaggugcuccuggcgccgcugcucuccgccgggaucuucggcgccgaccccauccacagccugcgggugugcgucgacaccgugcgcaccaacguguaccuggccgucuucgacaagaaccucuacgacaagcugguguccagcuuccuggagaugaagagcgagaagcagguggagcagaagaucgccgagauccccaaggaggaggucaagcccuucaucaccgaguccaagccgagcguggagcagcggaagcaggacgacaagaagaucaaggcgugcguggaggaggucacgaccacccucgaggagaccaaguuccugacggagaaccugcuccuguacaucgacaucaacgggaaccugcaccccgacuccgccacccucgugagcgacaucgacaucaccuuccugaagaaggacgcccccuacaucgugggcgacgucgugcaggagggcgugcugaccgccgucgugauccccacgaagaaggccgggggcaccaccgagaugcucgcgaaggcccugcgcaaggugccgaccgacaacuacaucacgaccuaccccgggcagggccugaacggguacaccgucgaggaggccaagaccgugcucaagaagugcaaguccgccuucuacauccugcccagcaucaucuccaacgagaagcaggagauccugggcaccgugagcuggaaccuccgggagaugcuggcgcacgccgaggagacgcgcaagcugaugcccgucugcguggagaccaaggccaucguguccaccauccagcggaaguacaagggcaucaagauccaggagggggucguggacuacggcgcccgcuucuacuucuacaccagcaagacgaccguggccucccugaucaacacccucaacgaccugaacgagacccuggucacgaugccgcucggguacgugacccacggccugaaccuggaggaggcggcccgguacaugcgcagccucaaggugcccgccaccgucuccgugagcucccccgacgccgugaccgccuacaacggguaccugacgagcuccagcaagacccccgaggagcacuucaucgagaccaucucccuggcgggcagcuacaaggacuggagcuacuccggccagagcacccagcucgggaucgaguuccugaagcggggcgacaaguccgucuacuacacgagcaacccgaccaccuuccaccuggacggggaggugaucaccuucgacaaccucaagacgcugcugucccuccgcgaggugcggaccaucaaggucuucaccaccguggacaacaucaaccugcacacgcagguggucgacaugagcaugaccuacggccagcaguucggccccaccuaccuggacggggccgacgugaccaagaucaagccccacaacucccacgagggcaagacguucuacgugcucccgaacgacgacacccugcgcgucgaggccuucgaguacuaccacaccaccgaccccagcuuccuggggcgguacauguccgcccucaaccacacgaagaaguggaaguacccccaggugaacggccugaccagcaucaagugggccgacaacaacugcuaccuggcgaccgcccuccugacccugcagcagaucgagcucaaguucaaccccccggcccugcaggacgccuacuaccgcgcgcgggccggggaggccgccaacuucugcgcccugauccucgcguacugcaacaagacggugggcgagcugggcgacguccgcgagaccauguccuaccuguuccagcacgccaaccucgacagcugcaagcgggugcugaacgucgugugcaagaccugcgggcagcagcagaccacccugaagggcguggaggccgucauguacauggggacgcucuccuacgagcaguucaagaagggcgugcagauccccugcaccugcgggaagcaggccaccaaguaccuggugcagcaggagagccccuucgucaugauguccgcccccccggcgcaguacgagcugaagcacggcaccuucacgugcgccagcgaguacaccggcaacuaccagugcgggcacuacaagcacaucaccuccaaggagacccucuacugcaucgacggcgcccugcugacgaagagcagcgaguacaaggggcccaucaccgacguguucuacaaggagaacuccuacaccaccacgaucaagcccgugaccuacaagcucgacggcgucgugugcaccgagaucgaccccaagcuggacaacuacuacaagaaggacaacagcuacuucaccgagcagccgaucgaccuggugcccaaccagcccuaccccaacgccuccuucgacaacuucaaguucgucugcgacaacaucaaguucgccgacgaccucaaccagcugacgggguacaagaagccggcgagccgcgagcugaaggugaccuucuuccccgaccucaacggcgacguggucgccaucgacuacaagcacuacacccccuccuucaagaagggcgccaagcugcugcacaagcccaucguguggcacgugaacaacgccaccaacaaggcgacguacaagccgaacaccuggugcauccggugccucuggagcaccaagcccgucgagaccuccaacagcuucgacgugcugaaguccgaggacgcccgcgggauggacaaccuggccugcgaggaccucaagcccgugagcgaggaggucguggagaaccccacgauccagaaggacgugcuggagugcaacgucaagaccaccgagguggugggcgacaucauccugaagccggccaacaacucccucaagaucaccgaggaggucgggcacacggaccugauggccgcguacguggacaacagcucccugaccaucaagaagcccaacgagcucagccgcgugcugggccugaagacccucgccacccacgggcuggccgccgucaacuccgugcccugggacacgaucgccaacuacgcgaagccguuccugaacaagguggucagcaccaccaccaacaucgugacgcggugccucaaccgcgugugcaccaacuacaugcccuacuucuucacccugcugcuccagcugugcaccuucacccgguccacgaacagccgcaucaaggccuccaugcccaccaccaucgccaagaacaccgucaagagcgugggcaaguucugccuggaggccagcuucaacuaccucaagucccccaacuucagcaagcugaucaacaucaucaucugguuccugcuccuguccgugugccugggcagccucaucuacuccacggccgcgcuggggguccugaugagcaaccucggcaugccguccuacugcaccggguaccgggagggcuaccugaacagcaccaacgugaccaucgccacguacugcaccggcuccauccccugcagcgugugccuguccgggcucgacagccuggacaccuaccccucccuggagaccauccagaucacgaucagcuccuucaagugggaccucaccgccuucggccuggucgccgagugguuccuggccuacauccucuucacccgcuucuucuacgugcuggggcuggcggccaucaugcagcucuucuucagcuacuucgccgugcacuucaucuccaacagcuggcugauguggcugaucaucaaccugguccagauggcccccaucuccgcgauggugcggauguacaucuucuucgccagcuucuacuacguguggaagagcuacguccacgugguggacggcugcaacuccagcaccugcaugaugugcuacaagcgcaaccgggccacgcgcgucgagugcaccaccaucgugaacgggguccggcgcuccuucuacguguacgccaacggcggcaagggguucugcaagcuccacaacuggaacugcgugaacugcgacaccuucugcgccggcagcacguucaucuccgacgaggucgcgcgggaccugagccugcaguucaagcgcccgaucaaccccaccgaccaguccagcuacaucguggacuccgugaccgucaagaacgggagcauccaccucuacuucgacaaggccggccagaagaccuacgagcggcacucccugagccacuucgugaaccuggacaaccuccgcgccaacaacacgaaggggucccugcccaucaacgugaucgucuucgacggcaagagcaagugcgaggaguccagcgccaaguccgccagcguguacuacucccagcugaugugccagcccauccuccugcuggaccaggcgcucgugagcgacgucggcgacagcgccgagguggccgugaagauguucgacgccuacgucaacaccuucuccagcaccuucaacgugccgauggagaagcugaagacccugguggccacggcggaggccgagcucgccaagaacgucucccuggacaacgugcugagcaccuucaucuccgccgcgcggcagggguucguggacagcgacgucgagaccaaggacgugguggagugccucaagcugucccaccagagcgacaucgaggucaccggcgacuccugcaacaacuacaugcugacguacaacaagguggagaacaugaccccccgcgaccucggggccugcaucgacugcagcgcccggcacaucaacgcccagguggccaagucccacaacaucgcgcugaucuggaacgucaaggacuucaugagccuguccgagcagcuccgcaagcagauccgcagcgccgccaagaagaacaaccugcccuucaagcugaccugcgccaccacgcggcagguggugaacgucgugaccaccaagaucgcccucaagggcgggugaggacuagucccuguucccagagcccacuuuuuuuucuuuuuuugaaauaaaauagccugucuuucagaucucaaaggcucuuuucagagccaccaaaaaaaaaaaaaaaaaaaaaaaaaaaaaaaaaaaaaaaaaaaaaaaaaaaaaaaaaaaaaaaaaaaaaaaaaaaaaaaaaaaaaaaaaaaaaaaaaaaaa

SEQ ID NO: 19967 - RNA, 6113 nt, Artificial Sequence
  SARS-CoV-2__MT632495.1__non-structural protein 3 (NSP3) mRNA gc
aggagagucccgcagucggcguccagcggcucugcuuguucgugugugugucguugcaggccuuauucaagcuuaccauggcccccaccaaggugaccuucggcgacgacacggucaucgaggugcagggguacaagagcgugaacaucaccuucgagcuggacgagcgcaucgacaagguccucaacgagaagugcuccgccuacaccguggagcugggcaccgaggugaacgaguucgcgugcgucguggccgacgccgugaucaagacgcugcagccggucagcgagcuccugaccccccuggggaucgaccucgacgagugguccauggccaccuacuaccuguucgacgagagcggcgaguucaagcuggccucccacauguacugcagcuucuacccccccgacgaggacgaggaggagggggacugcgaggaggaggaguucgagccguccacccaguacgaguacggcacggaggacgacuaccagggcaagccccucgaguucggggcgaccagcgccgcccugcagcccgaggaggagcaggaggaggacuggcuggacgacgacucccagcagaccgugggccagcaggacgggagcgaggacaaccagaccacgaccauccagaccaucguggagguccagccccagcucgagauggagcugaccccgguggugcagacgaucgaggucaacuccuucagcggcuaccugaagcucaccgacaacguguacaucaagaacgccgacaucguggaggaggcgaagaaggucaagcccaccgugguggucaacgccgccaacguguaccugaagcacgggggcggcguggccggggcccugaacaaggcgaccaacaacgccaugcaggucgaguccgacgacuacaucgccacgaacggcccccucaagguggggggcagcugcguccuguccggccacaacuucgccaagcacugccugcacgugguggggcccaacgucaacaagggcgaggacauccagcuccugaagagcgccuacgagaacuucaaccagcacgaggugcugcucgcgccgcugcuguccgccgggaucuucggcgccgaccccauccacagccuccgggugugcgucgacaccgugcgcaccaacguguaccuggccgucuucgacaagaaccuguacgacaagcucguguccagcuuccuggagaugaagagcgagaagcagguggagcagaagaucgccgagauccccaaggaggaggucaagcccuucaucaccgaguccaagccgagcguggagcagcggaagcaggacgacaagaagaucaaggcgugcguggaggaggucacgaccacccuggaggagaccaaguuccucacggagaaccugcugcucuacaucgacaucaacgggaaccugcaccccgacuccgccacccuggugagcgacaucgacaucaccuuccucaagaaggacgcccccuacaucgugggcgacgucgugcaggagggcgugcugaccgccgucgugauccccacgaagaaggccgggggcaccaccgagaugcuggcgaaggcccuccgcaaggugccgaccgacaacuacaucacgaccuaccccgggcagggccugaacggguacaccgucgaggaggccaagaccgugcugaagaagugcaaguccgccuucuacauccuccccagcaucaucuccaacgagaagcaggagauccugggcaccgugagcuggaaccugcgggagaugcucgcgcacgccgaggagacgcgcaagcugaugcccgucugcguggagaccaaggccaucguguccaccauccagcggaaguacaagggcaucaagauccaggagggggucguggacuacggcgcccgcuucuacuucuacaccagcaagacgaccguggccucccugaucaacacccugaacgaccucaacgagacccuggucacgaugccgcugggguacgugacccacggccucaaccuggaggaggcggcccgguacaugcgcagccugaaggugcccgucaccguguccgugagcucccccgacgccgucaccgccuacaacggguaccucacgagcuccagcaagacccccgaggagcacuucaucgagaccaucucccuggccggcagcuacaaggacuggagcuacuccggccagagcacccagcuggggaucgaguuccucaagcggggcgacaaguccguguacuacacgagcaacccgaccaccuuccaccuggacggggaggugaucaccuucgacaaccugaagacgcuccugucccugcgcgagguccggaccaucaagguguucaccaccguggacaacaucaaccuccacacgcaggucguggacaugagcaugaccuacggccagcaguucggccccaccuaccuggacggggcggacgugaccaagaucaagccccacaacucccacgagggcaagacguucuacguccugccgaacgacgacacccuccgcguggaggccuucgaguacuaccacaccaccgaccccagcuuccuggggcgguacauguccgcccugaaccacacgaagaaguggaaguacccccaggugaacggccucaccagcaucaagugggccgacaacaacugcuaccuggccaccgcgcugcucacccugcagcagaucgagcugaaguucaaccccccggcccuccaggacgccuacuaccgcgcccgggcgggggaggccgccaacuucugcgcccugauccuggccuacugcaacaagacggucggcgagcucggcgacgugcgcgagaccauguccuaccuguuccagcacgcgaaccuggacagcugcaagcggguccucaacguggugugcaagaccugcgggcagcagcagaccacccugaagggcgucgaggccgugauguacauggggacgcuguccuacgagcaguucaagaagggcgugcagauccccugcaccugcgggaagcaggccaccaaguaccucguccagcaggagagccccuucgugaugauguccgcccccccggcccaguacgagcugaagcacggcaccuucacgugcgcgagcgaguacaccggcaacuaccagugcgggcacuacaagcacaucaccuccaaggagacccuguacugcaucgacggcgcccuccugacgaagagcagcgaguacaaggggcccaucaccgacguguucuacaaggagaacuccuacaccaccacgaucaagcccgucaccuacaagcuggacggcguggugugcaccgagaucgaccccaagcucgacaacuacuacaagaaggacaacagcuacuucaccgagcagccgaucgaccugguccccaaccagcccuaccccaacgccuccuucgacaacuucaaguucgugugcgacaacaucaaguucgccgacgaccugaaccagcucacgggguacaagaagccggccagccgcgagcugaaggugaccuucuuccccgaccugaacggcgacgucguggcgaucgacuacaagcacuacacccccuccuucaagaagggcgccaagcuccugcacaagcccaucguguggcacgucaacaacgccaccaacaaggccacguacaagccgaacaccuggugcauccggugccuguggagcaccaagcccguggagaccuccaacagcuucgacgugcucaaguccgaggacgcgcaggggauggacaaccuggccugcgaggaccugaagcccgucagcgaggaggugguggagaaccccacgauccagaaggacguccucgagugcaacgugaagaccaccgagguggucggcgacaucauccugaagccggccaacaacucccugaagaucaccgaggagguggggcacacggaccucauggccgccuacguggacaacagcucccugaccaucaagaagcccaacgagcugagccgcguccucggccugaagacccuggcgacccacgggcucgccgccgugaacuccgugcccugggacacgaucgccaacuacgccaagccguuccugaacaaggucgugagcaccaccaccaacaucgugacgcgcugccugaaccgggucugcaccaacuacaugcccuacuucuucacccuccugcugcagcucugcaccuucacccgcuccacgaacagccggaucaaggcguccaugcccaccaccaucgccaagaacaccgugaagagcgugggcaaguucugccuggaggccagcuucaacuaccugaagucccccaacuucagcaagcucaucaacaucaucaucugguuccugcugcucuccgucugccugggcagccugaucuacuccacggccgcccucggggugcugaugagcaaccugggcaugccguccuacugcaccggguaccgcgagggcuaccucaacagcaccaacgugaccaucgcgacguacugcaccggcuccauccccugcagcgucugccuguccgggcuggacagccucgacaccuaccccucccuggagaccauccagaucacgaucagcuccuucaagugggaccugaccgccuucggccucguggccgagugguuccuggccuacauccuguucacccgguucuucuacgugcucgggcuggccgcgaucaugcagcuguucuucagcuacuucgccguccacuucaucuccaacagcuggcucauguggcugaucaucaaccuggugcagauggcccccaucuccgccauggugcgcauguacaucuucuucgcgagcuucuacuacgucuggaagagcuacgugcacguggucgacggcugcaacuccagcaccugcaugaugugcuacaagcggaaccgcgccacgcggguggagugcaccaccaucgucaacggggugcgccgguccuucuacguguacgccaacggcggcaagggguucugcaagcugcacaacuggaacugcgucaacugcgacaccuucugcgccggcagcacguucaucuccgacgagguggcccgcgaccucagccugcaguucaagcggccgaucaaccccaccgaccaguccagcuacaucguggacuccgucaccgugaagaacgggagcauccaccuguacuucgacaaggcgggccagaagaccuacgagcgccacucccucagccacuucgugaaccuggacaaccugcgggccaacaacacgaaggggucccuccccaucaacgucaucguguucgacggcaagagcaagugcgaggaguccagcgccaaguccgccagcguguacuacucccagcugaugugccagcccauccugcuccuggaccaggcccuggucagcgacgugggcgacagcgcggagguggccgucaagauguucgacgccuacgugaacaccuucuccagcaccuucaacgugccgauggagaagcucaagacccuggucgccacggccgaggcggagcuggccaagaacgugucccucgacaacgugcugagcaccuucaucuccgccgcccgccagggguucgucgacagcgacguggagaccaaggacguggucgagugccugaagcucucccaccagagcgacaucgaggugaccggcgacuccugcaacaacuacaugcugacguacaacaagguggagaacaugaccccccgggaccugggggcgugcaucgacugcagcgcccgccacaucaacgcccaggucgccaagucccacaacaucgcccucaucuggaacgugaaggacuucaugagccuguccgagcagcugcggaagcagauccgcagcgcggccaagaagaacaaccuccccuucaagcugaccugcgccaccacgcgccagguggucaacguggugaccaccaagaucgcccugaagggcgggugaggacuagucccuguucccagagcccacuuuuuuuucuuuuuuugaaauaaaauagccugucuuucagaucucaaaggcucuuuucagagccaccaaaaaaaaaaaaaaaaaaaaaaaaaaaaaaaaaaaaaaaaaaaaaaaaaaaaaaaaaaaaaaaaaaaaaaaaaaaaaaaaaaaaaaaaaaaaaaaaaaaaa

SEQ ID NO: 19968 - RNA, 6113 nt, Artificial Sequence
  SARS-CoV-2__MT632503.1__non-structural protein 3 (NSP3) mRNA gc
aggagagucccgcagucggcguccagcggcucugcuuguucgugugugugucguugcaggccuuauucaagcuuaccauggcccccaccaaggugaccuucggcgacgacacggucaucgaggugcagggguacaagagcgugaacaucaccuucgagcuggacgagcgcaucgacaagguccucaacgagaagugcuccgccuacaccguggagcugggcaccgaggugaacgaguucgcgugcgucguggccgacgccgugaucaagacgcugcagccggucagcgagcuccugaccccccuggggaucgaccucgacgagugguccauggccaccuacuaccuguucgacgagagcggcgaguucaagcuggccucccacauguacugcagcuucuacccccccgacgaggacgaggaggagggggacugcgaggaggaggaguucgagccguccacccaguacgaguacggcacggaggacgacuaccagggcaagccccucgaguucggggcgaccagcgccgcccugcagcccgaggaggagcaggaggaggacuggcuggacgacgacucccagcagaccgugggccagcaggacgggagcgaggacaaccagaccacgaccauccagaccaucguggagguccagccccagcucgagauggagcugaccccgguggugcagacgaucgaggucaacuccuucagcggcuaccugaagcucaccgacaacguguacaucaagaacgccgacaucguggaggaggcgaagaaggucaagcccaccgugguggucaacgccgccaacguguaccugaagcacgggggcggcguggccggggcccugaacaaggcgaccaacaacgccaugcaggucgaguccgacgacuacaucgccacgaacggcccccucaagguggggggcagcugcguccuguccggccacaaccuggccaagcacugccuccacgugguggggcccaacgucaacaagggcgaggacauccagcugcugaagagcgccuacgagaacuucaaccagcacgaggugcuccuggcgccgcugcucuccgccgggaucuucggcgccgaccccauccacagccugcgggugugcgucgacaccgugcgcaccaacguguaccuggccgucuucgacaagaaccucuacgacaagcugguguccagcuuccuggagaugaagagcgagaagcagguggagcagaagaucgccgagauccccaaggaggaggucaagcccuucaucaccgaguccaagccgagcguggagcagcggaagcaggacgacaagaagaucaaggcgugcguggaggaggucacgaccacccucgaggagaccaaguuccugacggagaaccugcuccuguacaucgacaucaacgggaaccugcaccccgacuccgccacccucgugagcgacaucgacaucaccuuccugaagaaggacgcccccuacaucgugggcgacgucgugcaggagggcgugcugaccgccgucgugauccccacgaagaaggccgggggcaccaccgagaugcucgcgaaggcccugcgcaaggugccgaccgacaacuacaucacgaccuaccccgggcagggccugaacggguacaccgucgaggaggccaagaccgugcucaagaagugcaaguccgccuucuacauccugcccagcaucaucuccaacgagaagcaggagauccugggcaccgugagcuggaaccuccgggagaugcuggcgcacgccgaggagacgcgcaagcugaugcccgucugcguggagaccaaggccaucguguccaccauccagcggaaguacaagggcaucaagauccaggagggggucguggacuacggcgcccgcuucuacuucuacaccagcaagacgaccguggccucccugaucaacacccucaacgaccugaacgagacccuggucacgaugccgcucggguacgugacccacggccugaaccuggaggaggcggcccgguacaugcgcagccucaaggugcccgccaccgucuccgugagcucccccgacgccgugaccgccuacaacggguaccugacgagcuccagcaagacccccgaggagcacuucaucgagaccaucucccuggcgggcagcuacaaggacuggagcuacuccggccagagcacccagcucgggaucgaguuccugaagcggggcgacaaguccgucuacuacacgagcaacccgaccaccuuccaccuggacggggaggugaucaccuucgacaaccucaagacgcugcugucccuccgcgaggugcggaccaucaaggucuucaccaccguggacaacaucaaccugcacacgcagguggucgacaugagcaugaccuacggccagcaguucggccccaccuaccuggacggggccgacgugaccaagaucaagccccacaacucccacgagggcaagacguucuacgugcucccgaacgacgacacccugcgcgucgaggccuucgaguacuaccacaccaccgaccccagcuuccuggggcgguacauguccgcccucaaccacacgaagaaguggaaguacccccaggugaacggccugaccagcaucaagugggccgacaacaacugcuaccuggcgaccgcccuccugacccugcagcagaucgagcucaaguucaaccccccggcccugcaggacgccuacuaccgcgcgcgggccggggaggccgccaacuucugcgcccugauccucgcguacugcaacaagacggugggcgagcugggcgacguccgcgagaccauguccuaccuguuccagcacgccaaccucgacagcugcaagcgggugcugaacgucgugugcaagaccugcgggcagcagcagaccacccugaagggcguggaggccgucauguacauggggacgcucuccuacgagcaguucaagaagggcgugcagauccccugcaccugcgggaagcaggccaccaaguaccuggugcagcaggagagccccuucgucaugauguccgcccccccggcgcaguacgagcugaagcacggcaccuucacgugcgccagcgaguacaccggcaacuaccagugcgggcacuacaagcacaucaccuccaaggagacccucuacugcaucgacggcgcccugcugacgaagagcagcgaguacaaggggcccaucaccgacguguucuacaaggagaacuccuacaccaccacgaucaagcccgugaccuacaagcucgacggcgucgugugcaccgagaucgaccccaagcuggacaacuacuacaagaaggacaacagcuacuucaccgagcagccgaucgaccuggugcccaaccagcccuaccccaacgccuccuucgacaacuucaaguucgucugcgacaacaucaaguucgccgacgaccucaaccagcugacgggguacaagaagccggcgagccgcgagcugaaggugaccuucuuccccgaccucaacggcgacguggucgccaucgacuacaagcacuacacccccuccuucaagaagggcgccaagcugcugcacaagcccaucguguggcacgugaacaacgccaccaacaaggcgacguacaagccgaacaccuggugcauccggugccucuggagcaccaagcccgucgagaccuccaacagcuucgacgugcugaaguccgaggacgcccaggggauggacaaccuggccugcgaggaccucaagcccgugagcgaggaggucguggagaaccccacgauccagaaggacgugcuggagugcaacgucaagaccaccgagguggugggcgacaucauccugaagccggccaacaacucccucaagaucaccgaggaggucgggcacacggaccugauggccgcguacguggacaacagcucccugaccaucaagaagcccaacgagcucagccgcgugcugggccugaagacccucgccacccacgggcuggccgccgucaacuccgugcccugggacacgaucgccaacuacgcgaagccguuccugaacaagguggucagcaccaccaccaacaucgugacgcgcugccucaaccgggugugcaccaacuacaugcccuacuucuucacccugcugcuccagcugugcaccuucacccgcuccacgaacagccggaucaaggccuccaugcccaccaccaucgccaagaacaccgucaagagcgugggcaaguucugccuggaggccagcuucaacuaccucaagucccccaacuucagcaagcugaucaacaucaucaucugguuccugcuccuguccgugugccugggcagccucaucuacuccacggccgcgcuggggguccugaugagcaaccucggcaugccguccuacugcaccggguaccgcgagggcuaccugaacagcaccaacgugaccaucgccacguacugcaccggcuccauccccugcagcgugugccuguccgggcucgacagccuggacaccuaccccucccuggagaccauccagaucacgaucagcuccuucaagugggaccucaccgccuucggccuggucgccgagugguuccuggccuacauccucuucacccgguucuucuacgugcuggggcuggcggccaucaugcagcucuucuucagcuacuucgccgugcacuucaucuccaacagcuggcugauguggcugaucaucaaccugguccagauggcccccaucuccgcgauggugcgcauguacaucuucuucgccagcuucuacuacguguggaagagcuacguccacgugguggacggcugcaacuccagcaccugcaugaugugcuacaagcggaaccgcgccacgcgggucgagugcaccaccaucgugaacgggguccgccgguccuucuacguguacgccaacggcggcaagggguucugcaagcuccacaacuggaacugcgugaacugcgacaccuucugcgccggcagcacguucaucuccgacgaggucgcgcgcgaccugagccugcaguucaagcggccgaucaaccccaccgaccaguccagcuacaucguggacuccgugaccgucaagaacgggagcauccaccucuacuucgacaaggccggccagaagaccuacgagcgccacucccugagccacuucgugaaccuggacaaccuccgggccaacaacacgaaggggucccugcccaucaacgugaucgucuucgacggcaagagcaagugcgaggaguccagcgccaaguccgccagcguguacuacucccagcugaugugccagcccauccuccugcuggaccaggcgcucgugagcgacgucggcgacagcgccgagguggccgugaagauguucgacgccuacgucaacaccuucuccagcaccuucaacgugccgauggagaagcugaagacccugguggccacggcggaggccgagcucgccaagaacgucucccuggacaacgugcugagcaucuucaucuccgccgcgcgccagggguucguggacagcgacgucgagaccaaggacgugguggagugccucaagcugucccaccagagcgacaucgaggucaccggcgacuccugcaacaacuacaugcugaccuacaacaagguggagaacaugacgccccgggaccucggggccugcaucgacugcagcgcccgccacaucaacgcccagguggccaagucccacaacaucgcgcugaucuggaacgucaaggacuucaugagccuguccgagcagcuccggaagcagauccgcagcgccgccaagaagaacaaccugcccuucaagcugaccugcgccaccacccgccagguggugaacgucgugacgaccaagaucgcccucaagggcgggugaggacuagucccuguucccagagcccacuuuuuuuucuuuuuuugaaauaaaauagccugucuuucagaucucaaaggcucuuuucagagccaccaaaaaaaaaaaaaaaaaaaaaaaaaaaaaaaaaaaaaaaaaaaaaaaaaaaaaaaaaaaaaaaaaaaaaaaaaaaaaaaaaaaaaaaaaaaaaaaaaaaaa

SEQ ID NO: 19969 - RNA, 6113 nt, Artificial Sequence
  SARS-CoV-2__MT632621.1__non-structural protein 3 (NSP3) mRNA gc
aggagagucccgcagucggcguccagcggcucugcuuguucgugugugugucguugcaggccuuauucaagcuuaccauggcccccaccaaggugaccuucggcgacgacacggucaucgaggugcagggguacaagagcgugaacaucaccuucgagcuggacgagcgcaucgacaagguccucaacgagaagugcuccgccuacaccguggagcugggcaccgaggugaacgaguucgcgugcgucguggccgacgccgugaucaagacgcugcagccggucagcgagcuccugaccccccuggggaucgaccucgacgagugguccauggccaccuacuaccuguucgacgagagcggcgaguucaagcuggccucccacauguacugcagcuucuacccccccgacgaggacgaggaggagggggacugcgaggaggaggaguucgagccguccacccaguacgaguacggcacggaggacgacuaccagggcaagccccucgaguucggggcgaccagcgccgcccugcagcccgaggaggagcaggaggaggacuggcuggacgacgacucccagcagaccgugggccagcaggacgggagcgaggacaaccagaccacgaccauccagaccaucguggagguccagccccagcucgagauggagcugaccccgguggugcagacgaucgaggucaacuccuucagcggcuaccugaagcucaccgacaacguguacaucaagaacgccgacaucguggaggaggcgaagaaggucaagcccaccgugguggucaacgccgccaacguguaccugaagcacgggggcggcguggccggggcccugaccaaggcgacgaacaacgccaugcaggucgaguccgacgacuacaucgccaccaacggcccccucaagguggggggcagcugcguccuguccggccacaaccuggccaagcacugccuccacgugguggggcccaacgucaacaagggcgaggacauccagcugcugaagagcgccuacgagaacuucaaccagcacgaggugcuccuggcgccgcugcucuccgccgggaucuucggcgccgaccccauccacagccugcgggugugcgucgacaccgugcgcaccaacguguaccuggccgucuucgacaagaaccucuacgacaagcugguguccagcuuccuggagaugaagagcgagaagcagguggagcagaagaucgccgagauccccaaggaggaggucaagcccuucaucacggaguccaagccgagcguggagcagcggaagcaggacgacaagaagaucaaggcgugcguggaggaggucaccaccacccucgaggagacgaaguuccugaccgagaaccugcuccuguacaucgacaucaacgggaaccugcaccccgacuccgccacccucgugagcgacaucgacaucaccuuccugaagaaggacgcccccuacaucgugggcgacgucgugcaggagggcgugcugacggccgucgugauccccaccaagaaggccgggggcaccaccgagaugcucgcgaaggcccugcgcaaggugccgacggacaacuacaucaccaccuaccccgggcagggccugaacggguacaccgucgaggaggccaagaccgugcucaagaagugcaaguccgccuucuacauccugcccagcaucaucuccaacgagaagcaggagauccugggcacggugagcuggaaccuccgggagaugcuggcgcacgccgaggagacccgcaagcugaugcccgucugcguggagaccaaggccaucguguccaccauccagcggaaguacaagggcaucaagauccaggagggggucguggacuacggcgcccgcuucuacuucuacacgagcaagaccaccguggccucccugaucaacacccucaacgaccugaacgagacgcuggucaccaugccgcucggguacgugacccacggccugaaccuggaggaggcggcccgguacaugcgcagccucaaggugcccgccaccgucuccgugagcucccccgacgccgugacggccuacaacggguaccugaccagcuccagcaagacccccgaggagcacuucaucgagaccaucucccuggcgggcagcuacaaggacuggagcuacuccggccagagcacgcagcucgggaucgaguuccugaagcggggcgacaaguccgucuacuacaccagcaacccgaccaccuuccaccuggacggggaggugaucacguucgacaaccucaagacccugcugucccuccgcgaggugcggaccaucaaggucuucaccacgguggacaacaucaaccugcacacccagguggucgacaugagcaugaccuacggccagcaguucggccccaccuaccuggacggggccgacgugacgaagaucaagccccacaacucccacgagggcaagaccuucuacgugcucccgaacgacgacacccugcgcgucgaggccuucgaguacuaccacaccacggaccccagcuuccuggggcgguacauguccgcccucaaccacaccaagaaguggaaguacccccaggugaacggccugaccagcaucaagugggccgacaacaacugcuaccuggcgaccgcccuccugacgcugcagcagaucgagcucaaguucaaccccccggcccugcaggacgccuacuaccgcgcgcgggccggggaggccgccaacuucugcgcccugauccucgcguacugcaacaagaccgugggcgagcugggcgacguccgcgagaccauguccuaccuguuccagcacgccaaccucgacagcugcaagcgggugcugaacgucgugugcaagaccugcgggcagcagcagaccacgcugaagggcguggaggccgucauguacauggggacccucuccuacgagcaguucaagaagggcgugcagauccccugcaccugcgggaagcaggccaccaaguaccuggugcagcaggagagccccuucgucaugauguccgcccccccggcgcaguacgagcugaagcacggcacguucaccugcgccagcgaguacaccggcaacuaccagugcgggcacuacaagcacaucaccuccaaggagacgcucuacugcaucgacggcgcccugcugaccaagagcagcgaguacaaggggcccaucaccgacguguucuacaaggagaacuccuacaccacgaccaucaagcccgugaccuacaagcucgacggcgucgugugcaccgagaucgaccccaagcuggacaacuacuacaagaaggacaacagcuacuucacggagcagccgaucgaccuggugcccaaccagcccuaccccaacgccuccuucgacaacuucaaguucgucugcgacaacaucaaguucgccgacgaccucaaccagcugaccggguacaagaagccggcgagccgcgagcugaaggugaccuucuuccccgaccucaacggcgacguggucgccaucgacuacaagcacuacacccccuccuucaagaagggcgccaagcugcugcacaagcccaucguguggcacgugaacaacgccacgaacaaggcgaccuacaagccgaacaccuggugcauccggugccucuggagcaccaagcccgucgagacguccaacagcuucgacgugcugaaguccgaggacgcccaggggauggacaaccuggccugcgaggaccucaagcccgugagcgaggaggucguggagaaccccaccauccagaaggacgugcuggagugcaacgucaagaccaccgagguggugggcgacaucauccugaagccggccaacaacucccucaagaucacggaggaggucgggcacaccgaccugauggccgcguacguggacaacagcucccugaccaucaagaagcccaacgagcucagccgcgugcugggccugaagacccucgccacgcacgggcuggccgccgucaacuccgugcccugggacaccaucgccaacuacgcgaagccguuccugaacaagguggucagcaccaccacgaacaucgugacccgcugccucaaccgggugugcaccaacuacaugcccuacuucuucacccugcugcuccagcugugcaccuucacgcgcuccaccaacagccggaucaaggccuccaugcccaccaccaucgccaagaacacggucaagagcgugggcaaguucugccuggaggccagcuucaacuaccucaagucccccaacuucagcaagcugaucaacaucaucaucugguuccugcuccuguccgugugccugggcagccucaucuacuccaccgccgcgcuggggguccugaugagcaaccucggcaugccguccuacugcaccggguaccgcgagggcuaccugaacagcaccaacgugacgaucgccaccuacugcaccggcuccauccccugcagcgugugccuguccgggcucgacagccuggacaccuaccccucccuggagacgauccagaucaccaucagcuccuucaagugggaccucaccgccuucggccuggucgccgagugguuccuggccuacauccucuucacccgguucuucuacgugcuggggcuggcggccaucaugcagcucuucuucagcuacuucgccgugcacuucaucuccaacagcuggcugauguggcugaucaucaaccugguccagauggcccccaucuccgcgauggugcgcauguacaucuucuucgccagcuucuacuacguguggaagagcuacguccacgugguggacggcugcaacuccagcacgugcaugaugugcuacaagcggaaccgcgccacccgggucgagugcaccaccaucgugaacgggguccgccgguccuucuacguguacgccaacggcggcaagggguucugcaagcuccacaacuggaacugcgugaacugcgacacguucugcgccggcagcaccuucaucuccgacgaggucgcgcgcgaccugagccugcaguucaagcggccgaucaaccccaccgaccaguccagcuacaucguggacuccgugaccgucaagaacgggagcauccaccucuacuucgacaaggccggccagaagacguacgagcgccacucccugagccacuucgugaaccuggacaaccuccgggccaacaacaccaaggggucccugcccaucaacgugaucgucuucgacggcaagagcaagugcgaggaguccagcgccaaguccgccagcguguacuacucccagcugaugugccagcccauccuccugcuggaccaggcgcucgugagcgacgucggcgacagcgccgagguggccgugaagauguucgacgccuacgucaacaccuucuccagcaccuucaacgugccgauggagaagcugaagacgcugguggccaccgcggaggccgagcucgccaagaacgucucccuggacaacgugcugagcaccuucaucuccgccgcgcgccagggguucguggacagcgacgucgagaccaaggacgugguggagugccucaagcugucccaccagagcgacaucgaggucacgggcgacuccugcaacaacuacaugcugaccuacaacaagguggagaacaugaccccccgggaccucggggccugcaucgacugcagcgcccgccacaucaacgcccagguggccaagucccacaacaucgcgcugaucuggaacgucaaggacuucaugagccuguccgagcagcuccggaagcagauccgcagcgccgccaagaagaacaaccugcccuucaagcugaccugcgccacgacccgccagguggugaacgucgugaccaccaagaucgcccucaagggcgggugaggacuagucccuguucccagagcccacuuuuuuuucuuuuuuugaaauaaaauagccugucuuucagaucucaaaggcucuuuucagagccaccaaaaaaaaaaaaaaaaaaaaaaaaaaaaaaaaaaaaaaaaaaaaaaaaaaaaaaaaaaaaaaaaaaaaaaaaaaaaaaaaaaaaaaaaaaaaaaaaaaaaa

SEQ ID NO: 19970 - RNA, 6113 nt, Artificial Sequence
  SARS-CoV-2__MT632626.1__non-structural protein 3 (NSP3) mRNA gc
aggagagucccgcagucggcguccagcggcucugcuuguucgugugugugucguugcaggccuuauucaagcuuaccauggcccccaccaaggugaccuucggcgacgacacggucaucgaggugcagggguacaagagcgugaacaucaccuucgagcuggacgagcgcaucgacaagguccucaacgagaagugcuccgccuacaccguggagcugggcaccgaggugaacgaguucgcgugcgucguggccgacgccgugaucaagacgcugcagccggucagcgagcuccugaccccccuggggaucgaccucgacgagugguccauggccaccuacuaccuguucgacgagagcggcgaguucaagcuggccucccacauguacugcagcuucuacccccccgacgaggacgaggaggagggggacugcgaggaggaggaguucgagccguccacccaguacgaguacggcacggaggacgacuaccagggcaagccccucgaguucggggcgaccagcgccgcccugcagcccgaggaggagcaggaggaggacuggcuggacgacgacucccagcagaccgugggccagcaggacgggagcgaggacaaccagaccacgaccauccagaccaucguggagguccagccccagcucgagauggagcugaccccgguggugcagacgaucgaggucaacuccuucagcggcuaccugaagcucaccgacaacguguacaucaagaacgccgacaucguggaggaggcgaagaaggucaagcccaccgugguggucaacgccgccaacguguaccugaagcacgggggcggcguggccggggcccugaacaaggcgaccaacaacgccaugcaggucgaguccgacgacuacaucgccacgaacggcccccucaagguggggggcagcugcguccuguccggccacaaccuggccaagcacugccuccacgugguggggcccaacgucaacaagggcgaggacauccagcugcugaagagcgccuacgagaacuucaaccagcacgaggugcuccuggcgccgcugcucuccgccgggaucuucggcgccgaccccauccacagccugcgggugugcgucgacaccgugcgcaccaacguguaccuggccgucuucgacaagaaccucuacgacaagcugguguccagcuuccuggagaugaagagcgagaagcagguggagcagaagaucgccgagauccccaaggaggaggucaagcccuucaucaccgaguccaagccgagcguggagcagcggaagcaggacgacaagaagaucaaggcgugcguggaggaggucacgaccacccucgaggagaccaaguuccugacggagaaccugcuccuguacaucgacaucaacgggaaccugcaccccgacuccgccacccucgugagcgacaucgacgugaccuuccugaagaaggacgcccccuacaucgucggcgacguggugcaggagggcguccugaccgccguggugauccccacgaagaaggccgggggcaccaccgagaugcucgcgaaggcccugcgcaaggucccgaccgacaacuacaucacgaccuaccccgggcagggccugaacggguacaccguggaggaggccaagaccgugcucaagaagugcaaguccgccuucuacauccugcccagcaucaucuccaacgagaagcaggagauccugggcaccgucagcuggaaccuccgggagaugcuggcgcacgccgaggagacgcgcaagcugaugcccgugugcguggagaccaaggccaucgucuccaccauccagcggaaguacaagggcaucaagauccaggagggggugguggacuacggcgcccgcuucuacuucuacaccagcaagacgaccgucgccucccugaucaacacccucaacgaccugaacgagacccuggugacgaugccgcucggguacgugacccacggccugaaccuggaggaggcggcccgguacaugcgcagccucaagguccccgccaccguguccgugagcucccccgacgccgucaccgccuacaacggguaccugacgagcuccagcaagacccccgaggagcacuucaucgagaccaucucccuggcgggcagcuacaaggacuggagcuacuccggccagagcacccagcucgggaucgaguuccugaagcggggcgacaaguccguguacuacacgagcaacccgaccaccuuccaccuggacggggaggugaucaccuucgacaaccucaagacgcugcugucccuccgcgagguccggaccaucaagguguucaccaccguggacaacaucaaccugcacacgcaggucguggacaugagcaugaccuacggccagcaguucggccccaccuaccuggacggggccgacgugaccaagaucaagccccacaacucccacgagggcaagacguucuacguccucccgaacgacgacacccugcgcguggaggccuucgaguacuaccacaccaccgaccccagcuuccuggggcgguacauguccgcccucaaccacacgaagaaguggaaguacccccaggugaacggccugaccagcaucaagugggccgacaacaacugcuaccuggcgaccgcccuccugacccugcagcagaucgagcucaaguucaaccccccggcccugcaggacgccuacuaccgcgcgcgggccggggaggccgccaacuucugcgcccugauccucgcguacugcaacaagacggucggcgagcugggcgacgugcgcgagaccauguccuaccuguuccagcacgccaaccucgacagcugcaagcggguccugaacguggugugcaagaccugcgggcagcagcagaccacccugaagggcgucgaggccgugauguacauggggacgcucuccuacgagcaguucaagaagggcgugcagauccccugcaccugcgggaagcaggccaccaaguaccugguccagcaggagagccccuucgugaugauguccgcccccccggcgcaguacgagcugaagcacggcaccuucacgugcgccagcgaguacaccggcaacuaccagugcgggcacuacaagcacaucaccuccaaggagacccucuacugcaucgacggcgcccugcugacgaagagcagcgaguacaaggggcccaucaccgacguguucuacaaggagaacuccuacaccaccacgaucaagcccgucaccuacaagcucgacggcguggugugcaccgagaucgaccccaagcuggacaacuacuacaagaaggacaacagcuacuucaccgagcagccgaucgaccugguccccaaccagcccuaccccaacgccuccuucgacaacuucaaguucgugugcgacaacaucaaguucgccgacgaccucaaccagcugacgggguacaagaagccggcgagccgcgagcugaaggugaccuucuuccccgaccucaacggcgacgucguggccaucgacuacaagcacuacacccccuccuucaagaagggcgccaagcugcugcacaagcccaucguguggcacgucaacaacgccaccaacaaggcgacguacaagccgaacaccuggugcauccggugccucuggagcaccaagcccguggagaccuccaacagcuucgacgugcugaaguccgaggacgcccaggggauggacaaccuggccugcgaggaccucaagcccgucagcgaggaggugguggagaaccccacgauccagaaggacguccuggagugcaacgugaagaccaccgagguggucggcgacaucauccugaagccggccaacaacucccucaagaucaccgaggagguggggcacacggaccugauggccgcguacguggacaacagcucccugaccaucaagaagcccaacgagcucagccgcguccugggccugaagacccucgccacccacgggcuggccgccgugaacuccgugcccugggacacgaucgccaacuacgcgaagccguuccugaacaaggucgugagcaccaccaccaacaucgugacgcgcugccucaaccgggucugcaccaacuacaugcccuacuucuucacccugcugcuccagcugugcaccuucacccgcuccacgaacagccggaucaaggccuccaugcccaccaccaucgccaagaacaccgugaagagcgugggcaaguucugccuggaggccagcuucaacuaccucaagucccccaacuucagcaagcugaucaacaucaucaucugguuccugcuccuguccgucugccugggcagccucaucuacuccacggccgcgcugggggugcugaugagcaaccucggcaugccguccuacugcaccggguaccgcgagggcuaccugaacagcaccaacgugaccaucgccacguacugcaccggcuccauccccugcagcgucugccuguccgggcucgacagccuggacaccuaccccucccuggagaccauccagaucacgaucagcuccuucaagugggaccucaccgccuucggccugguggccgagugguuccuggccuacauccucuucacccgguucuucuacgugcuggggcuggcggccaucaugcagcucuucuucagcuacuucgccguccacuucaucuccaacagcuggcugauguggcugaucaucaaccuggugcagauggcccccaucuccgcgauggugcgcauguacaucuucuucgccagcuucuacuacgucuggaagagcuacgugcacguggucgacggcugcaacuccagcaccugcaugaugugcuacaagcggaaccgcgccacgcggguggagugcaccaccaucgucaacggggugcgccgguccuucuacguguacgccaacggcggcaagggguucugcaagcuccacaacuggaacugcgucaacugcgacaccuucugcgccggcagcacguucaucuccgacgagguggcgcgcgaccugagccugcaguucaagcggccgaucaaccccaccgaccaguccagcuacaucguggacuccgucaccgugaagaacgggagcauccaccucuacuucgacaaggccggccagaagaccuacgagcgccacucccugagccacuucgugaaccuggacaaccuccgggccaacaacacgaaggggucccugcccaucaacgucaucguguucgacggcaagagcaagugcgaggaguccagcgccaaguccgccagcguguacuacucccagcugaugugccagcccauccuccugcuggaccaggcgcucgucagcgacgugggcgacagcgccgagguggccgucaagauguucgacgccuacgugaacaccuucuccagcaccuucaacgugccgauggagaagcugaagacccuggucgccacggcggaggccgagcucgccaagaacgugucccuggacaacgugcugagcaccuucaucuccgccgcgcgccagggguucgucgacagcgacguggagaccaaggacguggucgagugccucaagcugucccaccagagcgacaucgaggugaccggcgacuccugcaacaacuacaugcugacguacaacaagguggagaacaugaccccccgggaccucggggccugcaucgacugcagcgcccgccacaucaacgcccaggucgccaagucccacaacaucgcgcugaucuggaacgugaaggacuucaugagccuguccgagcagcuccggaagcagauccgcagcgccgccaagaagaacaaccugcccuucaagcugaccugcgccaccacgcgccagguggucaacguggugaccaccaagaucgcccucaagggcgggugaggacuagucccuguucccagagcccacuuuuuuuucuuuuuuugaaauaaaauagccugucuuucagaucucaaaggcucuuuucagagccaccaaaaaaaaaaaaaaaaaaaaaaaaaaaaaaaaaaaaaaaaaaaaaaaaaaaaaaaaaaaaaaaaaaaaaaaaaaaaaaaaaaaaaaaaaaaaaaaaaaaaa

SEQ ID NO: 19971 - RNA, 6113 nt, Artificial Sequence
  SARS-CoV-2__MT632766.1__non-structural protein 3 (NSP3) mRNA gc
aggagagucccgcagucggcguccagcggcucugcuuguucgugugugugucguugcaggccuuauucaagcuuaccauggcccccaccaaggugaccuucggcgacgacacggucaucgaggugcagggguacaagagcgugaacaucaccuucgagcuggacgagcgcaucgacaagguccucaacgagaagugcuccgccuacaccguggagcugggcaccgaggugaacgaguucgcgugcgucguggccgacgccgugaucaagacgcugcagccggucagcgagcuccugaccccccuggggaucgaccucgacgagugguccauggccaccuacuaccuguucgacgagagcggcgaguucaagcuggccucccacauguacugcagcuucuacccccccgacgaggacgaggaggagggggacugcgaggaggaggaguucgagccguccacccaguacgaguacggcacggaggacgacuaccagggcaagccccucgaguucggggcgaccagcgccgcccugcagcccgaggaggagcaggaggaggacuggcuggacgacgacucccagcagaccgugggccagcaggacgggagcgaggacaaccagaccacgaccauccagaccaucguggagguccagccccagcucgagauggagcugaccccgguggugcagacgaucgaggucaacuccuucagcggcuaccugaagcucaccgacaacguguacaucaagaacgccgacaucguggaggaggcgaagaaggucaagcccaccgugguggucaacgccgccaacguguaccugaagcacgggggcggcguggccggggcccugaacaaggcgaccaacaacgccaugcaggucgaguccgacgacuacaucgccacgaacggcccccucaagguggggggcagcugcguccuguccggccacaaccuggccaagcacugccuccacgugguggggcccaacgucaacaagggcgaggacauccagcugcugaagagcgccuacgagaacuucaaccagcacgaggugcuccuggcgccgcugcucuccgccgggaucuucggcgccgaccccauccacagccugcgggugugcgucgacaccgugcgcaccaacguguaccuggccgucuucgacaagaaccucuacgacaagcugguguccagcuuccuggagaugaagagcgagaagcagguggagcagaagaucgccgagauccccaaggaggaggucaagcccuucaucaccgaguccaagccgagcguggagcagcggaagcaggacgacaagaagaucaaggcgugcguggaggaggucacgaccacccucgaggagaccaaguuccugacggagaaccugcuccuguacaucgacaucaacgggaaccugcaccccgacuccgccacccucgugagcgacaucgacaucaccuuccugaagaaggacgcccccuacaucgugggcgacgucgugcaggagggcgugcugaccgccgucgugauccccacgaagaaggccgggggcaccaccgagaugcucgcgaaggcccugcgcaaggugccgaccgacaacuacaucacgaccuaccccgggcagggccugaacggguacaccgucgaggaggccaagaccgugcucaagaagugcaaguccgccuucuacauccugcccagcaucaucuccaacgagaagcaggagauccugggcaccgugagcuggaaccuccgggagaugcuggcgcacgccgaggagacgcgcaagcugaugcccgucugcguggagaccaaggccaucguguccaccauccagcggaaguacaagggcaucaagauccaggagggggucguggacuacggcgcccgcuucuacuucuacaccagcaagacgaccguggccucccugaucaacacccucaacgaccugaacgagacccuggucacgaugccgcucggguacgugacccacggccugaaccuggaggaggcggcccgguacaugcgcagccucaaggugcccgccaccgucuccgugagcucccccgacgccgugaccgccuacaacggguaccugacgagcuccagcaagacccccgaggagcacuucaucgagaccaucucccuggcgggcagcuacaaggacuggagcuacuccggccagagcacccagcucgggaucgaguuccugaagcggggcgacaaguccgucuacuacacgagcaacccgaccaccuuccaccuggacggggaggugaucaccuucgacaaccucaagacgcugcugucccuccgcgaggugcggaccaucaaggucuucaccaccguggacaacaucaaccugcacacgcagguggucgacaugagcaugaccuacggccagcaguucggccccaccuaccuggacggggccgacgugaccaagaucaagccccacaacucccacgagggcaagacguucuacgugcucccgaacgacgacacccugcgcgucgaggccuucgaguacuaccacaccaccgaccccagcuuccuggggcgguacauguccgcccucaaccacacgaagaaguggaaguacccccaggugaacggccugaccagcaucaagugggccgacaacaacugcuaccuggcgaccgugcuccugacccugcagcagaucgagcucaaguucaaccccccggcccugcaggacgccuacuaccgcgcccgggcgggggaggccgccaacuucugcgcccugauccucgccuacugcaacaagacggucggcgagcugggcgacgugcgcgagaccauguccuaccuguuccagcacgcgaaccucgacagcugcaagcggguccugaacguggugugcaagaccugcgggcagcagcagaccacccugaagggcgucgaggccgugauguacauggggacgcucuccuacgagcaguucaagaagggcgugcagauccccugcaccugcgggaagcaggccaccaaguaccugguccagcaggagagccccuucgugaugauguccgcccccccggcccaguacgagcugaagcacggcaccuucacgugcgcgagcgaguacaccggcaacuaccagugcgggcacuacaagcacaucaccuccaaggagacccucuacugcaucgacggcgcccugcugacgaagagcagcgaguacaaggggcccaucaccgacguguucuacaaggagaacuccuacaccaccacgaucaagcccgucaccuacaagcucgacggcguggugugcaccgagaucgaccccaagcuggacaacuacuacaagaaggacaacagcuacuucaccgagcagccgaucgaccugguccccaaccagcccuaccccaacgccuccuucgacaacuucaaguucgugugcgacaacaucaaguucgccgacgaccucaaccagcugacgggguacaagaagccggccagccgcgagcugaaggugaccuucuuccccgaccucaacggcgacgucguggcgaucgacuacaagcacuacacccccuccuucaagaagggcgccaagcugcugcacaagcccaucguguggcacgucaacaacgccaccaacaaggccacguacaagccgaacaccuggugcauccggugccucuggagcaccaagcccguggagaccuccaacagcuucgacgugcugaaguccgaggacgcgcaggggauggacaaccuggccugcgaggaccucaagcccgucagcgaggaggugguggagaaccccacgauccagaaggacguccuggagugcaacgugaagaccaccgagguggucggcgacaucauccugaagccggccaacaacucccucaagaucaccgaggagguggggcacacggaccugauggccgccuacguggacaacagcucccugaccaucaagaagcccaacgagcucagccgcguccugggccugaagacccucgcgacccacgggcuggccgccgugaacuccgugcccugggacacgaucgccaacuacgcccgcccguuccugaacaaggucgugagcaccaccaccaacaucgugacgcggugccucaaccgcgucugcaccaacuacaugcccuacuucuucacccugcugcuccagcugugcaccuucacccgguccacgaacagccgcaucaaggcguccaugcccaccaccaucgccaagaacaccgugaagagcgugggcaaguucugccuggaggccagcuucaacuaccucaagucccccaacuucagcaagcugaucaacaucaucaucugguuccugcuccuguccgucugccugggcagccucaucuacuccacggccgcccugggggugcugaugagcaaccucggcaugccguccuacugcaccggguaccgggagggcuaccugaacagcaccaacgugaccaucgcgacguacugcaccggcuccauccccugcagcgucugccuguccgggcucgacagccuggacaccuaccccucccuggagaccauccagaucacgaucagcuccuucaagugggaccucaccgccuucggccugguggccgagugguuccuggccuacauccucuucacccgcuucuucuacgugcuggggcuggccgcgaucaugcagcucuucuucagcuacuucgccguccacuucaucuccaacagcuggcugauguggcugaucaucaaccuggugcagauggcccccaucuccgccauggugcggauguacaucuucuucgcgagcuucuacuacgucuggaagagcuacgugcacguggucgacggcugcaacuccagcaccugcaugaugugcuacaagcgcaaccgggccacgcgcguggagugcaccaccaucgucaacggggugcggcgcuccuucuacguguacgccaacggcggcaagggguucugcaagcuccacaacuggaacugcgucaacugcgacaccuucugcgccggcagcacguucaucuccgacgagguggcccgggaccugagccugcaguucaagcgcccgaucaaccccaccgaccaguccagcuacaucguggacuccgucaccgugaagaacgggagcauccaccucuacuucgacaaggcgggccagaagaccuacgagcggcacucccugagccacuucgugaaccuggacaaccuccgcgccaacaacacgaaggggucccugcccaucaacgucaucguguucgacggcaagagcaagugcgaggaguccagcgccaaguccgccagcguguacuacucccagcugaugugccagcccauccuccugcuggaccaggcccucgucagcgacgugggcgacagcgcggagguggccgucaagauguucgacgccuacgugaacaccuucuccagcaccuucaacgugccgauggagaagcugaagacccuggucgccacggccgaggcggagcucgccaagaacgugucccuggacaacgugcugagcaccuucaucuccgccgcccggcagggguucgucgacagcgacguggagaccaaggacguggucgagugccucaagcugucccaccagagcgacaucgaggugaccggcgacuccugcaacaacuacaugcugacguacaacaagguggagaacaugaccccccgcgaccucggggcgugcaucgacugcagcgcccggcacaucaacgcccaggucgccaagucccacaacaucgcccugaucuggaacgugaaggacuucaugagccuguccgagcagcuccgcaagcagauccgcagcgcggccaagaagaacaaccugcccuucaagcugaccugcgccaccacgcggcagguggucaacguggugaccaccaagaucgcccucaagggcgggugaggacuagucccuguucccagagcccacuuuuuuuucuuuuuuugaaauaaaauagccugucuuucagaucucaaaggcucuuuucagagccaccaaaaaaaaaaaaaaaaaaaaaaaaaaaaaaaaaaaaaaaaaaaaaaaaaaaaaaaaaaaaaaaaaaaaaaaaaaaaaaaaaaaaaaaaaaaaaaaaaaaaa

SEQ ID NO: 19972 - RNA, 6113 nt, Artificial Sequence
  SARS-CoV-2__MT632776.1__non-structural protein 3 (NSP3) mRNA gc
aggagagucccgcagucggcguccagcggcucugcuuguucgugugugugucguugcaggccuuauucaagcuuaccauggcccccaccaaggugaccuucggcgacgacacggucaucgaggugcagggguacaagagcgugaacaucaccuucgagcuggacgagcgcaucgacaagguccucaacgagaagugcuccgccuacaccguggagcugggcaccgaggugaacgaguucgcgugcgucguggccgacgccgugaucaagacgcugcagccggucagcgagcuccugaccccccuggggaucgaccucgacgagugguccauggccaccuacuaccuguucgacgagagcggcgaguucaagcuggccucccacauguacugcagcuucuacccccccgacgaggacgaggaggagggggacugcgaggaggaggaguucgagccguccacccaguacgaguacggcacggaggacgacuaccagggcaagccccucgaguucggggcgaccagcgccgcccugcagcuggaggaggagcaggaggaggacuggcucgacgacgacucccagcagaccgugggccagcaggacgggagcgaggacaaccagaccacgaccauccagaccaucguggagguccagccccagcuggagauggagcugacccccguggugcagacgaucgaggucaacuccuucagcggcuaccucaagcugaccgacaacguguacaucaagaacgccgacguggucgaggaggcgaagaaggugaagccgaccguggucgugaacgccgccaacguguaccugaagcacgggggcggcgucgccggggcccucaacaaggcgaccaacaacgccaugcagguggaguccgacgacuacaucgccacgaacggcccccugaaggucgggggcagcugcgugcuguccggccacaaccucgccaagcacugccugcacguggucgggcccaacgugaacaagggcgaggacauccagcugcucaagagcgccuacgagaacuucaaccagcacgaggugcugcuggcgccccuccuguccgccgggaucuucggcgccgacccgauccacagccugcgggucugcguggacaccgugcgcaccaacgucuaccucgccguguucgacaagaaccuguacgacaagcugguguccagcuuccucgagaugaagagcgagaagcaggucgagcagaagaucgccgagauccccaaggaggaggugaagcccuucaucaccgaguccaagcccagcguggagcagcggaagcaggacgacaagaagaucaaggcgugcgucgaggaggugacgaccacccuggaggagaccaaguuccugacggagaaccuccugcuguacaucgacaucaacgggaaccuccacccggacuccgccacccuggugagcgacaucgacaucaccuuccugaagaaggacgcccccuacaucgucggcgacguggugcaggagggcguccucaccgccguggugauccccacgaagaaggccgggggcaccaccgagaugcuggcgaaggcccugcgcaagguccccaccgacaacuacaucacgaccuacccggggcagggccucaacggguacaccguggaggaggccaagaccgugcugaagaagugcaaguccgccuucuacauccugcccagcaucaucuccaacgagaagcaggagauccucggcaccgucagcuggaaccugcgggagaugcuggcgcacgccgaggagacgcgcaagcugaugcccgugugcguggagaccaaggccaucgucuccaccauccagcggaaguacaagggcaucaagauccaggagggggugguggacuacggcgcccgcuucuacuucuacaccagcaagacgaccgucgccucccucaucaacacccugaacgaccugaacgagacccucgugacgaugccccugggguacgugacccacggccugaaccucgaggaggcggcccgguacaugcgcagccugaaggucccggccaccguguccgugagcucccccgacgccgucaccgccuacaacggguaccugacgagcuccagcaagacccccgaggagcacuucaucgagaccaucucccucgcgggcagcuacaaggacuggagcuacuccggccagagcacccagcuggggaucgaguuccugaagcggggcgacaaguccguguacuacacgagcaaccccaccaccuuccaccucgacggggaggugaucaccuucgacaaccugaagacgcugcucucccugcgcgagguccggaccaucaagguguucaccaccguggacaacaucaaccugcacacgcaggucguggacaugagcaugaccuacggccagcaguucggcccgaccuaccucgacggggccgacgugaccaagaucaagccccacaacucccacgagggcaagacguucuacguccugcccaacgacgacacccugcgcguggaggccuucgaguacuaccacaccaccgacccgagcuuccucgggcgguacauguccgcccugaaccacacgaagaaguggaaguacccccaggugaacggccugaccagcaucaagugggccgacaacaacugcuaccucgcgaccgcccugcugacccuccagcagaucgagcugaaguucaacccccccgcccugcaggacgccuacuaccgcgcgcgggccggggaggccgccaacuucugcgcccucauccuggcguacugcaacaagacggucggcgagcugggcgacgugcgcgagaccauguccuaccucuuccagcacgccaaccuggacagcugcaagcggguccugaacguggugugcaagaccugcgggcagcagcagaccacccucaagggcgucgaggccgugauguacauggggacgcuguccuacgagcaguucaagaagggcgugcagaucccgugcaccugcgggaagcaggccaccaaguaccugguccagcaggagagccccuucgugaugauguccgccccccccgcgcaguacgagcucaagcacggcaccuucacgugcgccagcgaguacaccggcaacuaccagugcgggcacuacaagcacaucaccuccaaggagacccuguacugcaucgacggcgcccugcucacgaagagcagcgaguacaaggggccgaucaccgacguguucuacaaggagaacuccuacaccaccacgaucaagcccgucaccuacaagcuggacggcguggugugcaccgagaucgaccccaagcuggacaacuacuacaagaaggacaacagcuacuucaccgagcagcccaucgaccucgucccgaaccagcccuaccccaacgccuccuucgacaacuucaaguucgugugcgacaacaucaaguucgccgacgaccugaaccagcugacgggguacaagaagcccgcgagccgcgagcucaaggugaccuucuucccggaccugaacggcgacgucguggccaucgacuacaagcacuacacccccuccuucaagaagggcgccaagcugcuccacaagcccaucguguggcacgucaacaacgccaccaacaaggcgacguacaagcccaacaccuggugcauccggugccuguggagcaccaagccgguggagaccuccaacagcuucgacgugcugaaguccgaggacgcccaggggauggacaaccucgccugcgaggaccugaagcccgucagcgaggaggugguggagaaccccacgauccagaaggacguccuggagugcaacgugaagaccaccgagguggucggcgacaucauccucaagcccgccaacaacucccugaagaucaccgaggagguggggcacacggaccugauggccgcguacguggacaacagcucccucaccaucaagaagccgaacgagcugagccgcguccugggccucaagacccuggccacccacgggcuggccgccgugaacuccgugcccugggacacgaucgccaacuacgcgaagcccuuccucaacaaggucgugagcaccaccaccaacaucgugacgcgcugccugaaccgggucugcaccaacuacaugccguacuucuucacccugcuccugcagcugugcaccuucacccgcuccacgaacagccggaucaaggccuccaugcccaccaccaucgccaagaacaccgugaagagcgugggcaaguucugccucgaggccagcuucaacuaccugaagucccccaacuucagcaagcugaucaacaucaucaucugguuccuccugcuguccgucugccucggcagccugaucuacuccacggccgcgcugggggugcucaugagcaaccugggcaugcccuccuacugcaccggguaccgcgagggcuaccugaacagcaccaacgugaccaucgccacguacugcaccggcuccaucccgugcagcgucugccucuccgggcuggacagccuggacaccuaccccucccucgagaccauccagaucacgaucagcuccuucaagugggaccugaccgccuucggccugguggccgagugguuccucgccuacauccuguucacccgguucuucuacgugcuggggcucgcggccaucaugcagcuguucuucagcuacuucgccguccacuucaucuccaacagcuggcugauguggcugaucaucaaccucgugcagauggcccccaucuccgcgauggugcgcauguacaucuucuucgccagcuucuacuacgucuggaagagcuacgugcacguggucgacggcugcaacuccagcaccugcaugaugugcuacaagcggaaccgcgccacgcggguggagugcaccaccaucgucaacggggugcgccgguccuucuacguguacgccaacggcggcaagggguucugcaagcugcacaacuggaacugcgucaacugcgacaccuucugcgccggcagcacguucaucuccgacgagguggcgcgcgaccugagccuccaguucaagcggcccaucaacccgaccgaccaguccagcuacaucguggacuccgucaccgugaagaacgggagcauccaccuguacuucgacaaggccggccagaagaccuacgagcgccacucccugagccacuucgugaaccucgacaaccugcgggccaacaacacgaaggggucccugcccaucaacgucaucguguucgacggcaagagcaagugcgaggaguccagcgccaaguccgccagcguguacuacucccagcucaugugccagcccauccugcugcucgaccaggcgcuggucagcgacgugggcgacagcgccgagguggccgucaagauguucgacgccuacgugaacaccuucuccagcaccuucaacgugcccauggagaagcugaagacccucgucgccacggcggaggccgagcuggccaagaacgugucccuggacaacgugcucagcaccuucaucuccgccgcgcgccagggguucgucgacagcgacguggagaccaaggacguggucgagugccugaagcugucccaccagagcgacaucgaggugaccggcgacuccugcaacaacuacaugcucacguacaacaagguggagaacaugaccccgcgggaccugggggccugcaucgacugcagcgcccgccacaucaacgcccaggucgccaagucccacaacaucgcgcugaucuggaacgugaaggacuucaugagccucuccgagcagcugcggaagcagauccgcagcgccgccaagaagaacaaccugcccuucaagcucaccugcgccaccacgcgccagguggucaacguggugaccaccaagaucgcccugaagggcgggugaggacuagucccuguucccagagcccacuuuuuuuucuuuuuuugaaauaaaauagccugucuuucagaucucaaaggcucuuuucagagccaccaaaaaaaaaaaaaaaaaaaaaaaaaaaaaaaaaaaaaaaaaaaaaaaaaaaaaaaaaaaaaaaaaaaaaaaaaaaaaaaaaaaaaaaaaaaaaaaaaaaaa

SEQ ID NO: 19973 - RNA, 6113 nt, Artificial Sequence
  SARS-CoV-2__MT632780.1__non-structural protein 3 (NSP3) mRNA gc
aggagagucccgcagucggcguccagcggcucugcuuguucgugugugugucguugcaggccuuauucaagcuuaccauggcccccaccaaggugaccuucggcgacgacacggucaucgaggugcagggguacaagagcgugaacaucaccuucgagcuggacgagcgcaucgacaagguccucaacgagaagugcuccgccuacaccguggagcugggcaccgaggugaacgaguucgcgugcgucguggccgacgccgugaucaagacgcugcagccggucagcgagcuccugaccccccuggggaucgaccucgacgagugguccauggccaccuacuaccuguucgacgagagcggcgaguucaagcuggccucccacauguacugcagcuucuacccccccgacgaggacgaggaggagggggacugcgaggaggaggaguucgagccguccacccaguacgaguacggcacggaggacgacuaccagggcaagccccucgaguucggggcgaccagcgccgcccugcagcccgaggaggagcaggaggaggacuggcuggacgacgacucccagcagaccgugggccagcaggacgggagcgaggacaaccagaccacgaccauccagaccaucguggagguccagccccagcucgagauggagcugaccccgguggugcagacgaucgaggucaacuccuucagcggcuaccugaagcucaccgacaacguguacaucaagaacgccgacaucguggaggaggcgaagaaggucaagcccaccgugguggucaacgccgccaacguguaccugaagcacgggggcggcguggccggggcccugaacaaggcgaccaacaacgccaugcaggucgaguccgacgacuacaucgccacgaacggcccccucaagguggggggcagcugcguccuguccggccacaaccuggccaagcacugccuccacgugguggggcccaacgucaacaagggcgaggacauccagcugcugaagagcgccuacgagaacuucaaccagcacgaggugcuccuggcgccgcugcucuccgccgggaucuucggcgccgaccccauccacagccugcgggugugcgucgacaccgugcgcaccaacguguaccuggccgucuucgacaagaaccucuacgacaagcugguguccagcuuccuggagaugaagagcgagaagcagguggagcagaagaucgccgagauccccaaggaggaggucaagcccuucaucaccgaguccaagccgagcguggagcagcggaagcaggacgacaagaagaucaaggcgugcguggaggaggucacgaccacccucgaggagaccaaguuccugacggagaaccugcuccuguacaucgacaucaacgggaaccugcaccccgacuccgccacccucgugagcgacaucgacaucaccuuccugaagaaggacgcccccuacaucgugggcgacgucgugcaggagggcgugcugaccgccgucgugauccccacgaagaaggccgggggcaccaccgagaugcucgcgaaggcccugcgcaaggugccgaccgacaacuacaucacgaccuaccccgggcagggccugaacggguacaccgucgaggaggccaagaccgugcucaagaagugcaaguccgccuucuacauccugcccagcaucaucuccaacgagaagcaggagauccugggcaccgugagcuggaaccuccgggagaugcuggcgcacgccgaggagacgcgcaagcugaugcccgucugcguggagaccaaggccaucguguccaccauccagcggaaguacaagggcaucaagauccaggagggggucguggacuacggcgcccgcuucuacuucuacaccagcaagacgaccguggccucccugaucaacacccucaacgaccugaacgagacccuggucacgaugccgcucggguacgugacccacggccugaaccuggaggaggcggcccgguacaugcgcagccucaaggugcccgccaccgucuccgugagcucccccgacgccgugaccgccuacaacggguaccugacgagcuccagcaagacccccgaggagcacuucaucgagaccaucucccuggcgggcagcuacaaggacuggagcuacuccggccagagcacccagcucgggaucgaguuccugaagcggggcgacaaguccgucuacuacacgagcaacccgaccaccuuccaccuggacggggaggugaucaccuucgacaaccucaagacgcugcugucccuccgcgaggugcggaccaucaaggucuucaccaccguggacaacaucaaccugcacacgcagguggucgacaugagcaugaccuacggccagcaguucggccccaccuaccuggacggggccgacgugaccaagaucaagccccacaacucccacgagggcaagacguucuacgugcucccgaacgacgacacccugcgcgucgaggccuucgaguacuaccacaccaccgaccccagcuuccuggggcgguacauguccgcccucaaccacacgaagaaguggaaguacccccaggugaacggccugaccagcaucaagugggccgacaacaacugcuaccuggcgaccgcccuccugacccugcagcagaucgagcucaaguucaaccccccggcccugcaggacgccuacuaccgcgcgcgggccggggaggccgccaacuucugcgcccugauccucgcguacugcaacaagacggugggcgagcugggcgacguccgcgagaccauguccuaccuguuccagcacgccaaccucgacagcugcaagcgggugcugaacgucgugugcaagaccugcgggcagcagcagaccacccugaagggcguggaggccgucauguacauggggacgcucuccuacgagcaguucaagaagggcgugcagauccccugcaccugcgggaagcaggccaccaaguaccuggugcagcaggagagccccuucgucaugauguccgcccccccggcgcaguacgagcugaagcacggcaccuucacgugcgccagcgaguacaccggcaacuaccagugcgggcacuacaagcacaucaccuccaaggagacccucuacugcaucgacggcgcccugcugacgaagagcagcgaguacaaggggcccaucaccgacguguucuacaaggagaacuccuacaccaccacgaucaagcccgugaccuacaagcucgacggcgucgugugcaccgagaucgaccccaagcuggacaacuacuacaagaaggacaacagcuacuucaccgagcagccgaucgaccuggugcccaaccagcccuaccccaacgccuccuucgacaacuucaaguucgucugcgacaacaucaaguucgccgacgaccucaaccagcugacgggguacaagaagccggcgagccgcgagcugaaggugaccuucuuccccgaccucaacggcgacguggucgccaucgacuacaagcacuacacccccuccuucaagaagggcgccaagcugcugcacaagcccaucguguggcacgugaacaacgccaccaacaaggcgacguacaagccgaacaccuggugcauccggugccucuggagcaccaagcccgucgagaccuccaacagcuucgacgugcugaaguccgaggacgcccaggggauggacaaccuggccugcgaggaccucaagcccgugagcgaggaggucguggagaaccccacgauccagaaggacgugcuggagugcaacgucaagaccaccgagguggugggcgacaucauccugaagccggccaacaacucccucaagaucaccgaggaggucgggcacacggaccugauggccgcguacguggacaacagcucccugaccaucaagaagcccaacgagcucagccgcgugcugggccugaagacccucgccacccacgggcuggccgccgucaacuccgugcccugggacacgaucgccaacuacgcgaagccguuccugaacaagguggucagcaccaccaccaacaucgugacgcgcugccucaaccgggugugcaccaacuacaugcccuacuucuucacccugcugcuccagcugugcaccuucacccgcuccacgaacagccggaucaaggccuccaugcccaccaccaucgccaagaacaccgucaagagcgugggcaaguucugccuggaggccagcuucaacuaccucaagucccccaacuucagcaagcugaucaacaucaucaucugguuccugcuccuguccgugugccugggcagccucaucuacuccacggccgcgcuggggguccugaugagcaaccucggcaugccguccuacugcaccggguaccgcgagggcuaccugaacagcaccaacgugaccaucgccacguacugcaccggcuccauccccugcagcgugugccuguccgggcucgacagccuggacaccuaccccucccuggagaccauccagaucacgaucagcuccuucaagugggaccucaccgccuucggccuggucgccgagugguuccuggccuacauccucuucacccgguucuucuacgugcuggggcuggcggccaucaugcagcucuucuucagcuacuucgccgugcacuucaucuccaacagcuggcugauguggcugaucaucaaccugguccagauggcccccaucuccgcgauggugcgcauguacaucuucuucgccagcuucuacuacguguggaagagcuacguccacgugguggacggcugcaacuccagcaccugcaugaugugcuacaagcggaaccgcgccacgcgggucgagugcaccaccaucgugaacgggguccgcaaguccuucuacguguacgccaacggcggcaagggguucugcaagcuccacaacuggaacugcgugaacugcgacaccuucugcgccggcagcacguucaucuccgacgaggucgcgcgggaccugagccugcaguucaagcgcccgaucaaccccaccgaccaguccagcuacaucguggacuccgugaccgucaagaacgggagcauccaccucuacuucgacaaggccggccagaagaccuacgagcggcacucccugagccacuucgugaaccuggacaaccuccgcgccaacaacacgaaggggucccugcccaucaacgugaucgucuucgacggcaagagcaagugcgaggaguccagcgccaaguccgccagcguguacuacucccagcugaugugccagcccauccuccugcuggaccaggcgcucgugagcgacgucggcgacagcgccgagguggccgugaagauguucgacgccuacgucaacaccuucuccagcaccuucaacgugccgauggagaagcugaagacccugguggccacggcggaggccgagcucgccaagaacgucucccuggacaacgugcugagcaccuucaucuccgccgcgcggcagggguucguggacagcgacgucgagaccaaggacgugguggagugccucaagcugucccaccagagcgacaucgaggucaccggcgacuccugcaacaacuacaugcugacguacaacaagguggagaacaugaccccccgcgaccucggggccugcaucgacugcagcgcccggcacaucaacgcccagguggccaagucccacaacaucgcgcugaucuggaacgucaaggacuucaugagccuguccgagcagcuccgcaagcagauccggagcgccgccaagaagaacaaccugcccuucaagcugaccugcgccaccacgcgccagguggugaacgucgugaccaccaagaucgcccucaagggcgggugaggacuagucccuguucccagagcccacuuuuuuuucuuuuuuugaaauaaaauagccugucuuucagaucucaaaggcucuuuucagagccaccaaaaaaaaaaaaaaaaaaaaaaaaaaaaaaaaaaaaaaaaaaaaaaaaaaaaaaaaaaaaaaaaaaaaaaaaaaaaaaaaaaaaaaaaaaaaaaaaaaaaa

SEQ ID NO: 19974 - RNA, 6113 nt, Artificial Sequence
  SARS-CoV-2__MT632793.1__non-structural protein 3 (NSP3) mRNA gc
aggagagucccgcagucggcguccagcggcucugcuuguucgugugugugucguugcaggccuuauucaagcuuaccauggcccccaccaaggugaccuucggcgacgacacggucaucgaggugcagggguacaagagcgugaacaucaccuucgagcuggacgagcgcaucgacaagguccucaacgagaagugcuccgccuacaccguggagcugggcaccgaggugaacgaguucgcgugcgucguggccgacgccgugaucaagacgcugcagccggucagcgagcuccugaccccccuggggaucgaccucgacgagugguccauggccaccuacuaccuguucgacgagagcggcgaguucaagcuggccucccacauguacugcagcuucuacccccccgacgaggacgaggaggagggggacugcgaggaggaggaguucgagccguccacccaguacgaguacggcacggaggacgacuaccagggcaagccccucgaguucggggcgaccagcgccgcccugcagcccgaggaggagcaggaggaggacuggcuggacgacgacucccagcagaccgugggccagcaggacgggagcgaggacaaccagaccacgaccauccagaccaucguggagguccagccccagcucgagauggagcugaccccgguggugcagacgaucgaggucaacuccuucagcggcuaccugaagcucaccgacaacguguacaucaagaacgccgacaucguggaggaggcgaagaaggucaagcccaccgugguggucaacgccgccaacguguaccugaagcacgggggcggcguggccggggcccugaacaaggcgaccaacaacgccaugcaggucgaguccgacgacuacaucgccacgaacggcccccucaagguggggggcagcugcguccuguccggccacaaccuggccaagcacugccuccacgugguggggcccaacgucaacaagggcgaggacauccagcugcugaagagcgccuacgagaacuucaaccagcacgaggugcuccuggcgccgcugcucuccgccgggaucuucggcgccgaccccauccacagccugcgggugugcgucgacaccgugcgcaccaacguguaccuggccgucuucgacaagaaccucuacgacaagcugguguccagcuuccuggagaugaagagcgagaagcagguggagcagaagaucgccgagauccccaaggaggaggucaagcccuucaucaccgaguccaagccgagcguggagcagcggaagcaggacgacaagaagaucaaggcgugcguggaggaggucacgaccacccucgaggagaccaaguuccugacggagaaccugcuccuguacaucgacaucaacgggaaccugcaccccgacuccgccacccucgugagcgacaucgacaucaccuuccugaagaaggacgcccccuacaucgugggcgacgucgugcaggagggcgugcugaccgccgucgugauccccacgaagaaggccgggggcaccaccgagaugcucgcgaaggcccugcgcaaggugccgaccgacaacuacaucacgaccuaccccgggcagggccugaacggguacaccgucgaggaggccaagaccgugcucaagaagugcaaguccgccuucuacauccugcccagcaucaucuccaacgagaagcaggagauccugggcaccgugagcuggaaccuccgggagaugcuggcgcacgccgaggagacgcgcaagcugaugcccgucugcguggagaccaaggccaucguguccaccauccagcggaaguacaagggcaucaagauccaggagggggucguggacuacggcgcccgcuucuacuucuacaccagcaagacgaccguggccucccugaucaacacccucaacgaccugaacgagacccuggucacgaugccgcucggguacgugacccacggccugaaccuggaggaggcggcccgguacaugcgcagccucaaggugcccgccaccgucuccgugagcucccccgacgccgugaccgccuacaacggguaccugacgagcuccagcaagacccccgaggagcacuucaucgagaccaucucccuggcgggcagcuacaaggacuggagcuacuccggccagagcacccagcucgggaucgaguuccugaagcggggcgacaaguccgucuacuacacgagcaacccgaccaccuuccaccuggacggggaggugaucaccuucgacaaccucaagacgcugcugucccuccgcgaggugcggaccaucaaggucuucaccaccguggacaacaucaaccugcacacgcagguggucgacaugagcaugaccuacggccagcaguucggccccaccuaccuggacggggccgacgugaccaagaucaagccccacaacucccacgagggcaagacguucuacgugcucccgaacgacgacacccugcgcgucgaggccuucgaguacuaccacaccaccgaccccagcuuccuggggcgguacauguccgcccucaaccacacgaagaaguggaaguacccccaggugaacggccugaccagcaucaagugggccgacaacaacugcuaccuggcgaccgcccuccugacccugcagcagaucgagcucaaguucaaccccccggcccugcaggacgccuacuaccgcgcgcgggccggggaggccgccaacuucugcgcccugauccucgcguacugcaacaagacggugggcgagcugggcgacguccgcgagaccauguccuaccuguuccagcacgccaaccucgacagcugcaagcgggugcugaacgucgugugcaagaccugcgggcagcagcagaccacccugaagggcguggaggccgucauguacauggggacgcucuccuacgagcaguucaagaagggcgugcagauccccugcaccugcgggaagcaggccaccaaguaccuggugcagcaggagagccccuucgucaugauguccgcccccccggcgcaguacgagcugaagcacggcaccuucacgugcgccagcgaguacaccggcaacuaccagugcgggcacuacaagcacaucaucuccaaggagacccucuacugcaucgacggcgcccugcugaccaagagcagcgaguacaaggggcccaucacggacguguucuacaaggagaacuccuacaccaccaccaucaagcccgugacguacaagcucgacggcgucgugugcaccgagaucgaccccaagcuggacaacuacuacaagaaggacaacagcuacuucaccgagcagccgaucgaccuggugcccaaccagcccuaccccaacgccuccuucgacaacuucaaguucgucugcgacaacaucaaguucgccgacgaccucaaccagcugaccggguacaagaagccggcgagccgcgagcugaaggugacguucuuccccgaccucaacggcgacguggucgccaucgacuacaagcacuacacccccuccuucaagaagggcgccaagcugcugcacaagcccaucguguggcacgugaacaacgccaccaacaaggcgaccuacaagccgaacacguggugcauccggugccucuggagcaccaagcccgucgagaccuccaacagcuucgacgugcugaaguccgaggacgcccaggggauggacaaccuggccugcgaggaccucaagcccgugagcgaggaggucguggagaaccccaccauccagaaggacgugcuggagugcaacgucaagacgaccgagguggugggcgacaucauccugaagccggccaacaacucccucaagaucaccgaggaggucgggcacaccgaccugauggccgcguacguggacaacagcucccugacgaucaagaagcccaacgagcucagccgcgugcugggccugaagacccucgccacccacgggcuggccgccgucaacuccgugcccugggacaccaucgccaacuacgcgaagccguuccugaacaagguggucagcacgaccaccaacaucgugacccgcugccucaaccgggugugcacgaacuacaugcccuacuucuucacccugcugcuccagcugugcaccuucacccgcuccaccaacagccggaucaaggccuccaugcccacgaccaucgccaagaacaccgucaagagcgugggcaaguucugccuggaggccagcuucaacuaccucaagucccccaacuucagcaagcugaucaacaucaucaucugguuccugcuccuguccgugugccugggcagccucaucuacuccaccgccgcgcuggggguccugaugagcaaccucggcaugccguccuacugcacgggguaccgcgagggcuaccugaacagcaccaacgugaccaucgccaccuacugcacgggcuccauccccugcagcgugugccuguccgggcucgacagccuggacaccuaccccucccuggagaccauccagaucaccaucagcuccuucaagugggaccucacggccuucggccuggucgccgagugguuccuggccuacauccucuucacccgguucuucuacgugcuggggcuggcggccaucaugcagcucuucuucagcuacuucgccgugcacuucaucuccaacagcuggcugauguggcugaucaucaaccugguccagauggcccccaucuccgcgauggugcgcauguacaucuucuucgccagcuucuacuacguguggaagagcuacguccacgugguggacggcugcaacuccagcaccugcaugaugugcuacaagcggaaccgcgccacccgggucgagugcacgaccaucgugaacgggguccgccgguccuucuacguguacgccaacggcggcaagggguucugcaagcuccacaacuggaacugcgugaacugcgacaccuucugcgccggcagcaccuucaucuccgacgaggucgcgcgcgaccugagccugcaguucaagcggccgaucaaccccacggaccaguccagcuacaucguggacuccgugaccgucaagaacgggagcauccaccucuacuucgacaaggccggccagaagaccuacgagcgccacucccugagccacuucgugaaccuggacaaccuccgggccaacaacaccaaggggucccugcccaucaacgugaucgucuucgacggcaagagcaagugcgaggaguccagcgccaaguccgccagcguguacuacucccagcugaugugccagcccauccuccugcuggaccaggcgcucgugagcgacgucggcgacagcgccgagguggccgugaagauguucgacgccuacgucaacacguucuccagcaccuucgacgugccgauggagaagcugaagacccugguggccaccgcggaggccgagcucgccaagaacgucucccuggacaacgugcugagcacguucaucuccgccgcgcgccagggguucguggacagcgacgucgagaccaaggacgugguggagugccucaagcugucccaccagagcgacaucgaggucaccggcgacuccugcaacaacuacaugcugaccuacaacaagguggagaacaugacgccccgggaccucggggccugcaucgacugcagcgcccgccacaucaacgcccagguggccaagucccacaacaucgcgcugaucuggaacgucaaggacuucaugagccuguccgagcagcuccggaagcagauccgcagcgccgccaagaagaacaaccugcccuucaagcugaccugcgccaccacccgccagguggugaacgucgugacgaccaagaucgcccucaagggcgggugaggacuagucccuguucccagagcccacuuuuuuuucuuuuuuugaaauaaaauagccugucuuucagaucucaaaggcucuuuucagagccaccaaaaaaaaaaaaaaaaaaaaaaaaaaaaaaaaaaaaaaaaaaaaaaaaaaaaaaaaaaaaaaaaaaaaaaaaaaaaaaaaaaaaaaaaaaaaaaaaaaaaa

SEQ ID NO: 19975 - RNA, 6113 nt, Artificial Sequence
  SARS-CoV-2__MT632820.1__non-structural protein 3 (NSP3) mRNA gc
aggagagucccgcagucggcguccagcggcucugcuuguucgugugugugucguugcaggccuuauucaagcuuaccauggcccccaccaaggugaccuucggcgacgacacggucaucgaggugcagggguacaagagcgugaacaucaccuucgagcuggacgagcgcaucgacaagguccucaacgagaagugcuccgccuacaccguggagcugggcaccgaggugaacgaguucgcgugcgucguggccgacgccgugaucaagacgcugcagccggucagcgagcuccugaccccccuggggaucgaccucgacgagugguccauggccaccuacuaccuguucgacgagagcggcgaguucaagcuggccucccacauguacugcagcuucuacccccccgacgaggacgaggaggagggggacugcgaggaggaggaguucgagccguccacccaguacgaguacggcacggaggacgacuaccagggcaagccccucgaguucggggcgaccagcgccgcccugcagcccgaggaggagcaggaggaggacuggcuggacgacgacucccagcagaccgugggccagcaggacgggagcgaggacaaccagaccacgaccauccagaccaucguggagguccagccccagcucgagauggagcugaccccgguggugcagacgaucgaggucaacuccuucagcggcuaccugaagcucaccgacaacguguacaucaagaacgccgacaucguggaggaggcgaagaaggucaagcccaccgugguggucaacgccgccaacguguaccugaagcacgggggcggcguggccggggcccugaacaaggcgaccaacaacgccaugcaggucgaguccgacgacuacaucgccacgaacggcccccucaagguggggggcagcugcguccuguccggccacaaccuggccaagcacugccuccacgugguggggcccaacgucaacaagggcgaggacauccagcugcugaagagcgccuacgagaacuucaaccagcacgaggugcuccuggcgccgcugcucuccgccgggaucuucggcgccgaccccauccacagccugcgggugugcgucgacaccgugcgcaccaacguguaccuggccgucuucgacaagaaccucuacgacaagcugguguccagcuuccuggagaugaagagcgagaagcagguggagcagaagaucgccgagauccccaaggaggaggucaagcccuucaucaccgaguccaagccgagcguggagcagcggaagcaggacgacaagaagaucaaggcgugcguggaggaggucacgaccacccucgaggagaccaaguuccugacggagaaccugcuccuguacaucgacaucaacgggaaccugcaccccgacuccgccacccucgugagcgacaucgacaucaccuuccugaagaaggacgcccccuacaucgugggcgacgucgugcaggagggcgugcugaccgccgucgugauccccacgaagaaggccgggggcaccaccgagaugcucgcgaaggcccugcgcaaggugccgaccgacaacuacaucacgaccuaccccgggcagggccugaacggguacaccgucgaggaggccaagaccgugcucaagaagugcaaguccgccuucuacauccugcccagcaucaucuccaacgagaagcaggagauccugggcaccgugagcuggaaccuccgggagaugcuggcgcacgccgaggagacgcgcaagcugaugcccgucugcguggagaccaaggccaucguguccaccauccagcggaaguacaagggcaucaagauccaggagggggucguggacuacggcgcccgcuucuacuucuacaccagcaagacgaccguggccucccugaucaacacccucaacgaccugaacgagacccuggucacgaugccgcucggguacgugacccacggccugaaccuggaggaggcggcccgguacaugcgcagccucaaggugcccgccaccgucuccgugagcucccccgacgccgugaccgccuacaacggguaccugacgagcuccagcaagacccccgaggagcacuucaucgagaccaucucccuggcgggcagcuacaaggacuggagcuacuccggccagagcacccagcucgggaucgaguuccugaagcggggcgacaaguccgucuacuacacgagcaacccgaccaccuuccaccuggacggggaggugaucaccuucgacaaccucaagacgcugcugucccuccgcgaggugcggaccaucaaggucuucaccaccguggacaacaucaaccugcacacgcagguggucgacaugagcaugaccuacggccagcaguucggccccaccuaccuggacggggccgacgugaccaagaucaagccccacaacucccacgagggcaagacguucuacgugcucccgaacgacgacacccugcgcgucgaggccuucgaguacuaccacaccaccgaccccagcuuccuggggcgguacauguccgcccucaaccacacgaagaaguggaaguacccccaggugaacggccugaccagcaucaagugggccgacaacaacugcuaccuggcgaccgcccuccugacccugcagcagaucgagcucaaguucaaccccccggcccugcaggacgccuacuaccgcgcgcgggccggggaggccgccaacuucugcgcccugauccucgcguacugcaacaagacggugggcgagcugggcgacguccgcgagaccauguccuaccuguuccagcacgccaaccucgacagcugcaagcgggugcugaacgucgugugcaagaccugcgggcagcagcagaccacccugaagggcguggaggccgucauguacauggggacgcucuccuacgagcaguucaagaagggcgugcagauccccugcaccugcgggaagcaggccaccaaguaccuggugcagcaggagagccccuucgucaugauguccgcccccccggcgcaguacgagcugaagcacggcaccuucacgugcgccagcgaguacaccggcaacuaccagugcgggcacuacaagcacaucaccuccaaggagacccucuacugcaucgacggcgcccugcugacgaagagcagcgaguacaaggggcccaucaccgacguguucuacaaggagaacuccuacaccaccacgaucaagcccgugaccuacaagcucgacggcgucgugugcaccgagaucgaccccaagcuggacaacuacuacaagaaggacaacagcuacuucaccgagcagccgaucgaccuggugcccaaccagcccuaccccaacgccuccuucgacaacuucaaguucgucugcgacaacaucaaguucgccgacgaccucaaccagcugacgggguacaagaagccggcgagccgcgagcugaaggugaccuucuuccccgaccucaacggcgacguggucgccaucgacuacaagcacuacacccccuccuucaagaagggcgccaagcugcugcacaagcccaucguguggcacgugaacaacgccaccaacaaggcgacguacaagccgaacaccuggugcauccggugccucuggagcaccaagcccgucgagaccuccaacagcuucgacgugcugaaguccgaggacgcccaggggauggacaaccuggccugcgaggaccucaagcccgugagcgaggaggucguggagaaccccacgauccagaaggacgugcuggagugcaacgucaagaccaccgagguggugggcgacaucauccugaagccggccaacaacucccucaagaucaccgagaaggucgggcacacggaccugauggccgcguacguggacaacagcucccugaccaucaagaagcccaacgagcucagccgcgugcugggccugaagacccucgccacccacgggcuggccgccgucaacuccgugcccugggacacgaucgccaacuacgcgaagccguuccugaacaagguggucagcaccaccaccaacaucgugacgcgcugccucaaccgggugugcaccaacuacaugcccuacuucuucacccugcugcuccagcugugcaccuucacccgcuccacgaacagccggaucaaggccuccaugcccaccaccaucgccaagaacaccgucaagagcgugggcaaguucugccuggaggccagcuucaacuaccucaagucccccaacuucagcaagcugaucaacaucaucaucugguuccugcuccuguccgugugccugggcagccucaucuacuccacggccgcgcuggggguccugaugagcaaccucggcaugccguccuacugcaccggguaccgcgagggcuaccugaacagcaccaacgugaccaucgccacguacugcaccggcuccauccccugcagcgugugccuguccgggcucgacagccuggacaccuaccccucccuggagaccauccagaucacgaucagcuccuucaagugggaccucaccgccuucggccuggucgccgagugguuccuggccuacauccucuucacccgguucuucuacgugcuggggcuggcggccaucaugcagcucuucuucagcuacuucgccgugcacuucaucuccaacagcuggcugauguggcugaucaucaaccugguccagauggcccccaucuccgcgauggugcgcauguacaucuucuucgccagcuucuacuacguguggaagagcuacguccacgugguggacggcugcaacuccagcaccugcaugaugugcuacaagcggaaccgcgccacgcgggucgagugcaccaccaucgugaacgggguccgccgguccuucuacguguacgccaacggcggcaagggguucugcaagcuccacaacuggaacugcgugaacugcgacaccuucugcgccggcagcacguucaucuccgacgaggucgcgcgcgaccugagccugcaguucaagcggccgaucaaccccaccgaccaguccagcuacaucguggacuccgugaccgucaagaacgggagcauccaccucuacuucgacaaggccggccagaagaccuacgagcgccacucccugagccacuucgugaaccuggacaaccuccgggccaacaacacgaaggggucccugcccaucaacgugaucgucuucgacggcaagagcaagugcgaggaguccagcgccaaguccgccagcguguacuacucccagcugaugugccagcccauccuccugcuggaccaggcgcucgugagcgacgucggcgacagcgccgagguggccgugaagauguucgacgccuacgucaacaccuucuccagcaccuucaacgugccgauggagaagcugaagacccugguggccacggcggaggccgagcucgccaagaacgucucccuggacaacgugcugagcaccuucaucuccgccgcgcgccagggguucguggacagcgacgucgagaccaaggacgugguggagugccucaagcugucccaccagagcgacaucgaggucaccggcgacuccugcaacaacuacaugcugacguacaacaagguggagaacaugaccccccgggaccucggggccugcaucgacugcagcgcccgccacaucaacgcccagguggccaagucccacaacaucgcgcugaucuggaacgucaaggacuucaugagccuguccgagcagcuccggaagcagauccgcagcgccgccaagaagaacaaccugcccuucaagcugaccugcgccaccacgcgccagguggugaacgucgugaccaccaagaucgcccucaagggcgggugaggacuagucccuguucccagagcccacuuuuuuuucuuuuuuugaaauaaaauagccugucuuucagaucucaaaggcucuuuucagagccaccaaaaaaaaaaaaaaaaaaaaaaaaaaaaaaaaaaaaaaaaaaaaaaaaaaaaaaaaaaaaaaaaaaaaaaaaaaaaaaaaaaaaaaaaaaaaaaaaaaaaa

SEQ ID NO: 19976 - RNA, 6113 nt, Artificial Sequence
  SARS-CoV-2__MT632822.1__non-structural protein 3 (NSP3) mRNA gc
aggagagucccgcagucggcguccagcggcucugcuuguucgugugugugucguugcaggccuuauucaagcuuaccauggcccccaccaaggugaccuucggcgacgacacggucaucgaggugcagggguacaagagcgugaacaucaccuucgagcuggacgagcgcaucgacaagguccucaacgagaagugcuccgccuacaccguggagcugggcaccgaggugaacgaguucgcgugcgucguggccgacgccgugaucaagacgcugcagccggucagcgagcuccugaccccccuggggaucgaccucgacgagugguccauggccaccuacuaccuguucgacgagagcggcgaguucaagcuggccucccacauguacugcagcuucuacccccccgacgaggacgaggaggagggggacugcgaggaggaggaguucgagccguccacccaguacgaguacggcacggaggacgacuaccagggcaagccccucgaguucggggcgaccagcgccgcccugcagcccgaggaggagcaggaggaggacuggcuggacgacgacucccagcagaccgugggccagcaggacgggagcgaggacaaccagaccacgaccauccagaccaucguggagguccagccccagcucgagauggagcugaccccgguggugcagacgaucgaggucaacuccuucagcggcuaccugaagcucaccgacaacguguacaucaagaacgccgacaucguggaggaggcgaagaaggucaagcccaccgugguggucaacgccgccaacguguaccugaagcacgggggcggcguggccggggcccugaacaaggcgaccaacaacgccaugcaggucgaguccgacgacuacaucgccacgaacggcccccucaagguggggggcagcugcguccuguccggccacaaccuggccaagcacugccuccacgugguggggcccaacgucaacaagggcgaggacauccagcugcugaagagcgccuacgagaacuucaaccagcacgaggugcuccuggcgccgcugcucuccgccgggaucuucggcgccgaccccauccacagccugcgggugugcgucgacaccgugcgcaccaacguguaccuggccgucuucgacaagaaccucuacgacaagcugguguccagcuuccuggagaugaagagcgagaagcagguggagcagaagaucgccgagauccccaaggaggaggucaagcccuucaucaccgaguccaagccgagcguggagcagcggaagcaggacgacaagaagaucaaggcgugcguggaggaggucacgaccacccucgaggagaccaaguuccugacggagaaccugcuccuguacaucgacaucaacgggaaccugcaccccgacuccgccacccucgugagcgacaucgacaucaccuuccugaagaaggacgcccccuacaucgugggcgacgucgugcaggagggcgugcugaccgccgucgugauccccacgaagaaggccgggggcaccaccgagaugcucgcgaaggcccugcgcaaggugccgaccgacaacuacaucacgaccuaccccgggcagggccugaacggguacaccgucgaggaggccaagaccgugcucaagaagugcaaguccgccuucuacauccugcccagcaucaucuccaacgagaagcaggagauccugggcaccgugagcuggaaccuccgggagaugcuggcgcacgccgaggagacgcgcaagcugaugcccgucugcguggagaccaaggccaucguguccaccauccagcggaaguacaagggcaucaagauccaggagggggucguggacuacggcgcccgcuucuacuucuacaccagcaagacgaccguggccucccugaucaacacccucaacgaccugaacgagacccuggucacgaugccgcucggguacgugacccacggccugaaccuggaggaggcggcccgguacaugcgcagccucaaggugcccgccaccgucuccgugagcucccccgacgccgugaccgccuacaacggguaccugacgagcuccagcaagacccccgaggagcacuucaucgagaccaucucccuggcgagcagcuacaaggacugguccuacagcggccaguccacccagcucggcaucgaguuccugaagcggggggacaagagcgucuacuacacguccaacccgaccaccuuccaccuggacggcgaggugaucaccuucgacaaccucaagacgcugcugagccuccgcgaggugcggaccaucaaggucuucaccaccguggacaacaucaaccugcacacgcagguggucgacauguccaugaccuacgggcagcaguucggccccaccuaccuggacggcgccgacgugaccaagaucaagccccacaacagccacgaggggaagacguucuacgugcucccgaacgacgacacccugcgcgucgaggccuucgaguacuaccacaccaccgaccccuccuuccugggccgguacaugagcgcccucaaccacacgaagaaguggaaguacccccaggugaacgggcugaccuccaucaagugggccgacaacaacugcuaccuggcgaccgcccuccugacccugcagcagaucgagcucaaguucaaccccccggcccugcaggacgccuacuaccgcgcgcgggccggcgaggccgccaacuucugcgcccugauccucgcguacugcaacaagacggugggggagcugggcgacguccgcgagaccaugagcuaccuguuccagcacgccaaccucgacuccugcaagcgggugcugaacgucgugugcaagaccugcggccagcagcagaccacccugaaggggguggaggccgucauguacaugggcacgcucagcuacgagcaguucaagaagggggugcagauccccugcaccugcggcaagcaggccaccaaguaccuggugcagcaggagucccccuucgucaugaugagcgcccccccggcgcaguacgagcugaagcacgggaccuucacgugcgccuccgaguacaccggcaacuaccagugcggccacuacaagcacaucaccagcaaggagacccucuacugcaucgacggggcccugcugacgaagagcuccgaguacaagggccccaucaccgacguguucuacaaggagaacagcuacaccaccacgaucaagcccgugaccuacaagcucgacggggucgugugcaccgagaucgaccccaagcuggacaacuacuacaagaaggacaacuccuacuucaccgagcagccgaucgaccuggugcccaaccagcccuaccccaacgccagcuucgacaacuucaaguucgucugcgacaacaucaaguucgccgacgaccucaaccagcugacgggcuacaagaagccggcgucccgcgagcugaaggugaccuucuuccccgaccucaacggggacguggucgccaucgacuacaagcacuacacccccagcuucaagaagggcgccaagcugcugcacaagcccaucguguggcacgugaacaacgccaccaacaaggcgacguacaagccgaacaccuggugcauccggugccucugguccaccaagcccgucgagaccagcaacuccuucgacgugcugaagagcgaggacgcccagggcauggacaaccuggccugcgaggaccucaagcccguguccgaggaggucguggagaaccccacgauccagaaggacgugcuggagugcaacgucaagaccaccgagguggugggggacaucauccugaagccggccaacaacagccucaagaucaccgaggaggucggccacacggaccugauggccgcguacguggacaacuccagccugaccaucaagaagcccaacgagcucucccgcgugcuggggcugaagacccucgccacccacggccuggccgccgucaacagcgugcccugggacacgaucgccaacuacgcgaagccguuccugaacaagguggucuccaccaccaccaacaucgugacgcgcugccucaaccgggugugcaccaacuacaugcccuacuucuucacccugcugcuccagcugugcaccuucacccgcagcacgaacucccggaucaaggccagcaugcccaccaccaucgccaagaacaccgucaagagcguggggaaguucugccuggaggccuccuucaacuaccucaagagccccaacuucuccaagcugaucaacaucaucaucugguuccugcuccugagcgugugccugggcucccucaucuacagcacggccgcgcugggcguccugauguccaaccucgggaugccgagcuacugcaccggcuaccgcgagggguaccugaacuccaccaacgugaccaucgccacguacugcaccggcagcauccccugcuccgugugccugagcggccucgacucccuggacaccuaccccagccuggagaccauccagaucacgaucuccagcuucaagugggaccucaccgccuucgggcuggucgccgagugguuccuggccuacauccucuucacccgguucuucuacgugcugggccuggcggccaucaugcagcucuucuucuccuacuucgccgugcacuucaucagcaacuccuggcugauguggcugaucaucaaccugguccagauggcccccaucagcgcgauggugcgcauguacaucuucuucgccagcuucuacuacguguggaaguccuacguccacgugguggacgggugcaacagcuccaccugcaugaugugcuacaagcggaaccgcgccacgcgggucgagugcaccaccaucgugaacggcguccgccggagcuucuacguguacgccaacgggggcaagggcuucugcaagcuccacaacuggaacugcgugaacugcgacaccuucugcgccggguccacguucaucagcgacgaggucgcgcgcgaccugucccugcaguucaagcggccgaucaaccccaccgaccagagcuccuacaucguggacagcgugaccgucaagaacggcuccauccaccucuacuucgacaaggccgggcagaagaccuacgagcgccacagccugucccacuucgugaaccuggacaaccuccgggccaacaacacgaagggcagccugcccaucaacgugaucgucuucgacgggaaguccaagugcgaggagagcuccgccaagagcgccuccguguacuacagccagcugaugugccagcccauccuccugcuggaccaggcgcucgugagcgacgucggcgacuccgccgagguggccgugaagauguucgacgccuacgucaacaccuucagcuccaccuucaacgugccgauggagaagcugaagacccugguggccacggcggaggccgagcucgccaagaacgucagccuggacaacgugcuguccaccuucaucagcgccgcgcgccagggcuucguggacuccgacgucgagaccaaggacgugguggagugccucaagcugagccaccaguccgacaucgaggucaccggggacagcugcaacaacuacaugcugacguacaacaagguggagaacaugaccccccgggaccucggcgccugcaucgacugcuccgcccgccacaucaacgcccagguggccaagagccacaacaucgcgcugaucuggaacgucaaggacuucaugucccugagcgagcagcuccggaagcagauccgcuccgccgccaagaagaacaaccugcccuucaagcugaccugcgccaccacgcgccagguggugaacgucgugaccaccaagaucgcccucaaggggggcugaggacuagucccuguucccagagcccacuuuuuuuucuuuuuuugaaauaaaauagccugucuuucagaucucaaaggcucuuuucagagccaccaaaaaaaaaaaaaaaaaaaaaaaaaaaaaaaaaaaaaaaaaaaaaaaaaaaaaaaaaaaaaaaaaaaaaaaaaaaaaaaaaaaaaaaaaaaaaaaaaaaaa

SEQ ID NO: 19977 - RNA, 6113 nt, Artificial Sequence
  SARS-CoV-2__MT632834.1__non-structural protein 3 (NSP3) mRNA gc
aggagagucccgcagucggcguccagcggcucugcuuguucgugugugugucguugcaggccuuauucaagcuuaccauggcccccaccaaggugaccuucggcgacgacacggucaucgaggugcagggguacaagagcgugaacaucaccuucgagcuggacgagcgcaucgacaagguccucaacgagaagugcuccgccuacaccguggagcugggcaccgaggugaacgaguucgcgugcgucguggccgacgccgugaucaagacgcugcagccggucagcgagcuccugaccccccuggggaucgaccucgacgagugguccauggccaccuacuaccuguucgacgagagcggcgaguucaagcuggccucccacauguacugcagcuucuacccccccgacgaggacgaggaggagggggacugcgaggaggaggaguucgagccguccacccaguacgaguacggcacggaggacgacuaccagggcaagccccucgaguucggggcgaccagcgccgcccugcagcccgaggaggagcaggaggaggacuggcuggacgacgacucccagcagaccgugggccagcaggacgggagcgaggacaaccagaccacgaccauccagaccaucguggagguccagccccagcucgagauggagcugaccccgguggugcagacgaucgaggucaacuccuucagcggcuaccugaagcucaccgacaacguguacaucaagaacgccgacaucguggaggaggcgaagaaggucaagcccaccgugguggucaacgccgccaacguguaccugaagcacgggggcggcguggccggggcccugaacaaggcgaccaacaacgccaugcaggucgaguccgacgacuacaucgccacgaacggcccccucaagguggggggcagcugcguccuguccggccacaaccuggccaagcacugccuccacgugguggggcccaacgucaacaagggcgaggacauccagcugcugaagagcgccuacgagaacuucaaccagcacgaggugcuccuggcgccgcugcucuccgccgggaucuucggcgccgaccccauccacagccugcgggugugcgucgacaccgugcgcaccaacguguaccuggccgucuucgacaagaaccucuacgacaagcugguguccagcuuccuggagaugaagagcgagaagcagguggagcagaagaucgccgagauccccaaggaggaggucaagcccuucaucaccgaguccaagccgagcguggagcagcggaagcaggacgacaagaagaucaaggcgugcguggaggaggucacgaccacccucgaggagaccaaguuccugacggagaaccugcuccuguacaucgacaucaacgggaaccugcaccccgacuccgccacccucgugagcgacaucgacaucaccuuccugaagaaggacgcccccuacaucgugggcgacgucgugcaggagggcgugcugaccgccgucgugauccccacgaagaaggccgggggcaccaccgagaugcucgcgaaggcccugcgcaaggugccgaccgacaacuacaucacgaccuaccccgggcagggccugaacggguacaccgucgaggaggccaagaccgugcucaagaagugcaaguccgccuucuacauccugcccagcaucaucuccaacgagaagcaggagauccugggcaccgugagcuggaaccuccgggagaugcuggcgcacgccgaggagacgcgcaagcugaugcccgucugcguggagaccaaggccaucguguccaccauccagcggaaguacaagggcaucaagauccaggagggggucguggacuacggcgcccgcuucuacuucuacaccagcaagacgaccguggccucccugaucaacacccucaacgaccugaacgagacccuggucacgaugccgcucggguacgugacccacggccugaaccuggaggaggcggcccgguacaugcgcagccucaaggugcccgccaccgucuccgugagcucccccgacgccgugaccgccuacaacggguaccugacgagcuccagcaagacccccgaggagcacuucaucgagaccaucucccuggcgggcagcuacaaggacuggagcuacuccggccagagcacccagcucgggaucgaguuccugaagcggggcgacaaguccgucuacuacacgagcaacccgaccaccuuccaccuggacggggaggugaucaccuucgacaaccucaagacgcugcugucccuccgcgaggugcggaccaucaaggucuucaccaccguggacaacaucaaccugcacacgcagguggucgacaugagcaugaccuacggccagcaguucggccccaccuaccuggacggggccgacgugaccaagaucaagccccacaacucccacgagggcaagacguucuacgugcucccgaacgacgacacccugcgcgucgaggccuucgaguacuaccacaccaccgaccccagcuuccuggggcgguacauguccgcccucaaccacacgaagaaguggaaguacccccaggugaacggccugaccagcaucaagugggccgacaacaacugcuaccuggcgaccgcccuccugacccugcagcagaucgagcucaaguucaaccccccggcccugcaggacgccuacuaccgcgcgcgggccggggaggccgccaacuucugcgcccugauccucgcguacugcaacaagacggugggcgagcugggcgacguccgcgagaccauguccuaccuguuccagcacgccaaccucgacagcugcaagcgggugcugaacgucgugugcaagaccugcgggcagcagcagaccacccugaagggcguggaggccgucauguacauggggacgcucuccuacgagcaguucaagaagggcgugcagauccccugcaccugcgggaagcaggccaccaaguaccuggugcagcaggagagccccuucgucaugauguccgcccccccggcgcaguacgagcugaagcacggcaccuucacgugcgccagcgaguacaccggcaacuaccagugcgggcacuacaagcacaucaccuccaaggagacccucuacugcaucgacggcgcccugcugacgaagagcagcgaguacaaggggcccaucaccgacguguucuacaaggagaacuccuacaccaccacgaucaagcccgugaccuacaagcucgacggcgucgugugcaccgagaucgaccccaagcuggacaacuacuacaagaaggacaacagcuacuucaccgagcagccgaucgaccuggugcccaaccagcccuaccccaacgccuccuucgacaacuucaaguucgucugcgacaacaucaaguucgccgacgaccucaaccagcugacgggguacaagaagccggcgagccgcgagcugaaggugaccuucuuccccgaccucaacggcgacguggucgccaucgacuacaagcacuacacccccuccuucaagaagggcgccaagcugcugcacaagcccaucguguggcacgugaacaacgccaccaacaaggcgacguacaagccgaacaccuggugcauccggugccucuggagcaccaagcccgucgagaccuccaacagcuucgacgugcugaaguccgaggacgcccaggggauggacaaccuggccugcgaggaccucaagcccgugagcgaggaggucguggagaaccccacgauccagaaggacgugcuggagugcaacgucaagaccaccgagguggugggcgacaucauccugaagccggccaacaacucccucaagaucaccgaggaggucgggcacacggaccugauggccgcguacguggacaacagcucccugaccaucaagaagcccaacgagcucagccgcgugcugggccugaagacccucgccacccacgggcuggccgccgucaacuccgugcccugggacacgaucgccaacuacgcgaagccguuccugaacaagguggucagcaccaccaccaacaucgugacgcgcugccucaaccgggugugcaccaacuacaugcccuacuucuucacccugcugcuccagcugugcaccuucacccgcuccacgaacagccggaucaaggccuccaugcccaccaccaucgccaagaacaccgucaagagcgugggcaaguucugccuggaggccagcuucaacuaccucaagucccccaacuucagcaagcugaucaacaucaucaucugguuccugcuccuguccgugugccugggcagccucaucuacuccacggccgcgcuggggguccugaugagcaaccucggcaugccguccuacugcaccggguaccgcgagggcuaccugaacagcaccaacgugaccaucgccacguacugcaccggcuccauccccugcagcgugugccuguccgggcucgacagccuggacaccuaccccucccuggagaccauccagaucacgaucagcuccuucaagugggaccucaccgccuucggccuggucgccgagugguuccuggccuacauccucuucacccgguucuucuacgugcuggggcuggcggccaucaugcagcucuucuucagcuacuucgccgugcacuucaucuccaacagcuggcugauguggcugaucaucaaccugguccagauggcccccaucuccgcgauggugcgcauguacaucuucuucgcccucuucuacuacguguggaagagcuacguccacgugguggacggcugcaacagcuccaccugcaugaugugcuacaagcggaaccgcgccacgcgggucgagugcaccaccaucgugaacgggguccgccggagcuucuacguguacgccaacggcggcaagggguucugcaagcugcacaacuggaacugcgugaacugcgacaccuucugcgccggcuccacguucaucagcgacgaggucgcgcgcgaccugucccuccaguucaagcggccgaucaaccccaccgaccagagcuccuacaucguggacagcgugaccgucaagaacggguccauccaccuguacuucgacaaggccggccagaagaccuacgagcgccacagccugucccacuucgugaaccucgacaaccugcgggccaacaacacgaaggggagccugcccaucaacgugaucgucuucgacggcaaguccaagugcgaggagagcuccgccaagagcgccuccguguacuacagccagcucaugugccagcccauccugcugcucgaccaggcgcugguguccgacgucggcgacagcgccgagguggccgugaagauguucgacgccuacgucaacaccuucagcuccaccuucaacgugccgauggagaagcugaagacccucguggccacggcggaggccgagcuggccaagaacgucagccuggacaacgugcucuccaccuucaucagcgccgcgcgccagggguucguggacuccgacgucgagaccaaggacgugguggagugccugaagcugagccaccaguccgacaucgaggucaccggcgacagcugcaacaacuacaugcucacguacaacaagguggagaacaugaccccccgggaccugggggccugcaucgacugcuccgcccgccacaucaacgcccagguggccaagagccacaacaucgcgcugaucuggaacgucaaggacuucaugucccucagcgagcagcugcggaagcagauccgcuccgccgccaagaagaacaaccugcccuucaagcucaccugcgccaccacgcgccagguggugaacgucgugaccaccaagaucgcccugaagggcgggugaggacuagucccuguucccagagcccacuuuuuuuucuuuuuuugaaauaaaauagccugucuuucagaucucaaaggcucuuuucagagccaccaaaaaaaaaaaaaaaaaaaaaaaaaaaaaaaaaaaaaaaaaaaaaaaaaaaaaaaaaaaaaaaaaaaaaaaaaaaaaaaaaaaaaaaaaaaaaaaaaaaaa

SEQ ID NO: 19978 - RNA, 6113 nt, Artificial Sequence
  SARS-CoV-2__MT632840.1__non-structural protein 3 (NSP3) mRNA gc
aggagagucccgcagucggcguccagcggcucugcuuguucgugugugugucguugcaggccuuauucaagcuuaccauggcccccaccaaggugaccuucggcgacgacacggucaucgaggugcagggguacaagagcgugaacaucaccuucgagcuggacgagcgcaucgacaagguccucaacgagaagugcuccgccuacaccguggagcugggcaccgaggugaacgaguucgcgugcgucguggccgacgccgugaucaagacgcugcagccggucagcgagcuccugaccccccuggggaucgaccucgacgagugguccauggccaccuacuaccuguucgacgagagcggcgaguucaagcuggccucccacauguacugcagcuucuacccccccgacgaggacgaggaggagggggacugcgaggaggaggaguucgagccguccacccaguacgaguacggcacggaggacgacuaccagggcaagccccucgaguucggggcgaccagcgccgcccugcagcccgaggaggagcaggaggaggacuggcuggacgacgacucccagcagaccgugggccagcaggacgggagcgaggacaaccagaccacgaccauccagaccaucguggagguccagccccagcucgagauggagcugaccccgguggugcagacgaucgaggucaacuccuucagcggcuaccugaagcucaccgacaacguguacaucaagaacgccgacaucguggaggaggcgaagaaggucaagcccaccgugguggucaacgccgccaacguguaccugaagcacgggggcggcguggccggggcccugaacaaggcgaccaacaacgccaugcaggucgaguccgacgacuacaucgccacgaacggcccccucaagguggggggcagcugcguccuguccggccacaaccuggccaagcacugccuccacgugguggggcccaacgucaacaagugcgaggacauccagcugcugaagagcgccuacgagaacuucaaccagcacgaggugcuccuggcgccgcugcucuccgccggcaucuucggggccgaccccauccacagccugcgggugugcgucgacaccgugcgcaccaacguguaccuggccgucuucgacaagaaccucuacgacaagcugguguccagcuuccuggagaugaagagcgagaagcagguggagcagaagaucgccgagauccccaaggaggaggucaagcccuucaucaccgaguccaagccgagcguggagcagcggaagcaggacgacaagaagaucaaggcgugcguggaggaggucacgaccacccucgaggagaccaaguuccugacggagaaccugcuccuguacaucgacaucaacggcaaccugcaccccgacuccgccacccucgugagcgacaucgacaucaccuuccugaagaaggacgcccccuacaucgugggggacgucgugcaggagggcgugcugaccgccgucgugauccccacgaagaaggccggcgggaccaccgagaugcucgcgaaggcccugcgcaaggugccgaccgacaacuacaucacgaccuaccccggccaggggcugaacggcuacaccgucgaggaggccaagaccgugcucaagaagugcaaguccgccuucuacauccugcccagcaucaucuccaacgagaagcaggagauccuggggaccgugagcuggaaccuccgggagaugcuggcgcacgccgaggagacgcgcaagcugaugcccgucugcguggagaccaaggccaucguguccaccauccagcggaaguacaagggcaucaagauccaggagggcgucguggacuacggggcccgcuucuacuucuacaccagcaagacgaccguggccucccugaucaacacccucaacgaccugaacgagacccuggucacgaugccgcucggcuacgugacccacgggcugaaccuggaggaggcggcccgguacaugcgcagccucaaggugcccgccaccgucuccgugagcucccccgacgccgugaccgccuacaacggcuaccugacgagcuccagcaagacccccgaggagcacuucaucgagaccaucucccuggcggggagcuacaaggacuggagcuacuccggccagagcacccagcucggcaucgaguuccugaagcggggggacaaguccgucuacuacacgagcaacccgaccaccuuccaccuggacggcgaggugaucaccuucgacaaccucaagacgcugcugucccuccgcgaggugcggaccaucaaggucuucaccaccguggacaacaucaaccugcacacgcagguggucgacaugagcaugaccuacgggcagcaguucggccccaccuaccuggacggcgccgacgugaccaagaucaagccccacaacucccacgaggggaagacguucuacgugcucccgaacgacgacacccugcgcgucgaggccuucgaguacuaccacaccaccgaccccagcuuccugggccgguacauguccgcccucaaccacacgaagaaguggaaguacccccaggugaacgggcugaccagcaucaagugggccgacaacaacugcuaccuggcgaccgcccuccugacccugcagcagaucgagcucaaguucaaccccccggcccugcaggacgccuacuaccgcgcgcgggccggcgaggccgccaacuucugcgcccugauccucgcguacugcaacaagacggugggggagcugggcgacguccgcgagaccauguccuaccuguuccagcacgccaaccucgacagcugcaagcgggugcugaacgucgugugcaagaccugcggccagcagcagaccacccugaaggggguggaggccgucauguacaugggcacgcucuccuacgagcaguucaagaagggggugcagauccccugcaccugcggcaagcaggccaccaaguaccuggugcagcaggagagccccuucgucaugauguccgcccccccggcgcaguacgagcugaagcacgggaccuucacgugcgccagcgaguacaccggcaacuaccagugcggccacuacaagcacaucaccuccaaggagacccucuacugcaucgacggggcccugcugacgaagagcagcgaguacaagggccccaucaccgacguguucuacaaggagaacuccuacaccaccacgaucaagcccgugaccuacaagcucgacggggucgugugcaccgagaucgaccccaagcuggacaacuacuacaagaaggacaacagcuacuucaccgagcagccgaucgaccuggugcccaaccagcccuaccccaacgccuccuucgacaacuucaaguucgucugcgacaacaucaaguucgccgacgaccucaaccagcugacgggcuacaagaagccggcgagccgcgagcugaaggugaccuucuuccccgaccucaacggggacguggucgccaucgacuacaagcacuacacccccuccuucaagaagggcgccaagcugcugcacaagcccaucguguggcacgugaacaacgccaccaacaaggcgacguacaagccgaacaccuggugcauccggugccucuggagcaccaagcccgucgagaccuccaacagcuucgacgugcugaaguccgaggacgcccagggcauggacaaccuggccugcgaggaccucaagcccgugagcgaggaggucguggagaaccccacgauccagaaggacgugcuggagugcaacgucaagaccaccgagguggugggggacaucauccugaagccggccaacaacucccucaagaucaccgaggaggucggccacacggaccugauggccgcguacguggacaacagcucccugaccaucaagaagcccaacgagcucagccgcgugcuggggcugaagacccucgccacccacggccuggccgccgucaacuccgugcccugggacacgaucgccaacuacgcgcgcccguuccugaacaagguggucagcaccaccaccaacaucgugacgcggugccucaaccgcgugugcaccaacuacaugcccuacuucuucacccugcugcuccagcugugcaccuucacccgguccacgaacagccgcaucaaggccuccaugcccaccaccaucgccaagaacaccgucaagagcguggggaaguucugccuggaggccagcuucaacuaccucaagucccccaacuucagcaagcugaucaacaucaucaucugguuccugcuccuguccgugugccugggcagccucaucuacuccacggccgcgcugggcguccugaugagcaaccucgggaugccguccuacugcaccggcuaccgggagggguaccugaacagcaccaacgugaccaucgccacguacugcaccggcuccauccccugcagcgugugccuguccggccucgacagccuggacaccuaccccucccuggagaccauccagaucacgaucagcuccuucaagugggaccucaccgccuucgggcuggucgccgagugguuccuggccuacauccucuucacccgcuucuucuacgugcugggccuggcggccaucaugcagcucuucuucagcuacuucgccgugcacuucaucuccaacagcuggcugauguggcugaucaucaaccugguccagauggcccccaucuccgcgauggugcggauguacaucuucuucgccagcuucuacuacguguggaagagcuacguccacgugguggacgggugcaacuccagcaccugcaugaugugcuacaagcgcaaccgggccacgcgcgucgagugcaccaccaucgugaacggcguccggcgcuccuucuacguguacgccaacgggggcaagggcuucugcaagcuccacaacuggaacugcgugaacugcgacaccuucugcgccgggagcacguucaucuccgacgaggucgcgcgggaccugagccugcaguucaagcgcccgaucaaccccaccgaccaguccagcuacaucguggacuccgugaccgucaagaacggcagcauccaccucuacuucgacaaggccgggcagaagaccuacgagcggcacucccugagccacuucgugaaccuggacaaccuccgcgccaacaacacgaagggcucccugcccaucaacgugaucgucuucgacgggaagagcaagugcgaggaguccagcgccaaguccgccagcguguacuacucccagcugaugugccagcccauccuccugcuggaccaggcgcucgugagcgacgucggcgacagcgccgagguggccgugaagauguucgacgccuacgucaacaccuucuccagcaccuucaacgugccgauggagaagcugaagacccugguggccacggcggaggccgagcucgccaagaacgucucccuggacaacgugcugagcaccuucaucuccgccgcgcggcagggcuucguggacagcgacgucgagaccaaggacgugguggagugccucaagcugucccaccagagcgacaucgaggucaccggggacuccugcaacaacuacaugcugacguacaacaagguggagaacaugaccccccgcgaccucggcgccugcaucgacugcagcgcccggcacaucaacgcccagguggccaagucccacaacaucgcgcugaucuggaacgucaaggacuucaugagccuguccgagcagcuccgcaagcagauccgcagcgccgccaagaagaacaaccugcccuucaagcugaccugcgccaccacgcggcagguggugaacgucgugaccaccaagaucgcccucaaggggggcugaggacuagucccuguucccagagcccacuuuuuuuucuuuuuuugaaauaaaauagccugucuuucagaucucaaaggcucuuuucagagccaccaaaaaaaaaaaaaaaaaaaaaaaaaaaaaaaaaaaaaaaaaaaaaaaaaaaaaaaaaaaaaaaaaaaaaaaaaaaaaaaaaaaaaaaaaaaaaaaaaaaaa

SEQ ID NO: 19979 - RNA, 6113 nt, Artificial Sequence
  SARS-CoV-2__MT632866.1__non-structural protein 3 (NSP3) mRNA gc
aggagagucccgcagucggcguccagcggcucugcuuguucgugugugugucguugcaggccuuauucaagcuuaccauggcccccaccaaggugaccuucggcgacgacacggucaucgaggugcagggguacaagagcgugaacaucaccuucgagcuggacgagcgcaucgacaagguccucaacgagaagugcuccgccuacaccguggagcugggcaccgaggugaacgaguucgcgugcgucguggccgacgccgugaucaagacgcugcagccggucagcgagcuccugaccccccuggggaucgaccucgacgagugguccauggccaccuacuaccuguucgacgagagcggcgaguucaagcuggccucccacauguacugcagcuucuacccccccgacgaggacgaggaggagggggacugcgaggaggaggaguucgagccguccacccaguacgaguacggcacggaggacgacuaccagggcaagccccucgaguucggggcgaccagcgccgcccugcagcccgaggaggagcaggaggaggacuggcuggacgacgacucccagcagaccgugggccagcaggacgggagcgaggacaaccagaccacgaccauccagaccaucguggagguccagccccagcucgagauggagcugaccccgguggugcagacgaucgaggucaacuccuucagcggcuaccugaagcucaccgacaacguguacaucaagaacgccgacaucguggaggaggcgaagaaggucaagcccaccgugguggucaacgccgccaacguguaccugaagcacgggggcggcguggccggggcccugaacaaggcgaccaacaacgccaugcaggucgaguccgacgacuacaucgccacgaacggcccccucaagguggggggcagcugcguccuguccggccacaaccuggccaagcacugccuccacgugguggggcccaacgucaacaagggcgaggacauccagcugcugaagagcgccuacgagaacuucaaccagcacgaggugcuccuggcgccgcugcucuccgccgggaucuucggcgccgaccccauccacagccugcgggugugcgucgacaccgugcgcaccaacguguaccuggccgucuucgacaagaaccucuacgacaagcugguguccagcuuccuggagaugaagagcgagaagcagguggagcagaagaucgccgagauccccaaggaggaggucaagcccuucaucaccgaguccaagccgagcguggagcagcggaagcaggacgacaagaagaucaaggcgugcguggaggaggucacgaccacccucgaggagaccaaguuccugacggagaaccugcuccuguacaucgacaucaacgggaaccugcaccccgacuccgccacccucgugagcgacaucgacaucaccuuccugaagaaggacgcccccuacaucgugggcgacgucgugcaggagggcgugcugaccgccgucgugauccccacgaagaaggccgggggcaccaccgagaugcucgcgaaggcccugcgcaaggugccgaccgacaacuacaucacgaccuaccccgggcagggccugaacggguacaccgucgaggaggccaagaccgugcucaagaagugcaaguccgccuucuacauccugcccagcaucaucuccaacgagaagcaggagauccugggcaccgugagcuggaaccuccgggagaugcuggcgcacgccgaggagacgcgcaagcugaugcccgucugcguggagaccaaggccaucguguccaccauccagcggaaguacaagggcaucaagauccaggagggggucguggacuacggcgcccgcuucuacuucuacaccagcaagacgaccguggccucccugaucaacacccucaacgaccugaacgagacccuggucacgaugccgcucggguacgugacccacggccugaaccuggaggaggcggcccgguacaugcgcagccucaaggugcccgccaccgucuccgugagcucccccgacgccgugaccgccuacaacggguaccugacgagcuccagcaagacccccgaggagcacuucaucgagaccaucucccuggcgggcagcuacaaggacuggagcuacuccggccagagcacccagcucgggaucgaguuccugaagcggggcgacaaguccgucuacuacacgagcaacccgaccaccuuccaccuggacggggaggugaucaccuucgacaaccucaagacgcugcugucccuccgcgaggugcggaccaucaaggucuucaccaccguggacaacaucaaccugcacacgcagguggucgacaugagcaugaccuacggccagcaguucggccccaccuaccuggacggggccgacgugaccaagaucaagccccacaacucccacgagggcaagacguucuacgugcucccgaacgacgacacccugcgcgucgaggccuucgaguacuaccacaccaccgaccccagcuuccuggggcgguacauguccgcccucaaccacacgaagaaguggaaguacccccaggugaacggccugaccagcaucaagugggccgacaacaacugcuaccuggcgaccgcccuccugacccugcagcagaucgagcucaaguucaaccccccggcccugcaggacgccuacuaccgcgcgcgggccggggaggccgccaacuucugcgcccugauccucgcguacugcaacaagacggugggcgagcugggcgacguccgcgagaccauguccuaccuguuccagcacgccaaccucgacagcugcaagcgggugcugaacgucgugugcaagaccugcgggcagcagcagaccacccugaagggcguggaggccgucauguacauggggacgcucuccuacgagcaguucaagaagggcgugcagauccccugcaccugcgggaagcaggccaccaaguaccuggugcagcaggagagccccuucgucaugauguccgcccccccggcgcaguacgagcugaagcacggcaccuucacgugcgccagcgaguacaccggcaacuaccagugcgggcacuacaagcacaucaccuccaaggagacccucuacugcaucgacggcgcccugcugacgaagagcagcgaguacaaggggcccaucaccgacguguucuacaaggagaacuccuacaccaccacgaucaagcccgugaccuacaagcucgacggcgucgugugcaccgagaucgaccccaagcuggacaacuacuacaagaaggacaacagcuacuucaccgagcagccgaucgaccuggugcccaaccagcccuaccccaacgccuccuucgacaacuucaaguucgucugcgacaacaucaaguucgccgacgaccucaaccagcugacgggguacaagaagccggcgagccgcgagcugaaggugaccuucuuccccgaccucaacggcgacguggucgccaucgacuacaagcacuacacccccuccuucaagaagggcgccaagcugcugcacaagcccaucguguggcacgugaacaacgccaccaacaaggcgacguacaagccgaacaccuggugcauccggugccucuggagcaccaagcccgucgagaccuccaacagcuucgacgugcugaaguccgaggacgcccaggggauggacaaccuggccugcgaggaccucaagcccgugagcgaggaggucguggagaaccccacgauccagaaggacgugcuggagugcaacgucaagaccaccgagguggugggcgacaucauccugaagccggccaacaacucccucaagaucaccgaggaggucgggcacacggaccugauggccgcguacguggacaacagcucccugaccaucaagaagcccaacgagcucagccgcgugcugggccugaagacccucgccacccacgggcuggccgccgucaacuccgugcccugggacacgaucgccaacuacgcgaagccguuccugaacaagguggucagcaccaccaccaacaucgugacgcgcugccucaaccgggugugcaccaacuacaugcccuacuucuucacccugcugcuccagcugugcaccuucacccgcuccacgaacagccggaucaaggccuccaugcccaccaccaucgccaagaacaccgucaagagcgugggcaaguucugccuggaggccagcuucaacuaccucaagucccccaacuucagcaagcugaucaacaucaucaucugguuccugcuccuguccgugugccugggcagccucaucuacuccacggccgcgcuggggguccugaugagcaaccucggcaugccguccuacugcaccggguaccgcgagggcuaccugaacagcaccaacgugaccaucgccacguacugcaccggcuccauccccugcagcgugugccuguccgggcucgacagccuggacaccuaccccucccuggagaccauccagaucacgaucagcuccuucaagugggaccucaccgccuucggccuggucgccgagugguuccuggccuacauccucuucacccgguucuucuacgugcuggggcuggcggccaucaugcagcucuucuucagcuacuucgccgugcacuucaucuccaacagcuggcugauguggcugaucaucaaccugguccagauggcccccaucuccgcgauggugcgcauguacaucuucuucgccagcuucuacuacguguggaagagcuacguccacgugguggacggcugcaacuccagcaccugcaugaugugcuacaagcggaaccgcgccacgcgggucgagugcaccaccaucgugaacgggguccgccgguccuucuacguguacgccaacggcggcaagggguucugcaagcuccacaacuggaacugcgugaacugcgacaccuucugcgccggcagcacguucaucuccgacgaggucgcgcgcgaccugagccugcaguucaagcggccgaucaaccccaccgaccaguccagcuacaucguggacuccgugaccgucaagaacgggagcauccaccucuacuucgacaaggccggccagaagaccuacgagcgccacucccugagccacuucgugaaccuggacaaccuccgggccaacaacacgaaggggucccugcccaucaacgugaucgucuucgacggcaagagcaagugcgaggaguccagcgccaaguccgccagcguguacuacucccagcugaugugccagcccauccuccugcuggaccaggcgcucgugagcgacgucggcgacagcgccgagguggccgugaagauguucgacgccuacgucaacaccuucuccagcaccuucaacgugccgauggagaagcugaagacccugguggccacggcggaggccgagcucgccaagaacgucucccuggggaacgugcugagcaccuucaucuccgccgcgcgccagggcuucguggacagcgacgucgagaccaaggacgugguggagugccucaagcugucccaccagagcgacaucgaggucaccggggacuccugcaacaacuacaugcugacguacaacaagguggagaacaugaccccccgggaccucggcgccugcaucgacugcagcgcccgccacaucaacgcccagguggccaagucccacaacaucgcgcugaucuggaacgucaaggacuucaugagccuguccgagcagcuccggaagcagauccgcagcgccgccaagaagaacaaccugcccuucaagcugaccugcgccaccacgcgccagguggugaacgucgugaccaccaagaucgcccucaaggggggcugaggacuagucccuguucccagagcccacuuuuuuuucuuuuuuugaaauaaaauagccugucuuucagaucucaaaggcucuuuucagagccaccaaaaaaaaaaaaaaaaaaaaaaaaaaaaaaaaaaaaaaaaaaaaaaaaaaaaaaaaaaaaaaaaaaaaaaaaaaaaaaaaaaaaaaaaaaaaaaaaaaaaa

SEQ ID NO: 19980 - RNA, 6113 nt, Artificial Sequence
  SARS-CoV-2__MT632921.1__non-structural protein 3 (NSP3) mRNA gc
aggagagucccgcagucggcguccagcggcucugcuuguucgugugugugucguugcaggccuuauucaagcuuaccauggcccccaccaaggugaccuucggcgacgacacggucaucgaggugcagggguacaagagcgugaacaucaccuucgagcuggacgagcgcaucgacaagguccucaacgagaagugcuccgccuacaccguggagcugggcaccgaggugaacgaguucgcgugcgucguggccgacgccgugaucaagacgcugcagccggucagcgagcuccugaccccccuggggaucgaccucgacgagugguccauggccaccuacuaccuguucgacgagagcggcgaguucaagcuggccucccacauguacugcagcuucuacccccccgacgaggacgaggaggagggggacugcgaggaggaggaguucgagccguccacccaguacgaguacggcacggaggacgacuaccagggcaagccccucgaguucggggcgaccagcgccgcccugcagcccgaggaggagcaggaggaggacuggcuggacgacgacucccagcagaccgugggccagcaggacgggagcgaggacaaccagaccacgaccauccagaccaucguggagguccagccccagcucgagauggagcugaccccgguggugcagacgaucgaggucaacuccuucagcggcuaccugaagcucaccgacaacguguacaucaagaacgccgacaucguggaggaggcgaagaaggucaagcccaccgugguggucaacgccgccaacguguaccugaagcacgggggcggcguggccggggcccugaacaaggcgaccaacaacgccaugcaggucgaguccgacgacuacaucgccacgaacggcccccucaagguggggggcagcugcguccuguccggccacaaccuggccaagcacugccuccacgugguggggcccaacgucaacaagggcgaggacauccagcugcugaagagcgccuacgagaacuucaaccagcacgaggugcuccuggcgccgcugcucuccgccgggaucuucggcgccgacagcauccacucccugcgggugugcgucgacaccgugcgcaccaacguguaccuggccgucuucgacaagaaccucuacgacaagcuggugagcagcuuccuggagaugaaguccgagaagcagguggagcagaagaucgccgagauccccaaggaggaggucaagcccuucaucaccgagagcaagcccuccguggagcagcggaagcaggacgacaagaagaucaaggcgugcguggaggaggucacgaccacccucgaggagaccaaguuccugacggagaaccugcuccuguacaucgacaucaacgggaaccugcacccggacagcgccacccucguguccgacaucgacaucaccuuccugaagaaggacgcccccuacaucgugggcgacgucgugcaggagggcgugcugaccgccgucgugauccccacgaagaaggccgggggcaccaccgagaugcucgcgaaggcccugcgcaaggugcccaccgacaacuacaucacgaccuacccggggcagggccugaacggguacaccgucgaggaggccaagaccgugcucaagaagugcaagagcgccuucuacauccugcccuccaucaucagcaacgagaagcaggagauccugggcaccguguccuggaaccuccgggagaugcuggcgcacgccgaggagacgcgcaagcugaugcccgucugcguggagaccaaggccaucgugagcaccauccagcggaaguacaagggcaucaagauccaggagggggucguggacuacggcgcccgcuucuacuucuacaccuccaagacgaccguggccagccugaucaacacccucaacgaccugaacgagacccuggucacgaugccccucggguacgugacccacggccugaaccuggaggaggcggcccgguacaugcgcucccucaaggugccggccaccgucagcguguccagccccgacgccgugaccgccuacaacggguaccugacguccagcuccaagacccccgaggagcacuucaucgagaccaucagccuggcgggcagcuacaaggacugguccuacagcggccaguccacccagcucgggaucgaguuccugaagcggggcgacaagagcgucuacuacacguccaaccccaccaccuuccaccuggacggggaggugaucaccuucgacaaccucaagacgcugcugagccuccgcgaggugcggaccaucaaggucuucaccaccguggacaacaucaaccugcacacgcagguggucgacauguccaugaccuacggccagcaguucggcccgaccuaccuggacggggccgacgugaccaagaucaagccccacaacagccacgagggcaagacguucuacgugcuccccaacgacgacacccugcgcgucgaggccuucgaguacuaccacaccaccgacccguccuuccuggggcgguacaugagcgcccucaaccacacgaagaaguggaaguacccccaggugaacggccugaccuccaucaagugggccgacaacaacugcuaccuggcgaccgcccuccugacccugcagcagaucgagcucaaguucaacccccccgcccugcaggacgccuacuaccgcgcgcgggccggggaggccgccaacuucugcgcccugauccucgcguacugcaacaagacggugggcgagcugggcgacguccgcgagaccaugagcuaccuguuccagcacgccaaccucgacuccugcaagcgggugcugaacgucgugugcaagaccugcgggcagcagcagaccacccugaagggcguggaggccgucauguacauggggacgcucagcuacgagcaguucaagaagggcgugcagaucccgugcaccugcgggaagcaggccaccaaguaccuggugcagcaggagucccccuucgucaugaugagcgccccccccgcgcaguacgagcugaagcacggcaccuucacgugcgccuccgaguacaccggcaacuaccagugcgggcacuacaagcacaucaccagcaaggagacccucuacugcaucgacggcgcccugcugacgaagagcuccgaguacaaggggccgaucaccgacguguucuacaaggagaacagcuacaccaccacgaucaagcccgugaccuacaagcucgacggcgucgugugcaccgagaucgaccccaagcuggacaacuacuacaagaaggacaacuccuacuucaccgagcagcccaucgaccuggugccgaaccagcccuaccccaacgccagcuucgacaacuucaaguucgucugcgacaacaucaaguucgccgacgaccucaaccagcugacgggguacaagaagcccgcgucccgcgagcugaaggugaccuucuucccggaccucaacggcgacguggucgccaucgacuacaagcacuacacccccagcuucaagaagggcgccaagcugcugcacaagcccaucguguggcacgugaacaacgccaccaacaaggcgacguacaagcccaacaccuggugcauccggugccucugguccaccaagccggucgagaccagcaacuccuucgacgugcugaagagcgaggacgcccaggggauggacaaccuggccugcgaggaccucaagcccguguccgaggaggucguggagaaccccacgauccagaaggacgugcuggagugcaacgucaagaccaccgagguggugggcgacaucauccugaagcccgccaacaacagccucaagaucaccgaggaggucgggcacacggaccugauggccgcguacguggacaacuccagccugaccaucaagaagccgaacgagcucucccgcgugcugggccugaagacccucgccacccacgggcuggccgccgucaacagcgugcccugggacacgaucgccaacuacgcgaagcccuuccugaacaagguggucuccaccaccaccaacaucgugacgcgcugccucaaccgggugugcaccaacuacaugccguacuucuucacccugcugcuccagcugugcaccuucacccgcagcacgaacucccggaucaaggccagcaugcccaccaccaucgccaagaacaccgucaagagcgugggcaaguucugccuggaggccuccuucaacuaccucaagagccccaacuucuccaagcugaucaacaucaucaucugguuccugcuccugagcgugugccugggcucccucaucuacagcacggccgcgcuggggguccugauguccaaccucggcaugcccagcuacugcaccggguaccgcgagggcuaccugaacuccaccaacgugaccaucgccacguacugcaccggcagcaucccgugcuccgugugccugagcgggcucgacucccuggacaccuaccccagccuggagaccauccagaucacgaucuccagcuucaagugggaccucaccgccuucggccuggucgccgagugguuccuggccuacauccucuucacccgguucuucuacgugcuggggcuggcggccaucaugcagcucuucuucuccuacuucgccgugcacuucaucagcaacuccuggcugauguggcugaucaucaaccugguccagauggcccccaucagcgcgauggugcgcauguacaucuucuucgccagcuucuacuacguguggaaguccuacguccacgugguggacggcugcaacagcuccaccugcaugaugugcuacaagcggaaccgcgccacgcgggucgagugcaccaccaucgugaacgggguccgccggagcuucuacguguacgccaacggcggcaagggguucugcaagcuccacaacuggaacugcgugaacugcgacaccuucugcgccggcuccacguucaucagcgacgaggucgcgcgcgaccugucccugcaguucaagcggcccaucaacccgaccgaccagagcuccuacaucguggacagcgugaccgucaagaacggguccauccaccucuacuucgacaaggccggccagaagaccuacgagcgccacagccugucccacuucgugaaccuggacaaccuccgggccaacaacacgaaggggagccugcccaucaacgugaucgucuucgacggcaaguccaagugcgaggagagcuccgccaagagcgccuccguguacuacagccagcugaugugccagcccauccuccugcuggaccaggcgcucgugagcgacgucggcgacuccgccgagguggccgugaagauguucgacgccuacgucaacaccuucagcuccaccuucaacgugcccauggagaagcugaagacccugguggccacggcggaggccgagcucgccaagaacgucagccuggacaacgugcuguccaccuucaucagcgccgcgcgccagggguucguggacuccgacgucgagaccaaggacgugguggagugccucaagcugagccaccaguccgacaucgaggucaccggcgacagcugcaacaacuacaugcugacguacaacaagguggagaacaugaccccgcgggaccucggggccugcaucgacugcuccgcccgccacaucaacgcccagguggccaagagccacaacaucgcgcugaucuggaacgucaaggacuucaugucccugagcgagcagcuccggaagcagauccgcuccgccgccaagaagaacaaccugcccuucaagcugaccugcgccaccacgcgccagguggugaacgucgugaccaccaagaucgcccucaagggcgggugaggacuagucccuguucccagagcccacuuuuuuuucuuuuuuugaaauaaaauagccugucuuucagaucucaaaggcucuuuucagagccaccaaaaaaaaaaaaaaaaaaaaaaaaaaaaaaaaaaaaaaaaaaaaaaaaaaaaaaaaaaaaaaaaaaaaaaaaaaaaaaaaaaaaaaaaaaaaaaaaaaaaa

SEQ ID NO: 19981 - RNA, 6113 nt, Artificial Sequence
  SARS-CoV-2__MT632930.1__non-structural protein 3 (NSP3) mRNA gc
aggagagucccgcagucggcguccagcggcucugcuuguucgugugugugucguugcaggccuuauucaagcuuaccauggcccccaccaaggugaccuucggcgacgacacggucaucgaggugcagggguacaagagcgugaacaucaccuucgagcuggacgagcgcaucgacaagguccucaacgagaagugcuccgccuacaccguggagcugggcaccgaggugaacgaguucgcgugcgucguggccgacgccgugaucaagacgcugcagccggucagcgagcuccugaccccccuggggaucgaccucgacgagugguccauggccaccuacuaccuguucgacgagagcggcgaguucaagcuggccucccacauguacugcagcuucuacccccccgacgaggacgaggaggagggggacugcgaggaggaggaguucgagccguccacccaguacgaguacggcacggaggacgacuaccagggcaagccccucgaguucggggcgaccagcgccgcccugcagcccgaggaggagcaggaggaggacuggcuggacgacgacucccagcagaccgugggccagcaggacgggagcgaggacaaccagaccacgaccauccagaccaucguggagguccagccccagcucgagauggagcugaccccgguggugcagacgaucgaggucaacuccuucagcggcuaccugaagcucaccgacaacguguacaucaagaacgccgacaucguggaggaggcgaagaaggucaagcccaccgugguggucaacgccgccaacguguaccugaagcacgggggcggcguggccggggcccugaacaaggcgaccaacaacgccaugcaggucgaguccgacgacuacaucgccacgaacggcccccucaagguggggggcagcugcguccuguccggccacaaccuggccaagcacugccuccacgugguggggcccaacgucaacaagggcgaggacauccagcugcugaagagcgccuacgagaacuucaaccagcacgaggugcuccuggcgccgcugcucuccgccgggaucuucggcgccgaccccauccacagccugcgggugugcgucgacaccgugcgcaccaacguguaccuggccgucuucgacaagaaccucuacgacaagcugguguccagcuuccuggagaugaagagcgagaagcagguggagcagaagaucgccgagauccccaaggaggaggucaagcccuucaucaccgaguccaagccgagcguggagcagcggaagcaggacgacaagaagaucaaggcgugcguggaggaggucacgaccacccucgaggagaccaaguuccugacggagaaccugcuccuguacaucgacaucaacgggaaccugcaccccgacuccgccacccucgugagcgacaucgacaucaccuuccugaagaaggacgcccccuacaucgugggcgacgucgugcaggagggcgugcugaccgccgucgugauccccacgaagaaggccgggggcaccaccgagaugcucgcgaaggcccugcgcaaggugccgaccgacaacuacaucacgaccuaccccgggcagggccugaacggguacaccgucgaggaggccaagaccgugcucaagaagugcaaguccgccuucuacauccugcccagcaucaucuccaacgagaagcaggagauccugggcaccgugagcuggaaccuccgggagaugcuggcgcacgccgaggagacgcgcaagcugaugcccgucugcguggagaccaaggccaucguguccaccauccagcggaaguacaagggcaucaagauccaggagggggucguggacuacggcgcccgcuucuacuucuacaccagcaagacgaccguggccucccugaucaacacccucaacgaccugaacgagacccuggucacgaugccgcucggguacgugacccacggccugaaccuggaggaggcggcccgguacaugcgcagccucaaggugcccgccaccgucuccgugagcucccccgacgccgugaccgccuacaacggguaccugacgagcuccagcaagacccccgaggagcacuucaucgagaccaucucccuggcgggcagcuacaaggacuggagcuacuccggccagagcacccagcucgggaucgaguuccugaagcggggcgacaaguccgucuacuacacgagcaacccgaccaccuuccaccuggacggggaggugaucaccuucgacaaccucaagacgcugcugucccuccgcgaggugcggaccaucaaggucuucaccaccguggacaacaucaaccugcacacgcagguggucgacaugagcaugaccuacggccagcaguucggccccaccuaccuggacggggccgacgugaccaagaucaagccccacaacucccacgagggcaagacguucuacgugcucccgaacgacgacacccugcgcgucgaggccuucgaguacuaccacaccaccgaccccagcuuccuggggcgguacauguccgcccucaaccacacgaagaaguggaaguacccccaggugaacggccugaccagcaucaagugggccgacaacaacugcuaccuggcgaccgcccuccugacccugcagcagaucgagcucaaguucaaccccccggcccugcaggacgccuacuaccgcgcgcgggccggggaggccgccaacuucugcgcccugauccucgcguacugcaacaagacggugggcgagcugggcgacguccgcgagaccauguccuaccuguuccagcacgccaaccucgacagcugcaagcgggugcugaacgucgugugcaagaccugcgggcagcagcagaccacccugaagggcguggaggccgucauguacauggggacgcucuccuacgagcaguucaagaagggcgugcagauccccugcaccugcgggaagcaggccaccaaguaccuggugcagcaggagagccccuucgucaugauguccgcccccccggcgcaguacgagcugaagcacggcaccuucacgugcgccagcgaguacaccggcaacuaccagugcgggcacuacaagcacaucaccuccaaggagacccucuacugcaucgacggcgcccugcugacgaagagcagcgaguacaaggggcccaucaccgacguguucuacaaggagaacuccuacaccaccacgaucaagcccgugaccuacaagcucgacggcgucgugugcaccgagaucgaccccaagcuggacaacuacuacaagaaggacaacagcuacuucaccgagcagccgaucgaccuggugcccaaccagcccuaccccaacgccuccuucgacaacuucaaguucgucugcgacaacaucaaguucgccgacgaccucaaccagcugacgggguacaagaagccggcgagccgcgagcugaaggugaccuucuuccccgaccucaacggcgacguggucgccaucgacuacaagcacuacacccccuccuucaagaagggcgccaagcugcugcacaagcccaucguguggcacgugaacaacgccaccaacaaggcgacguacaagccgaacaccuggugcauccggugccucuggagcaccaagcccgucgagaccuccaacagcuucgacgugcugaaguccgaggacgcccaggggauggacaaccuggccugcgaggaccucaagcccgugagcgaggaggucguggagaaccccacgauccagaaggacgugcuggagugcaacgucaagaccaccgagguggugggcgacaucauccugaagccggccaacaacucccucaagaucaccgaggaggucgggcacacggaccugauggccgcguacguggacaacagcucccugaccaucaagaagcccaacgagcucagccgcgugcugggccugaagacccucgccacccacgggcuggccgccgucaacuccgugcccugggacacgaucgccaacuacgcgaagccguuccugaacaagguggucagcaccaccaccaacaucgugacgcgcugccucaaccgggugugcaccaacuacaugcccuacuucuucacccugcugcuccagcugugcaccuucacccgcuccacgaacagccggaucaaggccuccaugcccaccaccaucgccaagaacaccgucaagagcgugggcaaguucugccuggaggccagcuucaacuaccucaagucccccaacuucagcaagcugaucaacaucaucaucugguuccugcuccuguccgugugccugggcagccucaucuacuccacggccgcgcuggggguccugaugagcaaccucggcaugccguccuacugcaccggguaccgcgagggcuaccugaacagcaccaacgugaccaucgccacguacugcaccggcuccauccccugcagcgugugccuguccgggcucgacagccuggacaccuaccccucccuggagaccauccagaucacgaucagcuccuucaagugggaccucaccgccuucggccuggucgccgagugguuccuggccuacauccucuucacccgguucuucuacgugcuggggcuggcggccaucaugcagcucuucuucagcuacuucgccgugcacuucaucuccaacagcuggcugauguggcugaucaucaaccugguccagauggcccccaucuccgcgauggugcgcauguacaucuucuucgccagcuucuacuacguguggaagagcuacguccacgugguggacggcugcaacuccagcaccugcaugaugugcuacaagcggaaccgcgccacgcgggucgagugcaccaccaucgugaacgggguccgccgguccuucuacguguacgccaacggcggcaagggguucugcaagcuccacaacuggaacugcgugaacugcgacaccuucugcgccggcagcacguucaucuccgacgaggucgcgcgcgaccugagccugcaguucaagcggccgaucaaccccaccgaccaguccagcuacaucguggacuccgugaccgucaagaacgggagcauccaccucuacuucgacaaggccggccagaagaccuacgagcgccacucccccagccacuucgugaaccuggacaaccugcgggccaacaacacgaaggggucccuccccaucaacgugaucgucuucgacggcaagagcaagugcgaggaguccagcgccaaguccgccagcguguacuacucccagcugaugugccagccgauccugcuccuggaccaggcgcuggugagcgacgucggcgacagcgccgagguggccgugaagauguucgacgccuacgucaacaccuucuccagcaccuucaacgugcccauggagaagcucaagacccugguggccacggcggaggccgagcuggccaagaacgucucccucgacaacgugcugagcaccuucaucuccgccgcgcgccagggguucguggacagcgacgucgagaccaaggacgugguggagugccugaagcucucccaccagagcgacaucgaggucaccggcgacuccugcaacaacuacaugcugacguacaacaagguggagaacaugaccccccgggaccugggggccugcaucgacugcagcgcccgccacaucaacgcccagguggccaagucccacaacaucgcgcucaucuggaacgucaaggacuucaugagccuguccgagcagcugcggaagcagauccgcagcgccgccaagaagaacaaccuccccuucaagcugaccugcgccaccacgcgccagguggugaacgucgugaccaccaagaucgcccugaagggcgggugaggacuagucccuguucccagagcccacuuuuuuuucuuuuuuugaaauaaaauagccugucuuucagaucucaaaggcucuuuucagagccaccaaaaaaaaaaaaaaaaaaaaaaaaaaaaaaaaaaaaaaaaaaaaaaaaaaaaaaaaaaaaaaaaaaaaaaaaaaaaaaaaaaaaaaaaaaaaaaaaaaaaa

SEQ ID NO: 19982 - RNA, 6113 nt, Artificial Sequence
  SARS-CoV-2__MT632954.1__non-structural protein 3 (NSP3) mRNA gc
aggagagucccgcagucggcguccagcggcucugcuuguucgugugugugucguugcaggccuuauucaagcuuaccauggcccccaccaaggugaccuucggcgacgacacggucaucgaggugcagggguacaagagcgugaacaucaccuucgagcuggacgagcgcaucgacaagguccucaacgagaagugcuccgccuacaccguggagcugggcaccgaggugaacgaguucgcgugcgucguggccgacgccgugaucaagacgcugcagccggucagcgagcuccugaccccccuggggaucgaccucgacgagugguccauggccaccuacuaccuguucgacgagagcggcgaguucaagcuggccucccacauguacugcagcuucuacccccccgacgaggacgaggaggagggggacugcgaggaggaggaguucgagccguccacccaguacgaguacggcacggaggacgacuaccagggcaagccccucgaguucggggcgaccagcgccgcccugcagcccgaggaggagcaggaggaggacuggcuggacgacgacucccagcagaccgugggccagcaggacgggagcgaggacaaccagaccacgaccauccagaccaucguggagguccagccccagcucgagauggagcugaccccgguggugcagacgaucgaggucaacuccuucagcggcuaccugaagcucaccgacaacguguacaucaagaacgccgacaucguggaggaggcgaagaaggucaagcccaccgugguggucaacgccgccaacguguaccugaagcacgggggcggcguggccggggcccugaacaaggcgaccaacaacgccaugcaggucgaguccgacgacuacaucgccacgaacggcccccucaagguggggggcagcugcguccuguccggccacaaccuggccaagcacugccuccacgugguggggcccaacgucaacaagggcgaggacauccagcugcugaagagcgccuacgagaacuucaaccagcacgaggugcuccuggcgccgcugcucuccgccgggaucuucggcgccgaccccauccacagccugcgggugugcgucgacaccgugcgcaccaacguguaccuggccgucuucgacaagaaccucuacgacaagcugguguccagcuuccuggagaugaagagcgagaagcagguggagcagaagaucgccgagauccccaaggaggaggucaagcccuucaucaccgaguccaagccgagcguggagcagcggaagcaggacgacaagaagaucaaggcgugcguggaggaggucacgaccacccucgaggagaccaaguuccugacggagaaccugcuccuguacguggacaucaacgggaaccugcaccccgacuccgccacccucgugagcgacaucgacaucaccuuccugaagaaggacgcccccuacaucgucggcgacguggugcaggagggcguccugaccgccguggugauccccacgaagaaggccgggggcaccaccgagaugcucgcgaaggcccugcgcaaggucccgaccgacaacuacaucacgaccuaccccgggcagggccugaacggguacaccguggaggaggccaagaccgugcucaagaagugcaaguccgccuucuacauccugcccagcaucaucuccaacgagaagcaggagauccugggcaccgucagcuggaaccuccgggagaugcuggcgcacgccgaggagacgcgcaagcugaugcccgugugcguggagaccaaggccaucgucuccaccauccagcggaaguacaagggcaucaagauccaggagggggugguggacuacggcgcccgcuucuacuucuacaccagcaagacgaccgucgccucccugaucaacacccucaacgaccugaacgagacccuggugacgaugccgcucggguacgugacccacggccugaaccuggaggaggcggcccgguacaugcgcagccucaagguccccgccaccguguccgugagcucccccgacgccgucaccgccuacaacggguaccugacgagcuccagcaagacccccgaggagcacuucaucgagaccaucucccuggcgggcagcuacaaggacuggagcuacuccggccagagcacccagcucgggaucgaguuccugaagcggggcgacaaguccguguacuacacgagcaacccgaccaccuuccaccuggacggggaggugaucaccuucgacaaccucaagacgcugcugucccuccgcgagguccggaccaucaagguguucaccaccguggacaacaucaaccugcacacgcaggucguggacaugagcaugaccuacggccagcaguucggccccaccuaccuggacggggccgacgugaccaagaucaagccccacaacucccacgagggcaagacguucuacguccucccgaacgacgacacccugcgcguggaggccuucgaguacuaccacaccaccgaccccagcuuccuggggcgguacauguccgcccucaaccacacgaagaaguggaaguacccccaggugaacggccugaccagcaucaagugggccgacaacaacugcuaccuggcgaccgcccuccugacccugcagcagaucgagcucaaguucaaccccccggcccugcaggacgccuacuaccgcgcgcgggccggggaggccgccaacuucugcgcccugauccucgcguacugcaacaagacggucggcgagcugggcgacgugcgcgagaccauguccuaccuguuccagcacgccaaccucgacagcugcaagcggguccugaacguggugugcaagaccugcgggcagcagcagaccacccugaagggcgucgaggccgugauguacauggggacgcucuccuacgagcaguucaagaagggcgugcagauccccugcaccugcgggaagcaggccaccaaguaccugguccagcaggagagccccuucgugaugauguccgcccccccggcgcaguacgagcugaagcacggcaccuucacgugcgccagcgaguacaccggcaacuaccagugcgggcacuacaagcacaucaccuccaaggagacccucuacugcaucgacggcgcccugcugacgaagagcagcgaguacaaggggcccaucaccgacguguucuacaaggagaacuccuacaccaccacgaucaagcccgucaccuacaagcucgacggcguggugugcaccgagaucgaccccaagcuggacaacuacuacaagaaggacaacagcuacuucaccgagcagccgaucgaccugguccccaaccagcccuaccccaacgccuccuucgacaacuucaaguucgugugcgacaacaucaaguucgccgacgaccucaaccagcugacgggguacaagaagccggcgagccgcgagcugaaggugaccuucuuccccgaccucaacggcgacgucguggccaucgacuacaagcacuacacccccuccuucaagaagggcgccaagcugcugcacaagcccaucguguggcacgucaacaacgccaccaacaaggcgacguacaagccgaacaccuggugcauccggugccucuggagcaccaagcccguggagaccuccaacagcuucgacgugcugaaguccgaggacgcccaggggauggacaaccuggccugcgaggaccucaagcccgucagcgaggaggugguggagaaccccacgauccagaaggacguccuggagugcaacgugaagaccaccgagguggucggcgacaucauccugaagccggccaacaacucccucaagaucaccgaggagguggggcacacggaccugauggccgcguacguggacaacagcucccugaccaucaagaagcccaacgagcucagccgcguccugggccugaagacccucgccacccacgggcuggccgccgugaacuccgugcccugggacacgaucgccaacuacgcgaagccguuccugaacaaggucgugagcaccaccaccaacaucgugacgcgcugccucaaccgggucugcaccaacuacaugcccuacuucuucacccugcugcuccagcugugcaccuucacccgcuccacgaacagccggaucaaggccuccaugcccaccaccaucgccaagaacaccgugaagagcgugggcaaguucugccuggaggccagcuucaacuaccucaagucccccaacuucagcaagcugaucaacaucaucaucugguuccugcuccuguccgucugccugggcagccucaucuacuccacggccgcgcugggggugcugaugagcaaccucggcaugccguccuacugcaccggguaccgcgagggcuaccugaacagcaccaacgugaccaucgccacguacugcaccggcuccauccccugcagcgucugccuguccgggcucgacagccuggacaccuaccccucccuggagaccauccagaucacgaucagcuccuucaagugggaccucaccgccuucggccugguggccgagugguuccuggccuacauccucuucacccgguucuucuacgugcuggggcuggcggccaucaugcagcucuucuucagcuacuucgccguccacuucaucuccaacagcuggcugauguggcugaucaucaaccuggugcagauggcccccaucuccgcgauggugcgcauguacaucuucuucgccagcuucuacuacgucuggaagagcuacgugcacguggucgacggcugcaacuccagcaccugcaugaugugcuacaagcggaaccgcgccacgcggguggagugcaccaccaucgucaacggggugcgccgguccuucuacguguacgccaacggcggcaagggguucugcaagcuccacaacuggaacugcgucaacugcgacaccuucugcgccggcagcacguucaucuccgacgagguggcgcgcgaccugagccugcaguucaagcggccgaucaaccccaccgaccaguccagcuacaucguggacuccgucaccgugaagaacgggagcauccaccucuacuucgacaaggccggccagaagaccuacgagcgccacucccugagccacuucgugaaccuggacaaccuccgggccaacaacacgaaggggucccugcccaucaacgucaucguguucgacggcaagagcaagugcgaggaguccagcgccaaguccgccagcguguacuacucccagcugaugugccagcccauccuccugcuggaccaggcgcucgucagcgacgugggcgacagcgccgagguggccgucaagauguucgacgccuacgugaacaccuucuccagcaccuucaacgugccgauggagaagcugaagacccuggucgccacggcggaggccgagcucgccaagaacgugucccuggacaacgugcugagcaccuucaucuccgccgcgcgccagggguucgucgacagcgacguggagaccaaggacguggucgagugccucaagcugucccaccagagcgacaucgaggugaccggcgacuccugcaacaacuacaugcugacguacaacaagguggagaacaugaccccccgggaccucggggccugcaucgacugcagcgcccgccacaucaacgcccaggucgccaagucccacaacaucgcgcugaucuggaacgugaaggacuucaugagccuguccgagcagcuccggaagcagauccgcagcgccgccaagaagaacaaccugcccuucaagcugaccugcgccaccacgcgccagguggucaacguggugaccaccaagaucgcccucaagggcgggugaggacuagucccuguucccagagcccacuuuuuuuucuuuuuuugaaauaaaauagccugucuuucagaucucaaaggcucuuuucagagccaccaaaaaaaaaaaaaaaaaaaaaaaaaaaaaaaaaaaaaaaaaaaaaaaaaaaaaaaaaaaaaaaaaaaaaaaaaaaaaaaaaaaaaaaaaaaaaaaaaaaaa

SEQ ID NO: 19983 - RNA, 6113 nt, Artificial Sequence
  SARS-CoV-2__MT614457.1__non-structural protein 3 (NSP3) mRNA gc
aggagagucccgcagucggcguccagcggcucugcuuguucgugugugugucguugcaggccuuauucaagcuuaccauggcccccaccaaggugaccuucggcgacgacacggucaucgaggugcagggguacaagagcgugaacaucaccuucgagcuggacgagcgcaucgacaagguccucaacgagaagugcuccgccuacaccguggagcugggcaccgaggugaacgaguucgcgugcgucguggccgacgccgugaucaagacgcugcagccggucagcgagcuccugaccccccuggggaucgaccucgacgagugguccauggccaccuacuaccuguucgacgagagcggcgaguucaagcuggccucccacauguacugcagcuucuacccccccgacgaggacgaggaggagggggacugcgaggaggaggaguucgagccguccacccaguacgaguacggcacggaggacgacuaccagggcaagccccucgaguucggggcgaccagcgccgcccugcagcccgaggaggagcaggaggaggacuggcuggacgacgacucccagcagaccgugggccagcaggacgggagcgaggacaaccagaccacgaccauccagaccaucguggagguccagccccagcucgagauggagcugaccccgguggugcagacgaucgaggucaacuccuucagcggcuaccugaagcucaccgacaacguguacaucaagaacgccgacaucguggaggaggcgaagaaggucaagcccaccgugguggucaacgccgccaacguguaccugaagcacgggggcggcguggccggggcccugaacaaggcgaccaacaacgccaugcaggucgaguccgacgacuacaucgccacgaacggcccccucaagguggggggcagcugcguccuguccggccacaaccuggccaagcacugccuccacgugguggggcccaacgucgacaagggcgaggacauccagcugcugaagagcgccuacgagaacuucaaccagcacgaggugcuccuggcgccgcugcucuccgccgggaucuucggcgccgaccccauccacagccugcgggugugcgucgacaccgugcgcaccaacguguaccuggccgucuucgacaagaaccucuacgacaagcugguguccagcuuccuggagaugaagagcgagaagcagguggagcagaagaucgccgagauccccaaggaggaggucaagcccuucaucaccgaguccaagccgagcguggagcagcggaagcaggacgacaagaagaucaaggcgugcguggaggaggucacgaccacccucgaggagaccaaguuccugacggagaaccugcuccuguacaucgacaucaacgggaaccugcaccccgacuccgccacccucgugagcgacaucgacaucaccuuccugaagaaggacgcccccuacaucgugggcgacgucgugcaggagggcgugcugaccgccgucgugauccccacgaagaaggccgggggcaccaccgagaugcucgcgaaggcccugcgcaaggugccgaccgacaacuacaucacgaccuaccccgggcagggccugaacggguacaccgucgaggaggccaagaccgugcucaagaagugcaaguccgccuucuacauccugcccagcaucaucuccaacgagaagcaggagauccugggcaccgugagcuggaaccuccgggagaugcuggcgcacgccgaggagacgcgcaagcugaugcccgucugcguggagaccaaggccaucguguccaccauccagcggaaguacaagggcaucaagauccaggagggggucguggacuacggcgcccgcuucuacuucuacaccagcaagacgaccguggccucccugaucaacacccucaacgaccugaacgagacccuggucacgaugccgcucggguacgugacccacggccugaaccuggaggaggcggcccgguacaugcgcagccucaaggugcccgccaccgucuccgugagcucccccgacgccgugaccgccuacaacggguaccugacgagcuccagcaagacccccgaggagcacuucaucgagaccaucucccuggcgggcagcuacaaggacuggagcuacuccggccagagcacccagcucgggaucgaguuccugaagcggggcgacaaguccgucuacuacacgagcaacccgaccaccuuccaccuggacggggaggugaucaccuucgacaaccucaagacgcugcugucccuccgcgaggugcggaccaucaaggucuucaccaccguggacaacaucaaccugcacacgcagguggucgacaugagcaugaccuacggccagcaguucggccccaccuaccuggacggggccgacgugaccaagaucaagccccacaacucccacgagggcaagacguucuacgugcucccgaacgacgacacccugcgcgucgaggccuucgaguacuaccacaccaccgaccccagcuuccuggggcgguacauguccgcccucaaccacacgaagaaguggaaguacccccaggugaacggccugaccagcaucaagugggccgacaacaacugcuaccuggcgaccgcccuccugacccugcagcagaucgagcucaaguucaaccccccggcccugcaggacgccuacuaccgcgcgcgggccggggaggccgccaacuucugcgcccugauccucgcguacugcaacaagacggugggcgagcugggcgacguccgcgagaccauguccuaccuguuccagcacgccaaccucgacagcugcaagcgggugcugaacgucgugugcaagaccugcgggcagcagcagaccacccugaagggcguggaggccgucauguacauggggacgcucuccuacgagcaguucaagaagggcgugcagauccccugcaccugcgggaagcaggccaccaaguaccuggugcagcaggagagccccuucgucaugauguccgcccccccggcgcaguacgagcugaagcacggcaccuucacgugcgccagcgaguacaccggcaacuaccagugcgggcacuacaagcacaucaccuccaaggagacccucuacugcaucgacggcgcccugcugacgaagagcagcgaguacaaggggcccaucaccgacguguucuacaaggagaacuccuacaccaccacgaucaagcccgugaccuacaagcucgacggcgucgugugcaccgagaucgaccccaagcuggacaacuacuacaagaaggacaacagcuacuucaccgagcagccgaucgaccuggugcccaaccagcccuaccccaacgccuccuucgacaacuucaaguucgucugcgacaacaucaaguucgccgacgaccucaaccagcugacgggguacaagaagccggcgagccgcgagcugaaggugaccuucuuccccgaccucaacggcgacguggucgccaucgacuacaagcacuacacccccuccuucaagaagggcgccaagcugcugcacaagcccaucguguggcacgugaacaacgccaccaacaaggcgacguacaagccgaacaccuggugcauccggugccucuggagcaccaagcccgucgagaccuccaacagcuucgacgugcugaaguccgaggacgcccaggggauggacaaccuggccugcgaggaccucaagcccgugagcgaggaggucguggagaaccccacgauccagaaggacgugcuggagugcaacgucaagaccaccgagguggugggcgacaucauccugaagccggccaacaacucccucaagaucaccgaggaggucgggcacacggaccugauggccgcguacguggacaacagcucccugaccaucaagaagcccaacgagcucagccgcgugcugggccugaagacccucgccacccacgggcuggccgccgucaacuccgugcccugggacacgaucgccaacuacgcgaagccguuccugaacaagguggucagcaccaccaccaacaucgugacgcgcugccucaaccgggugugcaccaacuacaugcccuacuucuucacccugcugcuccagcugugcaccuucacccgcuccacgaacagccggaucaaggccuccaugcccaccaccaucgccaagaacaccgucaagagcgugggcaaguucugccuggaggccagcuucaacuaccucaagucccccaacuucagcaagcugaucaacaucaucaucugguuccugcuccuguccgugugccugggcagccucaucuacuccacggccgcgcuggggguccugaugagcaaccucggcaugccguccuacugcaccggguaccgcgagggcuaccugaacagcaccaacgugaccaucgccacguacugcaccggcuccauccccugcagcgugugccuguccgggcucgacagccuggacaccuaccccucccuggagaccauccagaucacgaucagcuccuucaagugggaccucaccgccuucggccuggucgccgagugguuccuggccuacauccucuucacccgguucuucuacgugcuggggcuggcggccaucaugcagcucuucuucagcuacuucgccgugcacuucaucuccaacagcuggcugauguggcugaucaucaaccugguccagauggcccccaucuccgcgauggugcgcauguacaucuucuucgccagcuucuacuacguguggaagagcuacguccacgugguggacggcugcaacuccagcaccugcaugaugugcuacaagcggaaccgcgccacgcgggucgagugcaccaccaucgugaacgggguccgccgguccuucuacguguacgccaacggcggcaagggguucugcaagcuccacaacuggaacugcgugaacugcgacaccuucugcgccggcagcacguucaucuccgacgaggucgcgcgcgaccugagccugcaguucaagcggccgaucaaccccaccgaccaguccagcuacaucguggacuccgugaccgucaagaacgggagcauccaccucuacuucgacaaggccggccagaagaccuacgagcgccacucccugagccacuucgugaaccuggacaaccuccgggccaacaacacgaaggggucccugcccaucaacgugaucgucuucgacggcaagagcaagugcgaggaguccagcgccaaguccgccagcguguacuacucccagcugaugugccagcccauccuccugcuggaccaggcgcucgugagcgacgucggcgacagcgccgagguggccgugaagauguucgacgccuacgucaacaccuucuccagcaccuucaacgugccgauggagaagcugaagacccugguggccacggcggaggccgagcucgccaagaacgucucccuggacaacgugcugagcaccuucaucuccgccgcgcgccagggguucguggacagcgacgucgagaccaaggacgugguggagugccucaagcugucccaccagagcgacaucgaggucaccggcgacuccugcaacaacuacaugcugacguacaacaagguggagaacaugaccccccgggaccucggggccugcaucgacugcagcgcccgccacaucaacgcccagguggccaagucccacaacaucgcgcugaucuggaacgucaaggacuucaugagccuguccgagcagcuccggaagcagauccgcagcgccgccaagaagaacaaccugcccuucaagcugaccugcgccaccacgcgccagguggugaacgucgugaccaccaagaucgcccucaagggcgggugaggacuagucccuguucccagagcccacuuuuuuuucuuuuuuugaaauaaaauagccugucuuucagaucucaaaggcucuuuucagagccaccaaaaaaaaaaaaaaaaaaaaaaaaaaaaaaaaaaaaaaaaaaaaaaaaaaaaaaaaaaaaaaaaaaaaaaaaaaaaaaaaaaaaaaaaaaaaaaaaaaaaa

SEQ ID NO: 19984 - RNA, 6113 nt, Artificial Sequence
  SARS-CoV-2__MT614462.1__non-structural protein 3 (NSP3) mRNA gc
aggagagucccgcagucggcguccagcggcucugcuuguucgugugugugucguugcaggccuuauucaagcuuaccauggcccccaccaaggugaccuucggcgacgacacggucaucgaggugcagggguacaagagcgugaacaucaccuucgagcuggacgagcgcaucgacaagguccucaacgagaagugcuccgccuacaccguggagcugggcaccgaggugaacgaguucgcgugcgucguggccgacgccgugaucaagacgcugcagccggucagcgagcuccugaccccccuggggaucgaccucgacgagugguccauggccaccuacuaccuguucgacgagagcggcgaguucaagcuggccucccacauguacugcagcuucuacccccccgacgaggacgaggaggagggggacugcgaggaggaggaguucgagccguccacccaguacgaguacggcacggaggacgacuaccagggcaagccccucgaguucggggcgaccagcgccgcccugcagcccgaggaggagcaggaggaggacuggcuggacgacgacucccagcagaccgugggccagcaggacgggagcgaggacaaccagaccacgaccauccagaccaucguggagguccagccccagcucgagauggagcugaccccgguggugcagacgaucgaggucaacuccuucagcggcuaccugaagcucaccgacaacguguacaucaagaacgccgacaucguggaggaggcgaagaaggucaagcccaccgugguggucaacgccgccaacguguaccugaagcacgggggcggcguggccggggcccugaacaaggcgaccaacaacgccaugcaggucgaguccgacgacuacaucgccacgaacggcccccucaagguggggggcagcugcguccuguccggccacaaccuggccaagcacugccuccacgugguggggcccaacgucaacaagggcgaggacauccagcugcugaagagcgccuacgagaacuucaaccagcacgaggugcuccuggcgccgcugcucuccgccgggaucuucggcgccgaccccauccacagccugcgggugugcgucgacaccgugcgcaccaacguguaccuggccgucuucgacaagaaccucuacgacaagcugguguccagcuuccuggagaugaagagcgagaagcagguggagcagaagaucgccgagauccccaaggaggaggucaagcccuucaucaccgaguccaagccgagcguggagcagcggaagcaggacgacaagaagaucaaggcgugcguggaggaggucacgaccacccucgaggagaccaaguuccugacggagaaccugcuccuguacaucgacaucaacgggaaccugcaccccgacuccgccacccucgugagcgacaucgacaucaccuuccugaagaaggacgcccccuacaucgugggcgacgucgugcaggagggcgugcugaccgccgucgugauccccacgaagaaggccgggggcaccaccgagaugcucgcgaaggcccugcgcaaggugccgaccgacaacuacaucacgaccuaccccgggcagggccugaacggguacaccgucgaggaggccaagaccgugcucaagaagugcaaguccgccuucuacauccugcccagcaucaucuccaacgagaagcaggagauccugggcaccgugagcuggaaccuccgggagaugcuggcgcacgccgaggagacgcgcaagcugaugcccgucugcguggagaccaaggccaucguguccaccauccagcggaaguacaagggcaucaagauccaggagggggucguggacuacggcgcccgcuucuacuucuacaccagcaagacgaccguggccucccugaucaacacccucaacgaccugaacgagacccuggucacgaugccgcucggguacgugacccacggccugaaccuggaggaggcggcccgguacaugcgcagccucaaggugcccgccaccgucuccgugagcucccccgacgccgugaccgccuacaacggguaccugacgagcuccagcaagacccccgaggagcacuucaucgagaccaucucccuggcgggcagcuacaaggacuggagcuacuccggccagagcacccagcucgggaucgaguuccugaagcggggcgacaaguccgucuacuacacgagcaacccgaccaccuuccaccuggacggggaggugaucaccuucgacaaccucaagacgcugcugucccuccgcgaggugcggaccaucaaggucuucaccaccguggacaacaucaaccugcacacgcagguggucgacaugagcaugaccuacggccagcaguucggccccaccuaccuggacggggccgacgugaccaagaucaagccccacaacucccacgagggcaagacguucuacgugcucccgaacgacgacacccugcgcgucgaggccuucgaguacuaccacaccaccgaccccagcuuccuggggcgguacauguccgcccucaaccacacgaagaaguggaaguacccccaggugaacggccugaccagcaucaagugggccgacaacaacugcuaccuggcgaccgcccuccugacccugcagcagaucgagcucaaguucaaccccccggcccugcaggacgccuacuaccgcgcgcgggccggggaggccgccaacuucugcgcccugauccucgcguacugcaacaagacggugggcgagcugggcgacguccgcgagaccauguccuaccuguuccagcacgccaaccucgacagcugcaagcgggugcugaacgucgugugcaagaccugcgggcagcagcagaccacccugaagggcguggaggccgucauguacauggggacgcucuccuacgagcaguucaagaagggcgugcagauccccugcaccugcgggaagcaggccaccaaguaccuggugcagcaggagagccccuucgucaugauguccgcccccccggcgcaguacgagcugaagcacggcaccuucacgugcgccagcgaguacaccggcaacuaccagugcgggcacuacaagcacaucaccuccaaggagacccucuacugcaucgacggcgcccugcugacgaagagcagcgaguacaaggggcccaucaccgacguguucuacaaggagaacuccuacaccaccacgaucaagcccgugaccuacaagcucgacggcgucgugugcaccgagaucgaccccaagcuggacaacuacuacaagaaggacaacagcuacuucaccgagcagccgaucgaccuggugcccaaccagcccuaccccaacgccuccuucgacaacuucaaguucgucugcgacaacaucaaguucgccgacgaccucaaccagcugacgggguacaagaagccggcgagccgcgagcugaaggugaccuucuuccccgaccucaacggcgacguggucgccaucgacuacaagcacuacacccccuccuucaagaagggcgccaagcugcugcacaagcccaucguguggcacgugaacaacgccaccaacaaggcgacguacaagccgaacaccuggugcauccggugccucuggagcaagaagcccgucgagaccuccaacagcuucgacgugcugaaguccgaggacgcccaggggauggacaaccuggccugcgaggaccucaagcccgugagcgaggaggucguggagaaccccaccauccagaaggacgugcuggagugcaacgucaagacgaccgagguggugggcgacaucauccugaagccggccaacaacucccucaagaucaccgaggaggucgggcacaccgaccugauggccgcguacguggacaacagcucccugacgaucaagaagcccaacgagcucagccgcgugcugggccugaagacccucgccacccacgggcuggccgccgucaacuccgugcccugggacaccaucgccaacuacgcgaagccguuccugaacaagguggucagcacgaccaccaacaucgugacccgcugccucaaccgggugugcacgaacuacaugcccuacuucuucacccugcugcuccagcugugcaccuucacccgcuccaccaacagccggaucaaggccuccaugcccacgaccaucgccaagaacaccgucaagagcgugggcaaguucugccuggaggccagcuucaacuaccucaagucccccaacuucagcaagcugaucaacaucaucaucugguuccugcuccuguccgugugccugggcagccucaucuacuccaccgccgcgcuggggguccugaugagcaaccucggcaugccguccuacugcacgggguaccgcgagggcuaccugaacagcaccaacgugaccaucgccaccuacugcacgggcuccauccccugcagcgugugccuguccgggcucgacagccuggacaccuaccccucccuggagaccauccagaucaccaucagcuccuucaagugggaccucacggccuucggccuggucgccgagugguuccuggccuacauccucuucacccgguucuucuacgugcuggggcuggcggccaucaugcagcucuucuucagcuacuucgccgugcacuucaucuccaacagcuggcugauguggcugaucaucaaccugguccagauggcccccaucuccgcgauggugcgcauguacaucuucuucgccagcuucuacuacguguggaagagcuacguccacgugguggacggcugcaacuccagcaccugcaugaugugcuacaagcggaaccgcgccacccgggucgagugcacgaccaucgugaacgggguccgccgguccuucuacguguacgccaacggcggcaagggguucugcaagcuccacaacuggaacugcgugaacugcgacaccuucugcgccggcagcaccuucaucuccgacgaggucgcgcgcgaccugagccugcaguucaagcggccgaucaaccccacggaccaguccagcuacaucguggacuccgugaccgucaagaacgggagcauccaccucuacuucgacaaggccggccagaagaccuacgagcgccacucccugagccacuucgugaaccuggacaaccuccgggccaacaacaccaaggggucccugcccaucaacgugaucgucuucgacggcaagagcaagugcgaggaguccagcgccaaguccgccagcguguacuacucccagcugaugugccagcccauccuccugcuggaccaggcgcucgugagcgacgucggcgacagcgccgagguggccgugaagauguucgacgccuacgucaacacguucuccagcaccuucaacgugccgauggagaagcugaagacccugguggccaccgcggaggccgagcucgccaagaacgucuuccuggacaacgugcuguccacguucaucagcgccgcgcgccagggguucguggacuccgacgucgagaccaaggacgugguggagugccucaagcugagccaccaguccgacaucgaggucaccggcgacagcugcaacaacuacaugcugaccuacaacaagguggagaacaugacgccccgggaccucggggccugcaucgacugcuccgcccgccacaucaacgcccagguggccaagagccacaacaucgcgcugaucuggaacgucaaggacuucaugucccugagcgagcagcuccggaagcagauccgcuccgccgccaagaagaacaaccugcccuucaagcugaccugcgccaccacccgccagguggugaacgucgugacgaccaagaucgcccucaagggcgggugaggacuagucccuguucccagagcccacuuuuuuuucuuuuuuugaaauaaaauagccugucuuucagaucucaaaggcucuuuucagagccaccaaaaaaaaaaaaaaaaaaaaaaaaaaaaaaaaaaaaaaaaaaaaaaaaaaaaaaaaaaaaaaaaaaaaaaaaaaaaaaaaaaaaaaaaaaaaaaaaaaaaa

SEQ ID NO: 19985 - RNA, 6113 nt, Artificial Sequence
  SARS-CoV-2__MT614466.1__non-structural protein 3 (NSP3) mRNA gc
aggagagucccgcagucggcguccagcggcucugcuuguucgugugugugucguugcaggccuuauucaagcuuaccauggcccccaccaaggugaccuucggcgacgacacggucaucgaggugcagggguacaagagcgugaacaucaccuucgagcuggacgagcgcaucgacaagguccucaacgagaagugcuccgccuacaccguggagcugggcaccgaggugaacgaguucgcgugcgucguggccgacgccgugaucaagacgcugcagccggucagcgagcuccugaccccccuggggaucgaccucgacgagugguccauggccaccuacuaccuguucgacgagagcggcgaguucaagcuggccucccacauguacugcagcuucuacccccccgacgaggacgaggaggagggggacugcgaggaggaggaguucgagccguccacccaguacgaguacggcacggaggacgacuaccagggcaagccccucgaguucggggcgaccagcgccgcccugcagcccgaggaggagcaggaggaggacuggcuggacgacgacucccagcagaccgugggccagcaggacgggagcgaggacaaccagaccacgaccauccagaccaucguggagguccagccccagcucgagauggagcugaccccgguggugcagacgaucgaggucaacuccuucagcggcuaccugaagcucaccgacaacguguacaucaagaacgccgacaucguggaggaggcgaagaaggucaagcccaccgugguggucaacgccgccaacguguaccugaagcacgggggcggcguggccggggcccugaacaaggcgaccaacaacgccaugcaggucgaguccgacgacuacaucgccacgaacggcccccucaagguggggggcagcugcguccuguccggccacaaccuggccaagcacugccuccacgugguggggcccaacgucaacaagggcgaggacauccagcugcugaagagcgccuacgagaacuucaaccagcacgaggugcuccuggcgccgcugcucuccgccgggaucuucggcgccgaccccauccacagccugcgggugugcgucgacaccgugcgcaccaacguguaccuggccgucuucgacaagaaccucuacgacaagcugguguccagcuuccuggagaugaagagcgagaagcagguggagcagaagaucgccgagauccccaaggaggaggucaagcccuucaucaccgaguccaagccgagcguggagcagcggaagcaggacgacaagaagaucaaggcgugcguggaggaggucacgaccacccucgaggagaccaaguuccugacggagaaccugcuccuguacaucgacaucaacgggaaccugcaccccgacuccgccacccucgugagcgacaucgacaucaccuuccugaagaaggacgcccccuacaucgugggcgacgucgugcaggagggcgugcugaccgccgucgugauccccacgaagaaggccgggggcaccaccgagaugcucgcgaaggcccugcgcaaggugccgaccgacaacuacaucacgaccuaccccgggcagggccugaacggguacaccgucgaggaggccaagaccgugcucaagaagugcaaguccgccuucuacauccugcccagcaucaucuccaacgagaagcaggagauccugggcaccgugagcuggaaccuccgggagaugcuggcgcacgccgaggagacgcgcaagcugaugcccgucugcguggagaccaaggccaucguguccaccauccagcggaaguacaagggcaucaagauccaggagggggucguggacuacggcgcccgcuucuacuucuacaccagcaagacgaccguggccucccugaucaacacccucaacgaccugaacgagacccuggucacgaugccgcucggguacgugacccacggccugaaccuggaggaggcggcccgguacaugcgcagccucaaggugcccgccaccgucuccgugagcucccccgacgccgugaccgccuacaacggguaccugacgagcuccagcaagacccccgaggagcacuucaucgagaccaucucccuggcgggcagcuacaaggacuggagcuacuccggccagagcacccagcucgggaucgaguuccugaagcggggcgacaaguccgucuacuacacgagcaacccgaccaccuuccaccuggacggggaggugaucaccuucgacaaccucaagacgcugcugucccuccgcgaggugcggaccaucaaggucuucaccaccguggacaacaucaaccugcacacgcagguggucgacaugagcaugaccuacggccagcaguucggccccaccuaccuggacggggccgacgugaccaagaucaagccccacaacucccacgagggcaagacguucuacgugcucccgaacgacgacacccugcgcgucgaggccuucgaguacuaccacaccaccgaccccagcuuccuggggcgguacauguccgcccucaaccacacgaagaaguggaaguacccccaggugaacggccugaccagcaucaagugggccgacaacaacugcuaccuggcgaccgcccuccugacccugcagcagaucgagcucaaguucaaccccccggcccugcaggacgccuacuaccgcgcgcgggccggggaggccgccaacuucugcgcccugauccucgcguacugcaacaagacggugggcgagcugggcgacguccgcgagaccauguccuaccuguuccagcacgccaaccucgacagcugcaagcgggugcugaacgucgugugcaagaccugcgggcagcagcagaccacccugaagggcguggaggccgucauguacauggggacgcucuccuacgagcaguucaagaagggcgugcagauccccugcaccugcgggaagcaggccaccaaguaccuggugcagcaggagagccccuucgucaugauguccgcccccccggcgcaguacgagcugaagcacggcaccuucacgugcgccagcgaguacaccggcaacuaccagugcgggcacuacaagcacaucaccuccaaggagacccucuacugcaucgacggcgcccugcugacgaagagcagcgaguacaaggggcccaucaccgacguguucuacaaggagaacuccuacaccaccacgaucaagcccgugaccuacaagcucgacggcgucgugugcaccgagaucgaccccaagcuggacaacuacuacaagaaggacaacagcuacuucaccgagcagccgaucgaccuggugcccaaccagcccuaccccaacgccuccuucgacaacuucaaguucgucugcgacaacaucaaguucgccgacgaccucaaccagcugacgggguacaagaagccggcgagccgcgagcugaaggugaccuucuuccccgaccucaacggcgacguggucgccaucgacuacaagcacuacacccccuccuucaagaagggcgccaagcugcugcacaagcccaucguguggcacgugaacaacgccaccaacaaggcgacguacaagccgaacaccuggugcauccggugccucuggagcaccaagcccgucgagaccuccaacagcuucgacgugcugaaguccgaggacgcccaggggauggacaaccuggccugcgaggaccucaagcccgugagcgaggaggucguggagaaccccacgauccagaaggacgugcuggagugcaacgucaagaccaccgagguggugggcgacaucauccugaagccggccaacaacucccucaagaucaccgaggaggucgggcacacggaccugauggccgcguacguggacaacagcucccugaccaucaagaagcccaacgagcucagccgcgugcugggccugaagacccucgccacccacgggcuggccgccgucaacuccgugcccugggacacgaucgccaacuacgcgaagccguuccugaacaagguggucagcaccaccaccaacaucgugacgcgcugccucaaccgggugugcaccaacuacaugcccuacuucuucacccugcugcuccagcugugcaccuucacccgcuccacgaacagccggaucaaggccuccaugcccaccaccaucgccaagaacaccgucaagagcgugggcaaguucugccuggaggccagcuucaacuaccucaagucccccaacuucagcaagcugaucaacgugaucaucugguuccugcuccuguccgucugccugggcagccucaucuacuccacggccgcgcugggggugcugaugagcaaccucggcaugccguccuacugcaccggguaccgcgagggcuaccugaacagcaccaacgugaccaucgccacguacugcaccggcuccauccccugcagcgucugccuguccgggcucgacagccuggacaccuaccccucccuggagaccauccagaucacgaucagcuccuucaagugggaccucaccgccuucggccugguggccgagugguuccuggccuacauccucuucacccgguucuucuacgugcuggggcuggcggccaucaugcagcucuucuucagcuacuucgccguccacuucaucuccaacagcuggcugauguggcugaucaucaaccuggugcagauggcccccaucuccgcgauggugcgcauguacaucuucuucgccagcuucuacuacgucuggaagagcuacgugcacguggucgacggcugcaacuccagcaccugcaugaugugcuacaagcggaaccgcgccacgcggguggagugcaccaccaucgucaacggggugcgccgguccuucuacguguacgccaacggcggcaagggguucugcaagcuccacaacuggaacugcgucaacugcgacaccuucugcgccggcagcacguucaucuccgacgagguggcgcgcgaccugagccugcaguucaagcggccgaucaaccccaccgaccaguccagcuacaucguggacuccgucaccgugaagaacgggagcauccaccucuacuucgacaaggccggccagaagaccuacgagcgccacucccugagccacuucgugaaccuggacaaccuccgggccaacaacacgaaggggucccugcccaucaacgucaucguguucgacggcaagagcaagugcgaggaguccagcgccaaguccgccagcguguacuacucccagcugaugugccagcccauccuccugcuggaccaggcgcucgucagcgacgugggcgacagcgccgagguggccgucaagauguucgacgccuacgugaacaccuucuccagcaccuucaacgugccgauggagaagcugaagacccuggucgccacggcggaggccgagcucgccaagaacgugucccuggacaacgugcugagcaccuucaucuccgccgcgcgccagggguucgucgacagcgacguggagaccaaggacguggucgagugccucaagcugucccaccagagcgacaucgaggugaccggcgacuccugcaacaacuacaugcugacguacaacaagguggagaacaugaccccccgggaccucggggccugcaucgacugcagcgcccgccacaucaacgcccaggucgccaagucccacaacaucgcgcugaucuggaacgugaaggacuucaugagccuguccgagcagcuccggaagcagauccgcagcgccgccaagaagaacaaccugcccuucaagcugaccugcgccaccacgcgccagguggucaacguggugaccaccaagaucgcccucaagggcgggugaggacuagucccuguucccagagcccacuuuuuuuucuuuuuuugaaauaaaauagccugucuuucagaucucaaaggcucuuuucagagccaccaaaaaaaaaaaaaaaaaaaaaaaaaaaaaaaaaaaaaaaaaaaaaaaaaaaaaaaaaaaaaaaaaaaaaaaaaaaaaaaaaaaaaaaaaaaaaaaaaaaaa

SEQ ID NO: 19986 - RNA, 6113 nt, Artificial Sequence
  SARS-CoV-2__MT614546.1__non-structural protein 3 (NSP3) mRNA gc
aggagagucccgcagucggcguccagcggcucugcuuguucgugugugugucguugcaggccuuauucaagcuuaccauggcccccaccaaggugaccuucggcgacgacacggucaucgaggugcagggguacaagagcgugaacaucaccuucgagcuggacgagcgcaucgacaagguccucaacgagaagugcuccgccuacaccguggagcugggcaccgaggugaacgaguucgcgugcgucguggccgacgccgugaucaagacgcugcagccggucagcgagcuccugaccccccuggggaucgaccucgacgagugguccauggccaccuacuaccuguucgacgagagcggcgaguucaagcuggccucccacauguacugcagcuucuacccccccgacgaggacgaggaggagggggacugcgaggaggaggaguucgagccguccacccaguacgaguacggcacggaggacgacuaccagggcaagccccucgaguucggggcgaccagcgccgcccugcagcccgaggaggagcaggaggaggacuggcuggacgacgacucccagcagaccgugggccagcaggacgggagcgaggacaaccagaccacgaccauccagaccaucguggagguccagccccagcucgagauggagcugaccccgguggugcagacgaucgaggucaacuccuucagcggcuaccugaagcucaccgacaacguguacaucaagaacgccgacaucguggaggaggcgaagaaggucaagcccaccgugguggucaacgccgccaacguguaccugaagcacgggggcggcguggccggggcccugaacaaggcgaccaacaacgccaugcaggucgaguccgacgacuacaucgccacgaacggcccccucaagguggggggcagcugcguccuguccggccacaaccuggccaagcacugccuccacgugguggggcccaacgucaacaagggcgaggacauccagcugcugaagagcgccuacgagaacuucaaccagcacgaggugcuccuggcgccgcugcucuccgccgggaucuucggcgccgaccccauccacagccugcgggugugcgucgacaccgugcgcaccaacguguaccuggccgucuucgacaagaaccucuacgacaagcugguguccagcuuccuggagaugaagagcgagaagcagguggagcagaagaucgccgagauccccaaggaggaggucaagcccuucaucaccgaguccaagccgagcguggagcagcggaagcaggacgacaagaagaucaaggcgugcguggaggaggucacgaccacccucgaggagaccaaguuccugacggagaaccugcuccuguacaucgacaucaacgggaaccugcaccccgacuccgccacccucgugagcgacaucgacaucaccuuccugaagaaggacgcccccuacaucgugggcgacgucgugcaggagggcgugcugaccgccgucgugauccccacgaagaaggccgggggcaccaccgagaugcucgcgaaggcccugcgcaaggugccgaccgacaacuacaucacgaccuaccccgggcagggccugaacggguacaccgucgaggaggccaagaccgugcucaagaagugcaaguccgccuucuacauccugcccagcaucaucuccaacgagaagcaggagauccugggcaccgugagcuggaaccuccgggagaugcuggcgcacgccgaggagacgcgcaagcugaugcccgucugcguggagaccaaggccaucguguccaccauccagcggaaguacaagggcaucaagauccaggagggggucguggacuacggcgcccgcuucuacuucuacaccagcaagacgaccguggccucccugaucaacacccucaacgaccugaacgagacccuggucacgaugccgcucggguacgugacccacggccugaaccuggaggaggcggcccgguacaugcgcagccucaaggugcccgccaccgucuccgugagcucccccgacgccgugaccgccuacaacggguaccugacgagcuccagcaagacccccgaggagcacuucaucgagaccaucucccuggcgggcagcuacaaggacuggagcuacuccggccagagcacccagcucgggaucgaguuccugaagcggggcgacaaguccgucuacuacacgagcaacccgaccaccuuccaccuggacggggaggugaucaccuucgacaaccucaagacgcugcugucccuccgcgaggugcggaccaucaaggucuucaccaccguggacaacaucaaccugcacacgcagguggucgacaugagcaugaccuacggccagcaguucggccccaccuaccuggacggggccgacgugaccaagaucaagccccacaacucccacgagggcaagacguucuacgugcucccgaacgacgacacccugcuggucgaggccuucgaguacuaccacaccaccgaccccagcuuccucgggcgcuacauguccgcccugaaccacacgaagaaguggaaguacccccaggugaacggccugaccagcaucaagugggccgacaacaacugcuaccucgcgaccgcccugcugacccuccagcagaucgagcugaaguucaaccccccggcccugcaggacgccuacuaccgggcgcgcgccggggaggccgccaacuucugcgcccucauccuggcguacugcaacaagacggugggcgagcugggcgacguccgggagaccauguccuaccucuuccagcacgccaaccuggacagcugcaagcgcgugcugaacgucgugugcaagaccugcgggcagcagcagaccacccucaagggcguggaggccgucauguacauggggacgcuguccuacgagcaguucaagaagggcgugcagauccccugcaccugcgggaagcaggccaccaaguaccuggugcagcaggagagccccuucgucaugauguccgcccccccggcgcaguacgagcucaagcacggcaccuucacgugcgccagcgaguacaccggcaacuaccagugcgggcacuacaagcacaucaccuccaaggagacccuguacugcaucgacggcgcccugcucacgaagagcagcgaguacaaggggcccaucaccgacguguucuacaaggagaacuccuacaccaccacgaucaagcccgugaccuacaagcuggacggcgucgugugcaccgagaucgaccccaagcuggacaacuacuacaagaaggacaacagcuacuucaccgagcagccgaucgaccucgugcccaaccagcccuaccccaacgccuccuucgacaacuucaaguucgucugcgacaacaucaaguucgccgacgaccugaaccagcugacgggguacaagaagccggcgagccgggagcucaaggugaccuucuuccccgaccugaacggcgacguggucgccaucgacuacaagcacuacacccccuccuucaagaagggcgccaagcugcuccacaagcccaucguguggcacgugaacaacgccaccaacaaggcgacguacaagccgaacaccuggugcauccgcugccuguggagcaccaagcccgucgagaccuccaacagcuucgacgugcugaaguccgaggacgcccaggggauggacaaccucgccugcgaggaccugaagcccgugagcgaggaggucguggagaaccccacgauccagaaggacgugcuggagugcaacgucaagaccaccgagguggugggcgacaucauccucaagccggccaacaacucccugaagaucaccgaggaggucgggcacacggaccugauggccgcguacguggacaacagcucccucaccaucaagaagcccaacgagcugagccgggugcugggccucaagacccuggccacccacgggcuggccgccgucaacuccgugcccugggacacgaucgccaacuacgcgaagccguuccucaacaagguggucagcaccaccaccaacaucgugacgcgcugccugaaccgcgugugcaccaacuacaugcccuacuucuucacccugcuccugcagcugugcaccuucacccgguccacgaacagccgcaucaaggccuccaugcccaccaccaucgccaagaacaccgucaagagcgugggcaaguucugccucgaggccagcuucaacuaccugaagucccccaacuucagcaagcugaucaacaucaucaucugguuccuccugcuguccgugugccucggcagccugaucuacuccacggccgcgcuggggguccucaugagcaaccugggcaugccguccuacugcaccggguaccgggagggcuaccugaacagcaccaacgugaccaucgccacguacugcaccggcuccauccccugcagcgugugccucuccgggcuggacagccuggacaccuaccccucccucgagaccauccagaucacgaucagcuccuucaagugggaccugaccgccuucggccuggucgccgagugguuccucgccuacauccuguucacccgcuucuucuacgugcuggggcucgcggccaucaugcagcuguucuucagcuacuucgccgugcacuucaucuccaacagcuggcugauguggcugaucaucaaccucguccagauggcccccaucuccgcgauggugcggauguacaucuucuucgccagcuucuacuacguguggaagagcuacguccacgugguggacggcugcaacuccagcaccugcaugaugugcuacaagcgcaaccgggccacgcgcgucgagugcaccaccaucgugaacgggguccggcgcuccuucuacguguacgccaacggcggcaagggguucugcaagcugcacaacuggaacugcgugaacugcgacaccuucugcgccggcagcacguucaucuccgacgaggucgcgcgggaccugagccuccaguucaagcgcccgaucaaccccaccgaccaguccagcuacaucguggacuccgugaccgucaagaacgggagcauccaccuguacuucgacaaggccggccagaagaccuacgagcggcacucccugagccacuucgugaaccucgacaaccugcgcgccaacaacacgaaggggucccugcccaucaacgugaucgucuucgacggcaagagcaagugcgaggaguccagcgccaaguccgccagcguguacuacucccagcucaugugccagcccauccugcugcucgaccaggcgcuggugagcgacgucggcgacagcgccgagguggccgugaagauguucgacgccuacgucaacaccuucuccagcaccuucaacgugccgauggagaagcugaagacccucguggccacggcggaggccgagcuggccaagaacgucucccuggacaacgugcucagcaccuucaucuccgccgcgcggcagggguucguggacagcgacgucgagaccaaggacgugguggagugccugaagcugucccaccagagcgacaucgaggucaccggcgacuccugcaacaacuacaugcucacguacaacaagguggagaacaugaccccccgcgaccugggggccugcaucgacugcagcgcccggcacaucaacgcccagguggccaagucccacaacaucgcgcugaucuggaacgucaaggacuucaugagccucuccgagcagcugcgcaagcagauccggagcgccgccaagaagaacaaccugcccuucaagcucaccugcgccaccacgcgccagguggugaacgucgugaccaccaagaucgcccugaagggcgggugaggacuagucccuguucccagagcccacuuuuuuuucuuuuuuugaaauaaaauagccugucuuucagaucucaaaggcucuuuucagagccaccaaaaaaaaaaaaaaaaaaaaaaaaaaaaaaaaaaaaaaaaaaaaaaaaaaaaaaaaaaaaaaaaaaaaaaaaaaaaaaaaaaaaaaaaaaaaaaaaaaaaa

SEQ ID NO: 19987 - RNA, 6113 nt, Artificial Sequence
  SARS-CoV-2__MT614552.1__non-structural protein 3 (NSP3) mRNA gc
aggagagucccgcagucggcguccagcggcucugcuuguucgugugugugucguugcaggccuuauucaagcuuaccauggcccccaccaaggugaccuucggcgacgacacggucaucgaggugcagggguacaagagcgugaacaucaccuucgagcuggacgagcgcaucgacaagguccucaacgagaagugcuccgccuacaccguggagcugggcaccgaggugaacgaguucgcgugcgucguggccgacgccgugaucaagacgcugcagccggucagcgagcuccugaccccccuggggaucgaccucgacgagugguccauggccaccuacuaccuguucgacgagagcggcgaguucaagcuggccucccacauguacugcagcuucuacccccccgacgaggacgaggaggagggggacugcgaggaggaggaguucgagccguccacccaguacgaguacggcacggaggacgacuaccagggcaagccccucgaguucggggcgaccagcgccgcccugcagcccgaggaggagcaggaggaggacuggcuggacgacgacucccagcagaccgugggccagcaggacgggagcgaggacaaccagaccacgaccauccagaccaucguggagguccagccccagcucgagauggagcugaccccgguggugcagacgaucgaggucaacuccuucagcggcuaccugaagcucaccgacaacguguacaucaagaacgccgacaucguggaggaggcgaagaaggucaagcccaccgugguggucaacgccgccaacguguaccugaagcacgggggcggcguggccggggcccugaacaaggcgaccaacaacgccaugcaggucgaguccgacgacuacaucgccacgaacggcccccucaagguggggggcagcugcguccuguccggccacaaccuggccaagcacugccuccacgugguggggcccaacgucaacaagggcgaggacauccagcugcugaagagcgccuacgagaacuucaaccagcacgaggugcuccuggcgccgcugcucuccgccgggaucuucggcgccgaccccauccacagccugcgggugugcgucgacaccgugcgcaccaacguguaccuggccgucuucgacaagaaccucuacgacaagcugguguccagcuuccuggagaugaagagcgagaagcagguggagcagaagaucgccgagauccccaaggaggaggucaagcccuucaucaccgaguccaagccgagcguggagcagcggaagcaggacgacaagaagaucaaggcgugcguggaggaggucacgaccacccucgaggagaccaaguuccugacggagaaccugcuccuguacaucgacaucaacgggaaccugcaccccgacuccgccacccucgugagcgacaucgacaucaccuuccugaagaaggacgcccccuacaucgugggcgacgucgugcaggagggcgugcugaccgccgucgugauccccacgaagaaggccgggggcaccaccgagaugcucgcgaaggcccugcgcaaggugccgaccgacaacuacaucacgaccuaccccgggcagggccugaacggguacaccgucgaggaggccaagaccgugcucaagaagugcaaguccgccuucuacauccugcccagcaucaucuccaacgagaagcaggagauccugggcaccgugagcuggaaccuccgggagaugcuggcgcacgccgaggagacgcgcaagcugaugcccgucugcguggagaccaaggccaucguguccaccauccagcggaaguacaagggcaucaagauccaggagggggucguggacuacggcgcccgcuucuacuucuacaccagcaagacgaccguggccucccugaucaacacccucaacgaccugaacgagacccuggucacgaugccgcucggguacgugacccacggccugaaccuggaggaggcggcccgguacaugcgcagccucaaggugcccgccaccgucuccgugagcucccccgacgccgugaccgccuacaacggguaccugacgagcuccagcaagacccccgaggagcacuucaucgagaccaucucccuggcgggcagcuacaaggacuggagcuacuccggccagagcacccagcucgggaucgaguuccugaagcggggcgacaaguccgucuacuacacgagcaacccgaccaccuuccaccuggacggggaggugaucaccuucgacaaccucaagacgcugcugucccuccgcgaggugcggaccaucaaggucuucaccaccguggacaacaucaaccugcacacgcagguggucgacaugagcaugaccuacggccagcaguucggccccaccuaccuggacggggccgacgugaccaagaucaagccccacaacucccacgagggcaagacguucuacgugcucccgaacgacgacacccugcgcgucgaggccuucgaguacuaccacaccaccgaccccagcuuccuggggcgguacauguccgcccucaaccacacgaagaaguggaaguacccccaggugaacggccugaccagcaucaagugggccgacaacaacugcuaccuggcgaccgcccuccugacccugcagcagaucgagcucaaguucaaccccccggcccugcaggacgccuacuaccgcgcgcgggccggggaggccgccaacuucugcgcccugauccucgcguacugcaacaagacggugggcgagcugggcgacguccgcgagaccauguccuaccuguuccagcacgccaaccucgacagcugcaagcgggugcugaacgucgugugcaagaccugcgggcagcagcagaccacccugaagggcguggaggccgucauguacauggggacgcucuccuacgagcaguucaagaagggcgugcagauccccugcaccugcgggaagcaggccaccaaguaccuggugcagcaggagagccccuucgucaugauguccgcccccccggcgcaguacgagcugaagcacggcaccuucacgugcgccagcgaguacaccggcaacuaccagugcgggcacuacaagcacaucaccuccaaggagacccucuacugcaucgacggcgcccugcugacgaagagcagcgaguacaaggggcccaucaccgacguguucuacaaggagaacuccuacaccaccacgaucaagcccgugaccuacaagcucgacggcgucgugugcaccgagaucgaccccaagcuggacaacuacuacaagaaggacaacagcuacuucaccgagcagccgaucgaccuggugcccaaccagcccuaccccaacgccuccuucgacaacuucaaguucgucugcgacaacaucaaguucgccgacgaccucaaccagcugacgggguacaagaagccggcgagccgcgagcugaaggugaccuucuuccccgaccucaacggcgacguggucgccaucgacuacaagcacuacacccccuccuucaagaagggcgccaagcugcugcacaagcccaucguguggcacgugaacaacgccaccaacaaggcgacguacaagccgaacaccuggugcauccggugccucuggagcaccaagcccgucgagaccuccaacagcuucgacgugcugaaguccgaggacgcccaggggauggacaaccuggccugcgaggaccucaagcccgugagcgaggaggucguggagaaccccacgauccagaaggacgugcuggagugcaacgucaagaccaccgagguggugggcgacaucauccugaagccggccaacaacucccucaagaucaccgaggaggucgggcacacggaccugauggccgcguacguggacaacagcucccugaccaucaagaagcccaacgagcucagccgcgugcugggccugaagacccucgccacccacgggcuggccgccgucaacuccgugcccugggacacgaucgccaacuacgcgaagccguuccugaacaagguggucagcaccaccaccaacaucgugacgcgcugccucaaccgggugugcaccaacuacaugcccuacuucuucacccugcugcuccagcugugcaccuucacccgcuccacgaacagccggaucaaggccuccaugcccaccaccaucgccaagaacaccgucaagagcgugggcaaguucugccuggaggccagcuucaacuaccucaaguccagcaacuucuccaagcugaucaacaucaucaucugguuccugcuccugagcgugugccugggcucccucaucuacagcacggccgcgcuggggguccugauguccaaccucggcaugcccagcuacugcaccggguaccgcgagggcuaccugaacuccaccaacgugaccaucgccacguacugcaccggcagcaucccgugcuccgugugccugagcgggcucgacucccuggacaccuaccccagccuggagaccauccagaucacgaucuccagcuucaagugggaccucaccgccuucggccuggucgccgagugguuccuggccuacauccucuucacccgguucuucuacgugcuggggcuggcggccaucaugcagcucuucuucuccuacuucgccgugcacuucaucagcaacuccuggcugauguggcugaucaucaaccugguccagauggcccccaucagcgcgauggugcgcauguacaucuucuucgccagcuucuacuacguguggaaguccuacguccacgugguggacggcugcaacagcuccaccugcaugaugugcuacaagcggaaccgcgccacgcgggucgagugcaccaccaucgugaacgggguccgccggagcuucuacguguacgccaacggcggcaagggguucugcaagcuccacaacuggaacugcgugaacugcgacaccuucugcgccggcuccacguucaucagcgacgaggucgcgcgcgaccugucccugcaguucaagcggcccaucaacccgaccgaccagagcuccuacaucguggacagcgugaccgucaagaacggguccauccaccucuacuucgacaaggccggccagaagaccuacgagcgccacagccugucccacuucgugaaccuggacaaccuccgggccaacaacacgaaggggagccugcccaucaacgugaucgucuucgacggcaaguccaagugcgaggagagcuccgccaagagcgccuccguguacuacagccagcugaugugccagcccauccuccugcuggaccaggcgcucgugagcgacgucggcgacuccgccgagguggccgugaagauguucgacgccuacgucaacaccuucagcuccaccuucaacgugcccauggagaagcugaagacccugguggccacggcggaggccgagcucgccaagaacgucagccuggacaacgugcuguccaccuucaucagcgccgcgcgccagggguucguggacuccgacgucgagaccaaggacgugguggagugccucaagcugagccaccaguccgacaucgaggucaccggcgacagcugcaacaacuacaugcugacguacaacaagguggagaacaugaccccgcgggaccucggggccugcaucgacugcuccgcccgccacaucaacgcccagguggccaagagccacaacaucgcgcugaucuggaacgucaaggacuucaugucccugagcgagcagcuccggaagcagauccgcuccgccgccaagaagaacaaccugcccuucaagcugaccugcgccaccacgcgccagguggugaacgucgugaccaccaagaucgcccucaagggcgggugaggacuagucccuguucccagagcccacuuuuuuuucuuuuuuugaaauaaaauagccugucuuucagaucucaaaggcucuuuucagagccaccaaaaaaaaaaaaaaaaaaaaaaaaaaaaaaaaaaaaaaaaaaaaaaaaaaaaaaaaaaaaaaaaaaaaaaaaaaaaaaaaaaaaaaaaaaaaaaaaaaaaa

SEQ ID NO: 19988 - RNA, 6113 nt, Artificial Sequence
  SARS-CoV-2__MT614556.1__non-structural protein 3 (NSP3) mRNA gc
aggagagucccgcagucggcguccagcggcucugcuuguucgugugugugucguugcaggccuuauucaagcuuaccauggcccccaccaaggugaccuucggcgacgacacggucaucgaggugcagggguacaagagcgugaacaucaccuucgagcuggacgagcgcaucgacaagguccucaacgagaagugcuccaccuacaccguggagcugggcacggaggugaacgaguucgccugcgucguggcggacgccgugaucaagacccugcagccggucagcgagcuccugaccccccuggggaucgaccucgacgagugguccauggccaccuacuaccuguucgacgagagcggcgaguucaagcuggccucccacauguacugcagcuucuacccccccgacgaggacgaggaggagggggacugcgaggaggaggaguucgagccguccacgcaguacgaguacggcaccgaggacgacuaccagggcaagccccucgaguucggggccaccagcgcggcccugcagcccgaggaggagcaggaggaggacuggcuggacgacgacucccagcagaccgugggccagcaggacgggagcgaggacaaccagacgaccaccauccagaccaucguggagguccagccccagcucgagauggagcugacgccgguggugcagaccaucgaggucaacuccuucagcggcuaccugaagcucaccgacaacguguacaucaagaacgccgacaucguggaggaggccaagaaggucaagcccaccgugguggucaacgcggccaacguguaccugaagcacgggggcggcguggccggggcccugaacaaggccacgaacaacgcgaugcaggucgaguccgacgacuacaucgccaccaacggcccccucaagguggggggcagcugcguccuguccggccacaaccuggccaagcacugccuccacgugguggggcccaacgucaacaagggcgaggacauccagcugcugaagagcgccuacgagaacuucaaccagcacgaggugcuccuggccccgcugcucuccgcggggaucuucggcgccgaccccauccacagccugcgggugugcgucgacaccgugcgcaccaacguguaccuggccgucuucgacaagaaccucuacgacaagcugguguccagcuuccuggagaugaagagcgagaagcagguggagcagaagaucgccgagauccccaaggaggaggucaagcccuucaucacggaguccaagccgagcguggagcagcggaagcaggacgacaagaagaucaaggccugcguggaggaggucaccaccacccucgaggagacgaaguuccugaccgagaaccugcuccuguacaucgacaucaacgggaaccugcaccccgacuccgcgacccucgugagcgacaucgacaucaccuuccugaagaaggacgcccccuacaucgugggcgacgucgugcaggagggcgugcugacggccgucgugauccccaccaagaaggccgggggcaccaccgagaugcucgccaaggcgcugcgcaaggugccgacggacaacuacaucaccaccuaccccgggcagggccugaacggguacaccgucgaggaggccaagaccgugcucaagaagugcaaguccgccuucuacauccugcccagcaucaucuccaacgagaagcaggagauccugggcacggugagcuggaaccuccgggagaugcuggcccacgcggaggagacccgcaagcugaugcccgucugcguggagaccaaggccaucguguccaccauccagcggaaguacaagggcaucaagauccaggagggggucguggacuacggcgcccgcuucuacuucuacacgagcaagaccaccguggccucccugaucaacacccucaacgaccugaacgagacgcuggucaccaugccgcucggguacgugacccacggccugaaccuggaggaggccgcgcgguacaugcgcagccucaaggugcccgccaccgucuccgugagcucccccgacgccgugacggccuacaacggguaccugaccagcuccagcaagacccccgaggagcacuucaucgagaccaucucccuggccggcagcuacaaggacuggagcuacuccggccagagcacgcagcucgggaucgaguuccugaagcggggcgacaaguccgucuacuacaccagcaacccgaccaccuuccaccuggacggggaggugaucacguucgacaaccucaagacccugcugucccuccgcgaggugcggaccaucaaggucuucaccacgguggacaacaucaaccugcacacccagguggucgacaugagcaugaccuacggccagcaguucggccccaccuaccuggacggggcggacgugacgaagaucaagccccacaacucccacgagggcaagaccuucuacgugcucccgaacgacgacacccugcgcgucgaggccuucgaguacuaccacaccacggaccccagcuuccuggggcgguacauguccgcccucaaccacaccaagaaguggaaguacccccaggugaacggccugaccagcaucaagugggccgacaacaacugcuaccuggccaccgcgcuccugacgcugcagcagaucgagcucaaguucaaccccccggcccugcaggacgccuacuaccgcgcccgggcgggggaggccgccaacuucugcgcccugauccucgccuacugcaacaagaccgugggcgagcugggcgacguccgcgagaccauguccuaccuguuccagcacgcgaaccucgacagcugcaagcgggugcugaacgucgugugcaagaccugcgggcagcagcagaccacgcugaagggcguggaggccgucaucuacauggggacccucuccuacgagcaguucaagaagggcgugcagauccccugcaccugcgggaagcaggccaccaaguaccuggugcagcaggagagccccuucgucaugauguccgcccccccggcccaguacgagcugaagcacggcacguucaccugcgcgagcgaguacaccggcaacuaccagugcgggcacuacaagcacaucaccuccaaggagacgcucuacugcaucgacggcgcccugcugaccaagagcagcgaguacaaggggcccaucaccgacguguucuacaaggagaacuccuacaccacgaccaucaagcccgugaccuacaagcucgacggcgucgugugcaccgagaucgaccccaagcuggacaacuacuacaagaaggacaacagcuacuucacggagcagccgaucgaccuggugcccaaccagcccuaccccaacgccuccuucgacaacuucaaguucgucugcgacaacaucaaguucgccgacgaccucaaccagcugaccggguacaagaagccggccagccgcgagcugaaggugaccuucuuccccgaccucaacggcgacguggucgcgaucgacuacaagcacuacacccccuccuucaagaagggcgccaagcugcugcacaagcccaucguguggcacgugaacaacgccacgaacaaggccaccuacaagccgaacaccuggugcauccggugccucuggagcaccaagcccgucgagacguccaacagcuucgacgugcugaaguccgaggacgcgcaggggauggacaaccuggccugcgaggaccucaagcccgugagcgaggaggucguggagaaccccaccauccagaaggacgugcuggagugcaacgucaagaccaccgagguggugggcgacaucauccugaagccggccaacaacucccucaagaucacggaggaggucgggcacaccgaccugauggccgccuacguggacaacagcucccugaccaucaagaagcccaacgagcucagccgcgugcugggccugaagacccucgcgacgcacgggcuggccgccgucaacuccgugcccugggacaccaucgccaacuacgccaagccguuccugaacaagguggucagcaccaccacgaacaucgugacccgcugccucaaccgggugugcaccaacuacaugcccuacuucuucacccugcugcuccagcugugcaccuucacgcgcuccaccaacagccggaucaaggcguccaugcccaccaccaucgccaagaacacggucaagagcgugggcaaguucugccuggaggccagcuucaacuaccucaagucccccaacuucagcaagcugaucaacaucaucaucugguuccugcuccuguccgugugccugggcagccucaucuacuccaccgccgcccuggggguccugaugagcaaccucggcaugccguccuacugcaccggguaccgcgagggcuaccugaacagcaccaacgugacgaucgcgaccuacugcaccggcuccauccccugcagcgugugccuguccgggcucgacagccuggacaccuaccccucccuggagacgauccagaucaccaucagcuccuucaagugggaccucaccgccuucggccuggucgccgagugguuccuggccuacauccucuucacccgguucuucuacgugcuggggcuggccgcgaucaugcagcucuucuucagcuacuucgccgugcacuucaucuccaacagcuggcugauguggcugaucaucaaccugguccagauggcccccaucuccgccauggugcgcauguacaucuucuucgcgagcuucuacuacguguggaagagcuacguccacgugguggacggcugcaacuccagcacgugcaugaugugcuacaagcggaaccgcgccacccgggucgagugcaccaccaucgugaacgggguccgccgguccuucuacguguacgccaacggcggcaagggguucugcaagcuccacaacuggaacugcgugaacugcgacacguucugcgccggcagcaccuucaucuccgacgaggucgcccgcgaccugagccugcaguucaagcggccgaucaaccccaccgaccaguccagcuacaucguggacuccgugaccgucaagaacgggagcauccaccucuacuucgacaaggcgggccagaagacguacgagcgccacucccugagccacuucgugaaccuggacaaccuccgggccaacaacaccaaggggucccugcccaucaacgugaucgucuucgacggcaagagcaagugcgaggaguccagcgccaaguccgccagcguguacuacucccagcugaugugccagcccauccuccugcuggaccaggcccucgugagcgacgucggcgacagcgcggagguggccgugaagauguucgacgccuacgucaacaccuucuccagcaccuucaacgugccgauggagaagcugaagacgcugguggccaccgccgaggcggagcucgccaagaacgucucccuggacaacgugcugagcaccuucaucuccgccgcccgccagggguucguggacagcgacgucgagaccaaggacgugguggagugccucaagcugucccaccagagcgacaucgaggucacgggcgacuccugcaacaacuacaugcugaccuacaacaagguggagaacaugaccccccgggaccucggggcgugcaucgacugcagcgcccgccacaucaacgcccagguggccaagucccacaacaucgcccugaucuggaacgucaaggacuucaugagccuguccgagcagcuccggaagcagauccgcagcgcggccaagaagaacaaccugcccuucaagcugaccugcgccacgacccgccagguggugaacgucgugaccaccaagaucgcccucaagggcgggugaggacuagucccuguucccagagcccacuuuuuuuucuuuuuuugaaauaaaauagccugucuuucagaucucaaaggcucuuuucagagccaccaaaaaaaaaaaaaaaaaaaaaaaaaaaaaaaaaaaaaaaaaaaaaaaaaaaaaaaaaaaaaaaaaaaaaaaaaaaaaaaaaaaaaaaaaaaaaaaaaaaaa

SEQ ID NO: 19989 - RNA, 6113 nt, Artificial Sequence
  SARS-CoV-2__MT510701.1__non-structural protein 3 (NSP3) mRNA gc
aggagagucccgcagucggcguccagcggcucugcuuguucgugugugugucguugcaggccuuauucaagcuuaccauggcccccaccaaggugaccuucggcgacgacacggucaucgaggugcagggguacaagagcgugaacaucaccuucgagcuggacgagcgcaucgacaagguccucaacgagaagugcuccgccuacaccguggagcugggcaccgaggugaacgaguucgcgugcgucguggccgacgccgugaucaagacgcugcagccggucagcgagcuccugaccccccuggggaucgaccucgacgagugguccauggccaccuacuaccuguucgacgagagcggcgaguucaagcuggccucccacauguacugcagcuucuacccccccgacgaggacgaggaggagggggacugcgaggaggaggaguucgagccguccacccaguacgaguacggcacggaggacgacuaccagggcaagccccucgaguucggggcgaccagcgccgcccugcagcccgaggaggagcaggaggaggacuggcuggacgacgacucccagcagaccgugggccagcaggacgggagcgaggacaaccagaccacgaccauccagaccaucguggagguccagccccagcucgagauggagcugaccccgguggugcagacgaucgaggucaacuccuucagcggcuaccugaagcucaccgacaacguguacaucaagaacgccgacaucguggaggaggcgaagaaggucaagcccaccgugguggucaacgccgccaacguguaccugaagcacgggggcggcguggccggggcccugaacaaggcgaccaacaacgccaugcaggucgaguccgacgacuacaucgccacgaacggcccccucaagguggggggcagcugcguccuguccggccacaaccuggccaagcacugccuccacgugguggggcccaacgucaacaagggcgaggacauccagcugcugaagagcgccuacgagaacuucaaccagcacgaggugcuccuggcgccgcugcucuccgccgggaucuucggcgccgaccccauccacagccugcgggugugcgucgacaccgugcgcaccaacguguaccuggccgucuucgacaagaaccucuacgacaagcugguguccagcuuccuggagaugaagagcgagaagcagguggagcagaagaucgccgagauccccaaggaggaggucaagcccuucaucaccgaguccaagccgagcguggagcagcggaagcaggacgacaagaagaucaaggcgugcguggaggaggucacgaccacccucgaggagaccaaguuccugacggagaaccugcuccuguacaucgacaucaacgggaaccugcaccccgacuccgccacccucgugagcgacaucgacaucaccuuccugaagaaggacgcccccuacaucgugggcgacgucgugcaggagggcgugcugaccgccgucgugauccccacgaagaacgccgggggcaccaccgagaugcucgcgaaggcccugcgcaaggugccgaccgacaacuacaucacgaccuaccccgggcagggccugaacggguacaccgucgaggaggccaagaccgugcucaagaagugcaaguccgccuucuacauccugcccagcaucaucuccaacgagaagcaggagauccugggcaccgugagcuggaaccuccgggagaugcuggcgcacgccgaggagacgcgcaagcugaugcccgucugcguggagaccaaggccaucguguccaccauccagcggaaguacaagggcaucaagauccaggagggggucguggacuacggcgcccgcuucuacuucuacaccagcaagacgaccguggccucccugaucaacacccucaacgaccugaacgagacccuggucacgaugccgcucggguacgugacccacggccugaaccuggaggaggcggcccgguacaugcgcagccucaaggugcccgccaccgucuccgugagcucccccgacgccgugaccgccuacaacggguaccugacgagcuccagcaagacccccgaggagcacuucaucgagaccaucucccuggcgggcagcuacaaggacuggagcuacuccggccagagcacccagcucgggaucgaguuccugaagcggggcgacaaguccgucuacuacacgagcaacccgaccaccuuccaccuggacggggaggugaucaccuucgacaaccucaagacgcugcugucccuccgcgaggugcggaccaucaaggucuucaccaccguggacaacaucaaccugcacacgcagguggucgacaugagcaugaccuacggccagcaguucggccccaccuaccuggacggggccgacgugaccaagaucaagccccacaacucccacgagggcaagacguucuacgugcucccgaacgacgacacccugcgcgucgaggccuucgaguacuaccacaccaccgaccccagcuuccuggggcgguacauguccgcccucaaccacacgaagaacuggaaguacccccaggugaacggccugaccagcaucaagugggccgacaacaacugcuaccuggcgaccgcccuccugacccugcagcagaucgagcucaaguucaaccccccggcccugcaggacgccuacuaccgcgcgcgggccggggaggccgccaacuucugcgcccugauccucgcguacugcaacaagacggugggcgagcugggcgacguccgcgagaccauguccuaccuguuccagcacgccaaccucgacagcugcaagcgggugcugaacgucgugugcaagaccugcgggcagcagcagaccacccugaagggcguggaggccgucauguacauggggacgcucuccuacgagcaguucaagaagggcgugcagauccccugcaccugcgggaagcaggccaccaaguaccuggugcagcaggagagccccuucgucaugauguccgcccccccggcgcaguacgagcugaagcacggcaccuucacgugcgccagcgaguacaccggcaacuaccagugcgggcacuacaagcacaucaccuccaaggagacccucuacugcaucgacggcgcccugcugacgaagagcagcgaguacaaggggcccaucaccgacguguucuacaaggagaacuccuacaccaccacgaucaagcccgugaccuacaagcucgacggcgucgugugcaccgagaucgaccccaagcuggacaacuacuacaagaaggacaacagcuacuucaccgagcagccgaucgaccuggugcccaaccagcccuaccccaacgccuccuucgacaacuucaaguucgucugcgacaacaucaaguucgccgacgaccucaaccagcugacgggguacaagaagccggcgagccgcgagcugaaggugaccuucuuccccgaccucaacggcgacguggucgccaucgacuacaagcacuacacccccuccuucaagaagggcgccaagcugcugcacaagcccaucguguggcacgugaacaacgccaccaacaaggcgacguacaagccgaacaccuggugcauccggugccucuggagcaccaagcccgucgagaccuccaacagcuucgacgugcugaaguccgaggacgcccaggggauggacaaccuggccugcgaggaccucaagcccgugagcgaggaggucguggagaaccccacgauccagaaggacgugcuggagugcaacgucaagaccaccgagguggugggcgacaucauccugaagccggccaacaacucccucaagaucaccgaggaggucgggcacacggaccugauggccgcguacguggacaacagcucccugaccaucaagaagcccaacgagcucagccgcgugcugggccugaagacccucgccacccacgggcuggccgccgucaacuccgugcccugggacacgaucgccaacuacgcgaagccguuccugaacaagguggucagcaccaccaccaacaucgugacgcgcugccucaaccgggugugcaccaacuacaugcccuacuucuucacccugcugcuccagcugugcaccuucacccgcuccacgaacagccggaucaaggccuccaugcccaccaccaucgccaagaacaccgucaagagcgugggcaaguucugccuggaggccagcuucaacuaccucaagucccccaacuucagcaagcugaucaacaucaucaucugguuccugcuccuguccgugugccugggcagccucaucuacuccacggccgcgcuggggguccugaugagcaaccucggcaugccguccuacugcaccggguaccgcgagggcuaccugaacagcaccaacgugaccaucgccacguacugcaccggcuccauccccugcagcgugugccuguccgggcucgacagccuggacaccuaccccucccuggagaccauccagaucacgaucagcuccuucaagugggaccucaccgccuucggccuggucgccgagugguuccuggccuacauccucuucacccgguucuucuacgugcuggggcuggcggccaucaugcagcucuucuucagcuacuucgccgugcacuucaucuccaacagcuggcugauguggcugaucaucaaccugguccagauggcccccaucuccgcgauggugcgcauguacaucuucuucgccagcuucuacuacguguggaagagcuacguccacgugguggacggcugcaacuccagcaccugcaugaugugcuacaagcggaaccgcgccacgcgggucgagugcaccaccaucgugaacgggguccgccgguccuucuacguguacgccaacggcggcaagggguucugcaagcuccacaacuggaacugcgugaacugcgacaccuucugcgccggcagcacguucaucuccgacgaggucgcgcgcgaccugagccugcaguucaagcggccgaucaaccccaccgaccaguccagcuacaucguggacuccgugaccgucaagaacgggagcauccaccucuacuucgacaaggccggccagaagaccuacgagcgccacucccugagccacuucgugaaccuggacaaccuccgggccaacaacacgaaggggucccugcccaucaacgugaucgucuucgacggcaagagcaagugcgaggaguccagcgccaaguccgccagcguguacuacucccagcugaugugccagcccauccuccugcuggaccaggcgcucgugagcgacgucggcgacagcgccgagguggccgugaagauguucgacgccuacgucaacaccuucuccagcaccuucaacgugccgauggagaagcugaagacccugguggccacggcggaggccgagcucgccaagaacgucucccuggacaacgugcugagcaccuucaucuccgccgcgcgccagggguucguggacagcgacgucgagaccaaggacgugguggagugccucaagcugucccaccagagcgacaucgaggucaccggcgacuccugcaacaacuacaugcugacguacaacaagguggagaacaugaccccccgggaccucggggccugcaucgacugcagcgcccgccacaucaacgcccagguggccaagucccacaacaucgcgcugaucuggaacgucaaggacuucaugagccuguccgagcagcuccggaagcagauccgcagcgccgccaagaagaacaaccugcccuucaagcugaccugcgccaccacgcgccagguggugaacgucgugaccaccaagaucgcccucaagggcgggugaggacuagucccuguucccagagcccacuuuuuuuucuuuuuuugaaauaaaauagccugucuuucagaucucaaaggcucuuuucagagccaccaaaaaaaaaaaaaaaaaaaaaaaaaaaaaaaaaaaaaaaaaaaaaaaaaaaaaaaaaaaaaaaaaaaaaaaaaaaaaaaaaaaaaaaaaaaaaaaaaaaaa

SEQ ID NO: 19990 - RNA, 6113 nt, Artificial Sequence
  SARS-CoV-2__MT607252.1__non-structural protein 3 (NSP3) mRNA gc
aggagagucccgcagucggcguccagcggcucugcuuguucgugugugugucguugcaggccuuauucaagcuuaccauggcccccaccaaggugaccuucggcgacgacacggucaucgaggugcagggguacaagagcgugaacaucaccuucgagcuggacgagcgcaucgacaagguccucaacgagaagugcuccgccuacaccguggagcugggcaccgaggugaacgaguucgcgugcgucguggccgacgccgugaucaagacgcugcagccggucagcgagcuccugaccccccuggggaucgaccucgacgagugguccauggccaccuacuaccuguucgacgagagcggcgaguucaagcuggccucccacauguacugcagcuucuacccccccgacgaggacgaggaggagggggacugcgaggaggaggaguucgagccguccacccaguacgaguacggcacggaggacgacuaccagggcaagccccucgaguucggggcgaccagcgccgcccugcagcccgaggaggagcaggaggaggacuggcuggacgacgacucccagcagaccgugggccagcaggacgggagcgaggacaaccagaccacgaccauccagaccaucguggagguccagccccagcucgagauggagcugaccccgguggugcagacgaucgaggucaacuccuucagcggcuaccugaagcucaccgacaacguguacaucaagaacgccgacaucguggaggaggcgaagaaggucaagcccaccgugguggucaacgccgccaacguguaccugaagcacgggggcggcguggccggggcccugaacaaggcgaccaacaacgccaugcaggucgaguccgacgacuacaucgccacgaacggcccccucaagguggggggcagcugcguccuguccggccacaaccuggccaagcacugccuccacgugguggggcccaacgucaacaagggcgaggacauccagcugcugaagagcgccuacgagaacuucaaccagcacgaggugcuccuggcgccgcugcucuccgccgggaucuucggcgccgaccccauccacagccugcgggugugcgucgacaccgugcgcaccaacguguaccuggccgucuucgacaagaaccucuacgacaagcugguguccagcuuccuggagaugaagagcgagaagcagguggagcagaagaucgccgagauccccaaggaggaggucaagcccuucaucaccgaguccaagccgagcguggagcagcggaagcaggacgacaagaagaucaaggcgugcguggaggaggucacgaccacccucgaggagaccaaguuccugacggagaaccugcuccuguacaucgacaucaacgggaaccugcaccccgacuccgccacccucgugagcgacaucgacaucaccuuccugaagaaggacgcccccuacaucgugggcgacgucgugcaggagggcgugcugaccgccgucgugauccccacgaagaaggccgggggcaccaccgagaugcucgcgaaggcccugcgcaaggugccgaccgacaacuacaucacgaccuaccccgggcagggccugaacggguacaccgucgaggaggccaagaccgugcucaagaagugcaaguccgccuucuacauccugcccagcaucaucuccaacgagaagcaggagauccugggcaccgugagcuggaaccuccgggagaugcuggcgcacgccgaggagacgcgcaagcugaugcccgucugcguggagaccaaggccaucguguccaccauccagcggaaguacaagggcaucaagauccaggagggggucguggacuacggcgcccgcuucuacuucuacaccagcaagacgaccguggccucccugaucaacacccucaacgaccugaacgagacccuggucacgaugccgcucggguacgugacccacggccugaaccuggaggaggcggcccgguacaugcgcagccucaaggugcccgccaccgucuccgugagcucccccgacgccgugaccgccuacaacggguaccugacgagcuccagcaagacccccgaggagcacuucaucgagaccaucucccuggcgggcagcuacaaggacuggagcuacuccggccagagcacccagcucgggaucgaguuccugaagcggggcgacaaguccgucuacuacacgagcaacccgaccaccuuccaccuggacggggaggugaucaccuucgacaaccucaagacgcugcugucccuccgcgaggugcggaccaucaaggucuucaccaccguggacaacaucaaccugcacacgcagguggucgacaugagcaugaccuacggccagcaguucggccccaccuaccuggacggggccgacgugaccaagaucaagccccacaacucccacgagggcaagacguucuacgugcucccgaacgacgacacccugcgcgucgaggccuucgaguacuaccacaccaccgaccccagcuuccuggggcgguacauguccgcccucaaccacacgaagaaguggaaguacccccaggugaacggccugaccagcaucaagugggccgacaacaacugcuaccuggcgaccgcccuccugacccugcagcagaucgagcucaaguucaaccccccggcccugcaggacgccuacuaccgcgcgcgggccggggaggccgccaacuucugcgcccugauccucgcguacugcaacaagacggugggcgagcugggcgacguccgcgagaccauguccuaccuguuccagcacgccaaccucgacagcugcaagcgggugcugaacgucgugugcaagaccugcgggcagcagcagaccacccugaagggcguggaggccgucauguacauggggacgcucuccuacgagcaguucaagaagggcgugcagaucagcugcaccugcgggaagcaggccaccaaguaccuggugcagcaggagucccccuucgucaugaugagcgccccccccgcgcaguacgagcugaagcacggcaccuucacgugcgccuccgaguacaccggcaacuaccagugcgggcacuacaagcacaucaccagcaaggagacccucuacugcaucgacggcgcccugcugacgaagagcuccgaguacaaggggccgaucaccgacguguucuacaaggagaacagcuacaccaccacgaucaagcccgugaccuacaagcucgacggcgucgugugcaccgagaucgaccccaagcuggacaacuacuacaagaaggacaacuccuacuucaccgagcagcccaucgaccuggugccgaaccagcccuaccccaacgccagcuucgacaacuucaaguucgucugcgacaacaucaaguucgccgacgaccucaaccagcugacgggguacaagaagcccgcgucccgcgagcugaaggugaccuucuucccggaccucaacggcgacguggucgccaucgacuacaagcacuacacccccagcuucaagaagggcgccaagcugcugcacaagcccaucguguggcacgugaacaacgccaccaacaaggcgacguacaagcccaacaccuggugcauccggugccucugguccaccaagccggucgagaccagcaacuccuucgacgugcugaagagcgaggacgcccaggggauggacaaccuggccugcgaggaccucaagcccguguccgaggaggucguggagaaccccacgauccagaaggacgugcuggagugcaacgucaagaccaccgagguggugggcgacaucauccugaagcccgccaacaacagccucaagaucaccgaggaggucgggcacacggaccugauggccgcguacguggacaacuccagccugaccaucaagaagccgaacgagcucucccgcgugcugggccugaagacccucgccacccacgggcuggccgccgucaacagcgugcccugggacacgaucgccaacuacgcgaagcccuuccugaacaagguggucuccaccaccaccaacaucgugacgcgcugccucaaccgggugugcaccaacuacaugccguacuucuucacccugcugcuccagcugugcaccuucacccgcagcacgaacucccggaucaaggccagcaugcccaccaccaucgccaagaacaccgucaagagcgugggcaaguucugccuggaggccuccuucaacuaccucaagagccccaacuucuccaagcugaucaacaucaucaucugguuccugcuccugagcgugugccugggcucccucaucuacagcacggccgcgcuggggguccugauguccaaccucggcaugcccagcuacugcaccggguaccgcgagggcuaccugaacuccaccaacgugaccaucgccacguacugcaccggcagcaucccgugcuccgugugccugagcgggcucgacucccuggacaccuaccccagccuggagaccauccagaucacgaucuccagcuucaagugggaccucaccgccuucggccuggucgccgagugguuccuggccuacauccucuucacccgguucuucuacgugcuggggcuggcggccaucaugcagcucuucuucuccuacuucgccgugcacuucaucagcaacuccuggcugauguggcugaucaucaaccugguccagauggcccccaucagcgcgauggugcgcauguacaucuucuucgccagcuucuacuacguguggaaguccuacguccacgugguggacggcugcaacagcuccaccugcaugaugugcuacaagcggaaccgcgccacgcgggucgagugcaccaccaucgugaacgggguccgccggagcuucuacguguacgccaacggcggcaagggguucugcaagcuccacaacuggaacugcgugaacugcgacaccuucugcgccggcuccacguucaucagcgacgaggucgcgcgcgaccugucccugcaguucaagcggcccaucaacccgaccgaccagagcuccuacaucguggacagcgugaccgucaagaacggguccauccaccucuacuucgacaaggccggccagaagaccuacgagcgccacagccugucccacuucgugaaccuggacaaccuccgggccaacaacacgaaggggagccugcccaucaacgugaucgucuucgacggcaaguccaagugcgaggagagcuccgccaagagcgccuccguguacuacagccagcugaugugccagcccauccuccugcuggaccaggcgcucgugagcgacgucggcgacuccgccgagguggccgugaagauguucgacgccuacgucaacaccuucagcuccaccuucaacgugcccauggagaagcugaagacccugguggccacggcggaggccgagcucgccaagaacgucagccuggacaacgugcuguccaccuucaucagcgccgcgcgccagggguucguggacuccgacgucgagaccaaggacgugguggagugccucaagcugagccaccaguccgacaucgaggucaccggcgacagcugcaacaacuacaugcugacguacaacaagguggagaacaugaccccgcgggaccucggggccugcaucgacugcuccgcccgccacaucaacgcccagguggccaagagccacaacaucgcgcugaucuggaacgucaaggacuucaugucccugagcgagcagcuccggaagcagauccgcuccgccgccaagaagaacaaccugcccuucaagcugaccugcgccaccacgcgccagguggugaacgucgugaccaccaagaucgcccucaagggcgggugaggacuagucccuguucccagagcccacuuuuuuuucuuuuuuugaaauaaaauagccugucuuucagaucucaaaggcucuuuucagagccaccaaaaaaaaaaaaaaaaaaaaaaaaaaaaaaaaaaaaaaaaaaaaaaaaaaaaaaaaaaaaaaaaaaaaaaaaaaaaaaaaaaaaaaaaaaaaaaaaaaaaa

SEQ ID NO: 19991 - RNA, 6113 nt, Artificial Sequence
  SARS-CoV-2__MT607602.1__non-structural protein 3 (NSP3) mRNA gc
aggagagucccgcagucggcguccagcggcucugcuuguucgugugugugucguugcaggccuuauucaagcuuaccauggcccccaccaaggugaccuucggcgacgacacggucaucgaggugcagggguacaagagcgugaacaucaccuucgagcuggacgagcgcaucgacaagguccucaacgagaagugcuccgccuacaccguggagcugggcaccgaggugaacgaguucgcgugcgucguggccgacgccgugaucaagacgcugcagccggucagcgagcuccugaccccccuggggaucgaccucgacgagugguccauggccaccuacuaccuguucgacgagagcggcgaguucaagcuggccucccacauguacugcagcuucuacccccccgacgaggacgaggaggagggggacugcgaggaggaggaguucgagccguccacccaguacgaguacggcacggaggacgacuaccagggcaagccccucgaguucggggcgaccagcgccgcccugcagcccgaggaggagcaggaggaggacuggcuggacgacgacucccagcagaccgugggccagcaggacgggagcgaggacaaccagaccacgaccauccagaccaucguggagguccagccccagcucgagauggagcugaccccgguggugcagacgaucgaggucaacuccuucagcggcuaccugaagcucaccgacaacguguacaucaagaacgccgacaucguggaggaggcgaagaaggucaagcccaccgugguggucaacgccgccaacguguaccugaagcacgggggcggcguggccggggcccugaacaaggcgaccaacaacgccaugcaggucgaguccgacgacuacaucgccacgaacggcccccucaagguggggggcagcugcguccuguccggccacaaccuggccaagcacugccuccacgugguggggcccaacgucaacaagggcgaggacauccagcugcugaagagcgccuacgagaacuucaaccagcacgaggugcuccuggcgccgcugcucuccgccgggaucuucggcgccgaccccauccacagccugcgggugugcgucgacaccgugcgcaccaacguguaccuggccgucuucgacaagaaccucuacgacaagcugguguccagcuuccuggagaugaagagcgagaagcagguggagcagaagaucgccgagauccccaaggaggaggucaagcccuucaucaccgaguccaagccgagcguggagcagcggaagcaggacgacaagaagaucaaggcgugcguggaggaggucacgaccacccucgaggagaccaaguuccugacggagaaccugcuccuguacaucgacaucaacgggaaccugcaccccgacuccgccacccucgugagcgacaucgacaucaccuuccugaagaaggacgcccccuacaucgugggcgacgucgugcaggagggcgugcugaccgccgucgugauccccacgaagaaggccgggggcaccaccgagaugcucgcgaaggcccugcgcaaggugccgaccgacaacuacaucacgaccuaccccgggcagggccugaacggguacaccgucgaggaggccaagaccgugcucaagaagugcaaguccgccuucuacauccugcccagcaucaucuccaacgagaagcaggagauccugggcaccgugagcuggaaccuccgggagaugcuggcgcacgccgaggagacgcgcaagcugaugcccgucugcguggagaccaaggccaucguguccaccauccagcggaaguacaagggcaucaagauccaggagggggucguggacuacggcgcccgcuucuacuucuacaccagcaagacgaccguggccucccugaucaacacccucaacgaccugaacgagacccuggucacgaugccgcucggguacgugacccacggccugaaccuggaggaggcggcccgguacaugcgcagccucaaggugcccgccaccgucuccgugagcucccccgacgccgugaccgccuacaacggguaccugacgagcuccagcaagacccccgaggagcacuucaucgagaccaucucccuggcgggcagcuacaaggacuggagcuacuccggccagagcacccagcucgggaucgaguuccugaagcggggcgacaaguccgucuacuacacgagcaacccgaccaccuuccaccuggacggggaggugaucaccuucgacaaccucaagacgcugcugucccuccgcgaggugcggaccaucaaggucuucaccaccguggacaacaucaaccugcacacgcagguggucgacaugagcaugaccuacggccagcaguucggccccaccuaccuggacggggccgacgugaccaagaucaagccccacaacucccacgagggcaagacguucuacgugcucccgaacgacgacacccugcgcgucgaggccuucgaguacuaccacaccaccgaccccagcuuccuggggcgguacauguccgcccucaaccacacgaagaaguggaaguacccccaggugaacggccugaccagcaucaagugggccgacaacaacugcuaccuggcgaccgcccuccugacccugcagcagaucgagcucaaguucaaccccccggcccugcaggacgccuacuaccgcgcgcgggccggggaggccgccaacuucugcgcccugauccucgcguacugcaacaagacggugggcgagcugggcgacguccgcgagaccaugggguaccuguuccagcacgccaaccucgacuccugcaagcgggugcugaacgucgugugcaagaccugcggccagcagcagaccacccugaaggggguggaggccgucauguacaugggcacgcucagcuacgagcaguucaagaagggggugcagauccccugcaccugcggcaagcaggccaccaaguaccuggugcagcaggagucccccuucgucaugaugagcgcccccccggcgcaguacgagcugaagcacggcaccuucacgugcgccuccgaguacaccgggaacuaccagugcggccacuacaagcacaucaccagcaaggagacccucuacugcaucgacggggcccugcugacgaaguccagcgaguacaagggccccaucaccgacguguucuacaaggagaacagcuacaccaccacgaucaagcccgugaccuacaagcucgacggggucgugugcaccgagaucgaccccaagcuggacaacuacuacaagaaggacaacuccuacuucaccgagcagccgaucgaccuggugcccaaccagcccuaccccaacgccagcuucgacaacuucaaguucgucugcgacaacaucaaguucgccgacgaccucaaccagcugacgggcuacaagaagccggcgucccgcgagcugaaggugaccuucuuccccgaccucaacggcgacguggucgccaucgacuacaagcacuacacccccagcuucaagaagggggccaagcugcugcacaagcccaucguguggcacgugaacaacgccaccaacaaggcgacguacaagccgaacaccuggugcauccggugccucugguccaccaagcccgucgagaccagcaacuccuucgacgugcugaagagcgaggacgcccagggcauggacaaccuggccugcgaggaccucaagcccguguccgaggaggucguggagaaccccacgauccagaaggacgugcuggagugcaacgucaagaccaccgagguggugggggacaucauccugaagccggccaacaacagccucaagaucaccgaggaggucggccacacggaccugauggccgcguacguggacaacuccagccugaccaucaagaagcccaacgagcucucccgcgugcuggggcugaagacccucgccacccacggccuggccgccgucaacagcgugcccugggacacgaucgccaacuacgcgaagccguuccugaacaagguggucuccaccaccaccaacaucgugacgcgcugccucaaccgggugugcaccaacuacaugcccuacuucuucacccugcugcuccagcugugcaccuucacccgcagcacgaacucccggaucaaggccagcaugcccaccaccaucgccaagaacaccgucaaguccgugggcaaguucugccuggaggccagcuucaacuaccucaagagccccaacuucuccaagcugaucaacaucaucaucugguuccugcuccugagcgugugccuggggucccucaucuacagcacggccgcgcugggcguccugauguccaaccucgggaugccgagcuacugcaccggcuaccgcgagggcuaccugaacuccaccaacgugaccaucgccacguacugcaccgggagcauccccugcuccgugugccugagcggccucgacucccuggacaccuaccccagccuggagaccauccagaucacgaucuccagcuucaagugggaccucaccgccuucgggcuggucgccgagugguuccuggccuacauccucuucacccgguucuucuacgugcugggccuggcggccaucaugcagcucuucuucuccuacuucgccgugcacuucaucagcaacuccuggcugauguggcugaucaucaaccugguccagauggcccccaucagcgcgauggugcgcauguacaucuucuucgccuccuucuacuacguguggaagagcuacguccacgugguggacgggugcaacagcuccaccugcaugaugugcuacaagcggaaccgcgccacgcgggucgagugcaccaccaucgugaacggcguccgccggagcuucuacguguacgccaacggcgggaagggcuucugcaagcuccacaacuggaacugcgugaacugcgacaccuucugcgccggguccacguucaucagcgacgaggucgcgcgcgaccugucccugcaguucaagcggccgaucaaccccaccgaccagagcuccuacaucguggacagcgugaccgucaagaacggcuccauccaccucuacuucgacaaggccgggcagaagaccuacgagcgccacagccugucccacuucgugaaccuggacaaccuccgggccaacaacacgaagggcagccugcccaucaacgugaucgucuucgacggcaaguccaagugcgaggagagcuccgccaagagcgccuccguguacuacagccagcugaugugccagcccauccuccugcuggaccaggcgcucguguccgacgucggggacagcgccgagguggccgugaagauguucgacgccuacgucaacaccuucagcuccaccuucaacgugccgauggagaagcugaagacccugguggccacggcggaggccgagcucgccaagaacgucagccuggacaacgugcuguccaccuucaucagcgccgcgcgccagggcuucguggacuccgacgucgagaccaaggacgugguggagugccucaagcugagccaccaguccgacaucgaggucaccggggacagcugcaacaacuacaugcugacguacaacaagguggagaacaugaccccccgggaccucggcgccugcaucgacugcuccgcccgccacaucaacgcccagguggccaagagccacaacaucgcgcugaucuggaacgucaaggacuucaugucccugagcgagcagcuccggaagcagauccgcuccgccgccaagaagaacaaccugcccuucaagcugaccugcgccaccacgcgccagguggugaacgucgugaccaccaagaucgcccucaaggggggcugaggacuagucccuguucccagagcccacuuuuuuuucuuuuuuugaaauaaaauagccugucuuucagaucucaaaggcucuuuucagagccaccaaaaaaaaaaaaaaaaaaaaaaaaaaaaaaaaaaaaaaaaaaaaaaaaaaaaaaaaaaaaaaaaaaaaaaaaaaaaaaaaaaaaaaaaaaaaaaaaaaaaa

SEQ ID NO: 19992 - RNA, 6113 nt, Artificial Sequence
  SARS-CoV-2__MT607608.1__non-structural protein 3 (NSP3) mRNA gc
aggagagucccgcagucggcguccagcggcucugcuuguucgugugugugucguugcaggccuuauucaagcuuaccauggcccccaccaaggugaccuucggcgacgacacggucaucgaggugcagggguacaagagcgugaacaucaccuucgagcuggacgagcgcaucgacaagguccucaacgagaagugcuccgccuacaccguggagcugggcaccgaggugaacgaguucgcgugcgucguggccgacgccgugaucaagacgcugcagccggucagcgagcuccugaccccccuggggaucgaccucgacgagugguccauggccaccuacuaccuguucgacgagagcggcgaguucaagcuggccucccacauguacugcagcuucuacccccccgacgaggacgaggaggagggggacugcgaggaggaggaguucgagccguccacccaguacgaguacggcacggaggacgacuaccagggcaagccccucgaguucggggcgaccagcgccgcccugcagcccgaggaggagcaggaggaggacuggcuggacgacgacucccagcagaccgugggccagcaggacgggagcgaggacaaccagaccacgaccauccagaccaucguggagguccagccccagcucgagauggagcugaccccgguggugcagacgaucgaggucaacuccuucagcggcuaccugaagcucaccgacaacguguacaucaagaacgccgacaucguggaggaggcgaagaaggucaagcccaccgugguggucaacgccgccaacguguaccugaagcacgggggcggcguggccggggcccugaacaaggcgaccaacaacgccaugcaggucgaguccgacgacuacaucgccacgaacggcccccucaagguggggggcagcugcguccuguccggccacaaccuggccaagcacugccuccacgugguggggcccaacgucaacaagggcgaggacauccagcugcugaagagcgccuacgagaacuucaaccagcacgaggugcuccuggcgccgcugcucuccgccgggaucuucggcgccgaccccauccacagccugcgggugugcgucgacaccgugcgcaccaacguguaccuggccgucuucgacaagaaccucuacgacaagcugguguccagcuuccuggagaugaagagcgagaagcagguggagcagaagaucgccgagauccccaaggaggaggucaagcccuucaucaccgaguccaagccgagcguggagcagcggaagcaggacgacaagaagaucaaggcgugcguggaggaggucacgaccacccucgaggagaccaaguuccugacggagaaccugcuccuguacaucgacaucaacgggaaccugcaccccgacuccgccacccucgugagcgacaucgacaucaccuuccugaagaaggacgcccccuacaucgugggcgacgucgugcaggagggcgugcugaccgccgucgugauccccacgaagaaggccgggggcaccaccgagaugcucgcgaaggcccugcgcaaggugccgaccgacaacuacaucacgaccuaccccgggcagggccugaacggguacaccgucgaggaggccaagaccgugcucaagaagugcaaguccgccuucuacauccugcccagcaucaucuccaacgagaagcaggagauccugggcaccgugagcuggaaccuccgggagaugcuggcgcacgccgaggagacgcgcaagcugaugcccgucugcguggagaccaaggccaucguguccaccauccagcggaaguacaagggcaucaagauccaggagggggucguggacuacggcgcccgcuucuacuucuacaccagcaagacgaccguggccucccugaucaacacccucaacgaccugaacgagacccuggucacgaugccgcucggguacgugacccacggccugaaccuggaggaggcggcccgguacaugcgcagccucaaggugcccgccaccgucuccgugagcucccccgacgccgugaccgccuacaacggguaccugacgagcuccagcaagacccccgaggagcacuucaucgagaccaucucccuggcgggcagcuacaaggacuggagcuacuccggccagagcacccagcucgggaucgaguuccugaagcggggcgacaaguccgucuacuacacgagcaacccgaccaccuuccaccuggacggggaggugaucaccuucgacaaccucaagacgcugcugucccuccgcgaggugcggaccaucaaggucuucaccaccguggacaacaucaaccugcacacgcagguggucgacaugagcaugaccuacggccagcaguucggccccaccuaccuggacggggccgacgugaccaagaucaagccccacaacucccacgagggcaagacguucuacgugcucccgaacgacgacacccugcgcgucgaggccuucgaguacuaccacaccaccgaccccagcuuccuggggcgguacauguccgcccucaaccacacgaagaaguggaaguacccccaggugaacggccugaccagcaucaagugggccgacaacaacugcuaccuggcgaccgcccuccugacccugcagcagaucgagcucaaguucaaccccccggcccugcaggacgccuacuaccgcgcgcgggccggggaggccgccaacuucugcgcccugauccucgcguacugcaacaagacggugggcgagcugggcgacguccgcgagaccauguccuaccuguuccagcacgccaaccucgacagcugcaagcgggugcugaacgucgugugcaagaccugcgggcagcagcagaccacccugaagggcguggaggccgucauguacauggggacgcucuccuacgagcaguucaagaagggcgugcagauccccugcaccugcgggaagcaggccaccaaguaccuggugcagcaggagagccccuucgucaugauguccgcccccccggcgcaguacgagcugaagcacggcaccuucacgugcgccagcgaguacaccggcaacuaccagugcgggcacuacaagcacaucaccuccaaggagacccucuacugcaucgacggcgcccugcugacgaagagcagcgaguacaaggggcccaucaccgacguguucuacaaggagaacuccuacaucaccaccaucaagcccgugacguacaagcucgacggcgucgugugcaccgagaucgaccccaagcuggacaacuacuacaagaaggacaacagcuacuucaccgagcagccgaucgaccuggugcccaaccagcccuaccccaacgccuccuucgacaacuucaaguucgucugcgacaacaucaaguucgccgacgaccucaaccagcugaccggguacaagaagccggcgagccgcgagcugaaggugacguucuuccccgaccucaacggcgacguggucgccaucgacuacaagcacuacacccccuccuucaagaagggcgccaagcugcugcacaagcccaucguguggcacgugaacaacgccaccaacaaggcgaccuacaagccgaacacguggugcauccggugccucuggagcaccaagcccgucgagaccuccaacagcuucgacgugcugaaguccgaggacgcccaggggauggacaaccuggccugcgaggaccucaagcccgugagcgaggaggucguggagaaccccaccauccagaaggacgugcuggagugcaacgucaagacgaccgagguggugggcgacaucauccugaagccggccaacaacucccucaagaucaccgaggaggucgggcacaccgaccugauggccgcguacguggacaacagcucccugacgaucaagaagcccaacgagcucagccgcgugcugggccugaagacccucgccacccacgggcuggccgccgucaacuccgugcccugggacaccaucgccaacuacgcgaagccguuccugaacaagguggucagcacgaccaccaacaucgugacccgcugccucaaccgggugugcacgaacuacaugcccuacuucuucacccugcugcuccagcugugcaccuucacccgcuccaccaacagccggaucaaggccuccaugcccacgaccaucgccaagaacaccgucaagagcgugggcaaguucugccuggaggccagcuucaacuaccucaagucccccaacuucagcaagcugaucaacaucaucaucugguuccugcuccuguccgugugccugggcagccucaucuacuccaccgccgcgcuggggguccugaugagcaaccucggcaugccguccuacugcacgggguaccgcgagggcuaccugaacagcaccaacgugaccaucgccaccuacugcacgggcuccauccccugcagcgugugccuguccgggcucgacagccuggacaccuaccccucccuggagaccauccagaucaccaucagcuccuucaagugggaccucacggccuucggccuggucgccgagugguuccuggccuacauccucuucacccgguucuucuacgugcuggggcuggcggccaucaugcagcucuucuucagcuacuucgccgugcacuucaucuccaacagcuggcugauguggcugaucaucaaccugguccagauggcccccaucuccgcgauggugcgcauguacaucuucuucgccagcuucuacuacguguggaagagcuacguccacgugguggacggcugcaacuccagcaccugcaugaugugcuacaagcggaaccgcgccacccgggucgagugcacgaccaucgugaacgggguccgccgguccuucuacguguacgccaacggcggcaagggguucugcaagcuccacaacuggaacugcgugaacugcgacaccuucugcgccggcagcaccuucaucuccgacgaggucgcgcgcgaccugagccugcaguucaagcggccgaucaaccccacggaccaguccagcuacaucguggacuccgugaccgucaagaacgggagcauccaccucuacuucgacaaggccggccagaagaccuacgagcgccacucccugagccacuucgugaaccuggacaaccuccgggccaacaacaccaaggggucccugcccaucaacgugaucgucuucgacggcaagagcaagugcgaggaguccagcgccaaguccgccagcguguacuacucccagcugaugugccagcccauccuccugcuggaccaggcgcucgugagcgacgucggcgacagcgccgagguggccgugaagauguucgacgccuacgucaacacguucuccagcaccuucaacgugccgauggagaagcugaagacccugguggccaccgcggaggccgagcucgccaagaacgucucccuggacaacgugcugagcacguucaucuccgccgcgcgccagggguucguggacagcgacgucgagaccaaggacgugguggagugccucaagcugucccaccagagcgacaucgaggucaccggcgacuccugcaacaacuacaugcugaccuacaacaagguggagaacaugacgccccgggaccucggggccugcaucgacugcagcgcccgccacaucaacgcccagguggccaagucccacaacaucgcgcugaucuggaacgucaaggacuucaugagccuguccgagcagcuccggaagcagauccgcagcgccgccaagaagaacaaccugcccuucaagcugaccugcgccaccacccgccagguggugaacgucgugacgaccaagaucgcccucaagggcgggugaggacuagucccuguucccagagcccacuuuuuuuucuuuuuuugaaauaaaauagccugucuuucagaucucaaaggcucuuuucagagccaccaaaaaaaaaaaaaaaaaaaaaaaaaaaaaaaaaaaaaaaaaaaaaaaaaaaaaaaaaaaaaaaaaaaaaaaaaaaaaaaaaaaaaaaaaaaaaaaaaaaaa

SEQ ID NO: 19993 - RNA, 6113 nt, Artificial Sequence
  SARS-CoV-2__MT607614.1__non-structural protein 3 (NSP3) mRNA gc
aggagagucccgcagucggcguccagcggcucugcuuguucgugugugugucguugcaggccuuauucaagcuuaccauggcccccaccaaggugaccuucggcgacgacacggucaucgaggugcagggguacaagagcgugaacaucaccuucgagcuggacgagcgcaucgacaagguccucaacgagaagugcuccgccuacaccguggagcugggcaccgaggugaacgaguucgcgugcgucguggccgacgccgugaucaagacgcugcagccggucagcgagcuccugaccccccuggggaucgaccucgacgagugguccauggccaccuacuaccuguucgacgagagcggcgaguucaagcuggccucccacauguacugcagcuucuacccccccgacgaggacgaggaggagggggacugcgaggaggaggaguucgagccguccacccaguacgaguacggcacggaggacgacuaccagggcaagccccucgaguucggggcgaccagcgccgcccugcagcccgaggaggagcaggaggaggacuggcuggacgacgacucccagcagaccgugggccagcaggacgggagcgaggacaaccagaccacgaccauccagaccaucguggagguccagccccagcucgagauggagcugaccccgguggugcagacgaucgaggucaacuccuucagcggcuaccugaagcucaccgacaacguguacaucaagaacgccgacaucguggaggaggcgaagaaggucaagcccaccgugguggucaacgccgccaacguguaccugaagcacgggggcggcguggccggggcccugaacaaggcgaccaacaacgccaugcaggucgaguccgacgacuacaucgccacgaacggcccccucaagguggggggcagcugcguccuguccggccacaaccuggccaagcacugccuccacgugguggggcccaacgucaacaagggcgaggacauccagcugcugaagagcgccuacgagaacuucaaccagcacgaggugcuccuggcgccgcugcucuccgccgggaucuucggcgccgaccccauccacagccugcgggugugcgucgacaccgugcgcaccaacguguaccuggccgucuucgacaagaaccucuacgacaagcugguguccagcuuccuggagaugaagagcgagaagcagguggagcagaagaucgccgagauccccaaggaggaggucaagcccuucaucaccgaguccaagccgagcguggagcagcggaagcaggacgacaagaagaucaaggcgugcguggaggaggucacgaccacccucgaggagaccaaguuccugacggagaaccugcuccuguacaucgacaucaacgggaaccugcaccccgacuccgccacccucgugagcgacaucgacaucaccuuccugaagaaggacgcccccuacaucgugggcgacgucgugcaggagggcgugcugaccgccgucgugauccccacgaagaaggccgggggcaccaccgagaugcucgcgaaggcccugcgcaaggugccgaccgacaacuacaucacgaccuaccccgggcagggccugaacggguacaccgucgaggaggccaagaccgugcucaagaagugcaaguccgccuucuacauccugcccagcaucaucuccaacgagaagcaggagauccugggcaccgugagcuggaaccuccgggagaugcuggcgcacgccgaggagacgcgcaagcugaugcccgucugcguggagaccaaggccaucguguccaccauccagcggaaguacaagggcaucaagauccaggagggggucguggacuacggcgcccgcuucuacuucuacaccagcaagacgaccguggccucccugaucaacacccucaacgaccugaacgagacccuggucacgaugccgcucggguacgugacccacggccugaaccuggaggaggcggcccgguacaugcgcagccucaaggugcccgccaccgucuccgugagcucccccgacgccgugaccgccuacaacggguaccugacgagcuccagcaagacccccgaggagcacuucaucgagaccaucucccuggcgggcagcuacaaggacuggagcuacuccggccagagcacccagcucgggaucgaguuccugaagcggggcgacaaguccgucuacuacacgagcaacccgaccaccuuccaccuggacggggaggugaccacguucgacaaccucaagacccugcugucccuccgcgaggugcggaccaucaaggucuucaccacgguggacaacaucaaccugcacacccagguggucgacaugagcaugaccuacggccagcaguucggccccaccuaccuggacggggccgacgugacgaagaucaagccccacaacucccacgagggcaagaccuucuacgugcucccgaacgacgacacccugcgcgucgaggccuucgaguacuaccacaccacggaccccagcuuccuggggcgguacauguccgcccucaaccacaccaagaaguggaaguacccccaggugaacggccugaccagcaucaagugggccgacaacaacugcuaccuggcgaccgcccuccugacgcugcagcagaucgagcucaaguucaaccccccggcccugcaggacgccuacuaccgcgcgcgggccggggaggccgccaacuucugcgcccugauccucgcguacugcaacaagaccgugggcgagcugggcgacguccgcgagaccauguccuaccuguuccagcacgccaaccucgacagcugcaagcgggugcugaacgucgugugcaagaccugcgggcagcagcagaccacgcugaagggcguggaggccgucauguacauggggacccucuccuacgagcaguucaagaagggcgugcagauccccugcaccugcgggaagcaggccaccaaguaccuggugcagcaggagagccccuucgucaugauguccgcccccccggcgcaguacgagcugaagcacggcacguucaccugcgccagcgaguacaccggcaacuaccagugcgggcacuacaagcacaucaccuccaaggagacgcucuacugcaucgacggcgcccugcugaccaagagcagcgaguacaaggggcccaucaccgacguguucuacaaggagaacuccuacaccacgaccaucaagcccgugaccuacaagcucgacggcgucgugugcaccgagaucgaccccaagcuggacaacuacuacaagaaggacaacagcuacuucacggagcagccgaucgaccuggugcccaaccagcccuaccccaacgccuccuucgacaacuucaaguucgucugcgacaacaucaaguucgccgacgaccucaaccagcugaccggguacaagaagccggcgagccgcgagcugaaggugaccuucuuccccgaccucaacggcgacguggucgccaucgacuacaagcacuacacccccuccuucaagaagggcgccaagcugcugcacaagcccaucguguggcacgugaacaacgccacgaacaaggcgaccuacaagccgaacaccuggugcauccggugccucuggagcaccaagcccgucgagacguccaacagcuucgacgugcugaaguccgaggacgcccaggggauggacaaccuggccugcgaggaccucaagcccgugagcgaggaggucguggagaaccccaccauccagaaggacgugcuggagugcaacgucaagaccaccgagguggugggcgacaucauccugaagccggccaacaacucccucaagaucacggaggaggucgggcacaccgaccugauggccgcguacguggacaacagcucccugaccaucaagaagcccaacgagcucagccgcgugcugggccugaagacccucgccacgcacgggcuggccgccgucaacuccgugcccugggacaccaucgccaacuacgcgaagccguuccugaacaagguggucagcaccaccacgaacaucgugacccgcugccucaaccgggugugcaccaacuacaugcccuacuucuucacccugcugcuccagcugugcaccuucacgcgcuccaccaacagccggaucaaggccuccaugcccaccaccaucgccaagaacacggucaagagcgugggcaaguucugccuggaggccagcuucaacuaccucaagucccccaacuucagcaagcugaucaacaucaucaucugguuccugcuccuguccgugugccugggcagccucaucuacuccaccgccgcgcuggggguccugaugagcaaccucggcaugccguccuacugcaccggguaccgcgagggcuaccugaacagcaccaacgugacgaucgccaccuacugcaccggcuccauccccugcagcgugugccuguccgggcucgacagccuggacaccuaccccucccuggagacgauccagaucaccaucagcuccuucaagugggaccucaccgccuucggccuggucgccgagugguuccuggccuacauccucuucacccgguucuucuacgugcuggggcuggcggccaucaugcagcucuucuucagcuacuucgccgugcacuucaucuccaacagcuggcugauguggcugaucaucaaccugguccagauggcccccaucuccgcgauggugcgcauguacaucuucuucgccagcuucuacuacguguggaagagcuacguccacgugguggacggcugcaacuccagcacgugcaugaugugcuacaagcggaaccgcgccacccgggucgagugcaccaccaucgugaacgggguccgccgguccuucuacguguacgccaacggcggcaagggguucugcaagcuccacaacuggaacugcgugaacugcgacacguucugcgccggcagcaccuucaucuccgacgaggucgcgcgcgaccugagccugcaguucaagcggccgaucaaccccaccgaccaguccagcuacaucguggacuccgugaccgucaagaacgggagcauccaccucuacuucgacaaggccggccagaagacguacgagcgccacucccugagccacuucgugaaccuggacaaccuccgggccaacaacaccaaggggucccugcccaucaacgugaucgucuucgacggcaagagcaagugcgaggaguccagcgccaaguccgccagcguguacuacucccagcugaugugccagcccauccuccugcuggaccaggcgcucgugagcgacgucggcgacagcgccgagguggccgugaagauguucgacgccuacgucaacaccuucuccagcaccuucaacgugccgauggagaagcugaagacgcugguggccaccgcggaggccgagcucgccaagaacgucucccuggacaacgugcugagcaccuucaucuccgccgcgcgccagggguucguggacagcgacgucgagaccaaggacgugguggagugccucaagcugucccaccagagcgacaucgaggucacgggcgacuccugcaacaacuacaugcugaccuacaacaagguggagaacaugaccccccgggaccucggggccugcaucgacugcagcgcccgccacaucaacgcccagguggccaagucccacaacaucgcgcugaucuggaacgucaaggacuucaugagccuguccgagcagcuccggaagcagauccgcagcgccgccaagaagaacaaccugcccuucaagcugaccugcgccacgacccgccagguggugaacgucgugaccaccaagaucgcccucaagggcgggugaggacuagucccuguucccagagcccacuuuuuuuucuuuuuuugaaauaaaauagccugucuuucagaucucaaaggcucuuuucagagccaccaaaaaaaaaaaaaaaaaaaaaaaaaaaaaaaaaaaaaaaaaaaaaaaaaaaaaaaaaaaaaaaaaaaaaaaaaaaaaaaaaaaaaaaaaaaaaaaaaaaaa

SEQ ID NO: 19994 - RNA, 6113 nt, Artificial Sequence
  SARS-CoV-2__MT609570.1__non-structural protein 3 (NSP3) mRNA gc
aggagagucccgcagucggcguccagcggcucugcuuguucgugugugugucguugcaggccuuauucaagcuuaccauggcccccaccaaggugaccuucggcgacgacacggucaucgaggugcagggguacaagagcgugaacaucaccuucgagcuggacgagcgcaucgacaagguccucaacgagaagugcuccgccuacaccguggagcugggcaccgaggugaacgaguucgcgugcgucguggccgacgccgugaucaagacgcugcagccggucagcgagcuccugaccccccuggggaucgaccucgacgagugguccauggccaccuacuaccuguucgacgagagcggcgaguucaagcuggccucccacauguacugcagcuucuacccccccgacgaggacgaggaggagggggacugcgaggaggaggaguucgagccguccacccaguacgaguacggcacggaggacgacuaccagggcaagccccucgaguucggggcgaccagcgccgcccugcagcccgaggaggagcaggaggaggacuggcuggacgacgacucccagcagaccgugggccagcaggacgggagcgaggacaaccagaccacgaccauccagaccaucguggagguccagccccagcucgagauggagcugaccccgguggugcagacgaucgaggucaacuccuucagcggcuaccugaagcucaccgacaacguguacaucaagaacgccgacaucguggaggaggcgaagaaggucaagcccaccgugguggucaacgccgccaacguguaccugaagcacgggggcggcguggccggggcccugaacaaggcgaccaacaacgccaugcaggucgaguccgacgacuacaucgccacgaacggcccccucaagguggggggcagcugcguccuguccggccacaaccuggccaagcacugccuccacgugguggggcccaacgucaacaagggcgaggacauccagcugcugaagagcgccuacgagaacuucaaccagcacgaggugcuccuggcgccgcugcucuccgccgggguguucggcgccgaccccauccacagccugcgggucugcguggacaccgugcgcaccaacgucuaccuggccguguucgacaagaaccucuacgacaagcugguguccagcuuccuggagaugaagagcgagaagcaggucgagcagaagaucgccgagauccccaaggaggaggugaagcccuucaucaccgaguccaagccgagcguggagcagcggaagcaggacgacaagaagaucaaggcgugcgucgaggaggugacgaccacccucgaggagaccaaguuccugacggagaaccugcuccuguacaucgacaucaacgggaaccugcaccccgacuccgccacccucgugagcgacaucgacaucaccuuccugaagaaggacgcccccuacaucgucggcgacguggugcaggagggcguccugaccgccguggugauccccacgaagaaggccgggggcaccaccgagaugcucgcgaaggcccugcgcaaggucccgaccgacaacuacaucacgaccuaccccgggcagggccugaacggguacaccguggaggaggccaagaccgugcucaagaagugcaaguccgccuucuacauccugcccagcaucaucuccaacgagaagcaggagauccugggcaccgucagcuggaaccuccgggagaugcuggcgcacgccgaggagacgcgcaagcugaugcccgugugcguggagaccaaggccaucgucuccaccauccagcggaaguacaagggcaucaagauccaggagggggugguggacuacggcgcccgcuucuacuucuacaccagcaagacgaccgucgccucccugaucaacacccucaacgaccugaacgagacccuggugacgaugccgcucggguacgugacccacggccugaaccuggaggaggcggcccgguacaugcgcagccucaagguccccgccaccguguccgugagcucccccgacgccgucaccgccuacaacggguaccugacgagcuccagcaagacccccgaggagcacuucaucgagaccaucucccuggcgggcagcuacaaggacuggagcuacuccggccagagcacccagcucgggaucgaguuccugaagcggggcgacaaguccguguacuacacgagcaacccgaccaccuuccaccuggacggggaggugaucaccuucgacaaccucaagacgcugcugucccuccgcgagguccggaccaucaagguguucaccaccguggacaacaucaaccugcacacgcaggucguggacaugagcaugaccuacggccagcaguucggccccaccuaccuggacggggccgacgugaccaagaucaagccccacaacucccacgagggcaagacguucuacguccucccgaacgacgacacccugcgcguggaggccuucgaguacuaccacaccaccgaccccagcuuccuggggcgguacauguccgcccucaaccacacgaagaaguggaaguacccccaggugaacggccugaccagcaucaagugggccgacaacaacugcuaccuggcgaccgcccuccugacccugcagcagaucgagcucaaguucaaccccccggcccugcaggacgccuacuaccgcgcgcgggccggggaggccgccaacuucugcgcccugauccucgcguacugcaacaagacggucggcgagcugggcgacgugcgcgagaccauguccuaccuguuccagcacgccaaccucgacagcugcaagcggguccugaacguggugugcaagaccugcgggcagcagcagaccacccugaagggcgucgaggccgugauguacauggggacgcucuccuacgagcaguucaagaagggcgugcagauccccugcaccugcgggaagcaggccaccaaguaccugguccagcaggagagccccuucgugaugauguccgcccccccggcgcaguacgagcugaagcacggcaccuucacgugcgccagcgaguacaccggcaacuaccagugcgggcacuacaagcacaucaccuccaaggagacccucuacugcaucgacggcgcccugcugacgaagagcagcgaguacaaggggcccaucaccgacguguucuacaaggagaacuccuacaccaccacgaucaagcccgucaccuacaagcucgacggcguggugugcaccgagaucgaccccaagcuggacaacuacuacaagaaggacaacagcuacuucaccgagcagccgaucgaccugguccccaaccagcccuaccccaacgccuccuucgacaacuucaaguucgugugcgacaacaucaaguucgccgacgaccucaaccagcugacgggguacaagaagccggcgagccgcgagcugaaggugaccuucuuccccgaccucaacggcgacgucguggccaucgacuacaagcacuacacccccuccuucaagaagggcgccaagcugcugcacaagcccaucguguggcacgucaacaacgccaccaacaaggcgacguacaagccgaacaccuggugcauccggugccucuggagcaccaagcccguggagaccuccaacagcuucgacgugcugaaguccgaggacgcccaggggauggacaaccuggccugcgaggaccucaagcccgucagcgaggaggugguggagaaccccacgauccagaaggacguccuggagugcaacgugaagaccaccgagguggucggcgacaucauccugaagccggccaacaacucccucaagaucaccgaggagguggggcacacggaccugauggccgcguacguggacaacagcucccugaccaucaagaagcccaacgagcucagccgcguccugggccugaagacccucgccacccacgggcuggccgccgugaacuccgugcccugggacacgaucgccaacuacgcgaagccguuccugaacaaggucgugagcaccaccaccaacaucgugacgcgcugccucaaccgggucugcaccaacuacaugcccuacuucuucacccugcugcuccagcugugcaccuucacccgcuccacgaacagccggaucaaggccuccaugcccaccaccaucgccaagaacaccgugaagagcgugggcaaguucugccuggaggccagcuucaacuaccucaagucccccaacuucagcaagcugaucaacaucaucaucugguuccugcuccuguccgucugccugggcagccucaucuacuccacggccgcgcugggggugcugaugagcaaccucggcaugccguccuacugcaccggguaccgcgagggcuaccugaacagcaccaacgugaccaucgccacguacugcaccggcuccauccccugcagcgucugccuguccgggcucgacagccuggacaccuaccccucccuggagaccauccagaucacgaucagcuccuucaagugggaccucaccgccuucggccugguggccgagugguuccuggccuacauccucuucacccgguucuucuacgugcuggggcuggcggccaucaugcagcucuucuucagcuacuucgccguccacuucaucuccaacagcuggcugauguggcugaucaucaaccuggugcagauggcccccaucuccgcgauggugcgcauguacaucuucuucgccagcuucuacuacgucuggaagagcuacgugcacguggucgacggcugcaacuccagcaccugcaugaugugcuacaagcggaaccgcgccacgcggguggagugcaccaccaucgucaacggggugcgccgguccuucuacguguacgccaacggcggcaagggguucugcaagcuccacaacuggaacugcgucaacugcgacaccuucugcgccggcagcacguucaucuccgacgagguggcgcgcgaccugagccugcaguucaagcggccgaucaaccccaccgaccaguccagcuacaucguggacuccgucaccgugaagaacgggagcauccaccucuacuucgacaaggccggccagaagaccuacgagcgccacucccugagccacuucgugaaccuggacaaccuccgggccaacaacacgaaggggucccugcccaucaacgucaucguguucgacggcaagagcaagugcgaggaguccagcgccaaguccgccagcguguacuacucccagcugaugugccagcccauccuccugcuggaccaggcgcucgucagcgacgugggcgacagcgccgagguggccgucaagauguucgacgccuacgugaacaccuucuccagcaccuucaacgugccgauggagaagcugaagacccuggucgccacggcggaggccgagcucgccaagaacgugucccuggacaacgugcugagcaccuucaucuccgccgcgcgccagggguucgucgacagcgacguggagaccaaggacguggucgagugccucaagcugucccaccagagcgacaucgaggugaccggcgacuccugcaacaacuacaugcugacguacaacaagguggagaacaugaccccccgggaccucggggccugcaucgacugcagcgcccgccacaucaacgcccaggucgccaagucccacaacaucgcgcugaucuggaacgugaaggacuucaugagccuguccgagcagcuccggaagcagauccgcagcgccgccaagaagaacaaccugcccuucaagcugaccugcgccaccacgcgccagguggucaacguggugaccaccaagaucgcccucaagggcgggugaggacuagucccuguucccagagcccacuuuuuuuucuuuuuuugaaauaaaauagccugucuuucagaucucaaaggcucuuuucagagccaccaaaaaaaaaaaaaaaaaaaaaaaaaaaaaaaaaaaaaaaaaaaaaaaaaaaaaaaaaaaaaaaaaaaaaaaaaaaaaaaaaaaaaaaaaaaaaaaaaaaaa

SEQ ID NO: 19995 - RNA, 6113 nt, Artificial Sequence
  SARS-CoV-2__MT609593.1__non-structural protein 3 (NSP3) mRNA gc
aggagagucccgcagucggcguccagcggcucugcuuguucgugugugugucguugcaggccuuauucaagcuuaccauggcccccaccaaggugaccuucggcgacgacacggucaucgaggugcagggguacaagagcgugaacaucaccuucgagcuggacgagcgcaucgacaagguccucaacgagaagugcuccgccuacaccguggagcugggcaccgaggugaacgaguucgcgugcgucguggccgacgccgugaucaagacgcugcagccggucagcgagcuccugaccccccuggggaucgaccucgacgagugguccauggccaccuacuaccuguucgacgagagcggcgaguucaagcuggccucccacauguacugcagcuucuacccccccgacgaggacgaggaggagggggacugcgaggaggaggaguucgagccguccacccaguacgaguacggcacggaggacgacuaccagggcaagccccucgaguucggggcgaccagcgccgcccugcagcccgaggaggagcaggaggaggacuggcuggacgacgacucccagcagaccgugggccagcaggacgggagcgaggacaaccagaccacgaccauccagaccaucguggagguccagccccagcucgagauggagcugaccccgguggugcagacgaucgaggucaacuccuucagcggcuaccugaagcucaccgacaacguguacaucaagaacgccgacaucguggaggaggcgaagaaggucaagcccaccgugguggucaacgccgccaacguguaccugaagcacgggggcggcguggccggggcccugaacaaggcgaccaacaacacgaugcaggucgaguccgacgacuacaucgccaccaacggcccccucaagguggggggcagcugcguccuguccggccacaaccuggccaagcacugccuccacgugguggggcccaacgucaacaagggcgaggacauccagcugcugaagagcgccuacgagaacuucaaccagcacgaggugcuccuggccccgcugcucuccgcggggaucuucggcgccgaccccauccacagccugcgggugugcgucgacaccgugcgcaccaacguguaccuggccgucuucgacaagaaccucuacgacaagcugguguccagcuuccuggagaugaagagcgagaagcagguggagcagaagaucgccgagauccccaaggaggaggucaagcccuucaucacggaguccaagccgagcguggagcagcggaagcaggacgacaagaagaucaaggccugcguggaggaggucaccaccacccucgaggagacgaaguuccugaccgagaaccugcuccuguacaucgacaucaacgggaaccugcaccccgacuccgcgacccucgugagcgacaucgacaucaccuuccugaagaaggacgcccccuacaucgugggcgacgucgugcaggagggcgugcugacggccgucgugauccccaccaagaaggccgggggcaccaccgagaugcucgccaaggcgcugcgcaaggugccgacggacaacuacaucaccaccuaccccgggcagggccugaacggguacaccgucgaggaggccaagaccgugcucaagaagugcaaguccgccuucuacauccugcccagcaucaucuccaacgagaagcaggagauccugggcacggugagcuggaaccuccgggagaugcuggcccacgcggaggagacccgcaagcugaugcccgucugcguggagaccaaggccaucguguccaccauccagcggaaguacaagggcaucaagauccaggagggggucguggacuacggcgcccgcuucuacuucuacacgagcaagaccaccguggccucccugaucaacacccucaacgaccugaacgagacgcuggucaccaugccgcucggguacgugacccacggccugaaccuggaggaggccgcgcgguacaugcgcagccucaaggugcccgccaccgucuccgugagcucccccgacgccgugacggccuacaacggguaccugaccagcuccagcaagacccccgaggagcacuucaucgagaccaucucccuggccggcagcuacaaggacuggagcuacuccggccagagcacgcagcucgggaucgaguuccugaagcggggcgacaaguccgucuacuacaccagcaacccgaccaccuuccaccuggacggggaggugaucacguucgacaaccucaagacccugcugucccuccgcgaggugcggaccaucaaggucuucaccacgguggacaacaucaaccugcacacccagguggucgacaugagcaugaccuacggccagcaguucggccccaccuaccuggacggggcggacgugacgaagaucaagccccacaacucccacgagggcaagaccuucuacgugcucccgaacgacgacacccugcgcgucgaggccuucgaguacuaccacaccacggaccccagcuuccuggggcgguacauguccgcccucaaccacaccaagaaguggaaguacccccaggugaacggccugaccagcaucaagugggccgacaacaacugcuaccuggccaccgcgcuccugacgcugcagcagaucgagcucaaguucaaccccccggcccugcaggacgccuacuaccgcgcccgggcgggggaggccgccaacuucugcgcccugauccucgccuacugcaacaagaccgugggcgagcugggcgacguccgcgagaccauguccuaccuguuccagcacgcgaaccucgacagcugcaagcgggugcugaacgucgugugcaagaccugcgggcagcagcagaccacgcugaagggcguggaggccgucauguacauggggacccucuccuacgagcaguucaagaagggcgugcagauccccugcaccugcgggaagcaggccaccaaguaccuggugcagcaggagagccccuucgucaugauguccgcccccccggcccaguacgagcugaagcacggcacguucaccugcgcgagcgaguacaccggcaacuaccagugcgggcacuacaagcacaucaccuccaaggagacgcucuacugcaucgacggcgcccugcugaccaagagcagcgaguacaaggggcccaucaccgacguguucuacaaggagaacuccuacaccacgaccaucaagcccgugaccuacaagcucgacggcgucgugugcaccgagaucgaccccaagcuggacaacuacuacaagaaggacaacagcuacuucacggagcagccgaucgaccuggugcccaaccagcccuaccccaacgccuccuucgacaacuucaaguucgucugcgacaacaucaaguucgccgacgaccucaaccagcugaccggguacaagaagccggccagccgcgagcugaaggugaccuucuuccccgaccucaacggcgacguggucgcgaucgacuacaagcacuacacccccuccuucaagaagggcgccaagcugcugcacaagcccaucguguggcacgugaacaacgccacgaacaaggccaccuacaagccgaacaccuggugcauccggugccucuggagcaccaagcccgucgagacguccaacagcuucgacgugcugaaguccgaggacgcgcaggggauggacaaccuggccugcgaggaccucaagcccgugagcgaggaggucguggagaaccccaccauccagaaggacgugcuggagugcaacgucaagaccaccgagguggugggcgacaucauccugaagccggccaacaacucccucaagaucacggaggaggucgggcacaccgaccugauggccgccuacguggacaacagcucccugaccaucaagaagcccaacgagcucagccgcgugcugggccugaagacccucgcgacgcacgggcuggccgccgucaacuccgugcccugggacaccaucgccaacuacgccaagccguuccugaacaagguggucagcaccaccacgaacaucgugacccgcugccucaaccgggugugcaccaacuacaugcccuacuucuucacccugcugcuccagcugugcaccuucacgcgcuccaccaacagccggaucaaggcguccaugcccaccaccaucgccaagaacacggucaagagcgugggcaaguucugccuggaggccagcuucaacuaccucaagucccccaacuucagcaagcugaucaacaucaucaucugguuccugcuccuguccgugugccugggcagccucaucuacuccaccgccgcccuggggguccugaugagcaaccucggcaugccguccuacugcaccggguaccgcgagggcuaccugaacagcaccaacgugacgaucgcgaccuacugcaccggcuccauccccugcagcgugugccuguccgggcucgacagccuggacaccuaccccucccuggagacgauccagaucaccaucagcuccuucaagugggaccucaccgccuucggccuggucgccgagugguuccuggccuacauccucuucacccgguucuucuacgugcuggggcuggccgcgaucaugcagcucuucuucagcuacuucgccgugcacuucaucuccaacagcuggcugauguggcugaucaucaaccugguccagauggcccccaucuccgccauggugcgcauguacaucuucuucgcgagcuucuacuacguguggaagagcuacguccacgugguggacggcugcaacuccagcacgugcaugaugugcuacaagcggaaccgcgccacccgggucgagugcaccaccaucgugaacgggguccgccgguccuucuacguguacgccaacggcggcaagggguucugcaagcuccacaacuggaacugcgugaacugcgacacguucugcgccggcagcaccuucaucuccgacgaggucgcccgcgaccugagccugcaguucaagcggccgaucaaccccaccgaccaguccagcuacaucguggacuccgugaccgucaagaacgggagcauccaccucuacuucgacaaggcgggccagaagacguacgagcgccacucccugagccacuucgugaaccuggacaaccuccgggccaacaacaccaaggggucccugcccaucaacgugaucgucuucgacggcaagagcaagugcgaggaguccagcgccaaguccgccagcguguacuacucccagcugaugugccagcccauccuccugcuggaccaggcccucgugagcgacgucggcgacagcgcggagguggccgugaagauguucgacgccuacgucaacaccuucuccagcaccuucaacgugccgauggagaagcugaagacgcugguggccaccgccgaggcggagcucgccaagaacgucucccuggacaacgugcugagcaccuucaucuccgccgcccgccagggguucguggacagcgacgucgagaccaaggacgugguggagugccucaagcugucccaccagagcgacaucgaggucacgggcgacuccugcaacaacuacaugcugaccuacaacaagguggagaacaugaccccccgggaccucggggcgugcaucgacugcagcgcccgccacaucaacgcccagguggccaagucccacaacaucgcccugaucuggaacgucaaggacuucaugagccuguccgagcagcuccggaagcagauccgcagcgcggccaagaagaacaaccugcccuucaagcugaccugcgccacgacccgccagguggugaacgucgugaccaccaagaucgcccucaagggcgggugaggacuagucccuguucccagagcccacuuuuuuuucuuuuuuugaaauaaaauagccugucuuucagaucucaaaggcucuuuucagagccaccaaaaaaaaaaaaaaaaaaaaaaaaaaaaaaaaaaaaaaaaaaaaaaaaaaaaaaaaaaaaaaaaaaaaaaaaaaaaaaaaaaaaaaaaaaaaaaaaaaaaa

SEQ ID NO: 19996 - RNA, 6113 nt, Artificial Sequence
  SARS-CoV-2__MT609599.1__non-structural protein 3 (NSP3) mRNA gc
aggagagucccgcagucggcguccagcggcucugcuuguucgugugugugucguugcaggccuuauucaagcuuaccauggcccccaccaaggugaccuucggcgacgacacggucaucgaggugcagggguacaagagcgugaacaucaccuucgagcuggacgagcgcaucgacaagguccucaacgagaagugcuccgccuacaccguggagcugggcaccgaggugaacgaguucgcgugcgucguggccgacgccgugaucaagacgcugcagccggucagcgagcuccugaccccccuggggaucgaccucgacgagugguccauggccaccuacuaccuguucgacgagagcggcgaguucaagcuggccucccacauguacugcagcuucuacccccccgacgaggacgaggaggagggggacugcgaggaggaggaguucgagccguccacccaguacgaguacggcacggaggacgacuaccagggcaagccccucgaguucggggcgaccagcgccgcccugcagcccgaggaggagcaggaggaggacuggcuggacgacgacucccagcagaccgugggccagcaggacgggagcgaggacaaccagaccacgaccauccagaccaucguggagguccagccccagcucgagauggagcugaccccgguggugcagacgaucgaggucaacuccuucagcggcuaccugaagcucaccgacaacguguacaucaagaacgccgacaucguggaggaggcgaagaaggucaagcccaccgugguggucaacgccgccaacguguaccugaagcacgggggcggcguggccggggcccugaacaaggcgaccaacaacgccaugcaggucgaguccgacgacuacaucgccacgaacggcccccucaagguggggggcagcugcguccuguccggccacaaccuggccaagcacugccuccacgugguggggcccaacgucaacaagggcgaggacauccagcugcugaagagcgccuacgagaacuucaaccagcacgaggugcuccuggcgccgcugcucuccgccgggaucuucggcgccgaccccauccacagccugcgggugugcgucgacaccgugcgcaccaacguguaccuggccgucuucgacaagaaccucuacgacaagcugguguccagcuuccuggagaugaagagcgagaagcagguggagcagaagaucgccgagauccccaaggaggaggucaagcccuucaucaccgaguccaagccgagcguggagcagcggaagcaggacgacaagaagaucaaggcgugcguggaggaggucacgaccacccucgaggagaccaaguuccugacggagaaccugcuccuguacaucgacaucaacgggaaccugcaccccgacuccgccacccucgugagcgacaucgacaucaccuuccugaagaaggacgcccccuacaucgugggcgacgucgugcaggagggcgugcugaccgccgucgugauccccacgaagaaggccgggggcaccaccgagaugcucgcgaaggcccugcgcaaggugccgaccgacaacuacaucacgaccuaccccgggcagggccugaacggguacaccgucgaggaggccaagaccgugcucaagaagugcaaguccgccuucuacauccugcccagcaucaucuccaacgagaagcaggagauccugggcaccgugagcuggaaccuccgggagaugcuggcgcacgccgaggagacgcgcaagcugaugcccgucugcguggagaccaaggccaucguguccaccauccagcggaaguacaagggcaucaagauccaggagggggucguggacuacggcgcccgcuucuacuucuacaccagcaagacgaccguggccucccugaucaacacccucaacgaccugaacgagacccuggucacgaugccgcucggguacgugacccacggccugaaccuggaggaggcggcccgguacaugcgcagccucaaggugcccgccaccgucuccgugagcucccccgacgccgugaccgccuacaacggguaccugacgagcuccagcaagacccccgaggagcacuucaucgagaccaucucccuggcgggcagcuacaaggacuggagcuacuccggccagagcacccagcucgggaucgaguuccugaagcggggcgacaaguccgucuacuacacgagcaacccgaccaccuuccaccuggacggggaggugaucaccuucgacaaccucaagacgcugcugucccuccgcgaggugcggaccaucaaggucuucaccaccguggacaacaucaaccugcacacgcagguggucgacaugagcaugaccuacggccagcaguucggccccaccuaccuggacggggccgacgugaccaagaucaagccccacaacucccacgagggcaagacguucuacgugcucccgaacgacgacacccugcgcgucgaggccuucgaguacuaccacaccaccgaccccagcuuccuggggcgguacauguccgcccucaaccacacgaagaaguggaaguacccccaggugaacggccugaccagcaucaagugggccgacaacaacugcuaccuggcgaccgcccuccugacccugcagcagaucgagcucaaguucaaccccccggcccugcaggacgccuacuaccgcgcgcgggccggggaggccgccaacuucugcgcccugauccucgcguacugcaacaagacggugggcgagcugggcgacguccgcgagaccauguccuaccuguuccagcacgccaaccucgacagcugcaagcgggugcugaacgucgugugcaagaccugcgggcagcagcagaccacccugaagggcguggaggccgucauguacauggggacgcucuccuacgagcaguucaagaagggcgugcagauccccugcaccugcgggaagcaggccaccaaguaccuggugcagcaggagagccccuucgucaugauguccgcccccccggcgcaguacgagcugaagcacggcaccuucacgugcgccagcgaguacaccggcaacuaccagugcgggcacuacaagcacaucaccuccaaggagacccucuacugcaucgacggcgcccugcugacgaagagcagcgaguacaaggggcccaucaccgacguguucuacaaggagaacuccuacaccaccacgaucaagcccgugaccuacaagcucgacggcgucgugugcaccgagaucgaccccaagcuggacaacuacuacaagaaggacaacagcuacuucaccgagcagccgaucgaccuggugcccaaccagcccuaccccaacgccuccuucgacaacuucaaguucgucugcgacaacaucaaguucgccgacgaccucaaccagcugacgggguacaagaagccggcgagccgcgagcugaaggugaccuucuuccccgaccucaacggcgacguggucgccaucgacuacaagcacuacacccccuccuucaagaagggcgccaagcugcugcacaagcccaucguguggcacgugaacaacgccaccaacaaggcgacguacaagccgaacaccuggugcauccggugccucuggagcaccaagcccgucgagaccuccaacagcuucgacgugcugaaguccgaggacgcccaggggauggacaaccuggccugcgaggaccucaagcccgugagcgaggaggucguggagaaccccacgauccagaaggacgugcuggagugcaacgucaagaccaccgagguggugggcgacaucauccugaagccggccaacaacauccucaagaucaccgaggaggucgggcacacggaccugauggccgcguacguggacaacuccagccugaccaucaagaagcccaacgagcucucccgcgugcugggccugaagacccucgccacccacgggcuggccgccgucaacagcgugcccugggacacgaucgccaacuacgcgaagccguuccugaacaagguggucuccaccaccaccaacaucgugacgcgcugccucaaccgggugugcaccaacuacaugcccuacuucuucacccugcugcuccagcugugcaccuucacccgcagcacgaacucccggaucaaggccagcaugcccaccaccaucgccaagaacaccgucaaguccgugggcaaguucugccuggaggccagcuucaacuaccucaagagccccaacuucuccaagcugaucaacaucaucaucugguuccugcuccugagcgugugccugggcucccucaucuacagcacggccgcgcuggggguccugauguccaaccucggcaugccgagcuacugcaccggguaccgcgagggcuaccugaacuccaccaacgugaccaucgccacguacugcaccggcagcauccccugcuccgugugccugagcgggcucgacucccuggacaccuaccccagccuggagaccauccagaucacgaucuccagcuucaagugggaccucaccgccuucggccuggucgccgagugguuccuggccuacauccucuucacccgguucuucuacgugcuggggcuggcggccaucaugcagcucuucuucuccuacuucgccgugcacuucaucagcaacuccuggcugauguggcugaucaucaaccugguccagauggcccccaucagcgcgauggugcgcauguacaucuucuucgccuccuucuacuacguguggaagagcuacguccacgugguggacggcugcaacagcuccaccugcaugaugugcuacaagcggaaccgcgccacgcgggucgagugcaccaccaucgugaacgggguccgccggagcuucuacguguacgccaacggcggcaagggguucugcaagcuccacaacuggaacugcgugaacugcgacaccuucugcgccggcuccacguucaucagcgacgaggucgcgcgcgaccugucccugcaguucaagcggccgaucaaccccaccgaccagagcuccuacaucguggacagcgugaccgucaagaacggguccauccaccucuacuucgacaaggccggccagaagaccuacgagcgccacagccugucccacuucgugaaccuggacaaccuccgggccaacaacacgaaggggagccugcccaucaacgugaucgucuucgacggcaaguccaagugcgaggagagcuccgccaagagcgccuccguguacuacagccagcugaugugccagcccauccuccugcuggaccaggcgcucguguccgacgucggcgacagcgccgagguggccgugaagauguucgacgccuacgucaacaccuucagcuccaccuucaacgugccgauggagaagcugaagacccugguggccacggcggaggccgagcucgccaagaacgucagccuggacaacgugcuguccaccuucaucagcgccgcgcgccagggguucguggacuccgacgucgagaccaaggacgugguggagugccucaagcugagccaccaguccgacaucgaggucaccggcgacagcugcaacaacuacaugcugacguacaacaagguggagaacaugaccccccgggaccucggggccugcaucgacugcuccgcccgccacaucaacgcccagguggccaagagccacaacaucgcgcugaucuggaacgucaaggacuucaugucccugagcgagcagcuccggaagcagauccgcuccgccgccaagaagaacaaccugcccuucaagcugaccugcgccaccacgcgccagguggugaacgucgugaccaccaagaucgcccucaagggcgggugaggacuagucccuguucccagagcccacuuuuuuuucuuuuuuugaaauaaaauagccugucuuucagaucucaaaggcucuuuucagagccaccaaaaaaaaaaaaaaaaaaaaaaaaaaaaaaaaaaaaaaaaaaaaaaaaaaaaaaaaaaaaaaaaaaaaaaaaaaaaaaaaaaaaaaaaaaaaaaaaaaaaa

SEQ ID NO: 19997 - RNA, 6113 nt, Artificial Sequence
  SARS-CoV-2__MT612115.1__non-structural protein 3 (NSP3) mRNA gc
aggagagucccgcagucggcguccagcggcucugcuuguucgugugugugucguugcaggccuuauucaagcuuaccauggcccccaccaaggugaccuucggcgacgacacggucaucgaggugcagggguacaagagcgugaacaucaccuucgagcuggacgagcgcaucgacaagguccucaacgagaagugcuccgccuacaccguggagcugggcaccgaggugaacgaguucgcgugcgucguggccgacgccgugaucaagacgcugcagccggucagcgagcuccugaccccccuggggaucgaccucgacgagugguccauggccaccuacuaccuguucgacgagagcggcgaguucaagcuggccucccacauguacugcagcuucuacccccccgacgaggacgaggaggagggggacugcgaggaggaggaguucgagccguccacccaguacgaguacggcacggaggacgacuaccagggcaagccccucgaguucggggcgaccagcgccgcccugcagcccgaggaggagcaggaggaggacuggcuggacgacgacucccagcagaccgugggccagcaggacgggagcgaggacaaccagaccaucacgauccagaccaucguggagguccagccccagcucgagauggagcugaccccgguggugcagaccaucgaggucaacuccuucagcggcuaccugaagcucacggacaacguguacaucaagaacgccgacaucguggaggaggcgaagaaggucaagcccaccgugguggucaacgccgccaacguguaccugaagcacgggggcggcguggccggggcccugaacaaggcgaccaacaacgccaugcaggucgaguccgacgacuacaucgccaccaacggcccccucaagguggggggcagcugcguccuguccggccacaaccuggccaagcacugccuccacgugguggggcccaacgucaacaagggcgaggacauccagcugcugaagagcgccuacgagaacuucaaccagcacgaggugcuccuggcgccgcugcucuccgccgggaucuucggcgccgaccccauccacagccugcgggugugcgucgacacggugcgcaccaacguguaccuggccgucuucgacaagaaccucuacgacaagcugguguccagcuuccuggagaugaagagcgagaagcagguggagcagaagaucgccgagauccccaaggaggaggucaagcccuucaucaccgaguccaagccgagcguggagcagcggaagcaggacgacaagaagaucaaggcgugcguggaggaggucaccacgacccucgaggagaucaaguuccugaccgagaaccugcuccuguacaucgacaucaacgggaaccugcaccccgacuccgccacccucgugagcgacaucgacaucacguuccugaagaaggacgcccccuacaucgugggcgacgucgugcaggagggcgugcugaccgccgucgugauccccaccaagaaggccgggggcaccacggagaugcucgcgaaggcccugcgcaaggugccgaccgacaacuacaucaccaccuaccccgggcagggccugaacggguacacggucgaggaggccaagaccgugcucaagaagugcaaguccgccuucuacauccugcccagcaucaucuccaacgagaagcaggagauccugggcaccgugagcuggaaccuccgggagaugcuggcgcacgccgaggagacccgcaagcugaugcccgucugcguggagaccaaggccaucguguccacgauccagcggaaguacaagggcaucaagauccaggagggggucguggacuacggcgcccgcuucuacuucuacaccagcaagaccaccguggccucccugaucaacacgcucaacgaccugaacgagacccuggucaccaugccgcucggguacgugacccacggccugaaccuggaggaggcggcccgguacaugcgcagccucaaggugcccgccacggucuccgugagcucccccgacgccgugaccgccuacaacggguaccugaccagcuccagcaagacccccgaggagcacuucaucgagacgaucucccuggcgggcagcuacaaggacuggagcuacuccggccagagcacccagcucgggaucgaguuccugaagcggggcgacaaguccgucuacuacaccagcaacccgaccacguuccaccuggacggggaggugaucaccuucgacaaccucaagacccugcugucccuccgcgaggugcggaccaucaaggucuucacgaccguggacaacaucaaccugcacacccagguggucgacaugagcaugaccuacggccagcaguucggccccacguaccuggacggggccgacgugaccaagaucaagccccacaacucccacgagggcaagaccuucuacgugcucccgaacgacgacacccugcgcgucgaggccuucgaguacuaccacacgaccgaccccagcuuccuggggcgguacauguccgcccucaaccacaccaagaaguggaaguacccccaggugaacggccugaccagcaucaagugggccgacaacaacugcuaccuggcgacggcccuccugacccugcagcagaucgagcucaaguucaaccccccggcccugcaggacgccuacuaccgcgcgcgggccggggaggccgccaacuucugcgcccugauccucgcguacugcaacaagaccgugggcgagcugggcgacguccgcgagaccauguccuaccuguuccagcacgccaaccucgacagcugcaagcgggugcugaacgucgugugcaagacgugcgggcagcagcagaccacccugaagggcguggaggccgucauguacauggggacccucuccuacgagcaguucaagaagggcgugcagauccccugcaccugcgggaagcaggccacgaaguaccuggugcagcaggagagccccuucgucaugauguccgcccccccggcgcaguacgagcugaagcacggcaccuucaccugcgccagcgaguacaccggcaacuaccagugcgggcacuacaagcacaucacguccaaggagacccucuacugcaucgacggcgcccugcugaccaagagcagcgaguacaaggggcccaucaccgacguguucuacaaggagaacuccuacacgaccaccaucaagcccgugaccuacaagcucgacggcgucgugugcacggagaucgaccccaagcuggacaacuacuacaagaaggacaacagcuacuucaccgagcagccgaucgaccuggugcccaaccagcccuaccccaacgccuccuucgacaacuucaaguucgucugcgacaacaucaaguucgccgacgaccucaaccagcugaccggguacaagaagccggcgagccgcgagcugaaggugaccuucuuccccgaccucaacggcgacguggucgccaucgacuacaagcacuacacgcccuccuucaagaagggcgccaagcugcugcacaagcccaucguguggcacgugaacaacgccaccaacaaggcgaccuacaagccgaacaccuggugcauccggugccucuggagcacgaagcccgucgagaccuccaacagcuucgacgugcugaaguccgaggacgcccaggggauggacaaccuggccugcgaggaccucaagcccgugagcgaggaggucguggagaaccccaccauccagaaggacgugcuggagugcaacgucaagaccacggagguggugggcgacaucauccugaagccggccaacaacucccucaagaucaccgaggaggucgggcacaccgaccugauggccgcguacguggacaacagcucccugaccaucaagaagcccaacgagcucagccgcgugcugggccugaagacgcucgccacccacgggcuggccgccgucaacuccgugcccugggacaccaucgccaacuacgcgaagccguuccugaacaagguggucagcaccacgaccaacaucgugacccgcugccucaaccgggugugcaccaacuacaugcccuacuucuucacgcugcugcuccagcugugcaccuucacccgcuccaccaacagccggaucaaggccuccaugcccaccacgaucgccaagaacaccgucaagagcgugggcaaguucugccuggaggccagcuucaacuaccucaagucccccaacuucagcaagcugaucaacaucaucaucugguuccugcuccuguccgugugccugggcagccucaucuacuccaccgccgcgcuggggguccugaugagcaaccucggcaugccguccuacugcaccggguaccgcgagggcuaccugaacagcacgaacgugaccaucgccaccuacugcaccggcuccauccccugcagcgugugccuguccgggcucgacagccuggacacguaccccucccuggagaccauccagaucaccaucagcuccuucaagugggaccucaccgccuucggccuggucgccgagugguuccuggccuacauccucuucacgcgguucuucuacgugcuggggcuggcggccaucaugcagcucuucuucagcuacuucgccgugcacuucaucuccaacagcuggcugauguggcugaucaucaaccugguccagauggcccccaucuccgcgauggugcgcauguacaucuucuucgccagcuucuacuacguguggaagagcuacguccacgugguggacggcugcaacuccagcaccugcaugaugugcuacaagcggaaccgcgccacccgggucgagugcaccacgaucgugaacgggguccgccgguccuucuacguguacgccaacggcggcaagggguucugcaagcuccacaacuggaacugcgugaacugcgacaccuucugcgccggcagcaccuucaucuccgacgaggucgcgcgcgaccugagccugcaguucaagcggccgaucaaccccaccgaccaguccagcuacaucguggacuccgugacggucaagaacgggagcauccaccucuacuucgacaaggccggccagaagaccuacgagcgccacucccugagccacuucgugaaccuggacaaccuccgggccaacaacaccaaggggucccugcccaucaacgugaucgucuucgacggcaagagcaagugcgaggaguccagcgccaaguccgccagcguguacuacucccagcugaugugccagcccauccuccugcuggaccaggcgcucgugagcgacgucggcgacagcgccgagguggccgugaagauguucgacgccuacgucaacaccuucuccagcacguucaacgugccgauggagaagcugaagacccugguggccaccgcggaggccgagcucgccaagaacgucucccuggacaacgugcugagcaccuucaucuccgccgcgcgccagggguucguggacagcgacgucgagacgaaggacgugguggagugccucaagcugucccaccagagcgacaucgaggucaccggcgacuccugcaacaacuacaugcugaccuacaacaagguggagaacaugaccccccgggaccucggggccugcaucgacugcagcgcccgccacaucaacgcccagguggccaagucccacaacaucgcgcugaucuggaacgucaaggacuucaugagccuguccgagcagcuccggaagcagauccgcagcgccgccaagaagaacaaccugcccuucaagcugacgugcgccaccacccgccagguggugaacgucgugaccacgaagaucgcccucaagggcgggugaggacuagucccuguucccagagcccacuuuuuuuucuuuuuuugaaauaaaauagccugucuuucagaucucaaaggcucuuuucagagccaccaaaaaaaaaaaaaaaaaaaaaaaaaaaaaaaaaaaaaaaaaaaaaaaaaaaaaaaaaaaaaaaaaaaaaaaaaaaaaaaaaaaaaaaaaaaaaaaaaaaaa

SEQ ID NO: 19998 - RNA, 6113 nt, Artificial Sequence
  SARS-CoV-2__MT601281.1__non-structural protein 3 (NSP3) mRNA gc
aggagagucccgcagucggcguccagcggcucugcuuguucgugugugugucguugcaggccuuauucaagcuuaccauggcccccaccaaggugaccuucggcgacgacacggucaucgaggugcagggguacaagagcgugaacaucaccuucgagcuggacgagcgcaucgacaagguccucaacgagaagugcuccgccuacaccguggagcugggcaccgaggugaacgaguucgcgugcgucguggccgacgccgugaucaagacgcugcagccggucagcgagcuccugaccccccuggggaucgaccucgacgagugguccauggccaccuacuaccuguucgacgagagcggcgaguucaagcuggccucccacauguacugcagcuucuacccccccgacgaggacgaggaggagggggacugcgaggaggaggaguucgagccguccacccaguacgaguacggcacggaggacgacuaccagggcaagccccucgaguucggggcgaccagcgccgcccugcagcccgaggaggagcaggaggaggacuggcuggacgacgacucccagcagaccgugggccagcaggacgggagcgaggacaaccagaccacgaccauccagaccaucguggagguccagccccagcucgagauggagcugaccccgguggugcagacgaucgaggucaacuccuucagcggcuaccugaagcucaccgacaacguguacaucaagaacgccgacaucguggaggaggcgaagaaggucaagcccaccgugguggucaacgccgccaacguguaccugaagcacgggggcggcguggccggggcccugaacaaggcgaccaacaacgccaugcaggucgaguccgacgacuacaucgccacgaacggcccccucaagguggggggcagcugcguccuguccggccacaaccuggccaagcacugccuccacgugguggggcccaacgucaacaagggcgaggacauccagcugcugaagagcgccuacgagaacuucaaccagcacgaggugcuccuggcgccgcugcucuccgccgggaucuucggcgccgaccccauccacagccugcgggugugcgucgacaccgugcgcaccaacguguaccuggccgucuucgacaagaaccucuacgacaagcugguguccagcuuccuggagaugaagagcgagaagcagguggagcagaagaucgccgagauccccaaggaggaggucaagcccuucaucaccgaguccaagccgagcguggagcagcggaagcaggacgacaagaagaucaaggcgugcguggaggaggucacgaccacccucgaggagaccaaguuccugacggagaaccugcuccuguacaucgacaucaacgggaaccugcaccccgacuccgccacccucgugagcgacaucgacaucaccuuccugaagaaggacgcccccuacaucgugggcgacgucgugcaggagggcgugcugaccgccgucgugauccccacgaagaaggccgggggcaccaccgagaugcucgcgaaggcccugcgcaaggugccgaccgacaacuacaucacgaccuaccccgggcagggccugaacggguacaccgucgaggaggccaagaccgugcucaagaagugcaaguccgccuucuacauccugcccagcaucaucuccaacgagaagcaggagauccugggcaccgugagcuggaaccuccgggagaugcuggcgcacgccgaggagacgcgcaagcugaugcccgucugcguggagaccaaggccaucguguccaccauccagcggaaguacaagggcaucaagauccaggagggggucguggacuacggcagccgcuucuacuucuacaccuccaagacgaccguggccagccugaucaacacccucaacgaccugaacgagacccuggucacgaugccgcucggguacgugacccacggccugaaccuggaggaggccgcgcgguacaugcgcucccucaaggugcccgccaccgucagcguguccagccccgacgccgugaccgccuacaacggguaccugacguccagcuccaagacccccgaggagcacuucaucgagaccaucagccuggccggcagcuacaaggacugguccuacagcggccaguccacccagcucgggaucgaguuccugaagcggggcgacaagagcgucuacuacacguccaacccgaccaccuuccaccuggacggggaggugaucaccuucgacaaccucaagacgcugcugagccuccgcgaggugcggaccaucaaggucuucaccaccguggacaacaucaaccugcacacgcagguggucgacauguccaugaccuacggccagcaguucggccccaccuaccuggacggggcggacgugaccaagaucaagccccacaacagccacgagggcaagacguucuacgugcucccgaacgacgacacccugcgcgucgaggccuucgaguacuaccacaccaccgaccccuccuuccuggggcgguacaugagcgcccucaaccacacgaagaaguggaaguacccccaggugaacggccugaccuccaucaagugggccgacaacaacugcuaccuggccaccgcgcuccugacccugcagcagaucgagcucaaguucaaccccccggcccugcaggacgccuacuaccgcgcccgggcgggggaggccgccaacuucugcgcccugauccucgccuacugcaacaagacggugggcgagcugggcgacguccgcgagaccaugagcuaccuguuccagcacgcgaaccucgacuccugcaagcgggugcugaacgucgugugcaagaccugcgggcagcagcagaccacccugaagggcguggaggccgucauguacauggggacgcucagcuacgagcaguucaagaagggcgugcagauccccugcaccugcgggaagcaggccaccaaguaccuggugcagcaggagucccccuucgucaugaugagcgcccccccggcccaguacgagcugaagcacggcaccuucacgugcgcguccgaguacaccggcaacuaccagugcgggcacuacaagcacaucaccagcaaggagacccucuacugcaucgacggcgcccugcugacgaagagcuccgaguacaaggggcccaucaccgacguguucuacaaggagaacagcuacaccaccacgaucaagcccgugaccuacaagcucgacggcgucgugugcaccgagaucgaccccaagcuggacaacuacuacaagaaggacaacuccuacuucaccgagcagccgaucgaccuggugcccaaccagcccuaccccaacgccagcuucgacaacuucaaguucgucugcgacaacaucaaguucgccgacgaccucaaccagcugacgggguacaagaagccggccucccgcgagcugaaggugaccuucuuccccgaccucaacggcgacguggucgcgaucgacuacaagcacuacacccccagcuucaagaagggcgccaagcugcugcacaagcccaucguguggcacgugaacaacgccaccaacaaggccacguacaagccgaacaccuggugcauccggugccucugguccaccaagcccgucgagaccagcaacuccuucgacgugcugaagagcgaggacgcgcaggggauggacaaccuggccugcgaggaccucaagcccguguccgaggaggucguggagaaccccacgauccagaaggacgugcuggagugcaacgucaagaccaccgagguggugggcgacaucauccugaagccggccaacaacagccucaagaucaccgaggaggucgggcacacggaccugauggccgccuacguggacaacuccagccugaccaucaagaagcccaacgagcucucccgcgugcugggccugaagacccucgcgacccacgggcuggccgccgucaacagcgugcccugggacacgaucgccaacuacgccaagccguuccugaacaagguggucuccaccaccaccaacaucgugacgcgcugccucaaccgggugugcaccaacuacaugcccuacuucuucacccugcugcuccagcugugcaccuucacccgcagcacgaacucccggaucaaggcgagcaugcccaccaccaucgccaagaacaccgucaagagcgugggcaaguucugccuggaggccuccuucaacuaccucaagagccccaacuucuccaagcugaucaacaucaucaucugguuccugcuccugagcgugugccugggcucccucaucuacagcacggccgcccuggggguccugauguccaaccucggcaugccgagcuacugcaccggguaccgcgagggcuaccugaacuccaccaacgugaccaucgcgacguacugcaccggcagcauccccugcuccgugugccugagcgggcucgacucccuggacaccuaccccagccuggagaccauccagaucacgaucuccagcuucaagugggaccucaccgccuucggccuggucgccgagugguuccuggccuacauccucuucacccgguucuucuacgugcuggggcuggccgcgaucaugcagcucuucuucuccuacuucgccgugcacuucaucagcaacuccuggcugauguggcugaucaucaaccugguccagauggcccccaucagcgccauggugcgcauguacaucuucuucgcgagcuucuacuacguguggaaguccuacguccacgugguggacggcugcaacagcuccaccugcaugaugugcuacaagcggaaccgcgccacgcgggucgagugcaccaccaucgugaacgggguccgccggagcuucuacguguacgccaacggcggcaagggguucugcaagcuccacaacuggaacugcgugaacugcgacaccuucugcgccggcuccacguucaucagcgacgaggucgcccgcgaccugucccugcaguucaagcggccgaucaaccccaccgaccagagcuccuacaucguggacagcgugaccgucaagaacggguccauccaccucuacuucgacaaggcgggccagaagaccuacgagcgccacagccugucccacuucgugaaccuggacaaccuccgggccaacaacacgaaggggagccugcccaucaacgugaucgucuucgacggcaaguccaagugcgaggagagcuccgccaagagcgccuccguguacuacagccagcugaugugccagcccauccuccugcuggaccaggcccucgugagcgacgucggcgacuccgcggagguggccgugaagauguucgacgccuacgucaacaccuucagcuccaccuucaacgugccgauggagaagcugaagacccugguggccacggccgaggcggagcucgccaagaacgucagccuggacaacgugcuguccaccuucaucagcgccgcccgccagggguucguggacuccgacgucgagaccaaggacgugguggagugccucaagcugagccaccaguccgacaucgaggucaccggcgacagcugcaacaacuacaugcugacguacaacaagguggagaacaugaccccccgggaccucggggcgugcaucgacugcuccgcccgccacaucaacgcccagguggccaagagccacaacaucgcccugaucuggaacgucaaggacuucaugucccugagcgagcagcuccggaagcagauccgcuccgcggccaagaagaacaaccugcccuucaagcugaccugcgccaccacgcgccagguggugaacgucgugaccaccaagaucgcccucaagggcgggugaggacuagucccuguucccagagcccacuuuuuuuucuuuuuuugaaauaaaauagccugucuuucagaucucaaaggcucuuuucagagccaccaaaaaaaaaaaaaaaaaaaaaaaaaaaaaaaaaaaaaaaaaaaaaaaaaaaaaaaaaaaaaaaaaaaaaaaaaaaaaaaaaaaaaaaaaaaaaaaaaaaaa

SEQ ID NO: 19999 - RNA, 6113 nt, Artificial Sequence
  SARS-CoV-2__MT601291.1__non-structural protein 3 (NSP3) mRNA gc
aggagagucccgcagucggcguccagcggcucugcuuguucgugugugugucguugcaggccuuauucaagcuuaccauggcccccaccaaggugaccuucggcgacgacacggucaucgaggugcagggguacaagagcgugaacaucaccuucgagcuggacgagcgcaucgacaagguccucaacgagaagugcuccgccuacaccguggagcugggcaccgaggugaacgaguucgcgugcgucguggccgacgccgugaucaagacgcugcagccggucagcgagcuccugaccccccuggggaucgaccucgacgagugguccauggccaccuacuaccuguucgacgagagcggcgaguucaagcuggccucccacauguacugcagcuucuacccccccgacgaggacgaggaggagggggacugcgaggaggaggaguucgagccguccacccaguacgaguacggcacggaggacgacuaccagggcaagccccucgaguucggggcgaccagcgccgcccugcagcccgaggaggagcaggaggaggacuggcuggacgacgacucccagcagaccgugggccagcaggacgggagcgaggacaaccagaccacgaccauccagaccaucguggagguccagccccagcucgagauggagcugaccccgguggugcagacgaucgaggucaacuccuucagcggcuaccugaagcucaccgacaacguguacaucaagaacgccgacaucguggaggaggcgaagaaggucaagcccaccgugguggucaacgccgccaacguguaccugaagcacgggggcggcguggccggggcccugaacaaggcgaccaacaacgccaugcaggucgaguccgacgacuacaucgccacgaacggcccccucaagguggggggcagcugcguccuguccggccacaaccuggccaagcacugccuccacgugguggggcccaacgucaacaagggcgaggacauccagcugcugaagagcgccuacgagaacuucaaccagcacgaggugcuccuggcgccgcugcucuccgccgggaucuucggcgccgaccccauccacagccugcgggugugcgucgacaccgugcgcaccaacguguaccuggccgucuucgacaagaaccucuacgacaagcugguguccagcuuccuggagaugaagagcgagaagcagguggagcagaagaucgccgagauccccaaggaggaggucaagcccuucaucaccgaguccaagccgagcguggagcagcggaagcaggacgacaagaagaucaaggcgugcguggaggaggucacgaccacccucgaggagaccaaguuccugacggagaaccugcuccuguacaucgacaucaacgggaaccugcacuccgacagcgccacccucguguccgacaucgacaucaccuuccugaagaaggacgcccccuacaucgugggcgacgucgugcaggagggcgugcugaccgccgucgugauccccacgaagaaggccgggggcaccaccgagaugcucgcgaaggcccugcgcaaggugcccaccgacaacuacaucacgaccuacccggggcagggccugaacggguacaccgucgaggaggccaagaccgugcucaagaagugcaagagcgccuucuacauccugcccuccaucaucagcaacgagaagcaggagauccugggcaccguguccuggaaccuccgggagaugcuggcgcacgccgaggagacgcgcaagcugaugcccgucugcguggagaccaaggccaucgugagcaccauccagcggaaguacaagggcaucaagauccaggagggggucguggacuacggcgcccgcuucuacuucuacaccuccaagacgaccguggccagccugaucaacacccucaacgaccugaacgagacccuggucacgaugccccucggguacgugacccacggccugaaccuggaggaggcggcccgguacaugcgcucccucaaggugccggccaccgucagcguguccagccccgacgccgugaccgccuacaacggguaccugacguccagcuccaagacccccgaggagcacuucaucgagaccaucagccuggcgggcagcuacaaggacugguccuacagcggccaguccacccagcucgggaucgaguuccugaagcggggcgacaagagcgucuacuacacguccaaccccaccaccuuccaccuggacggggaggugaucaccuucgacaaccucaagacgcugcugagccuccgcgaggugcggaccaucaaggucuucaccaccguggacaacaucaaccugcacacgcagguggucgacauguccaugaccuacggccagcaguucggcccgaccuaccuggacggggccgacgugaccaagaucaagccccacaacagccacgagggcaagacguucuacgugcuccccaacgacgacacccugcgcgucgaggccuucgaguacuaccacaccaccgacccguccuuccuggggcgguacaugagcgcccucaaccacacgaagaaguggaaguacccccaggugaacggccugaccuccaucaagugggccgacaacaacugcuaccuggcgaccgcccuccugacccugcagcagaucgagcucaaguucaacccccccgcccugcaggacgccuacuaccgcgcgcgggccggggaggccgccaacuucugcgcccugauccucgcguacugcaacaagacggugggcgagcugggcgacguccgcgagaccaugagcuaccuguuccagcacgccaaccucgacuccugcaagcgggugcugaacgucgugugcaagaccugcgggcagcagcagaccacccugaagggcguggaggccgucauguacauggggacgcucagcuacgagcaguucaagaagggcgugcagaucccgugcaccugcgggaagcaggccaccaaguaccuggugcagcaggagucccccuucgucaugaugagcgccccccccgcgcaguacgagcugaagcacggcaccuucacgugcgccuccgaguacaccggcaacuaccagugcgggcacuacaagcacaucaccagcaaggagacccucuacugcaucgacggcgcccugcugacgaagagcuccgaguacaaggggccgaucaccgacguguucuacaaggagaacagcuacaccaccacgaucaagcccgugaccuacaagcucgacggcgucgugugcaccgagaucgaccccaagcuggacaacuacuacaagaaggacaacuccuacuucaccgagcagcccaucgaccuggugccgaaccagcccuaccccaacgccagcuucgacaacuucaaguucgucugcgacaacaucaaguucgccgacgaccucaaccagcugacgggguacaagaagcccgcgucccgcgagcugaaggugaccuucuucccggaccucaacggcgacguggucgccaucgacuacaagcacuacacccccagcuucaagaagggcgccaagcugcugcacaagcccaucguguggcacgugaacaacgccaccaacaaggcgacguacaagcccaacaccuggugcauccggugccucugguccaccaagccggucgagaccagcaacuccuucgacgugcugaagagcgaggacgcccaggggauggacaaccuggccugcgaggaccucaagcccguguccgaggaggucguggagaaccccacgauccagaaggacgugcuggagugcaacgucaagaccaccgagguggugggcgacaucauccugaagcccgccaacaacagccucaagaucaccgaggaggucgggcacacggaccugauggccgcguacguggacaacuccagccugaccaucaagaagccgaacgagcucucccgcgugcugggccugaagacccucgccacccacgggcuggccgccgucaacagcgugcccugggacacgaucgccaacuacgcgaagcccuuccugaacaagguggucuccaccaccaccaacaucgugacgcgcugccucaaccgggugugcaccaacuacaugccguacuucuucacccugcugcuccagcugugcaccuucacccgcagcacgaacucccggaucaaggccagcaugcccaccaccaucgccaagaacaccgucaagagcgugggcaaguucugccuggaggccuccuucaacuaccucaagagccccaacuucuccaagcugaucaacaucaucaucugguuccugcuccugagcgugugccugggcucccucaucuacagcacggccgcgcuggggguccugauguccaaccucggcaugcccagcuacugcaccggguaccgcgagggcuaccugaacuccaccaacgugaccaucgccacguacugcaccggcagcaucccgugcuccgugugccugagcgggcucgacucccuggacaccuaccccagccuggagaccauccagaucacgaucuccagcuucaagugggaccucaccgccuucggccuggucgccgagugguuccuggccuacauccucuucacccgguucuucuacgugcuggggcuggcggccaucaugcagcucuucuucuccuacuucgccgugcacuucaucagcaacuccuggcugauguggcugaucaucaaccugguccagauggcccccaucagcgcgauggugcgcauguacaucuucuucgccagcuucuacuacguguggaaguccuacguccacgugguggacggcugcaacagcuccaccugcaugaugugcuacaagcggaaccgcgccacgcgggucgagugcaccaccaucgugaacgggguccgccggagcuucuacguguacgccaacggcggcaagggguucugcaagcuccacaacuggaacugcgugaacugcgacaccuucugcgccggcuccacguucaucagcgacgaggucgcgcgcgaccugucccugcaguucaagcggcccaucaacccgaccgaccagagcuccuacaucguggacagcgugaccgucaagaacggguccauccaccucuacuucgacaaggccggccagaagaccuacgagcgccacagccugucccacuucgugaaccuggacaaccuccgggccaacaacacgaaggggagccugcccaucaacgugaucgucuucgacggcaaguccaagugcgaggagagcuccgccaagagcgccuccguguacuacagccagcugaugugccagcccauccuccugcuggaccaggcgcucgugagcgacgucggcgacuccgccgagguggccgugaagauguucgacgccuacgucaacaccuucagcuccaccuucaacgugcccauggagaagcugaagacccugguggccacggcggaggccgagcucgccaagaacgucagccuggacaacgugcuguccaccuucaucagcgccgcgcgccagggguucguggacuccgacgucgagaccaaggacgugguggagugccucaagcugagccaccaguccgacaucgaggucaccggcgacagcugcaacaacuacaugcugacguacaacaagguggagaacaugaccccgcgggaccucggggccugcaucgacugcuccgcccgccacaucaacgcccagguggccaagagccacaacaucgcgcugaucuggaacgucaaggacuucaugucccugagcgagcagcuccggaagcagauccgcuccgccgccaagaagaacaaccugcccuucaagcugaccugcgccaccacgcgccagguggugaacgucgugaccaccaagaucgcccucaagggcgggugaggacuagucccuguucccagagcccacuuuuuuuucuuuuuuugaaauaaaauagccugucuuucagaucucaaaggcucuuuucagagccaccaaaaaaaaaaaaaaaaaaaaaaaaaaaaaaaaaaaaaaaaaaaaaaaaaaaaaaaaaaaaaaaaaaaaaaaaaaaaaaaaaaaaaaaaaaaaaaaaaaaaa

SEQ ID NO: 20000 - RNA, 6113 nt, Artificial Sequence
  SARS-CoV-2__MT601292.1__non-structural protein 3 (NSP3) mRNA gc
aggagagucccgcagucggcguccagcggcucugcuuguucgugugugugucguugcaggccuuauucaagcuuaccauggcccccaccaaggugaccuucggcgacgacacggucaucgaggugcagggguacaagagcgugaacaucaccuucgagcuggacgagcgcaucgacaagguccucaacgagaagugcuccgccuacaccguggagcugggcaccgaggugaacgaguucgcgugcgucguggccgacgccgugaucaagacgcugcagccggucagcgagcuccugaccccccuggggaucgaccucgacgagugguccauggccaccuacuaccuguucgacgagagcggcgaguucaagcuggccucccacauguacugcagcuucuacccccccgacgaggacgaggaggagggggacugcgaggaggaggaguucgagccguccacccaguacgaguacggcacggaggacgacuaccagggcaagccccucgaguucggggcgaccagcgccgcccugcagcccgaggaggagcaggaggaggacuggcuggacgacgacucccagcagaccgugggccagcaggacgggagcgaggacaaccagaccacgaccauccagaccaucguggagguccagccccagcucgagauggagcugaccccgguggugcagacgaucgaggucaacuccuucagcggcuaccugaagcucaccgacaacguguacaucaagaacgccgacaucguggaggaggcgaagaaggucaagcccaccgugguggucaacgccgccaacguguaccugaagcacgggggcggcguggccggggcccugaacaaggcgaccaacaacgccaugcaggucgaguccgacgacuacaucgccacgaacggcccccucaagguggggggcagcugcguccuguccggccacaaccuggccaagcacugccuccacgugguggggcccaacgucaacaagggcgaggacauccagcugcugaagagcgccuacgagaacuucaaccagcacgaggugcuccuggcgccgcugcucuccgccgggaucuucggcgccgaccccauccacagccugcgggugugcgucgacaccgugcgcaccaacguguaccuggccgucuucgacaagaaccucuacgacaagcugguguccagcuuccuggagaugaagagcgagaagcagguggagcagaagaucgccgagauccccaaggaggaggucaagcccuucaucaccgaguccaagccgagcguggagcagcggaagcaggacgacaagaagaucaaggcgugcguggaggaggucacgaccacccucgaggagaccaaguuccugacggagaaccugcuccuguacaucgacaucaacgggaaccugcaccccgacuccgccacccucgugagcgacaucgacaucaccuuccugaagaaggacgcccccuacaucgugggcgacgucgugcaggagggcgugcugaccgccgucgugauccccacgaagaaggccgggggcaccaccgagaugcucgcgaaggcccugcgcaaggugccgaccgacaacuacaucacgaccuaccccgggcagggccugaacggguacaccgucgaggaggccaagaccgugcucaagaagugcaaguccgccuucuacauccugcccagcaucaucuccaacgagaagcaggagauccugggcaccgugagcuggaaccuccgggagaugcuggcgcacgccgaggagacgcgcaagcugaugcccgucugcguggagaccaaggccaucguguccaccauccagcggaaguacaagggcaucaagauccaggagggggucguggacuacggcgcccgcuucuacuucuacaccagcaagacgaccguggccucccugaucaacacccucaacgaccugaacgagacccuggucacgaugccgcucggguacgugacccacggccugaaccuggaggaggcggcccgguacaugcgcagccucaaggugcccgccaccgucuccgugagcucccccgacgccgugaccgccuacaacggguaccugacgagcuccagcaagacccccgaggagcacuucaucgagaccaucucccuggcgggcagcuacaaggacuggagcuacuccggccagagcacccagcucgggaucgaguuccugaagcggggcgacaaguccgucuacuacacgagcaacccgaccaccuuccaccuggacggggaggugaucaccuucgacaaccucaagacgcugcugucccuccgcgaggugcggaccaucaaggucuucaccaccguggacaacaucaaccugcacacgcagguggucgacaugagcaugaccuacggccagcaguucggccccaccuaccuggacggggccgacgugaccaagaucaagccccacaacucccacgagggcaagacguucuacgugcucccgaacgacgacacccugcgcgucgaggccuucgaguacuaccacaccaccgaccccagcuuccuggggcgguacauguccgcccucaaccacacgaagaaguggaaguacccccaggugaacggccugaccagcaucaagugggccgacaacaacugcuaccuggcgaccgcccuccugacccugcagcagaucgagcucaaguucaacucccccgcccugcaggacgccuacuaccgcgcgcgggccggggaggccgccaacuucugcgcccugauccucgcguacugcaacaagacggugggcgagcugggcgacguccgcgagaccaugagcuaccuguuccagcacgccaaccucgacuccugcaagcgggugcugaacgucgugugcaagaccugcgggcagcagcagaccacccugaagggcguggaggccgucauguacauggggacgcucagcuacgagcaguucaagaagggcgugcagaucccgugcaccugcgggaagcaggccaccaaguaccuggugcagcaggagucccccuucgucaugaugagcgccccccccgcgcaguacgagcugaagcacggcaccuucacgugcgccuccgaguacaccggcaacuaccagugcgggcacuacaagcacaucaccagcaaggagacccucuacugcaucgacggcgcccugcugacgaagagcuccgaguacaaggggccgaucaccgacguguucuacaaggagaacagcuacaccaccacgaucaagcccgugaccuacaagcucgacggcgucgugugcaccgagaucgaccccaagcuggacaacuacuacaagaaggacaacuccuacuucaccgagcagcccaucgaccuggugccgaaccagcccuaccccaacgccagcuucgacaacuucaaguucgucugcgacaacaucaaguucgccgacgaccucaaccagcugacgggguacaagaagcccgcgucccgcgagcugaaggugaccuucuucccggaccucaacggcgacguggucgccaucgacuacaagcacuacacccccagcuucaagaagggcgccaagcugcugcacaagcccaucguguggcacgugaacaacgccaccaacaaggcgacguacaagcccaacaccuggugcauccggugccucugguccaccaagccggucgagaccagcaacuccuucgacgugcugaagagcgaggacgcccaggggauggacaaccuggccugcgaggaccucaagcccguguccgaggaggucguggagaaccccacgauccagaaggacgugcuggagugcaacgucaagaccaccgagguggugggcgacaucauccugaagcccgccaacaacagccucaagaucaccgaggaggucgggcacacggaccugauggccgcguacguggacaacuccagccugaccaucaagaagccgaacgagcucucccgcgugcugggccugaagacccucgccacccacgggcuggccgccgucaacagcgugcccugggacacgaucgccaacuacgcgaagcccuuccugaacaagguggucuccaccaccaccaacaucgugacgcgcugccucaaccgggugugcaccaacuacaugccguacuucuucacccugcugcuccagcugugcaccuucacccgcagcacgaacucccggaucaaggccagcaugcccaccaccaucgccaagaacaccgucaagagcgugggcaaguucugccuggaggccuccuucaacuaccucaagagccccaacuucuccaagcugaucaacaucaucaucugguuccugcuccugagcgugugccugggcucccucaucuacagcacggccgcgcuggggguccugauguccaaccucggcaugcccagcuacugcaccggguaccgcgagggcuaccugaacuccaccaacgugaccaucgccacguacugcaccggcagcaucccgugcuccgugugccugagcgggcucgacucccuggacaccuaccccagccuggagaccauccagaucacgaucuccagcuucaagugggaccucaccgccuucggccuggucgccgagugguuccuggccuacauccucuucacccgguucuucuacgugcuggggcuggcggccaucaugcagcucuucuucuccuacuucgccgugcacuucaucagcaacuccuggcugauguggcugaucaucaaccugguccagauggcccccaucagcgcgauggugcgcauguacaucuucuucgccagcuucuacuacguguggaaguccuacguccacgugguggacggcugcaacagcuccaccugcaugaugugcuacaagcggaaccgcgccacgcgggucgagugcaccaccaucgugaacgggguccgccggagcuucuacguguacgccaacggcggcaagggguucugcaagcuccacaacuggaacugcgugaacugcgacaccuucugcgccggcuccacguucaucagcgacgaggucgcgcgcgaccugucccugcaguucaagcggcccaucaacccgaccgaccagagcuccuacaucguggacagcgugaccgucaagaacggguccauccaccucuacuucgacaaggccggccagaagaccuacgagcgccacagccugucccacuucgugaaccuggacaaccuccgggccaacaacacgaaggggagccugcccaucaacgugaucgucuucgacggcaaguccaagugcgaggagagcuccgccaagagcgccuccguguacuacagccagcugaugugccagcccauccuccugcuggaccaggcgcucgugagcgacgucggcgacuccgccgagguggccgugaagauguucgacgccuacgucaacaccuucagcuccaccuucaacgugcccauggagaagcugaagacccugguggccacggcggaggccgagcucgccaagaacgucagccuggacaacgugcuguccaccuucaucagcgccgcgcgccagggguucguggacuccgacgucgagaccaaggacgugguggagugccucaagcugagccaccaguccgacaucgaggucaccggcgacagcugcaacaacuacaugcugacguacaacaagguggagaacaugaccccgcgggaccucggggccugcaucgacugcuccgcccgccacaucaacgcccagguggccaagagccacaacaucgcgcugaucuggaacgucaaggacuucaugucccugagcgagcagcuccggaagcagauccgcuccgccgccaagaagaacaaccugcccuucaagcugaccugcgccaccacgcgccagguggugaacgucgugaccaccaagaucgcccucaagggcgggugaggacuagucccuguucccagagcccacuuuuuuuucuuuuuuugaaauaaaauagccugucuuucagaucucaaaggcucuuuucagagccaccaaaaaaaaaaaaaaaaaaaaaaaaaaaaaaaaaaaaaaaaaaaaaaaaaaaaaaaaaaaaaaaaaaaaaaaaaaaaaaaaaaaaaaaaaaaaaaaaaaaaa

SEQ ID NO: 20001 - RNA, 6113 nt, Artificial Sequence
  SARS-CoV-2__MT584985.1__non-structural protein 3 (NSP3) mRNA gc
aggagagucccgcagucggcguccagcggcucugcuuguucgugugugugucguugcaggccuuauucaagcuuaccauggcccccaccaaggugaccuucggcgacgacacggucaucgaggugcagggguacaagagcgugaacaucaccuucgagcuggacgagcgcaucgacaagguccucaaccagaagugcuccgccuacaccguggagcugggcaccgaggugaacgaguucgcgugcgucguggccgacgccgugaucaagacgcugcagccggucagcgagcuccugaccccccuggggaucgaccucgacgagugguccauggccaccuacuaccuguucgacgagagcggcgaguucaagcuggccucccacauguacugcagcuucuacccccccgacgaggacgaggaggagggggacugcgaggaggaggaguucgagccguccacccaguacgaguacggcacggaggacgacuaccagggcaagccccucgaguucggggcgaccagcgccgcccugcagcccgaggaggagcaggaggaggacuggcuggacgacgacucccagcagaccgugggccagcaggacgggagcgaggacaaccagaccacgaccauccagaccaucguggagguccagccccagcucgagauggagcugaccccgguggugcagacgaucgaggucaacuccuucagcggcuaccugaagcucaccgacaacguguacaucaagaacgccgacaucguggaggaggcgaagaaggucaagcccaccgugguggucaacgccgccaacguguaccugaagcacgggggcggcguggccggggcccugaacaaggcgaccaacaacgccaugcaggucgaguccgacgacuacaucgccacgaacggcccccucaagguggggggcagcugcguccuguccggccacaaccuggccaagcacugccuccacgugguggggcccaacgucaacaagggcgaggacauccagcugcugaagagcgccuacgagaacuucaaccagcacgaggugcuccuggcgccgcugcucuccgccgggaucuucggcgccgaccccauccacagccugcgggugugcgucgacaccgugcgcaccaacguguaccuggccgucuucgacaagaaccucuacgacaagcugguguccagcuuccuggagaugaagagcgagaagcagguggagcagaagaucgccgagauccccaaggaggaggucaagcccuucaucaccgaguccaagccgagcguggagcagcggaagcaggacgacaagaagaucaaggcgugcguggaggaggucacgaccacccucgaggagaccaaguuccugacggagaaccugcuccuguacaucgacaucaacgggaaccugcaccccgacuccgccacccucgugagcgacaucgacaucaccuuccugaagaaggacgcccccuacaucgugggcgacgucgugcaggagggcgugcugaccgccgucgugauccccacgaagaaggccgggggcaccaccgagaugcucgcgaaggcccugcgcaaggugccgaccgacaacuacaucacgaccuaccccgggcagggccugaacggguacaccgucgaggaggccaagaccgugcucaagaagugcaaguccgccuucuacauccugcccagcaucaucuccaacgagaagcaggagauccugggcaccgugagcuggaaccuccgggagaugcuggcgcacgccgaggagacgcgcaagcugaugcccgucugcguggagaccaaggccaucguguccaccauccagcggaaguacaagggcaucaagauccaggagggggucguggacuacggcgcccgcuucuacuucuacaccagcaagacgaccguggccucccugaucaacacccucaacgaccugaacgagacccuggucacgaugccgcucggguacgugacccacggccugaaccuggaggaggcggcccgguacaugcgcagccucaaggugcccgccaccgucuccgugagcucccccgacgccgugaccgccuacaacggguaccugacgagcuccagcaagacccccgaggagcacuucaucgagaccaucucccuggcgggcagcuacaaggacuggagcuacuccggccagagcacccagcucgggaucgaguuccugaagcggggcgacaaguccgucuacuacacgagcaacccgaccaccuuccaccuggacggggaggugaucaccuucgacaaccucaagacgcugcugucccuccgcgaggugcggaccaucaaggucuucaccaccguggacaacaucaaccugcacacgcagguggucgacaugagcaugaccuacggccagcaguucggccccaccuaccuggacggggccgacgugaccaagaucaagccccacaacucccacgagggcaagacguucuacgugcucccgaacgacgacacccugcgcgucgaggccuucgaguacuaccacaccaccgaccccagcuuccuggggcgguacauguccgcccucaaccacacgaagaaguggaaguacccccaggugaacggccugaccagcaucaagugggccgacaacaacugcuaccuggcgaccgcccuccugacccugcagcagaucgagcucaaguucaaccccccggcccugcaggacgccuacuaccgcgcgcgggccggggaggccgccaacuucugcgcccugauccucgcguacugcaacaagacggugggcgagcugggcgacguccgcgagaccauguccuaccuguuccagcacgccaaccucgacagcugcaagcgggugcugaacgucgugugcaagaccugcgggcagcagcagaccacccugaagggcguggaggccgucauguacauggggacgcucuccuacgagcaguucaagaagggcgugcagauccccugcaccugcgggaagcaggccaccaaguaccuggugcagcaggagagccccuucgucaugauguccgcccccccggcgcaguacgagcugaagcacggcaccuucacgugcgccagcgaguacaccggcaacuaccagugcgggcacuacaagcacaucaccuccaaggagacccucuacugcaucgacggcgcccugcugacgaagagcagcgaguacaaggggcucaucaccgacguguucuacaaggagaacuccuacaccaccacgaucaagcccgugaccuacaagcuggacggcgucgugugcaccgagaucgaccccaagcuggacaacuacuacaagaaggacaacagcuacuucaccgagcagcccaucgaccucgugccgaaccagcccuaccccaacgccuccuucgacaacuucaaguucgucugcgacaacaucaaguucgccgacgaccugaaccagcugacgggguacaagaagcccgcgagccgcgagcucaaggugaccuucuucccggaccugaacggcgacguggucgccaucgacuacaagcacuacacccccuccuucaagaagggcgccaagcugcuccacaagcccaucguguggcacgugaacaacgccaccaacaaggcgacguacaagcccaacaccuggugcauccggugccuguggagcaccaagccggucgagaccuccaacagcuucgacgugcugaaguccgaggacgcccaggggauggacaaccucgccugcgaggaccugaagcccgugagcgaggaggucguggagaaccccacgauccagaaggacgugcuggagugcaacgucaagaccaccgagguggugggcgacaucauccucaagcccgccaacaacucccugaagaucaccgaggaggucgggcacacggaccugauggccgcguacguggacaacagcucccucaccaucaagaagccgaacgagcugagccgcgugcugggccucaagacccuggccacccacgggcuggccgccgucaacuccgugcccugggacacgaucgccaacuacgcgaagcccuuccucaacaagguggucagcaccaccaccaacaucgugacgcgcugccugaaccgggugugcaccaacuacaugccguacuucuucacccugcuccugcagcugugcaccuucacccgcuccacgaacagccggaucaaggccuccaugcccaccaccaucgccaagaacaccgucaagagcgugggcaaguucugccucgaggccagcuucaacuaccugaagucccccaacuucagcaagcugaucaacaucaucaucugguuccuccugcuguccgugugccucggcagccugaucuacuccacggccgcgcuggggguccucaugagcaaccugggcaugcccuccuacugcaccggguaccgcgagggcuaccugaacagcaccaacgugaccaucgccacguacugcaccggcuccaucccgugcagcgugugccucuccgggcuggacagccuggacaccuaccccucccucgagaccauccagaucacgaucagcuccuucaagugggaccugaccgccuucggccuggucgccgagugguuccucgccuacauccuguucacccgguucuucuacgugcuggggcucgcggccaucaugcagcuguucuucagcuacuucgccgugcacuucaucuccaacagcuggcugauguggcugaucaucaaccucguccagauggcccccaucuccgcgauggugcgcauguacaucuucuucgccagcuucuacuacguguggaagagcuacguccacgugguggacggcugcaacuccagcaccugcaugaugugcuacaagcggaaccgcgccacgcgggucgagugcaccaccaucgugaacgggguccgccgguccuucuacguguacgccaacggcggcaagggguucugcaagcugcacaacuggaacugcgugaacugcgacaccuucugcgccggcagcacguucaucuccgacgaggucgcgcgcgaccugagccuccaguucaagcggcccaucaacccgaccgaccaguccagcuacaucguggacuccgugaccgucaagaacgggagcauccaccuguacuucgacaaggccggccagaagaccuacgagcgccacucccugagccacuucgugaaccucgacaaccugcgggccaacaacacgaaggggucccugcccaucaacgugaucgucuucgacggcaagagcaagugcgaggaguccagcgccaaguccgccagcguguacuacucccagcucaugugccagcccauccugcugcucgaccaggcgcuggugagcgacgucggcgacagcgccgagguggccgugaagauguucgacgccuacgucaacaccuucuccagcaccuucaacgugcccauggagaagcugaagacccucguggccacggcggaggccgagcuggccaagaacgucucccuggacaacgugcucagcaccuucaucuccgccgcgcgccagggguucguggacagcgacgucgagaccaaggacgugguggagugccugaagcugucccaccagagcgacaucgaggucaccggcgacuccugcaacaacuacaugcucacguacaacaagguggagaacaugaccccgcgggaccugggggccugcaucgacugcagcgcccgccacaucaacgcccagguggccaagucccacaacaucgcgcugaucuggaacgucaaggacuucaugagccucuccgagcagcugcggaagcagauccgcagcgccgccaagaagaacaaccugcccuucaagcucaccugcgccaccacgcgccagguggugaacgucgugaccaccaagaucgcccugaagggcgggugaggacuagucccuguucccagagcccacuuuuuuuucuuuuuuugaaauaaaauagccugucuuucagaucucaaaggcucuuuucagagccaccaaaaaaaaaaaaaaaaaaaaaaaaaaaaaaaaaaaaaaaaaaaaaaaaaaaaaaaaaaaaaaaaaaaaaaaaaaaaaaaaaaaaaaaaaaaaaaaaaaaaa

SEQ ID NO: 20002 - RNA, 6113 nt, Artificial Sequence
  SARS-CoV-2__MT585059.1__non-structural protein 3 (NSP3) mRNA gc
aggagagucccgcagucggcguccagcggcucugcuuguucgugugugugucguugcaggccuuauucaagcuuaccauggcccccaccaaggugaccuucggcgacgacacggucaucgaggugcagggguacaagagcgugaacaucaccuucgagcuggacgagcgcaucgacaagguccucaacgagaagugcuccgccuacaccguggagcugggcaccgaggugaacgaguucgcgugcgucguggccgacgccgugaucaagacgcugcagccggucagcgagcuccugaccccccuggggaucgaccucgacgagugguccauggccaccuacuaccuguucgacgagagcggcgaguucaagcuggccucccacauguacugcagcuucuacccccccgacgaggacgaggaggagggggacugcgaggaggaggaguucgagccguccacccaguacgaguacggcacggaggacgacuaccagggcaagccccucgaguucggggcgaccagcgccgcccugcagcccgaggaggagcaggaggaggacuggcuggacgacgacucccagcagaccgugggccagcaggacgggagcgaggacaaccagaccacgaccauccagaccaucguggagguccagccccagcucgagauggagcugaccccgguggugcagacgaucgaggucaacuccuucagcggcuaccugaagcucaccgacaacguguacaucaagaacgccgacaucguggaggaggcgaagaaggucaagcccaccgugguggucaacgccgccaacguguaccugaagcacgggggcggcguggccggggcccugaacaaggcgaccaacaacgccaugcaggucgaguccgacgacuacaucgccacgaacggcccccucaagguggggggcagcugcguccuguccggccacaaccuggccaagcacugccuccacgugguggggcccaacgucaacaagggcgaggacauccagcugcugaagagcgccuacgagaacuucaaccagcacgaggugcuccuggcgccgcugcucuccgccgggaucuucggcgccgaccccauccacagccugcgggugugcgucgacaccgugcgcaccaacguguaccuggccgucuucgacaagaaccucuacgacaagcugguguccagcuuccuggagaugaagagcgagaagcagguggagcagaagaucgccgagauccccaaggaggaggucaagcccuucaucaccgaguccaagccgagcguggagcagcggaagcaggacgacaagaagaucaaggcgugcguggaggaggucacgaccacccucgaggagaccaaguuccugacggagaaccugcuccuguacaucgacaucaacgggaaccugcaccccgacuccgccacccucgugagcgacaucgacaucaccuuccugaagaaggacgcccccuacaucgugggcgacgucgugcaggagggcgugcugaccgccgucgugauccccacgaagaaggccgggggcaccaccgagaugcucgcgaaggcccugcgcaaggugccgaccgacaacuacaucacgaccuaccccgggcagggccugaacggguacaccgucgaggaggccaagaccgugcucaagaagugcaaguccgccuucuacauccugcccagcaucaucuccaacgagaagcaggagauccugggcaccgugagcuggaaccuccgggagaugcuggcgcacgccgaggagacgcgcaagcugaugcccgucugcguggagaccaaggccaucguguccaccauccagcacaaguacaagggcaucaagauccaggagggggucguggacuacggcgcccgguucuacuucuacaccagcaagacgaccguggccucccugaucaacacccucaacgaccugaacgagacccuggucacgaugccgcucggguacgugacccacggccugaaccuggaggaggcggcccgcuacaugcggagccucaaggugcccgccaccgucuccgugagcucccccgacgccgugaccgccuacaacggguaccugacgagcuccagcaagacccccgaggagcacuucaucgagaccaucucccuggcgggcagcuacaaggacuggagcuacuccggccagagcacccagcucgggaucgaguuccugaagcgcggcgacaaguccgucuacuacacgagcaacccgaccaccuuccaccuggacggggaggugaucaccuucgacaaccucaagacgcugcugucccuccgggaggugcgcaccaucaaggucuucaccaccguggacaacaucaaccugcacacgcagguggucgacaugagcaugaccuacggccagcaguucggccccaccuaccuggacggggccgacgugaccaagaucaagccccacaacucccacgagggcaagacguucuacgugcucccgaacgacgacacccugcgggucgaggccuucgaguacuaccacaccaccgaccccagcuuccuggggcgcuacauguccgcccucaaccacacgaagaaguggaaguacccccaggugaacggccugaccagcaucaagugggccgacaacaacugcuaccuggcgaccgcccuccugacccugcagcagaucgagcucaaguucaaccccccggcccugcaggacgccuacuaccgggcgcgcgccggggaggccgccaacuucugcgcccugauccucgcguacugcaacaagacggugggcgagcugggcgacguccgggagaccauguccuaccuguuccagcacgccaaccucgacagcugcaagcgcgugcugaacgucgugugcaagaccugcgggcagcagcagaccacccugaagggcguggaggccgucauguacauggggacgcucuccuacgagcaguucaagaagggcgugcagauccccugcaccugcgggaagcaggccaccaaguaccuggugcagcaggagagccccuucgucaugauguccgcccccccggcgcaguacgagcugaagcacggcaccuucacgugcgccagcgaguacaccggcaacuaccagugcgggcacuacaagcacaucaccuccaaggagacccucuacugcaucgacggcgcccugcugacgaagagcagcgaguacaaggggcccaucaccgacguguucuacaaggagaacuccuacaccaccacgaucaagcccgugaccuacaagcucgacggcgucgugugcaccgagaucgaccccaagcuggacaacuacuacaagaaggacaacagcuacuucaccgagcagccgaucgaccuggugcccaaccagcccuaccccaacgccuccuucgacaacuucaaguucgucugcgacaacaucaaguucgccgacgaccucaaccagcugacgggguacaagaagccggcgagccgggagcugaaggugaccuucuuccccgaccucaacggcgacguggucgccaucgacuacaagcacuacacccccuccuucaagaagggcgccaagcugcugcacaagcccaucguguggcacgugaacaacgccaccaacaaggcgacguacaagccgaacaccuggugcauccgcugccucuggagcaccaagcccgucgagaccuccaacagcuucgacgugcugaaguccgaggacgcccaggggauggacaaccuggccugcgaggaccucaagcccgugagcgaggaggucguggagaaccccacgauccagaaggacgugcuggagugcaacgucaagaccaccgagguggugggcgacaucauccugaagccggccaacaacucccucaagaucaccgaggaggucgggcacacggaccugauggccgcguacguggacaacagcucccugaccaucaagaagcccaacgagcucagccgggugcugggccugaagacccucgccacccacgggcuggccgccgucaacuccgugcccugggacacgaucgccaacuacgcgaagccguuccugaacaagguggucagcaccaccaccaacaucgugacgcgcugccucaaccgcgugugcaccaacuacaugcccuacuucuucacccugcugcuccagcugugcaccuucacccgguccacgaacagccgcaucaaggccuccaugcccaccaccaucgccaagaacaccgucaagagcgugggcaaguucugccuggaggccagcuucaacuaccucaagucccccaacuucagcaagcugaucaacaucaucaucugguuccugcuccuguccgugugccugggcagccucaucuacuccacggccgcgcuggggguccugaugagcaaccucggcaugccguccuacugcaccggguaccgggagggcuaccugaacagcaccaacgugaccaucgccacguacugcaccggcuccauccccugcagcgugugccuguccgggcucgacagccuggacaccuaccccucccuggagaccauccagaucacgaucagcuccuucaagugggaccucaccgccuucggccuggucgccgagugguuccuggccuacauccucuucacccgcuucuucuacgugcuggggcuggcggccaucaugcagcucuucuucagcuacuucgccgugcacuucaucuccaacagcuggcugauguggcugaucaucaaccugguccagauggcccccaucuccgcgauggugcggauguacaucuucuucgccagcuucuacuacguguggaagagcuacguccacgugguggacggcugcaacuccagcaccugcaugaugugcuacaagcgcaaccgggccacgcgcgucgagugcaccaccaucgugaacgggguccggcgcuccuucuacguguacgccaacggcggcaagggguucugcaagcuccacaacuggaacugcgugaacugcgacaccuucugcgccggcagcacguucaucuccgacgaggucgcgcgggaccugagccugcaguucaagcgcccgaucaaccccaccgaccaguccagcuacaucguggacuccgugaccgucaagaacgggagcauccaccucuacuucgacaaggccggccagaagaccuacgagcggcacucccugagccacuucgugaaccuggacaaccuccgcgccaacaacacgaaggggucccugcccaucaacgugaucgucuucgacggcaagagcaagugcgaggaguccagcgccaaguccgccagcguguacuacucccagcugaugugccagcccauccuccugcuggaccaggcgcucgugagcgacgucggcgacagcgccgagguggccgugaagauguucgacgccuacgucaacaccuucuccagcaccuucaacgugccgauggagaagcugaagacccugguggccacggcggaggccgagcucgccaagaacgucucccuggacaacgugcugagcaccuucaucuccgccgcgcggcagggguucguggacagcgacgucgagaccaaggacgugguggagugccucaagcugucccaccagagcgacaucgaggucaccggcgacuccugcaacaacuacaugcugacguacaacaagguggagaacaugaccccccgcgaccucggggccugcaucgacugcagcgcccggcacaucaacgcccagguggccaagucccacaacaucgcgcugaucuggaacgucaaggacuucaugagccuguccgagcagcuccgcaagcagauccggagcgccgccaagaagaacaaccugcccuucaagcugaccugcgccaccacgcgccagguggugaacgucgugaccaccaagaucgcccucaagggcgggugaggacuagucccuguucccagagcccacuuuuuuuucuuuuuuugaaauaaaauagccugucuuucagaucucaaaggcucuuuucagagccaccaaaaaaaaaaaaaaaaaaaaaaaaaaaaaaaaaaaaaaaaaaaaaaaaaaaaaaaaaaaaaaaaaaaaaaaaaaaaaaaaaaaaaaaaaaaaaaaaaaaaa

SEQ ID NO: 20003 - RNA, 6113 nt, Artificial Sequence
  SARS-CoV-2__MT585090.1__non-structural protein 3 (NSP3) mRNA gc
aggagagucccgcagucggcguccagcggcucugcuuguucgugugugugucguugcaggccuuauucaagcuuaccauggcccccaccaaggugaccuucggcgacgacacggucaucgaggugcagggguacaagagcgugaacaucaccuucgagcuggacgagcgcaucgacaagguccucaacgagaagugcuccgccuacaccguggagcugggcaccgaggugaacgaguucgcgugcgucguggccgacgccgugaucaagacgcugcagccggucagcgagcuccugaccccccuggggaucgaccucgacgagugguccauggccaccuacuaccuguucgacgagagcggcgaguucaagcuggccucccacauguacugcagcuucuacccccccgacgaggacgaggaggagggggacugcgaggaggaggaguucgagccguccacccaguacgaguacggcacggaggacgacuaccagggcaagccccucgaguucggggcgaccagcgccgcccugcagcccgaggaggagcaggaggaggacuggcuggacgacgacucccagcagaccgugggccagcaggacgggagcgaggacaaccagaccacgaccauccagaccaucguggagguccagccccagcucgagauggagcugaccccgguggugcagacgaucgaggucaacuccuucagcggcuaccugaagcucaccgacaacguguacaucaagaacgccgacaucguggaggaggcgaagaaggucaagcccaccgugguggucaacgccgccaacguguaccugaagcacgggggcggcguggccggggcccugaacaaggcgaccaacaacgccaugcaggucgaguccgacgacuacaucgccacgaacggcccccucaagguggggggcagcugcguccuguccggccacaaccuggccaagcacugccuccacgugguggggcccaacgucaacaagggcgaggacauccagcugcugaagagcgccuacgagaacuucaaccagcacgaggugcuccuggcgccgcugcucuccgccgggaucuucggcgccgaccccauccacagccugcgggugugcgucgacaccgugcgcaccaacguguaccuggccgucuucgacaagaaccucuacgacaagcugguguccagcuuccuggagaugaagagcgagaagcagguggagcagaagaucgccgagauccccaaggaggaggucaagcccuucaucaccgaguccaagccgagcguggagcagcggaagcaggacgacaagaagaucaaggcgugcguggaggaggucacgaccacccucgaggagaccaaguuccugacggagaaccugcuccuguacaucgacaucaacgggaaccugcaccccgacuccgccacccucgugagcgacaucgacaucaccuuccugaagaaggacgcccccuacaucgugggcgacgucgugcaggagggcgugcugaccgccgucgugauccccacgaagaaggccgggggcaccaccgagaugcucgcgaaggcccugcgcaaggugccgaccgacaacuacaucacgaccuaccccgggcagggccugaacggguacaccgucgaggaggccaagaccgugcucaagaagugcaaguccgccuucuacauccugcccagcaucaucuccaacgagaagcaggagauccugggcaccgugagcuggaaccuccgggagaugcuggcgcacgccgaggagacgcgcaagcugaugcccgucugcguggagaccaaggccaucguguccaccauccagcggaaguacaagggcaucaagauccaggagggggucguggacuacggcgcccgcuucuacuucuacaccagcaagacgaccguggccucccugaucaacacccucaacgaccugaacgagacccuggucacgaugccgcucggguacgugacccacggccugaaccuggaggaggcggcccgguacaugcgcagccucaaggugcccgccaccgucuccgugagcucccccgacgccgugaccgccuacaacggguaccugacgagcuccagcaagacccccgaggagcacuucaucgagaccaucucccuggcgggcagcuacaaggacuggagcuacuccggccagagcacccagcucgggaucgaguuccugaagcggggcgacaaguccgucuacuacacgagcaacccgaccaccuuccaccuggacggggaggugaucaccuucgacaaccucaagacgcugcugucccuccgcgaggugcggaccaucaaggucuucaccaccguggacaacaucaaccugcacacgcagguggucgacaugagcaugaccuacggccagcaguucggccccaccuaccuggacggggccgacgugaccaagaucaagccccacaacucccacgagggcaagacguucuacgugcucccgaacgacgacacccugcgcgucgaggccuucgaguacuaccacaccaccgaccccagcuuccuggggcgguacauguccgcccucaaccacacgaagaaguggaaguacccccaggugaacggccugaccagcaucaagugggccgacaacaacugcuaccuggcgaccgcccuccugacccugcagcagaucgagcucaaguucaaccccccggcccugcaggacgccuacuaccgcgcgcgggccggggaggccgccaacuucugcgcccugauccucgcguacugcaacaagacggugggcgagcugggcgacguccgcgagaccauguccuaccuguuccagcacgccaaccucgacagcugcaagcgggugcugaacgucgugugcaagaccugcgggcagcagcagaccacccugaagggcguggaggccgucauguacauggggacgcucuccuacgagcaguucaagaagggcgugcagauccccugcaccugcgggaagcaggccaccaaguaccuggugcagcaggagagccccuucgucaugauguccgcccccccggcgcaguacgagcugaagcacggcaccuucacgugcgccagcgaguacaccggcaacuaccagugcgggcacuacaagcacaucaccuccaaggagacccucuacugcaucgacggcgcccugcugacgaagagcagcgaguacaaggggcccaucaccgacguguucuacaaggagaacuccuacaccaccacgaucaagcccgugaccuacaagcucgacggcgucgugugcaccgagaucgaccccaagcuggacaucuacuacaagaaggacaacagcuacuucaccgagcagccgaucgaccuggugcccaaccagcccuaccccaacgccuccuucgacaacuucaaguucgucugcgacaacaucaaguucgccgacgaccucaaccagcugacgggguacaagaagccggcgagccgcgagcugaaggugaccuucuuccccgaccucaacggcgacguggucgccaucgacuacaagcacuacacccccuccuucaagaagggcgccaagcugcugcacaagcccaucguguggcacgugaacaacgccaccaacaaggcgacguacaagccgaacaccuggugcauccggugccucuggagcaccaagcccgucgagaccuccaacagcuucgacgugcugaaguccgaggacgcccaggggauggacaaccuggccugcgaggaccucaagcccgugagcgaggaggucguggagaaccccacgauccagaaggacgugcuggagugcaacgucaagaccaccgagguggugggcgacaucauccugaagccggccaacaacucccucaagaucaccgaggaggucgggcacacggaccugauggccgcguacguggacaacagcucccugaccaucaagaagcccaacgagcucagccgcgugcugggccugaagacccucgccacccacgggcuggccgccgucaacuccgugcccugggacacgaucgccaacuacgcgaagccguuccugaacaagguggucagcaccaccaccaacaucgugacgcgcugccucaaccgggugugcaccaacuacaugcccuacuucuucacccugcugcuccagcugugcaccuucacccgcuccacgaacagccggaucaaggccuccaugcccaccaccaucgccaagaacaccgucaagagcgugggcaaguucugccuggaggccagcuucaacuaccucaagucccccaacuucagcaagcugaucaacaucaucaucugguuccugcuccuguccgugugccugggcagccucaucuacuccacggccgcgcuggggguccugaugagcaaccucggcaugccguccuacugcaccggguaccgcgagggcuaccugaacagcaccaacgugaccaucgccacguacugcaccggcuccauccccugcagcgugugccuguccgggcucgacagccuggacaccuaccccucccuggagaccauccagaucacgaucagcuccuucaagugggaccucaccgccuucggccuggucgccgagugguuccuggccuacauccucuucacccgguucuucuacgugcuggggcuggcggccaucaugcagcucuucuucagcuacuucgccgugcacuucaucuccaacagcuggcugauguggcugaucaucaaccugguccagauggcccccaucuccgcgauggugcgcauguacaucuucuucgccagcuucuacuacguguggaagagcuacguccacgugguggacggcugcaacuccagcaccugcaugaugugcuacaagcggaaccgcgccacgcgggucgagugcaccaccaucgugaacgggguccgccgguccuucuacguguacgccaacggcggcaagggguucugcaagcuccacaacuggaacugcgugaacugcgacaccuucugcgccggcagcacguucaucuccgacgaggucgcgcgcgaccugagccugcaguucaagcggccgaucaaccccaccgaccaguccagcuacaucguggacuccgugaccgucaagaacgggagcauccaccucuacuucgacaaggccggccagaagaccuacgagcgccacucccugagccacuucgugaaccuggacaaccuccgggccaacaacacgaaggggucccugcccaucaacgugaucgucuucgacggcaagagcaagugcgaggaguccagcgccaaguccgccagcguguacuacucccagcugaugugccagcccauccuccugcuggaccaggcgcucgugagcgacgucggcgacagcgccgagguggccgugaagauguucgacgccuacgucaacaccuucuccagcaccuucaacgugccgauggagaagcugaagacccugguggccacggcggaggccgagcucgccaagaacgucucccuggacaacgugcugagcaccuucaucuccgccgcgcgccagggguucguggacagcgacgucgagaccaaggacgugguggagugccucaagcugucccaccagagcgacaucgaggucaccggcgacuccugcaacaacuacaugcugacguacaacaagguggagaacaugaccccccgggaccucggggccugcaucgacugcagcgcccgccacaucaacgcccagguggccaagucccacaacaucgcgcugaucuggaacgucaaggacuucaugagccuguccgagcagcuccggaagcagauccgcagcgccgccaagaagaacaaccugcccuucaagcugaccugcgccaccacgcgccagguggugaacgucgugaccaccaagaucgcccucaagggcgggugaggacuagucccuguucccagagcccacuuuuuuuucuuuuuuugaaauaaaauagccugucuuucagaucucaaaggcucuuuucagagccaccaaaaaaaaaaaaaaaaaaaaaaaaaaaaaaaaaaaaaaaaaaaaaaaaaaaaaaaaaaaaaaaaaaaaaaaaaaaaaaaaaaaaaaaaaaaaaaaaaaaaa

SEQ ID NO: 20004 - RNA, 6113 nt, Artificial Sequence
  SARS-CoV-2__MT479223.1__non-structural protein 3 (NSP3) mRNA gc
aggagagucccgcagucggcguccagcggcucugcuuguucgugugugugucguugcaggccuuauucaagcuuaccauggcccccaccaaggugaccuucggcgacgacacggucaucgaggugcagggguacaagagcgugaacaucaccuucgagcuggacgagcgcaucgacaagguccucaacgagaagugcuccgccuacaccguggagcugggcaccgaggugaacgaguucgcgugcgucguggccgacgccgugaucaagacgcugcagccggucagcgagcuccugaccccccuggggaucgaccucgacgagugguccauggccaccuacuaccuguucgacgagagcggcgaguucaagcuggccucccacauguacugcagcuucuacccccccgacgaggacgaggaggagggggacugcgaggaggaggaguucgagccguccacccaguacgaguacggcacggaggacgacuaccagggcaagccccucgaguucggggcgaccagcgccgcccugcagcccgaggaggagcaggaggaggacuggcuggacgacgacucccagcagaccgugggccagcaggacgggagcgaggacaaccagaccacgaccauccagaccaucguggagguccagccccagcucgagauggagcugaccccgguggugcagacgaucgaggucaacuccuucagcggcuaccugaagcucaccgacaacguguacaucaagaacgccgacaucguggaggaggcgaagaaggucaagcccaccgugguggucaacgccgccaacguguaccugaagcacgggggcggcguggccggggcccugaacaaggcgaccaacaacgccaugcaggucgaguccgacgacuacaucgccacgaacggcccccucaagguggggggcagcugcguccuguccggccacaaccuggccaagcacugccuccacgugguggggcccaacgucaacaagggcgaggacauccagcugcugaagagcgccuacgagaacuucaaccagcacgaggugcuccuggcgccgcugcucuccgccgggaucuucggcgccgaccccauccacagccugcgggugugcgucgacaccgugcgcaccaacguguaccuggccgucuucgacaagaaccucuacgacaagcugguguccagcuuccuggagaugaagagcgagaagcagguggagcagaagaucgccgagauccccaaggaggaggucaagcccuucaucaccgaguccaagccgagcguggagcagcggaagcaggacgacaagaagaucaaggcgugcguggaggaggucacgaccacccucgaggagaccaaguuccugacggagaaccugcuccuguacaucgacaucaacgggaaccugcaccccgacuccgccacccucgugagcgacaucgacaucaccuuccugaagaaggacgcccccuacaucgugggcgacgucgugcaggagggcgugcugaccgccgucgugauccccacgaagaaggccgggggcaccaccgagaugcucgcgaaggcccugcgcaaggugccgaccgacaacuacaucacgaccuaccccgggcagggccugaacggguacaccgucgaggaggccaagaccgugcucaagaagugcaaguccgccuucuacauccugcccagcaucaucuccaacgagaagcaggagauccugggcaccgugagcuggaaccuccgggagaugcuggcgcacgccgaggagacgcgcaagcugaugcccgucugcguggagaccaaggccaucguguccaccauccagcggaaguacaagggcaucaagauccaggagggggucguggacuacggcgcccgcuucuacuucuacaccagcaagacgaccguggccucccugaucaacacccucaacgaccugaacgagacccuggucacgaugccgcucggguacgugacccacggccugaaccuggaggaggcggcccgguacaugcgcagccucaaggugcccgccaccgucuccgugagcucccccgacgccgugaccgccuacaacggguaccugacgagcuccagcaagacccccgaggagcacuucaucgagaccaucucccuggcgggcagcuacaaggacuggagcuacuccggccagagcacccagcucgggaucgaguuccugaagcggggcgacaaguccgucuacuacacgagcaacccgaccaccuuccaccuggacggggaggugaucaccuucgacaaccucaagacgcugcugucccuccgcgaggugcggaccaucaaggucuucaccaccguggacaacaucaaccugcacacgcagguggucgacaugagcaugaccuacggccagcaguucggccccaccuaccuggacggggccgacgugaccaagaucaagccccacaacucccacgagggcaagacguucuacgugcucccgaacgacgacacccugcgcgucgaggccuucgaguacuaccacaccaccgaccccagcuuccuggggcgguacauguccgcccucaaccacacgaagaaguggaaguacccccaggugaacggccugaccagcaucaagugggccgacaacaacugcuaccuggcgaccgcccuccugacccugcagcagaucgagcucaaguucaaccccccggcccugcaggacgccuacuaccgcgcgcgggccggggaggccgccaacuucugcgcccugauccucgcguacugcaacaagacggugggcgagcugggcgacguccgcgagaccauguccuaccuguuccagcacgccaaccucgacagcugcaagcgggugcugaacgucgugugcaagaccugcgggcagcagcagaccacccugaagggcguggaggccgucauguacauggggacgcucuccuacgagcaguucaagaagggcgugcagauccccugcaccugcgggaagcaggccaccaaguaccuggugcagcaggagagccccuucgucaugauguccgcccccccggcgcaguacgagcugaagcacggcaccuucacgugcgccagcgaguacaccggcaacuaccagugcgggcacuacaagcacaucaccuccaaggagacccucuacugcaucgacggcgcccugcugacgaagagcagcgaguacaaggggcccaucaccgacguguucuacaaggagaacuccuacaccaccacgaucaagcccgugaccuacaagcucgacggcgucgugugcaccgagaucgaccccaagcuggacaacuacuacaagaaggacaacagcuacuucaccgagcagccgaucgaccuggugcccaaccagcccuaccccaacgccuccuucgacaacuucaaguucgucugcgacaacaucaaguucgccgacgaccucaaccagcugacgggguacaagaagccggcgagccgcgagcugaaggugaccuucuuccccgaccucaacggcgacguggucgccaucgacuacaagcacuacacccccuccuucaagaagggcgccaagcugcugcacaagcccaucguguggcacgugaacaacgccaccaacaaggcgacguacaagccgaacaccuggugcauccggugccucuggagcaccaagcccgucgagaccuccaacagcuucgacgugcugaaguccgaggacgcccaggggauggacaaccuggccugcgaggaccucaagcccgugagcgaggaggucguggagaaccccacgauccagaaggacgugcuggagugcaacgucaagaccaccgagguggugggcgacaucauccugaagccggccaacaacucccucaagaucaccgaggaggucgggcacacggaccugauggccgcguacguggacaacagcucccugaccaucaagaagcccaacgagcucagccgcgugcugggccugaagacccucgccacccacgggcuggccgccgucaacuccgugcccugggacacgaucgccaacuacgcgaagccguuccugaacaagguggucagcaccaccaccaacaucgugacgcgcugccucaaccgggugugcaccaacuacaugcccuacuucuucacccugcugcuccagcugugcaccuucacccgcuccacgaacagccggaucaaggccuccaugcccaccaccaucgccaagaacaccgucaagagcgugggcaaguucugccuggaggccagcuucaacuaccucaagucccccaacuucagcaagcugaucaacaucaucaucugguuccugcuccuguccgugugccugggcagccucaucuacuccacggccgcgcuggggguccugaugagcaaccucggcaugccguccuacugcaccggguaccgcgagggcuaccugaacagcaccaacgugaccaucgccacguacugcaccggcuccauccccugcagcgugugccuguccgggcucgacagccuggacaccuaccccucccuggagaccauccagaucacgaucagcuccuucaagugggaccucaccgccuucggccuggucgccgagugguuccuggccuacauccucuucacccgguucuucuacgugcuggggcuggcggccaucaugcagcucuucuucagcuacuucgccgugcacuucaucuccaacagcuggcugauguggcugaucaucaaccugguccagauggcccccaucuccgcgauggugcgcauguacaucuucuucgccagcuucuacuacguguggaagagcuacguccacgugguggacggcugcaacuccagcaccugcaugaugugcuacaagcggaaccgcgccauccgggucgagugcacgaccaucgugaacgggguccgccgguccuucuacguguacgccaacggcggcaagggguucugcaagcuccacaacuggaacugcgugaacugcgacaccuucugcgccggcagcaccuucaucuccgacgaggucgcgcgcgaccugagccugcaguucaagcggccgaucaaccccacggaccaguccagcuacaucguggacuccgugaccgucaagaacgggagcauccaccucuacuucgacaaggccggccagaagaccuacgagcgccacucccugagccacuucgugaaccuggacaaccuccgggccaacaacaccaaggggucccugcccaucaacgugaucgucuucgacggcaagagcaagugcgaggaguccagcgccaaguccgccagcguguacuacucccagcugaugugccagcccauccuccugcuggaccaggcgcucgugagcgacgucggcgacagcgccgagguggccgugaagauguucgacgccuacgucaacacguucuccagcaccuucaacgugccgauggagaagcugaagacccugguggccaccgcggaggccgagcucgccaagaacgucucccuggacaacgugcugagcacguucaucuccgccgcgcgccagggguucguggacagcgacgucgagaccaaggacgugguggagugccucaagcugucccaccagagcgacaucgaggucaccggcgacuccugcaacaacuacaugcugaccuacaacaagguggagaacaugacgccccgggaccucggggccugcaucgacugcagcgcccgccacaucaacgcccagguggccaagucccacaacaucgcgcugaucuggaacgucaaggacuucaugagccuguccgagcagcuccggaagcagauccgcagcgccgccaagaagaacaaccugcccuucaagcugaccugcgccaccacccgccagguggugaacgucgugacgaccaagaucgcccucaagggcgggugaggacuagucccuguucccagagcccacuuuuuuuucuuuuuuugaaauaaaauagccugucuuucagaucucaaaggcucuuuucagagccaccaaaaaaaaaaaaaaaaaaaaaaaaaaaaaaaaaaaaaaaaaaaaaaaaaaaaaaaaaaaaaaaaaaaaaaaaaaaaaaaaaaaaaaaaaaaaaaaaaaaaa

SEQ ID NO: 20005 - RNA, 6113 nt, Artificial Sequence
  SARS-CoV-2__MT582483.1__non-structural protein 3 (NSP3) mRNA gc
aggagagucccgcagucggcguccagcggcucugcuuguucgugugugugucguugcaggccuuauucaagcuuaccauggcccccaccaaggugaccuucggcgacgacacggucaucgaggugcagggguacaagagcgugaacaucaccuucgagcuggacgagcgcaucgacaagguccucaacgagaagugcuccgccuacaccguggagcugggcaccgaggugaacgaguucgcgugcgucgugacggacgccgugaucaagacccugcagccggucagcgagcuccugaccccccuggggaucgaccucgacgagugguccauggccaccuacuaccuguucgacgagagcggcgaguucaagcuggccucccacauguacugcagcuucuacccccccgacgaggacgaggaggagggggacugcgaggaggaggaguucgagccguccacgcaguacgaguacggcaccgaggacgacuaccagggcaagccccucgaguucggggccaccagcgcggcccugcagcccgaggaggagcaggaggaggacuggcuggacgacgacucccagcagaccgugggccagcaggacgggagcgaggacaaccagacgaccaccauccagaccaucguggagguccagccccagcucgagauggagcugacgccgguggugcagaccaucgaggucaacuccuucagcggcuaccugaagcucaccgacaacguguacaucaagaacgccgacaucguggaggaggccaagaaggucaagcccaccgugguggucaacgcggccaacguguaccugaagcacgggggcggcguggccggggcccugaacaaggccacgaacaacgcgaugcaggucgaguccgacgacuacaucgccaccaacggcccccucaagguggggggcagcugcguccuguccggccacaaccuggccaagcacugccuccacgugguggggcccaacgucaacaagggcgaggacauccagcugcugaagagcgccuacgagaacuucaaccagcacgaggugcuccuggccccgcugcucuccgcggggaucuucggcgccgaccccauccacagccugcgggugugcgucgacaccgugcgcaccaacguguaccuggccgucuucgacaagaaccucuacgacaagcugguguccagcuuccuggagaugaagagcgagaagcagguggagcagaagaucgccgagauccccaaggaggaggucaagcccuucaucacggaguccaagccgagcguggagcagcggaagcaggacgacaagaagaucaaggccugcguggaggaggucaccaccacccucgaggagacgaaguuccugaccgagaaccugcuccuguacaucgacaucaacgggaaccugcaccccgacuccgcgacccucgugagcgacaucgacaucaccuuccugaagaaggacgcccccuacaucgugggcgacgucgugcaggagggcgugcugacggccgucgugauccccaccaagaaggccgggggcaccaccgagaugcucgccaaggcgcugcgcaaggugccgacggacaacuacaucaccaccuaccccgggcagggccugaacggguacaccgucgaggaggccaagaccgugcucaagaagugcaaguccgccuucuacauccugcccagcaucaucuccaacgagaagcaggagauccugggcacggugagcuggaaccuccgggagaugcuggcccacgcggaggagacccgcaagcugaugcccgucugcguggagaccaaggccaucguguccaccauccagcggaaguacaagggcaucaagauccaggagggggucguggacuacggcgcccgcuucuacuucuacacgagcaagaccaccguggccucccugaucaacacccucaacgaccugaacgagacgcuggucaccaugccgcucggguacgugacccacggccugaaccuggaggaggccgcgcgguacaugcgcagccucaaggugcccgccaccgucuccgugagcucccccgacgccgugacggccuacaacggguaccugaccagcuccagcaagacccccgaggagcacuucaucgagaccaucucccuggccggcagcuacaaggacuggagcuacuccggccagagcacgcagcucgggaucgaguuccugaagcggggcgacaaguccgucuacuacaccagcaacccgaccaccuuccaccuggacggggaggugaucacguucgacaaccucaagacccugcugucccuccgcgaggugcggaccaucaaggucuucaccacgguggacaacaucaaccugcacacccagguggucgacaugagcaugaccuacggccagcaguucggccccaccuaccuggacggggcggacgugacgaagaucaagccccacaacucccacgagggcaagaccuucuacgugcucccgaacgacgacacccugcgcgucgaggccuucgaguacuaccacaccacggaccccagcuuccuggggcgguacauguccgcccucaaccacaccaagaaguggaaguacccccaggugaacggccugaccagcaucaagugggccgacaacaacugcuaccuggccaccgcgcuccugacgcugcagcagaucgagcucaaguucaaccccccggcccugcaggacgccuacuaccgcgcccgggcgggggaggccgccaacuucugcgcccugauccucgccuacugcaacaagaccgugggcgagcugggcgacguccgcgagaccauguccuaccuguuccagcacgcgaaccucgacagcugcaagcgggugcugaacgucgugugcaagaccugcgggcagcagcagaccacgcugaagggcguggaggccgucauguacauggggacccucuccuacgagcaguucaagaagggcgugcagauccccugcaccugcgggaagcaggccaccaaguaccuggugcagcaggagagccccuucgucaugauguccgcccccccggcccaguacgagcugaagcacggcacguucaccugcgcgagcgaguacaccggcaacuaccagugcgggcacuacaagcacaucaccuccaaggagacgcucuacugcaucgacggcgcccugcugaccaagagcagcgaguacaaggggcccaucaccgacguguucuacaaggagaacuccuacaccacgaccaucaagcccgugaccuacaagcucgacggcgucgugugcaccgagaucgaccccaagcuggacaacuacuacaagaaggacaacagcuacuucacggagcagccgaucgaccuggugcccaaccagcccuaccccaacgccuccuucgacaacuucaaguucgucugcgacaacaucaaguucgccgacgaccucaaccagcugaccggguacaagaagccggccagccgcgagcugaaggugaccuucuuccccgaccucaacggcgacguggucgcgaucgacuacaagcacuacacccccuccuucaagaagggcgccaagcugcugcacaagcccaucguguggcacgugaacaacgccacgaacaaggccaccuacaagccgaacaccuggugcauccggugccucuggagcaccaagcccgucgagacguccaacagcuucgacgugcugaaguccgaggacgcgcaggggauggacaaccuggccugcgaggaccucaagcccgugagcgaggaggucguggagaaccccaccauccagaaggacgugcuggagugcaacgucaagaccaccgagguggugggcgacaucauccugaagccggccaacaacucccucaagaucacggaggaggucgggcacaccgaccugauggccgccuacguggacaacagcucccugaccaucaagaagcccaacgagcucagccgcgugcugggccugaagacccucgcgacgcacgggcuggccgccgucaacuccgugcccugggacaccaucgccaacuacgccaagccguuccugaacaagguggucagcaccaccacgaacaucgugacccgcugccucaaccgggugugcaccaacuacaugcccuacuucuucacccugcugcuccagcugugcaccuucacgcgcuccaccaacagccggaucaaggcguccaugcccaccaccaucgccaagaacacggucaagagcgugggcaaguucugccuggaggccagcuucaacuaccucaagucccccaacuucagcaagcugaucaacaucaucaucugguuccugcuccuguccgugugccugggcagccucaucuacuccaccgccgcccuggggguccugaugagcaaccucggcaugccguccuacugcaccggguaccgcgagggcuaccugaacagcaccaacgugacgaucgcgaccuacugcaccggcuccauccccugcagcgugugccuguccgggcucgacagccuggacaccuaccccucccuggagacgauccagaucaccaucagcuccuucaagugggaccucaccgccuucggccuggucgccgagugguuccuggccuacauccucuucacccgguucuucuacgugcuggggcuggccgcgaucaugcagcucuucuucagcuacuucgccgugcacuucaucuccaacagcuggcugauguggcugaucaucaaccugguccagauggcccccaucuccgccauggugcgcauguacaucuucuucgcgagcuucuacuacguguggaagagcuacguccacgugguggacggcugcaacuccagcacgugcaugaugugcuacaagcggaaccgcgccacccgggucgagugcaccaccaucgugaacgggguccgccgguccuucuacguguacgccaacggcggcaagggguucugcaagcuccacaacuggaacugcgugaacugcgacacguucugcgccggcagcaccuucaucuccgacgaggucgcccgcgaccugagccugcaguucaagcggccgaucaaccccaccgaccaguccagcuacaucguggacuccgugaccgucaagaacgggagcauccaccucuacuucgacaaggcgggccagaagacguacgagcgccacucccugagccacuucgugaaccuggacaaccuccgggccaacaacaccaaggggucccugcccaucaacgugaucgucuucgacggcaagagcaagugcgaggaguccagcgccaaguccgccagcguguacuacucccagcugaugugccagcccauccuccugcuggaccaggcccucgugagcgacgucggcgacagcgcggagguggccgugaagauguucgacgccuacgucaacaccuucuccagcaccuucaacgugccgauggagaagcugaagacgcugguggccaccgccgaggcggagcucgccaagaacgucucccuggacaacgugcugagcaccuucaucuccgccgcccgccagggguucguggacagcgacgucgagaccaaggacgugguggagugccucaagcugucccaccagagcgacaucgaggucacgggcgacuccugcaacaacuacaugcugaccuacaacaagguggagaacaugaccccccgggaccucggggcgugcaucgacugcagcgcccgccacaucaacgcccagguggccaagucccacaacaucgcccugaucuggaacgucaaggacuucaugagccuguccgagcagcuccggaagcagauccgcagcgcggccaagaagaacaaccugcccuucaagcugaccugcgccacgacccgccagguggugaacgucgugaccaccaagaucgcccucaagggcgggugaggacuagucccuguucccagagcccacuuuuuuuucuuuuuuugaaauaaaauagccugucuuucagaucucaaaggcucuuuucagagccaccaaaaaaaaaaaaaaaaaaaaaaaaaaaaaaaaaaaaaaaaaaaaaaaaaaaaaaaaaaaaaaaaaaaaaaaaaaaaaaaaaaaaaaaaaaaaaaaaaaaaa

SEQ ID NO: 20006 - RNA, 6113 nt, Artificial Sequence
  SARS-CoV-2__MT582496.1__non-structural protein 3 (NSP3) mRNA gc
aggagagucccgcagucggcguccagcggcucugcuuguucgugugugugucguugcaggccuuauucaagcuuaccauggcccccaccaaggugaccuucggcgacgacacggucaucgaggugcagggguacaagagcgugaacaucaccuucgagcuggacgagcgcaucgacaagguccucaacgagaagugcuccgccuacaccguggagcugggcaccgaggugaacgaguucgcgugcgucgugacggacgccgugaucaagacccugcagccggucagcgagcuccugaccccccuggggaucgaccucgacgagugguccauggccaccuacuaccuguucgacgagagcggcgaguucaagcuggccucccacauguacugcagcuucuacccccccgacgaggacgaggaggagggggacugcgaggaggaggaguucgagccguccacgcaguacgaguacggcaccgaggacgacuaccagggcaagccccucgaguucggggccaccagcgcggcccugcagcccgaggaggagcaggaggaggacuggcuggacgacgacucccagcagaccgugggccagcaggacgggagcgaggacaaccagacgaccaccauccagaccaucguggagguccagccccagcucgagauggagcugacgccgguggugcagaccaucgaggucaacuccuucagcggcuaccugaagcucaccgacaacguguacaucaagaacgccgacaucguggaggaggccaagaaggucaagcccaccgugguggucaacgcggccaacguguaccugaagcacgggggcggcguggccggggcccugaacaaggccacgaacaacgcgaugcaggucgaguccgacgacuacaucgccaccaacggcccccucaagguggggggcagcugcguccuguccggccacaaccuggccaagcacugccuccacgugguggggcccaacgucaacaagggcgaggacauccagcugcugaagagcgccuacgagaacuucaaccagcacgaggugcuccuggccccgcugcucuccgcggggaucuucggcgccgaccccauccacagccugcgggugugcgucgacaccgugcgcaccaacguguaccuggccgucuucgacaagaaccucuacgacaagcugguguccagcuuccuggagaugaagagcgagaagcagguggagcagaagaucgccgagauccccaaggaggaggucaagcccuucaucacggaguccaagccgagcguggagcagcggaagcaggacgacaagaagaucaaggccugcguggaggaggucaccaccacccucgaggagacgaaguuccugaccgagaaccugcuccuguacaucgacaucaacgggaaccugcaccccgacuccgcgacccucgugagcgacaucgacaucaccuuccugaagaaggacgcccccuacaucgugggcgacgucgugcaggagggcgugcugacggccgucgugauccccaccaagaaggccgggggcaccaccgagaugcucgccaaggcgcugcgcaaggugccgacggacaacuacaucaccaccuaccccgggcagggccugaacggguacaccgucgaggaggccaagaccgugcucaagaagugcaaguccgccuucuacauccugcccagcaucaucuccaacgagaagcaggagauccugggcacggugagcuggaaccuccgggagaugcuggcccacgcggaggagacccgcaagcugaugcccgucugcguggagaccaaggccaucguguccaccauccagcggaaguacaagggcaucaagauccaggagggggucguggacuacggcgcccgcuucuacuucuacacgagcaagaccaccguggccucccugaucaacacccucaacgaccugaacgagacgcuggucaccaugccgcucggguacgugacccacggccugaaccuggaggaggccgcgugguacaugcggagccucaaggugcccgccaccgucuccgugagcucccccgacgccgugacggccuacaacggguaccugaccagcuccagcaagacccccgaggagcacuucaucgagaccaucucccuggccggcagcuacaaggacuggagcuacuccggccagagcacgcagcucgggaucgaguuccugaagcgcggcgacaaguccgucuacuacaccagcaacccgaccaccuuccaccuggacggggaggugaucacguucgacaaccucaagacccugcugucccuccgggaggugcgcaccaucaaggucuucaccacgguggacaacaucaaccugcacacccagguggucgacaugagcaugaccuacggccagcaguucggccccaccuaccuggacggggcggacgugacgaagaucaagccccacaacucccacgagggcaagaccuucuacgugcucccgaacgacgacacccugcgggucgaggccuucgaguacuaccacaccacggaccccagcuuccuggggcgcuacauguccgcccucaaccacaccaagaaguggaaguacccccaggugaacggccugaccagcaucaagugggccgacaacaacugcuaccuggccaccgcgcuccugacgcugcagcagaucgagcucaaguucaaccccccggcccugcaggacgccuacuaccgggcccgcgcgggggaggccgccaacuucugcgcccugauccucgccuacugcaacaagaccgugggcgagcugggcgacguccgggagaccauguccuaccuguuccagcacgcgaaccucgacagcugcaagcgcgugcugaacgucgugugcaagaccugcgggcagcagcagaccacgcugaagggcguggaggccgucauguacauggggacccucuccuacgagcaguucaagaagggcgugcagauccccugcaccugcgggaagcaggccaccaaguaccuggugcagcaggagagccccuucgucaugauguccgcccccccggcccaguacgagcugaagcacggcacguucaccugcgcgagcgaguacaccggcaacuaccagugcgggcacuacaagcacaucaccuccaaggagacgcucuacugcaucgacggcgcccugcugaccaagagcagcgaguacaaggggcccaucaccgacguguucuacaaggagaacuccuacaccacgaccaucaagcccgugaccuacaagcucgacggcgucgugugcaccgagaucgaccccaagcuggacaacuacuacaagaaggacaacagcuacuucacggagcagccgaucgaccuggugcccaaccagcccuaccccaacgccuccuucgacaacuucaaguucgucugcgacaacaucaaguucgccgacgaccucaaccagcugaccggguacaagaagccggccagccgggagcugaaggugaccuucuuccccgaccucaacggcgacguggucgcgaucgacuacaagcacuacacccccuccuucaagaagggcgccaagcugcugcacaagcccaucguguggcacgugaacaacgccacgaacaaggccaccuacaagccgaacaccuggugcauccgcugccucuggagcaccaagcccgucgagacguccaacagcuucgacgugcugaaguccgaggacgcgcaggggauggacaaccuggccugcgaggaccucaagcccgugagcgaggaggucguggagaaccccaccauccagaaggacgugcuggagugcaacgucaagaccaccgagguggugggcgacaucauccugaagccggccaacaacucccucaagaucacggaggaggucgggcacaccgaccugauggccgccuacguggacaacagcucccugaccaucaagaagcccaacgagcucagccgggugcugggccugaagacccucgcgacgcacgggcuggccgccgucaacuccgugcccugggacaccaucgccaacuacgccaagccguuccugaacaagguggucagcaccaccacgaacaucgugacccgcugccucaaccgcgugugcaccaacuacaugcccuacuucuucacccugcugcuccagcugugcaccuucacgcgguccaccaacagccgcaucaaggcguccaugcccaccaccaucgccaagaacacggucaagagcgugggcaaguucugccuggaggccagcuucaacuaccucaagucccccaacuucagcaagcugaucaacaucaucaucugguuccugcuccuguccgugugccugggcagccucaucuacuccaccgccgcccuggggguccugaugagcaaccucggcaugccguccuacugcaccggguaccgggagggcuaccugaacagcaccaacgugacgaucgcgaccuacugcaccggcuccauccccugcagcgugugccuguccgggcucgacagccuggacaccuaccccucccuggagacgauccagaucaccaucagcuccuucaagugggaccucaccgccuucggccuggucgccgagugguuccuggccuacauccucuucacccgcuucuucuacgugcuggggcuggccgcgaucaugcagcucuucuucagcuacuucgccgugcacuucaucuccaacagcuggcugauguggcugaucaucaaccugguccagauggcccccaucuccgccauggugcggauguacaucuucuucgcgagcuucuacuacguguggaagagcuacguccacgugguggacggcugcaacuccagcacgugcaugaugugcuacaagcgcaaccgggccacccgcgucgagugcaccaccaucgugaacgggguccggcgcuccuucuacguguacgccaacggcggcaagggguucugcaagcuccacaacuggaacugcgugaacugcgacacguucugcgccggcagcaccuucaucuccgacgaggucgcccgggaccugagccugcaguucaagcgcccgaucaaccccaccgaccaguccagcuacaucguggacuccgugaccgucaagaacgggagcauccaccucuacuucgacaaggcgggccagaagacguacgagcggcacucccugagccacuucgugaaccuggacaaccuccgcgccaacaacaccaaggggucccugcccaucaacgugaucgucuucgacggcaagagcaagugcgaggaguccagcgccaaguccgccagcguguacuacucccagcugaugugccagcccauccuccugcuggaccaggcccucgugagcgacgucggcgacagcgcggagguggccgugaagauguucgacgccuacgucaacaccuucuccagcaccuucaacgugccgauggagaagcugaagacgcugguggccaccgccgaggcggagcucgccaagaacgucucccuggacaacgugcugagcaccuucaucuccgccgcccggcagggguucguggacagcgacgucgagaccaaggacgugguggagugccucaagcugucccaccagagcgacaucgaggucacgggcgacuccugcaacaacuacaugcugaccuacaacaagguggagaacaugaccccccgcgaccucggggcgugcaucgacugcagcgcccggcacaucaacgcccagguggccaagucccacaacaucgcccugaucuggaacgucaaggacuucaugagccuguccgagcagcuccgcaagcagauccggagcgcggccaagaagaacaaccugcccuucaagcugaccugcgccacgacccgccagguggugaacgucgugaccaccaagaucgcccucaagggcgggugaggacuagucccuguucccagagcccacuuuuuuuucuuuuuuugaaauaaaauagccugucuuucagaucucaaaggcucuuuucagagccaccaaaaaaaaaaaaaaaaaaaaaaaaaaaaaaaaaaaaaaaaaaaaaaaaaaaaaaaaaaaaaaaaaaaaaaaaaaaaaaaaaaaaaaaaaaaaaaaaaaaaa

SEQ ID NO: 20007 - RNA, 6113 nt, Artificial Sequence
  SARS-CoV-2__MT499218.1__non-structural protein 3 (NSP3) mRNA gc
aggagagucccgcagucggcguccagcggcucugcuuguucgugugugugucguugcaggccuuauucaagcuuaccauggcccccaccaaggugaccuucggcgacgacacggucaucgaggugcagggguacaagagcgugaacaucaccuucgagcuggacgagcgcaucgacaagguccucaacgagaagugcuccgccuacaccguggagcugggcaccgaggugaacgaguucgcgugcgucguggccgacgccgugaucaagacgcugcagccggucagcgagcuccugaccccccuggggaucgaccucgacgagugguccauggccaccuacuaccuguucgacgagagcggcgaguucaagcuggccucccacauguacugcagcuucuacccccccgacgaggacgaggaggagggggacugcgaggaggaggaguucgagccguccacccaguacgaguacggcacggaggacgacuaccagggcaagccccucgaguucggggcgaccagcgccgcccugcagcccgaggaggagcaggaggaggacuggcuggacgacgacucccagcagaccgugggccagcaggacgggagcgaggacaaccagaccacgaccauccagaccaucguggagguccagccccagcucgagauggagcugaccccgguggugcagacgaucgaggucaacuccuucagcggcuaccugaagcucaccgacaacguguacaucaagaacgccgacaucguggaggaggcgaagaaggucaagcccaccgugguggucaacgccgccaacguguaccugaagcacgggggcggcguggccggggcccugaacaaggcgaccaacaacgccaugcaggucgaguccgacgacuacaucgccacgaacggcccccucaagguggggggcagcugcguccuguccggccacaaccuggccaagcacugccuccacgugguggggcccaacgucaacaagggcgaggacauccagcugcugaagagcgccuacgagaacuucaaccagcacgaggugcuccuggcgccgcugcucuccgccgggaucuucggcgccgaccccauccacagccugcgggugugcgucgacaccgugcgcaccaacguguaccuggccgucuucgacaagaaccucuacgacaagcugguguccagcuuccuggagaugaagagcgagaagcagguggagcagaagaucgccgagauccccaaggaggaguucaagcccuucaucaccgaguccaagccgagcgucgagcagcggaagcaggacgacaagaagaucaaggcgugcguggaggaggugacgaccacccucgaggagaccaaguuccugacggagaaccugcuccuguacaucgacaucaacgggaaccugcaccccgacuccgccacccucgucagcgacaucgacaucaccuuccugaagaaggacgcccccuacaucgugggcgacgugguccaggagggcgugcugaccgccguggucauccccacgaagaaggccgggggcaccaccgagaugcucgcgaaggcccugcgcaaggugccgaccgacaacuacaucacgaccuaccccgggcagggccugaacggguacaccguggaggaggccaagaccguccucaagaagugcaaguccgccuucuacauccugcccagcaucaucuccaacgagaagcaggagauccugggcaccgugagcuggaaccuccgggagaugcuggcgcacgccgaggagacgcgcaagcugaugcccgugugcgucgagaccaaggccaucguguccaccauccagcggaaguacaagggcaucaagauccaggaggggguggucgacuacggcgcccgcuucuacuucuacaccagcaagacgaccguggccucccugaucaacacccucaacgaccugaacgagacccuggugacgaugccgcucggguacgucacccacggccugaaccuggaggaggcggcccgguacaugcgcagccucaaggugcccgccaccguguccgucagcucccccgacgccgugaccgccuacaacggguaccugacgagcuccagcaagacccccgaggagcacuucaucgagaccaucucccuggcgggcagcuacaaggacuggagcuacuccggccagagcacccagcucgggaucgaguuccugaagcggggcgacaaguccguguacuacacgagcaacccgaccaccuuccaccuggacggggaggucaucaccuucgacaaccucaagacgcugcugucccuccgcgaggugcggaccaucaagguguucaccaccgucgacaacaucaaccugcacacgcaggugguggacaugagcaugaccuacggccagcaguucggccccaccuaccuggacggggccgacgucaccaagaucaagccccacaacucccacgagggcaagacguucuacgugcucccgaacgacgacacccugcgcguggaggccuucgaguacuaccacaccaccgaccccagcuuccuggggcgguacauguccgcccucaaccacacgaagaaguggaaguacccccaggucaacggccugaccagcaucaagugggccgacaacaacugcuaccuggcgaccgcccuccugacccugcagcagaucgagcucaaguucaaccccccggcccugcaggacgccuacuaccgcgcgcgggccggggaggccgccaacuucugcgcccugauccucgcguacugcaacaagacggugggcgagcugggcgacgugcgcgagaccauguccuaccuguuccagcacgccaaccucgacagcugcaagcggguccugaacguggucugcaagaccugcgggcagcagcagaccacccugaagggcguggaggccgugauguacauggggacgcucuccuacgagcaguucaagaagggcguccagauccccugcaccugcgggaagcaggccaccaaguaccuggugcagcaggagagccccuucgugaugauguccgcccccccggcgcaguacgagcugaagcacggcaccuucacgugcgccagcgaguacaccggcaacuaccagugcgggcacuacaagcacaucaccuccaaggagacccucuacugcaucgacggcgcccugcugacgaagagcagcgaguacaaggggcccaucaccgacgucuucuacaaggagaacuccuacaccaccacgaucaagcccgugaccuacaagcucgacggcguggucugcaccgagaucgaccccaagcuggacaacuacuacaagaaggacaacagcuacuucaccgagcagccgaucgaccuggugcccaaccagcccuaccccaacgccuccuucgacaacuucaaguucgugugcgacaacaucaaguucgccgacgaccucaaccagcugacgggguacaagaagccggcgagccgcgagcugaaggucaccuucuuccccgaccucaacggcgacgugguggccaucgacuacaagcacuacacccccuccuucaagaagggcgccaagcugcugcacaagcccaucgucuggcacgugaacaacgccaccaacaaggcgacguacaagccgaacaccuggugcauccggugccucuggagcaccaagcccguggagaccuccaacagcuucgacguccugaaguccgaggacgcccaggggauggacaaccuggccugcgaggaccucaagcccgugagcgaggagguggucgagaaccccacgauccagaaggacgugcuggagugcaacgugaagaccaccgaggucgugggcgacaucauccugaagccggccaacaacucccucaagaucaccgaggagguggggcacacggaccugauggccgcguacgucgacaacagcucccugaccaucaagaagcccaacgagcucagccgcgugcugggccugaagacccucgccacccacgggcuggccgccgugaacuccguccccugggacacgaucgccaacuacgcgaagccguuccugaacaagguggugagcaccaccaccaacaucgucacgcgcugccucaaccgggugugcaccaacuacaugcccuacuucuucacccugcugcuccagcugugcaccuucacccgcuccacgaacagccggaucaaggccuccaugcccaccaccaucgccaagaacaccgugaagagcgucggcaaguucugccuggaggccagcuucaacuaccucaagucccccaacuucagcaagcugaucaacaucaucaucugguuccugcuccuguccgugugccugggcagccucaucuacuccacggccgcgcugggggugcugaugagcaaccucggcaugccguccuacugcaccggguaccgcgagggcuaccugaacagcaccaacgucaccaucgccacguacugcaccggcuccauccccugcagcgugugccuguccgggcucgacagccuggacaccuaccccucccuggagaccauccagaucacgaucagcuccuucaagugggaccucaccgccuucggccugguggccgagugguuccuggccuacauccucuucacccgguucuucuacguccuggggcuggcggccaucaugcagcucuucuucagcuacuucgccgugcacuucaucuccaacagcuggcugauguggcugaucaucaaccuggugcagauggcccccaucuccgcgaugguccgcauguacaucuucuucgccagcuucuacuacguguggaagagcuacgugcacgucguggacggcugcaacuccagcaccugcaugaugugcuacaagcggaaccgcgccacgcggguggagugcaccaccaucgucaacggggugcgccgguccuucuacgucuacgccaacggcggcaagggguucugcaagcuccacaacuggaacugcgugaacugcgacaccuucugcgccggcagcacguucaucuccgacgagguggcgcgcgaccugagccugcaguucaagcggccgaucaaccccaccgaccaguccagcuacaucgucgacuccgugaccgugaagaacgggagcauccaccucuacuucgacaaggccggccagaagaccuacgagcgccacucccugagccacuucgucaaccuggacaaccuccgggccaacaacacgaaggggucccugcccaucaacgugaucguguucgacggcaagagcaagugcgaggaguccagcgccaaguccgccagcgucuacuacucccagcugaugugccagcccauccuccugcuggaccaggcgcucgugagcgacgugggcgacagcgccgaggucgccgugaagauguucgacgccuacgugaacaccuucuccagcaccuucaacgucccgauggagaagcugaagacccugguggccacggcggaggccgagcucgccaagaacgugucccuggacaacguccugagcaccuucaucuccgccgcgcgccagggguucguggacagcgacguggagaccaaggacgucguggagugccucaagcugucccaccagagcgacaucgaggugaccggcgacuccugcaacaacuacaugcugacguacaacaaggucgagaacaugaccccccgggaccucggggccugcaucgacugcagcgcccgccacaucaacgcccagguggccaagucccacaacaucgcgcugaucuggaacgugaaggacuucaugagccuguccgagcagcuccggaagcagauccgcagcgccgccaagaagaacaaccugcccuucaagcugaccugcgccaccacgcgccaggucgugaacguggucaccaccaagaucgcccucaagggcgggugaggacuagucccuguucccagagcccacuuuuuuuucuuuuuuugaaauaaaauagccugucuuucagaucucaaaggcucuuuucagagccaccaaaaaaaaaaaaaaaaaaaaaaaaaaaaaaaaaaaaaaaaaaaaaaaaaaaaaaaaaaaaaaaaaaaaaaaaaaaaaaaaaaaaaaaaaaaaaaaaaaaaa

SEQ ID NO: 20008 - RNA, 6113 nt, Artificial Sequence
  SARS-CoV-2__MT576035.1__non-structural protein 3 (NSP3) mRNA gc
aggagagucccgcagucggcguccagcggcucugcuuguucgugugugugucguugcaggccuuauucaagcuuaccauggcccccaccaaggugaccuucggcgacgacacggucaucgaggugcagggguacaagagcgugaacaucaccuucgagcuggacgagcgcaucgacaagguccucaacgagaagugcuccgccuacaccguggagcugggcaccgaggugaacgaguucgcgugcgucguggccgacgccgugaucaagacgcugcagccggucagcgagcuccugaccccccuggggaucgaccucgacgagugguccauggccaccuacuaccuguucgacgagagcggcgaguucaagcuggccucccacauguacugcagcuucuacccccccgacgaggacgaggaggagggggacugcgaggaggaggaguucgagccguccacccaguacgaguacggcacggaggacgacuaccagggcaagccccucgaguucggggcgaccagcgccgcccugcagcccgaggaggagcaggaggaggacuggcuggacgacgacucccagcagaccgugggccagcaggacgggagcgaggacaaccagaccacgaccauccagaccaucguggagguccagccccagcucgagauggagcugaccccgguggugcagacgaucgaggucaacuccuucagcggcuaccugaagcucaccgacaacguguacaucaagaacgccgacaucguggaggaggcgaagaaggucaagcccaccgugguggucaacgccgccaacguguaccugaagcacgggggcggcguggccggggcccugaacaaggcgaccaacaacgccaugcaggucgaguccgacgacuacaucgccacgaacggcccccucaagguggggggcagcugcguccuguccggccacaaccuggccaagcacugccuccacgugguggggcccaacgucaacaagggcgaggacauccagcugcugaagagcgccuacgagaacuucaaccagcacgaggugcuccuggcgccgcugcucuccgccgggaucuucggcgccgaccccauccacagccugcgggugugcgucgacaccgugcgcaccaacguguaccuggccgucuucgacaagaaccucuacgacaagcugguguccagcuuccuggagaugaagagcgagaagcagguggagcagaagaucgccgagauccccaaggaggaggucaagcccuucaucaccgaguccaagccgagcguggagcagcggaagcaggacgacaagaagaucaaggcgugcguggaggaggucacgaccacccucgaggagaccaaguuccugacggagaaccugcuccuguacaucgacaucaacgggaaccugcaccccgacuccgccacccucgugagcgacaucgacaucaccuuccugaagaaggacgcccccuacaucgugggcgacgucgugcaggagggcgugcugaccgccgucgugauccccacgaagaaggccgggggcaccaccgagaugcucgcgaaggcccugcgcaaggugccgaccgacaacuacaucacgaccuaccccgggcagggccugaacggguacaccgucgaggaggccaagaccgugcucaagaagugcaaguccgccuucuacauccugcccagcaucaucuccaacgagaagcaggagauccugggcaccgugagcuggaaccuccgggagaugcuggcgcacgccgaggagacgcgcaagcugaugcccgucugcguggagaccaaggccaucguguccaccauccagcggaaguacaagggcaucaagauccaggagggggucguggacuacggcgcccgcuucuacuucuacaccagcaagacgaccguggccucccugaucaacacccucaacgaccugaacgagacccuggucacgaugccgcucggguacgugacccacggccugaaccuggaggaggcggcccgguacaugcgcagccucaaggugcccgccaccgucuccgugagcucccccgacgccgugaccgccuacaacggguaccugacgagcuccagcaagacccccgaggagcacuucaucgagaccaucucccuggcgggcagcuacaaggacuggagcuacuccggccagagcacccagcucgggaucgaguuccugaagcggggcgacaaguccgucuacuacacgagcaacccgaccaccuuccaccuggacggggaggugaucaccuucgacaaccucaagacgcugcugucccuccgcgaggugcggaccaucaaggucuucaccaccguggacaacaucaaccugcacacgcagguggucgacaugagcaucaccuacggccagcaguucggccccaccuaccuggacggggccgacgugaccaagaucaagccccacaacucccacgagggcaagacguucuacgugcucccgaacgacgacacccugcgcgucgaggccuucgaguacuaccacaccaccgaccccagcuuccuggggcgguacauguccgcccucaaccacacgaagaaguggaaguacccccaggugaacggccugaccagcaucaagugggccgacaacaacugcuaccuggcgaccgcccuccugacccugcagcagaucgagcucaaguucaaccccccggcccugcaggacgccuacuaccgcgcgcgggccggggaggccgccaacuucugcgcccugauccucgcguacugcaacaagacggugggcgagcugggcgacguccgcgagaccauguccuaccuguuccagcacgccaaccucgacagcugcaagcgggugcugaacgucgugugcaagaccugcgggcagcagcagaccacccugaagggcguggaggccgucauguacauggggacgcucuccuacgagcaguucaagaagggcgugcagauccccugcaccugcgggaagcaggccaccaaguaccuggugcagcaggagagccccuucgucaugauguccgcccccccggcgcaguacgagcugaagcacggcaccuucacgugcgccagcgaguacaccggcaacuaccagugcgggcacuacaagcacaucaccuccaaggagacccucuacugcaucgacggcgcccugcugacgaagagcagcgaguacaaggggcccaucaccgacguguucuacaaggagaacuccuacaccaccacgaucaagcccgugaccuacaagcucgacggcgucgugugcaccgagaucgaccccaagcuggacaacuacuacaagaaggacaacagcuacuucaccgagcagccgaucgaccuggugcccaaccagcccuaccccaacgccuccuucgacaacuucaaguucgucugcgacaacaucaaguucgccgacgaccucaaccagcugacgggguacaagaagccggcgagccgcgagcugaaggugaccuucuuccccgaccucaacggcgacguggucgccaucgacuacaagcacuacacccccuccuucaagaagggcgccaagcugcugcacaagcccaucguguggcacgugaacaacgccaccaacaaggcgacguacaagccgaacaccuggugcauccggugccucuggagcaccaagcccgucgagaccuccaacagcuucgacgugcugaaguccgaggacgcccaggggauggacaaccuggccugcgaggaccucaagcccgugagcgaggaggucguggagaaccccacgauccagaaggacgugcuggagugcaacgucaagaccaccgagguggugggcgacaucauccugaagccggccaacaacucccucaagaucaccgaggaggucgggcacacggaccugauggccgcguacguggacaacagcucccugaccaucaagaagcccaacgagcucagccgcgugcugggccugaagacccucgccacccacgggcuggccgccgucaacuccgugcccugggacacgaucgccaacuacgcgaagccguuccugaacaagguggucagcaccaccaccaacaucgugacgcgcugccucaaccgggugugcaccaacuacaugcccuacuucuucacccugcugcuccagcugugcaccuucacccgcuccacgaacagccggaucaaggccuccaugcccaccaccaucgccaagaacaccgucaagagcgugggcaaguucugccuggaggccagcuucaacuaccucaagucccccaacuucagcaagcugaucaacaucaucaucugguuccugcuccuguccgugugccugggcagccucaucuacuccacggccgcgcuggggguccugaugagcaaccucggcaugccguccuacugcaccggguaccgcgagggcuaccugaacagcaccaacgugaccaucgccacguacugcaccggcuccauccccugcagcgugugccuguccgggcucgacagccuggacaccuaccccucccuggagaccauccagaucacgaucagcuccuucaagugggaccucaccgccuucggccuggucgccgagugguuccuggccuacauccucuucacccgguucuucuacgugcuggggcuggcggccaucaugcagcucuucuucagcuacuucgccgugcacuucaucuccaacagcuggcugauguggcugaucaucaaccugguccagauggcccccaucuccgcgauggugcgcauguacaucuucuucgccagcuucuacuacguguggaagagcuacguccacgugguggacggcugcaacuccagcaccugcaugaugugcuacaagcggaaccgcgccacgcgggucgagugcaccaccaucgugaacgggguccgccgguccuucuacguguacgccaacggcggcaagggguucugcaagcuccacaacuggaacugcgugaacugcgacaccuucugcgccggcagcacguucaucuccgacgaggucgcgcgcgaccugagccugcaguucaagcggccgaucaaccccaccgaccaguccagcuacaucguggacuccgugaccgucaagaacgggagcauccaccucuacuucgacaaggccggccagaagaccuacgagcgccacucccugagccacuucgugaaccuggacaaccuccgggccaacaacacgaaggggucccugcccaucaacgugaucgucuucgacggcaagagcaagugcgaggaguccagcgccaaguccgccagcguguacuacucccagcugaugugccagcccauccuccugcuggaccaggcgcucgugagcgacgucggcgacagcgccgagguggccgugaagauguucgacgccuacgucaacaccuucuccagcaccuucaacgugccgauggagaagcugaagacccugguggccacggcggaggccgagcucgccaagaacgucucccuggacaacgugcugagcaccuucaucuccgccgcgcgccagggguucguggacagcgacgucgagaccaaggacgugguggagugccucaagcugucccaccagagcgacaucgaggucaccggcgacuccugcaacaacuacaugcugacguacaacaagguggagaacaugaccccccgggaccucggggccugcaucgacugcagcgcccgccacaucaacgcccagguggccaagucccacaacaucgcgcugaucuggaacgucaaggacuucaugagccuguccgagcagcuccggaagcagauccgcagcgccgccaagaagaacaaccugcccuucaagcugaccugcgccaccacgcgccagguggugaacgucgugaccaccaagaucgcccucaagggcgggugaggacuagucccuguucccagagcccacuuuuuuuucuuuuuuugaaauaaaauagccugucuuucagaucucaaaggcucuuuucagagccaccaaaaaaaaaaaaaaaaaaaaaaaaaaaaaaaaaaaaaaaaaaaaaaaaaaaaaaaaaaaaaaaaaaaaaaaaaaaaaaaaaaaaaaaaaaaaaaaaaaaaa

SEQ ID NO: 20009 - RNA, 6113 nt, Artificial Sequence
  SARS-CoV-2__MT576041.1__non-structural protein 3 (NSP3) mRNA gc
aggagagucccgcagucggcguccagcggcucugcuuguucgugugugugucguugcaggccuuauucaagcuuaccauggcccccaccaaggugaccuucggcgacgacacggucaucgaggugcagggguacaagagcgugaacaucaccuucgagcuggacgagcgcaucgacaagguccucaacgagaagugcuccgccuacaccguggagcugggcaccgaggugaacgaguucgcgugcgucguggccgacgccgugaucaagacgcugcagccggucagcgagcuccugaccccccuggggaucgaccucgacgagugguccauggccaccuacuaccuguucgacgagagcggcgaguucaagcuggccucccacauguacugcagcuucuacccccccgacgaggacgaggaggagggggacugcgaggaggaggaguucgagccguccacccaguacgaguacggcacggaggacgacuaccagggcaagccccucgaguucggggcgaccagcgccgcccugcagcccgaggaggagcaggaggaggacuggcuggacgacgacucccagcagaccgugggccagcaggacgggagcgaggacaaccagaccacgaccauccagaccaucguggagguccagccccagcucgagauggagcugaccccgguggugcagacgaucgaggucaacuccuucagcggcuaccugaagcucaccgacaacguguacaucaagaacgccgacaucguggaggaggcgaagaaggucaagcccaccgugguggucaacgccgccaacguguaccugaagcacgggggcggcguggccggggcccugaacaaggcgaccaacaacgccaugcaggucgaguccgacgacuacaucgccacgaacggcccccucaagguggggggcagcugcguccuguccggccacaaccuggccaagcacugccuccacgugguggggcccaacgucaacaagggcgaggacauccagcugcugaagagcgccuacgagaacuucaaccagcacgaggugcuccuggcgccgcugcucuccgccgggaucuucggcgccgaccccauccacagccugcgggugugcgucgacaccgugcgcaccaacguguaccuggccgucuucgacaagaaccucuacgacaagcugguguccagcuuccuggagaugaagagcgagaagcagguggagcagaagaucgccgagauccccaaggaggaggucaagcccuucaucaccgaguccaagccgagcguggagcagcggaagcaggacgacaagaagaucaaggcgugcguggaggaggucacgaccacccucgaggagaccaaguuccugacggagaaccugcuccuguacaucgacaucaacgggaaccugcaccccgacuccaccacccucgugagcgacaucgacaucaccuuccugaagaaggacgcccccuacaucgugggcgacgucgugcaggagggcgugcugacggccgucgugauccccaccaagaaggccgggggcaccaccgagaugcucgccaaggcgcugcgcaaggugccgacggacaacuacaucaccaccuaccccgggcagggccugaacggguacaccgucgaggaggccaagaccgugcucaagaagugcaaguccgccuucuacauccugcccagcaucaucuccaacgagaagcaggagauccugggcacggugagcuggaaccuccgggagaugcuggcccacgcggaggagacccgcaagcugaugcccgucugcguggagaccaaggccaucguguccaccauccagcggaaguacaagggcaucaagauccaggagggggucguggacuacggcgcccgcuucuacuucuacacgagcaagaccaccguggccucccugaucaacacccucaacgaccugaacgagacgcuggucaccaugccgcucggguacgugacccacggccugaaccuggaggaggccgcgcgguacaugcgcagccucaaggugcccgccaccgucuccgugagcucccccgacgccgugacggccuacaacggguaccugaccagcuccagcaagacccccgaggagcacuucaucgagaccaucucccuggccggcagcuacaaggacuggagcuacuccggccagagcacgcagcucgggaucgaguuccugaagcggggcgacaaguccgucuacuacaccagcaacccgaccaccuuccaccuggacggggaggugaucacguucgacaaccucaagacccugcugucccuccgcgaggugcggaccaucaaggucuucaccacgguggacaacaucaaccugcacacccagguggucgacaugagcaugaccuacggccagcaguucggccccaccuaccuggacggggcggacgugacgaagaucaagccccacaacucccacgagggcaagaccuucuacgugcucccgaacgacgacacccugcgcgucgaggccuucgaguacuaccacaccacggaccccagcuuccuggggcgguacauguccgcccucaaccacaccaagaaguggaaguacccccaggugaacggccugaccagcaucaagugggccgacaacaacugcuaccuggccaccgcgcuccugacgcugcagcagaucgagcucaaguucaaccccccggcccugcaggacgccuacuaccgcgcccgggcgggggaggccgccaacuucugcgcccugauccucgccuacugcaacaagaccgugggcgagcugggcgacguccgcgagaccauguccuaccuguuccagcacgcgaaccucgacagcugcaagcgggugcugaacgucgugugcaagaccugcgggcagcagcagaccacgcugaagggcguggaggccgucaucuacauggggacccucuccuacgagcaguucaagaagggcgugcagauccccugcaccugcgggaagcaggccaccaaguaccuggugcagcaggagagccccuucgucaugauguccgcccccccggcccaguacgagcugaagcacggcacguucaccugcgcgagcgaguacaccggcaacuaccagugcgggcacuacaagcacaucaccuccaaggagacgcucuacugcaucgacggcgcccugcugaccaagagcagcgaguacaaggggcccaucaccgacguguucuacaaggagaacuccuacaccacgaccaucaagcccgugaccuacaagcucgacggcgucgugugcaccgagaucgaccccaagcuggacaacuacuacaagaaggacaacagcuacuucacggagcagccgaucgaccuggugcccaaccagcccuaccccaacgccuccuucgacaacuucaaguucgucugcgacaacaucaaguucgccgacgaccucaaccagcugaccggguacaagaagccggccagccgcgagcugaaggugaccuucuuccccgaccucaacggcgacguggucgcgaucgacuacaagcacuacacccccuccuucaagaagggcgccaagcugcugcacaagcccaucguguggcacgugaacaacgccacgaacaaggccaccuacaagccgaacaccuggugcauccggugccucuggagcaccaagcccgucgagacguccaacagcuucgacgugcugaaguccgaggacgcgcaggggauggacaaccuggccugcgaggaccucaagcccgugagcgaggaggucguggagaaccccaccauccagaaggacgugcuggagugcaacgucaagaccaccgagguggugggcgacaucauccugaagccggccaacaacucccucaagaucacggaggaggucgggcacaccgaccugauggccgccuacguggacaacagcucccugaccaucaagaagcccaacgagcucagccgcgugcugggccugaagacccucgcgacgcacgggcuggccgccgucaacuccgugcccugggacaccaucgccaacuacgccaagccguuccugaacaagguggucagcaccaccacgaacaucgugacccgcugccucaaccgggugugcaccaacuacaugcccuacuucuucacccugcugcuccagcugugcaccuucacgcgcuccaccaacagccggaucaaggcguccaugcccaccaccaucgccaagaacacggucaagagcgugggcaaguucugccuggaggccagcuucaacuaccucaagucccccaacuucagcaagcugaucaacaucaucaucugguuccugcuccuguccgugugccugggcagccucaucuacuccaccgccgcccuggggguccugaugagcaaccucggcaugccguccuacugcaccggguaccgcgagggcuaccugaacagcaccaacgugacgaucgcgaccuacugcaccggcuccauccccugcagcgugugccuguccgggcucgacagccuggacaccuaccccucccuggagacgauccagaucaccaucagcuccuucaagugggaccucaccgccuucggccuggucgccgagugguuccuggccuacauccucuucacccgguucuucuacgugcuggggcuggccgcgaucaugcagcucuucuucagcuacuucgccgugcacuucaucuccaacagcuggcugauguggcugaucaucaaccugguccagauggcccccaucuccgccauggugcgcauguacaucuucuucgcgagcuucuacuacguguggaagagcuacguccacgugguggacggcugcaacuccagcacgugcaugaugugcuacaagcggaaccgcgccacccgggucgagugcaccaccaucgugaacgggguccgccgguccuucuacguguacgccaacggcggcaagggguucugcaagcuccacaacuggaacugcgugaacugcgacacguucugcgccggcagcaccuucaucuccgacgaggucgcccgcgaccugagccugcaguucaagcggccgaucaaccccaccgaccaguccagcuacaucguggacuccgugaccgucaagaacgggagcauccaccucuacuucgacaaggcgggccagaagacguacgagcgccacucccugagccacuucgugaaccuggacaaccuccgggccaacaacaccaaggggucccugcccaucaacgugaucgucuucgacggcaagagcaagugcgaggaguccagcgccaaguccgccagcguguacuacucccagcugaugugccagcccauccuccugcuggaccaggcccucgugagcgacgucggcgacagcgcggagguggccgugaagauguucgacgccuacgucaacaccuucuccagcaccuucaacgugccgauggagaagcugaagacgcugguggccaccgccgaggcggagcucgccaagaacgucucccuggacaacgugcugagcaccuucaucuccgccgcccgccagggguucguggacagcgacgucgagaccaaggacgugguggagugccucaagcugucccaccagagcgacaucgaggucacgggcgacuccugcaacaacuacaugcugaccuacaacaagguggagaacaugaccccccgggaccucggggcgugcaucgacugcagcgcccgccacaucaacgcccagguggccaagucccacaacaucgcccugaucuggaacgucaaggacuucaugagccuguccgagcagcuccggaagcagauccgcagcgacgcgaagaagaacaaccugcccuucaagcugaccugcgccacgacccgccagguggugaacgucgugaccaccaagaucgcccucaagggcgggugaggacuagucccuguucccagagcccacuuuuuuuucuuuuuuugaaauaaaauagccugucuuucagaucucaaaggcucuuuucagagccaccaaaaaaaaaaaaaaaaaaaaaaaaaaaaaaaaaaaaaaaaaaaaaaaaaaaaaaaaaaaaaaaaaaaaaaaaaaaaaaaaaaaaaaaaaaaaaaaaaaaaa

SEQ ID NO: 20010 - RNA, 6113 nt, Artificial Sequence
  SARS-CoV-2__MT576044.1__non-structural protein 3 (NSP3) mRNA gc
aggagagucccgcagucggcguccagcggcucugcuuguucgugugugugucguugcaggccuuauucaagcuuaccauggcccccaccaaggugaccuucggcgacgacacggucaucgaggugcagggguacaagagcgugaacaucaccuucgagcuggacgagcgcaucgacaagguccucaacgagaagugcuccgccuacaccguggagcugggcaccgaggugaacgaguucgcgugcgucguggccgacgccgugaucaagacgcugcagccggucagcgagcuccugaccccccuggggaucgaccucgacgagugguccauggccaccuacuaccuguucgacgagagcggcgaguucaagcuggccucccacauguacugcagcuucuacccccccgacgaggacgaggaggagggggacugcgaggaggaggaguucgagccguccacccaguacgaguacggcacggaggacgacuaccagggcaagccccucgaguucggggcgaccagcgccgcccugcagcccgaggaggagcaggaggaggacuggcuggacgacgacucccagcagaccgugggccagcaggacgggagcgaggacaaccagaccacgaccauccagaccaucguggagguccagccccagcucgagauggagcugaccccgguggugcagacgaucgaggucaacuccuucagcggcuaccugaagcucaccgacaacguguacaucaagaacgccgacaucguggaggaggcgaagaaggucaagcccaccgugguggucaacgccgccaacguguaccugaagcacgggggcggcguggccggggcccugaacaaggcgaccaacaacgccaugcaggucgaguccgacgacuacaucgccacgaacggcccccucaagguggggggcagcugcguccuguccggccacaaccuggccaagcacugccuccacgugguggggcccaacgucaacaagggcgaggacauccagcugcugaagagcgccuacgagaacuucaaccagcacgaggugcuccuggcgccgcugcucuccgccgggaucuucggcgccgaccccauccacagccugcgggugugcgucgacaccgugcgcaccaacguguaccuggccgucuucgacaagaaccucuacgacaagcugguguccagcuuccuggagaugaagagcgagaagcagguggagcagaagaucgccgagauccccaaggaggaggucaagcccuucaucaccgaguccaagccgagcguggagcagcggaagcaggacgacaagaagaucaaggcgugcguggaggaggucacgaccacccucgaggagaccaaguuccugacggagaaccugcuccuguacaucgacaucaacgggaaccugcaccccgacuccgccacccucgugagcgacaucgacaucaccuuccugaagaaggacgcccccuacaucgugggcgacgucgugcaggagggcgugcugaccgccgucgugauccccacgaagaaggccgggggcaccaccgagaugcucgcgaaggcccugcgcaaggugccgaccgacaacuacaucacgaccuaccccgggcagggccugaacggguacaccgucgaggaggccaagaccgugcucaagaagugcaaguccgccuucuacauccugcccagcaucaucuccaacgagaagcaggagauccugggcaccgugagcuggaaccuccgggagaugcuggcgcacgccgaggagacgcgcaagcugaugcccgucugcguggagaccaaggccaucguguccaccauccagcggaaguacaagggcaucaagauccaggagggggucguggacuacggcgcccgcuucuacuucuacaccagcaagacgaccguggccucccugaucaacacccucaacgaccugaacgagacccuggucacgaugccgcucggguacgugacccacggccugaaccuggaggaggcggcccgguacaugcgcagccucaaggugcccgccaccgucuccgugagcucccccgacgccgugaccgccuacaacggguaccugacgagcuccagcaagacccccgaggagcacuucaucgagaccaucucccuggcgggcagcuacaaggacuggagcuacuccggccagagcacccagcucgggaucgaguuccugaagcggggcgacaaguccgucuacuacacgagcaacccgaccaccuuccaccuggacggggaggugaucaccuucgacaaccucaagacgcugcugucccuccgcgaggugcggaccaucaaggucuucaccaccguggacaacaucaaccugcacacgcagguggucgacaugagcaugaccuacggccagcaguucggccccaccuaccuggacggggccgacgugaccaagaucaagccccacaacucccacgagggcaagacguucuacgugcucccgaacgacgacacccugcgcgucgaggccuucgaguacuaccacaccaccgaccccagcuuccuggggcgguacauguccgcccucaaccacacgaagaaguggaaguacccccaggugaacggccugaccagcaucaagugggccgacaacaacugcuaccuggcgaccgcccuccugacccugcagcagaucgagcucaaguucaaccccccggcccugcaggacgccuacuaccgcgcgcgggccggggaggccgccaacuucugcgcccugauccucgcguacugcaacaagacggugggcgagcugggcgacguccgcgagaccauguccuaccuguuccagcacgccaaccucgacagcugcaagcgggugcugaacgucgugugcaagaccugcgggcagcagcagaccacccugaagggcguggaggccgucauguacauggggacgcucuccuacgagcaguucaagaagggcgugcagauccccugcaccugcgggaagcaggccaccaaguaccuggugcagcaggagagccccuucgucaugauguccgcccccccggcgcaguacgagcugaagcacggcaccuucacgugcgccagcgaguacaccggcaacuaccagugcgggcacuacaagcacaucaccuccaaggagacccucuacugcaucgacggcgcccugcugacgaagagcagcgaguacaaggggcccaucaccgacguguucuacaaggagaacuccuacaccaccacgaucaagcccgugaccuacaagcucgacggcgucgugugcaccgagaucgaccccaagcuggacaacuacuacaagaaggacaacagcuacuucaccgagcagccgaucgaccuggugcccaaccagcccuaccccaacgccuccuucgacaacuucaaguucgucugcgacaacaucaaguucgccgacgaccucaaccagcugacgggguacaagaagccggcgagccgcgagcugaaggugaccuucuuccccgaccucaacggcgacguggucgccaucgacuacaagcacuacacccccuccuucaagaagggcgccaagcugcugcacaagcccaucguguggcacgugaacaacgccaccaacaaggcgacguacaagccgaacaccuggugcauccggugccucuggagcaccaagcccgucgagaccuccaacagcuucgacgugcugaaguccgaggacgcccaggggauggacaaccuggccugcgaggaccucaagcccgugagcgaggaggucguggagaaccccacgauccagaaggacgugcuggagugcaacgucaagaccaccgagguggugggcgacaucauccugaagccggccaacaacucccucaagaucaccgaggaggucgggcacacggaccugauggccgcguacguggacaacagcucccugaccaucaagaagcccaacgagcucagccgcgugcugggccugaagacccucgccacccacgggcuggccgccgucaacuccgugcccugggacacgaucgccaacuacgcgaagccguuccugaacaagguggucagcaccaccaccaacaucgugacgcgcugccucaaccgggugugcaccaacuacaugcccuacuucuucacccugcugcuccagcugugcaccuucacccgcuccacgaacagccggaucaaggccuccaugcccaccaccaucgccaagaacaccgucaagagcgugggcaaguucugccuggaggccagcuucaacuaccucaagucccccaacuucagcaagcugaucaacaucaucaucugguuccugcuccuguccgugugccugggcagccucaucuacuccacggccgcgcuggggguccugaugagcaaccucggcaugccguccuacugcaccggguaccgcgagggcuaccugaacagcaccaacgugaccaucgccacguacugcaccggcuccauccccugcagcgugugccuguccgggcucgacagccuggacaccuaccccucccuggagaccauccagaucacgaucagcuccuucaagugggaccucaccgccuucggcgucguggccgagugguuccuggccuacauccuguucacccgguucuucuacgugcucgggcuggcggccaucaugcagcuguucuucagcuacuucgccguccacuucaucuccaacagcuggcucauguggcugaucaucaaccuggugcagauggcccccaucuccgcgauggugcgcauguacaucuucuucgccagcuucuacuacgucuggaagagcuacgugcacguggucgacggcugcaacuccagcaccugcaugaugugcuacaagcggaaccgcgccacgcggguggagugcaccaccaucgucaacggggugcgccgguccuucuacguguacgccaacggcggcaagggguucugcaagcugcacaacuggaacugcgucaacugcgacaccuucugcgccggcagcacguucaucuccgacgagguggcgcgcgaccucagccugcaguucaagcggccgaucaaccccaccgaccaguccagcuacaucguggacuccgucaccgugaagaacgggagcauccaccuguacuucgacaaggccggccagaagaccuacgagcgccacucccucagccacuucgugaaccuggacaaccugcgggccaacaacacgaaggggucccuccccaucaacgucaucguguucgacggcaagagcaagugcgaggaguccagcgccaaguccgccagcguguacuacucccagcugaugugccagcccauccugcuccuggaccaggcgcuggucagcgacgugggcgacagcgccgagguggccgucaagauguucgacgccuacgugaacaccuucuccagcaccuucaacgugccgauggagaagcucaagacccuggucgccacggcggaggccgagcuggccaagaacgugucccucgacaacgugcugagcaccuucaucuccgccgcgcgccagggguucgucgacagcgacguggagaccaaggacguggucgagugccugaagcucucccaccagagcgacaucgaggugaccggcgacuccugcaacaacuacaugcugacguacaacaagguggagaacaugaccccccgggaccugggggccugcaucgacugcagcgcccgccacaucaacgcccaggucgccaagucccacaacaucgcgcucaucuggaacgugaaggacuucaugagccuguccgagcagcugcggaagcagauccgcagcgccgccaagaagaacaaccuccccuucaagcugaccugcgccaccacgcgccagguggucaacguggugaccaccaagaucgcccugaagggcgggugaggacuagucccuguucccagagcccacuuuuuuuucuuuuuuugaaauaaaauagccugucuuucagaucucaaaggcucuuuucagagccaccaaaaaaaaaaaaaaaaaaaaaaaaaaaaaaaaaaaaaaaaaaaaaaaaaaaaaaaaaaaaaaaaaaaaaaaaaaaaaaaaaaaaaaaaaaaaaaaaaaaaa

SEQ ID NO: 20011 - RNA, 6113 nt, Artificial Sequence
  SARS-CoV-2__MT576530.1__non-structural protein 3 (NSP3) mRNA gc
aggagagucccgcagucggcguccagcggcucugcuuguucgugugugugucguugcaggccuuauucaagcuuaccauggcccccaccaaggugaccuucggcgacgacacggucaucgaggugcagggguacaagagcgugaacaucaccuucgagcuggacgagcgcaucgacaagguccucaacgagaagugcuccgccuacaccguggagcugggcaccgaggugaacgaguucgcgugcgucguggccgacgccgugaucaagacgcugcagccggucagcgagcuccugaccccccuggggaucgaccucgacgagugguccauggccaccuacuaccuguucgacgagagcggcgaguucaagcuggccucccacauguacugcagcuucuacccccccgacgaggacgaggaggagggggacugcgaggaggaggaguucgagccguccacccaguacgaguacggcacggaggacgacuaccagggcaagccccucgaguucggggcgaccagcgccgcccugcagcccgaggaggagcaggaggaggacuggcuggacgacgacucccagcagaccgugggccagcaggacgggagcgaggacaaccagaccacgaccauccagaccaucguggagguccagccccagcucgagauggagcugaccccgguggugcagacgaucgaggucaacuccuucagcggcuaccugaagcucaccgacaacguguacaucaagaacgccgacaucguggaggaggcgaagaaggucaagcccaccgugguggucaacgccgccaacguguaccugaagcacgggggcggcguggccggggcccugaacaaggcgaccaacaacgccaugcaggucgaguccgacgacuacaucgccacgaacggcccccucaagguggggggcagcugcguccuguccggccacaaccuggccaagcacugccuccacgugguggggcccaacgucaacaagggcgaggacauccagcugcugaagagcgccuacgagaacuucaaccagcacgaggugcuccuggcgccgcugcucuccgccgggaucuucggcgccgaccccauccacagccugcgggugugcgucgacaccgugcgcaccaacguguaccuggccgucuucgacaagaaccucuacgacaagcugguguccagcuuccuggagaugaagagcgagaagcagguggagcagaagaucgccgagauccccaaggaggaggucaagcccuucaucaccgaguccaagccgagcguggagcagcggaagcaggacgacaagaagaucaaggcgugcguggaggaggucacgaccacccucgaggagaccaaguuccugacggagaaccugcuccuguacaucgacaucaacgggaaccugcaccccgacuccgccacccucgugagcgacaucgacaucaccuuccugaagaaggacgcccccuacaucgugggcgacgucgugcaggagggcgugcugaccgccgucgugauccccacgaagaaggccgggggcaccaccgagaugcucgcgaaggcccugcgcaaggugccgaccgacaacuacaucacgaccuaccccgggcagggccugaacggguacaccgucgaggaggccaagaccgugcucaagaagugcaaguccgccuucuacauccugcccagcaucaucuccaacgagaagcaggagauccugggcaccgugagcuggaaccuccgggagaugcuggcgcacgccgaggagacgcgcaagcugaugcccgucugcguggagaccaaggccaucguguccaccauccagcggaaguacaagggcaucaagauccaggagggggucguggacuacggcgcccgcuucuacuucuacaccagcaagacgaccguggccucccugaucaacacccucaacgaccugaacgagacccuggucacgaugccgcucggguacgugacccacggccugaaccuggaggaggcggcccgguacaugcgcagccucaaggugcccgccaccgucuccgugagcucccccgacgccgugaccgccuacaacggguaccugacgagcuccagcaagacccccgaggagcacuucaucgagaccaucucccuggcgggcagcuacaaggacuggagcuacuccggccagagcacccagcucgggaucgaguuccugaagcggggcgacaaguccgucuacuacacgagcaacccgaccaccuuccaccuggacggggaggugaucaccuucgacaaccucaagacgcugcugucccuccgcgaggugcggaccaucaaggucuucaccaccguggacaacaucaaccugcacacgcagguggucgacaugagcaugaccuacggccagcaguucggccccaccuaccuggacggggccgacgugaccaagaucaagccccacaacucccacgagggcaagacguucuacgugcucccgaacgacgacacccugcgcgucgaggccuucgaguacuaccacaccaccgaccccagcuuccuggggcgguacauguccgcccucaaccacacgaagaaguggaaguacccccaggugaacggccugaccagcaucaagugggccgacaacaacugcuaccuggcgaccgcccuccugacccugcagcagaucgagcucaaguucaaccccccggcccugcaggacgccuacuaccgcgcgcgggccggggaggccgccaacuucugcgcccugauccucgcguacugcaacaagacggugggcgagcugggcgacguccgcgagaccauguccuaccuguuccagcacgccaaccucgacagcugcaagcgggugcugaacgucgugugcaagaccugcgggcagcagcagaccacccugaagggcguggaggccgucauguacauggggacgcucuccuacgagcaguucaagaagggcgugcagauccccugcaccugcgggaagcaggccaccaaguaccuggugcagcaggagagccccuucgucaugauguccgcccccccggcgcaguacgagcugaagcacggcaccuucacgugcgccagcgaguacaccggcaacuaccagugcgggcacuacaagcacaucaccuccaaggagacccucuacugcaucgacggcgcccugcugacgaagagcagcgaguacaaggggcccaucaccgacguguucuacaaggagaacuccuacaccaccacgaucaagcccgugaccuacaagcucgacggcgucgugugcaccgagaucgaccccaagcuggacaacuacuacaagaaggacaacagcuacuucaccgagcagccgaucgaccuggugcccaaccagcccuaccccaacgccuccuucgacaacuucaaguucgucugcgacaacaucaaguucgccgacgaccucaaccagcugacgggguacaagaagccggcgagccgcgagcugaaggugaccuucuuccccgaccucaacggcgacguggucgccaucgacuacaagcacuacacccccuccuucaagaagggcgccaagcugcugcacaagcccaucguguggcacgugaacaacgccaccaacaaggcgacguacaagccgaacaccuggugcauccggugccucuggagcaccaagcccgucgagaccuccaacagcuucgacgugcugaaguccgaggacgcccaggggauggacaaccuggccugcgaggaccucaagcccgugagcgaggaggucguggagaaccccacgauccagaaggacgugcuggagugcaacgucaagaccaccgagguggugggcgacaucauccugaagccggccaacaacucccucaagaucaccgaggaggucgggcacaucgaccugauggccgcguacguggacaacagcucccugacgaucaagaagcccaacgagcucagccgcgugcugggccugaagacccucgccacccacgggcuggccgccgucaacuccgugcccugggacaccaucgccaacuacgcgaagccguuccugaacaagguggucagcacgaccaccaacaucgugacccgcugccucaaccgggugugcacgaacuacaugcccuacuucuucacccugcugcuccagcugugcaccuucacccgcuccaccaacagccggaucaaggccuccaugcccacgaccaucgccaagaacaccgucaagagcgugggcaaguucugccuggaggccagcuucaacuaccucaagucccccaacuucagcaagcugaucaacaucaucaucugguuccugcuccuguccgugugccugggcagccucaucuacuccaccgccgcgcuggggguccugaugagcaaccucggcaugccguccuacugcacgggguaccgcgagggcuaccugaacagcaccaacgugaccaucgccaccuacugcacgggcuccauccccugcagcgugugccuguccgggcucgacagccuggacaccuaccccucccuggagaccauccagaucaccaucagcuccuucaagugggaccucacggccuucggccuggucgccgagugguuccuggccuacauccucuucacccgguucuucuacgugcuggggcuggcggccaucaugcagcucuucuucagcuacuucgccgugcacuucaucuccaacagcuggcugauguggcugaucaucaaccugguccagauggcccccaucuccgcgauggugcgcauguacaucuucuucgccagcuucuacuacguguggaagagcuacguccacgugguggacggcugcaacuccagcaccugcaugaugugcuacaagcggaaccgcgccacccgggucgagugcacgaccaucgugaacgggguccgccgguccuucuacguguacgccaacggcggcaagggguucugcaagcuccacaacuggaacugcgugaacugcgacaccuucugcgccggcagcaccuucaucuccgacgaggucgcgcgcgaccugagccugcaguucaagcggccgaucaaccccacggaccaguccagcuacaucguggacuccgugaccgucaagaacgggagcauccaccucuacuucgacaaggccggccagaagaccuacgagcgccacucccugagccacuucgugaaccuggacaaccuccgggccaacaacaccaaggggucccugcccaucaacgugaucgucuucgacggcaagagcaagugcgaggaguccagcgccaaguccgccagcguguacuacucccagcugaugugccagcccauccuccugcuggaccaggcgcucgugagcgacgucggcgacagcgccgagguggccgugaagauguucgacgccuacgucaacacguucuccagcaccuucaacgugccgauggagaagcugaagacccugguggccaccgcggaggccgagcucgccaagaacgucucccuggacaacgugcugagcacguucaucuccgccgcgcgccagggguucguggacagcgacgucgagaccaaggacgugguggagugccucaagcugucccaccagagcgacaucgaggucaccggcgacuccugcaacaacuacaugcugaccuacaacaagguggagaacaugacgccccgggaccucggggccugcaucgacugcagcgcccgccacaucaacgcccagguggccaagucccacaacaucgcgcugaucuggaacgucaaggacuucaugagccuguccgagcagcuccggaagcagauccgcagcgccgccaagaagaacaaccugcccuucaagcugaccugcgccaccacccgccagguggugaacgucgugacgaccaagaucgcccucaagggcgggugaggacuagucccuguucccagagcccacuuuuuuuucuuuuuuugaaauaaaauagccugucuuucagaucucaaaggcucuuuucagagccaccaaaaaaaaaaaaaaaaaaaaaaaaaaaaaaaaaaaaaaaaaaaaaaaaaaaaaaaaaaaaaaaaaaaaaaaaaaaaaaaaaaaaaaaaaaaaaaaaaaaaa

SEQ ID NO: 20012 - RNA, 6113 nt, Artificial Sequence
  SARS-CoV-2__MT576639.1__non-structural protein 3 (NSP3) mRNA gc
aggagagucccgcagucggcguccagcggcucugcuuguucgugugugugucguugcaggccuuauucaagcuuaccauggcccccaccaaggugaccuucggcgacgacacggucaucgaggugcagggguacaagagcgugaacaucaccuucgagcuggacgagcgcaucgacaagguccucaacgagaagugcuccgccuacaccguggagcugggcaccgaggugaacgaguucgcgugcgucguggccgacgccgugaucaagacgcugcagccggucagcgagcuccugaccccccuggggaucgaccucgacgagugguccauggccaccuacuaccuguucgacgagagcggcgaguucaagcuggccucccacauguacugcagcuucuacccccccgacgaggacgaggaggagggggacugcgaggaggaggaguucgagccguccacccaguacgaguacggcacggaggacgacuaccagggcaagccccucgaguucggggcgaccagcgccgcccugcagcccgaggaggagcaggaggaggacuggcuggacgacgacucccagcagaccgugggccagcaggacgggagcgaggacaaccagaccacgaccauccagaccaucguggagguccagccccagcucgagauggagcugaccccgguggugcagacgaucgaggucaacuccuucagcggcuaccugaagcucaccgacaacguguacaucaagaacgccgacaucguggaggaggcgaagaaggucaagcccaccgugguggucaacgccgccaacguguaccugaagcacgggggcggcguggccggggcccugaacaaggcgaccaacaacgccaugcaggucgaguccgacgacuacaucgccacgaacggcccccucaagguggggggcagcugcguccuguccggccacaaccuggccaagcacugccuccacgugguggggcccaacgucaacaagggcgaggacauccagcugcugaagagcgccuacgagaacuucaaccagcacgaggugcuccuggcgccgcugcucuccgccgggaucuucggcgccgaccccauccacagccugcgggugugcgucgacaccgugcgcaccaacguguaccuggccgucuucgacaagaaccucuacgacaagcugguguccagcuuccuggagaugaagagcgagaagcagguggagcagaagaucgccgagauccccaaggaggaggucaagcccuucaucaccgaguccaagccgagcguggagcagcggaagcaggacgacaagaagaucaaggcgugcguggaggaggucacgaucacccucgaggagaccaaguuccugaccgagaaccugcuccuguacaucgacaucaacgggaaccugcaccccgacuccgccacgcucgugagcgacaucgacaucaccuuccugaagaaggacgcccccuacaucgugggcgacgucgugcaggagggcgugcugaccgccgucgugauccccaccaagaaggccgggggcacgaccgagaugcucgcgaaggcccugcgcaaggugccgaccgacaacuacaucaccacguaccccgggcagggccugaacggguacaccgucgaggaggccaagaccgugcucaagaagugcaaguccgccuucuacauccugcccagcaucaucuccaacgagaagcaggagauccugggcaccgugagcuggaaccuccgggagaugcuggcgcacgccgaggagacccgcaagcugaugcccgucugcguggagacgaaggccaucguguccaccauccagcggaaguacaagggcaucaagauccaggagggggucguggacuacggcgcccgcuucuacuucuacaccagcaagaucaccguggccucccugaucaacacgcucaacgaccugaacgagacccuggucaccaugccgcucggguacgugacccacggccugaaccuggaggaggcggcccgguacaugcgcagccucaaggugcccgccacggucuccgugagcucccccgacgccgugaccgccuacaacggguaccugaccagcuccagcaagacccccgaggagcacuucaucgagacgaucucccuggcgggcagcuacaaggacuggagcuacuccggccagagcacccagcucgggaucgaguuccugaagcggggcgacaaguccgucuacuacaccagcaacccgaccacguuccaccuggacggggaggugaucaccuucgacaaccucaagacccugcugucccuccgcgaggugcggaccaucaaggucuucacgaccguggacaacaucaaccugcacacccagguggucgacaugagcaugaccuacggccagcaguucggccccacguaccuggacggggccgacgugaccaagaucaagccccacaacucccacgagggcaagaccuucuacgugcucccgaacgacgacacccugcgcgucgaggccuucgaguacuaccacacgaccgaccccagcuuccuggggcgguacauguccgcccucaaccacaccaagaaguggaaguacccccaggugaacggccugaccagcaucaagugggccgacaacaacugcuaccuggcgacggcccuccugacccugcagcagaucgagcucaaguucaaccccccggcccugcaggacgccuacuaccgcgcgcgggccggggaggccgccaacuucugcgcccugauccucgcguacugcaacaagaccgugggcgagcugggcgacguccgcgagaccauguccuaccuguuccagcacgccaaccucgacagcugcaagcgggugcugaacgucgugugcaagacgugcgggcagcagcagaccacccugaagggcguggaggccgucauguacauggggacccucuccuacgagcaguucaagaagggcgugcagauccccugcaccugcgggaagcaggccacgaaguaccuggugcagcaggagagccccuucgucaugauguccgcccccccggcgcaguacgagcugaagcacggcaccuucaccugcgccagcgaguacaccggcaacuaccagugcgggcacuacaagcacaucacguccaaggagacccucuacugcaucgacggcgcccugcugaccaagagcagcgaguacaaggggcccaucaccgacguguucuacaaggagaacuccuacacgaccaccaucaagcccgugaccuacaagcucgacggcgucgugugcacggagaucgaccccaagcuggacaacuacuacaagaaggacaacagcuacuucaccgagcagccgaucgaccuggugcccaaccagcccuaccccaacgccuccuucgacaacuucaaguucgucugcgacaacaucaaguucgccgacgaccucaaccagcugaccggguacaagaagccggcgagccgcgagcugaaggugaccuucuuccccgaccucaacggcgacguggucgccaucgacuacaagcacuacacgcccuccuucaagaagggcgccaagcugcugcacaagcccaucguguggcacgugaacaacgccaccaacaaggcgaccuacaagccgaacaccuggugcauccggugccucuggagcacgaagcccgucgagaccuccaacagcuucgacgugcugaaguccgaggacgcccaggggauggacaaccuggccugcgaggaccucaagcccgugagcgaggaggucguggagaaccccaccauccagaaggacgugcuggagugcaacgucaagaccacggagguggugggcgacaucauccugaagccggccaacaacucccucaagaucaccgaggaggucgggcacaccgaccugauggccgcguacguggacaacagcucccugaccaucaagaagcccaacgagcucagccgcgugcugggccugaagacgcucgccacccacgggcuggccgccgucaacuccgugcccugggacaccaucgccaacuacgcgaagccguuccugaacaagguggucagcaccacgaccaacaucgugacccgcugccucaaccgggugugcaccaacuacaugcccuacuucuucacgcugcugcuccagcugugcaccuucacccgcuccaccaacagccggaucaaggccuccaugcccaccacgaucgccaagaacaccgucaagagcgugggcaaguucugccuggaggccagcuucaacuaccucaagucccccaacuucagcaagcugaucaacaucaucaucugguuccugcuccuguccgugugccugggcagccucaucuacuccaccgccgcgcuggggguccugaugagcaaccucggcaugccguccuacugcaccggguaccgcgagggcuaccugaacagcacgaacgugaccaucgccaccuacugcaccggcuccauccccugcagcgugugccuguccgggcucgacagccuggacacguaccccucccuggagaccauccagaucaccaucagcuccuucaagugggaccucaccgccuucggccuggucgccgagugguuccuggccuacauccucuucacgcgguucuucuacgugcuggggcuggcggccaucaugcagcucuucuucagcuacuucgccgugcacuucaucuccaacagcuggcugauguggcugaucaucaaccugguccagauggcccccaucuccgcgauggugcgcauguacaucuucuucgccagcuucuacuacguguggaagagcuacguccacgugguggacggcugcaacuccagcaccugcaugaugugcuacaagcggaaccgcgccacccgggucgagugcaccacgaucgugaacgggguccgccgguccuucuacguguacgccaacggcggcaagggguucugcaagcuccacaacuggaacugcgugaacugcgacaccuucugcgccggcagcaccuucaucuccgacgaggucgcgcgcgaccugagccugcaguucaagcggccgaucaaccccaccgaccaguccagcuacaucguggacuccgugacggucaagaacgggagcauccaccucuacuucgacaaggccggccagaagaccuacgagcgccacucccugagccacuucgugaaccuggacaaccuccgggccaacaacaccaaggggucccugcccaucaacgugaucgucuucgacggcaagagcaagugcgaggaguccagcgccaaguccgccagcguguacuacucccagcugaugugccagcccauccuccugcuggaccaggcgcucgugagcgacgucggcgacagcgccgagguggccgugaagauguucgacgccuacgucaacaccuucuccagcacguucaacgugccgauggagaagcugaagacccugguggccaccgcggaggccgagcucgccaagaacgucucccuggacaacgugcugagcaccuucaucuccgccgcgcgccagggguucguggacagcgacgucgagacgaaggacgugguggagugccucaagcugucccaccagagcgacaucgaggucaccggcgacuccugcaacaacuacaugcugaccuacaacaagguggagaacaugaccccccgggaccucggggccugcaucgacugcagcgcccgccacaucaacgcccagguggccaagucccacaacaucgcgcugaucuggaacgucaaggacuucaugagccuguccgagcagcuccggaagcagauccgcagcgccgccaagaagaacaaccugcccuucaagcugacgugcgccaccacccgccagguggugaacgucgugaccacgaagaucgcccucaagggcgggugaggacuagucccuguucccagagcccacuuuuuuuucuuuuuuugaaauaaaauagccugucuuucagaucucaaaggcucuuuucagagccaccaaaaaaaaaaaaaaaaaaaaaaaaaaaaaaaaaaaaaaaaaaaaaaaaaaaaaaaaaaaaaaaaaaaaaaaaaaaaaaaaaaaaaaaaaaaaaaaaaaaaa

SEQ ID NO: 20013 - RNA, 6113 nt, Artificial Sequence
  SARS-CoV-2__MT576641.1__non-structural protein 3 (NSP3) mRNA gc
aggagagucccgcagucggcguccagcggcucugcuuguucgugugugugucguugcaggccuuauucaagcuuaccauggcccccaccaaggugaccuucggcgacgacacggucaucgaggugcagggguacaagagcgugaacaucaccuucgagcuggacgagcgcaucgacaagguccucaacgagaagugcuccgccuacaccguggagcugggcaccgaggugaacgaguucgcgugcgucguggccgacgccgugaucaagacgcugcagccggucagcgagcuccugaccccccuggggaucgaccucgacgagugguccauggccaccuacuaccuguucgacgagagcggcgaguucaagcuggccucccacauguacugcagcuucuacccccccgacgaggacgaggaggagggggacugcgaggaggaggaguucgagccguccacccaguacgaguacggcacggaggacgacuaccagggcaagccccucgaguucggggcgaccagcgccgcccugcagcccgaggaggagcaggaggaggacuggcuggacgacgacucccagcagaccgugggccagcaggacgggagcgaggacaaccagaccacgaccauccagaccaucguggagguccagccccagcucgagauggagcugaccccgguggugcagacgaucgaggucaacuccuucagcggcuaccugaagcucaccgacaacguguacaucaagaacgccgacaucguggaggaggcgaagaaggucaagcccaccgugguggucaacgccgccaacguguaccugaagcacgggggcggcguggccggggcccugaacaaggcgaccaacaacgccaugcaggucgaguccgacgacuacaucgccacgaacggcccccucaagguggggggcagcugcguccuguccggccacaaccuggccaagcacugccuccacgugguggggcccaacgucaacaagggcgaggacauccagcugcugaagagcgccuacgagaacuucaaccagcacgaggugcuccuggcgccgcugcucuccgccgggaucuucggcgccgaccccauccacagccugcgggugugcgucgacaccgugcgcaccaacguguaccuggccgucuucgacaagaaccucuacgacaagcugguguccagcuuccuggagaugaagagcgagaagcagguggagcagaagaucgccgagauccccaaggaggaggucaagcccuucaucaccgaguccaagccgagcguggagcagcggaagcaggacgacaagaagaucaaggcgugcguggaggaggucacgaccacccucgaggagaccaaguuccugacggagaaccugcuccuguacaucgacaucaacgggaaccugcaccccgacuccgccacccucgugagcgacaucgacaucaccuuccugaagaaggacgcccccuacaucgugggcgacgucgugcaggagggcgugcugaccgccgucgugauccccacgaagaaggccgggggcaccaccgagaugcucgcgaaggcccugcgcaaggugccgaccgacaacuacaucacgaccuaccccgggcagggccugaacggguacaccgucgaggaggccaagaccgugcucaagaagugcaaguccgccuucuacauccugcccagcaucaucuccaacgagaagcaggagauccugggcaccgugagcuggaaccuccgggagaugcuggcgcacgccgaggagacgcgcaagcugaugcccgucugcguggagaccaaggccaucguguccaccauccagcggaaguacaagggcaucaagauccaggagggggucguggacuacggcgcccgcuucuacuucuacaccagcaagacgaccguggccucccugaucaacacccucaacgaccugaacgagacccuggucacgaugccgcucggguacgugacccacggccugaaccuggaggaggcggcccgguacaugcgcagccucaaggugcccgccaccgucuccgugagcucccccgacgccgugaccgccuacaacggguaccugacgagcuccagcaagaccuccgaggagcacuucaucgagaccaucagccuggcgggcagcuacaaggacugguccuacagcggccaguccacccagcucgggaucgaguuccugaagcggggcgacaagagcgucuacuacacguccaaccccaccaccuuccaccuggacggggaggugaucaccuucgacaaccucaagacgcugcugagccuccgcgaggugcggaccaucaaggucuucaccaccguggacaacaucaaccugcacacgcagguggucgacauguccaugaccuacggccagcaguucggcccgaccuaccuggacggggccgacgugaccaagaucaagccccacaacagccacgagggcaagacguucuacgugcuccccaacgacgacacccugcgcgucgaggccuucgaguacuaccacaccaccgacccguccuuccuggggcgguacaugagcgcccucaaccacacgaagaaguggaaguacccccaggugaacggccugaccuccaucaagugggccgacaacaacugcuaccuggcgaccgcccuccugacccugcagcagaucgagcucaaguucaacccccccgcccugcaggacgccuacuaccgcgcgcgggccggggaggccgccaacuucugcgcccugauccucgcguacugcaacaagacggugggcgagcugggcgacguccgcgagaccaugagcuaccuguuccagcacgccaaccucgacuccugcaagcgggugcugaacgucgugugcaagaccugcgggcagcagcagaccacccugaagggcguggaggccgucauguacauggggacgcucagcuacgagcaguucaagaagggcgugcagaucccgugcaccugcgggaagcaggccaccaaguaccuggugcagcaggagucccccuucgucaugaugagcgccccccccgcgcaguacgagcugaagcacggcaccuucacgugcgccuccgaguacaccggcaacuaccagugcgggcacuacaagcacaucaccagcaaggagacccucuacugcaucgacggcgcccugcugacgaagagcuccgaguacaaggggccgaucaccgacguguucuacaaggagaacagcuacaccaccacgaucaagcccgugaccuacaagcucgacggcgucgugugcaccgagaucgaccccaagcuggacaacuacuacaagaaggacaacuccuacuucaccgagcagcccaucgaccuggugccgaaccagcccuaccccaacgccagcuucgacaacuucaaguucgucugcgacaacaucaaguucgccgacgaccucaaccagcugacgggguacaagaagcccgcgucccgcgagcugaaggugaccuucuucccggaccucaacggcgacguggucgccaucgacuacaagcacuacacccccagcuucaagaagggcgccaagcugcugcacaagcccaucguguggcacgugaacaacgccaccaacaaggcgacguacaagcccaacaccuggugcauccggugccucugguccaccaagccggucgagaccagcaacuccuucgacgugcugaagagcgaggacgcccaggggauggacaaccuggccugcgaggaccucaagcccguguccgaggaggucguggagaaccccacgauccagaaggacgugcuggagugcaacgucaagaccaccgagguggugggcgacaucauccugaagcccgccaacaacagccucaagaucaccgaggaggucgggcacacggaccugauggccgcguacguggacaacuccagccugaccaucaagaagccgaacgagcucucccgcgugcugggccugaagacccucgccacccacgggcuggccgccgucaacagcgugcccugggacacgaucgccaacuacgcgaagcccuuccugaacaagguggucuccaccaccaccaacaucgugacgcgcugccucaaccgggugugcaccaacuacaugccguacuucuucacccugcugcuccagcugugcaccuucacccgcagcacgaacucccggaucaaggccagcaugcccaccaccaucgccaagaacaccgucaagagcgugggcaaguucugccuggaggccuccuucaacuaccucaagagccccaacuucuccaagcugaucaacaucaucaucugguuccugcuccugagcgugugccugggcucccucaucuacagcacggccgcgcuggggguccugauguccaaccucggcaugcccagcuacugcaccggguaccgcgagggcuaccugaacuccaccaacgugaccaucgccacguacugcaccggcagcaucccgugcuccgugugccugagcgggcucgacucccuggacaccuaccccagccuggagaccauccagaucacgaucuccagcuucaagugggaccucaccgccuucggccuggucgccgagugguuccuggccuacauccucuucacccgguucuucuacgugcuggggcuggcggccaucaugcagcucuucuucuccuacuucgccgugcacuucaucagcaacuccuggcugauguggcugaucaucaaccugguccagauggcccccaucagcgcgauggugcgcauguacaucuucuucgccagcuucuacuacguguggaaguccuacguccacgugguggacggcugcaacagcuccaccugcaugaugugcuacaagcggaaccgcgccacgcgggucgagugcaccaccaucgugaacgggguccgccggagcuucuacguguacgccaacggcggcaagggguucugcaagcuccacaacuggaacugcgugaacugcgacaccuucugcgccggcuccacguucaucagcgacgaggucgcgcgcgaccugucccugcaguucaagcggcccaucaacccgaccgaccagagcuccuacaucguggacagcgugaccgucaacaacggguccauccaccucuacuucgacaaggccggccagaagaccuacgagcgccacagccugucccacuucgugaaccuggacaaccuccgggccaacaacacgaaggggagccugcccaucaacgugaucgucuucgacggcaaguccaagugcgaggagagcuccgccaagagcgccuccguguacuacagccagcugaugugccagcccauccuccugcuggaccaggcgcucgugagcgacgucggcgacuccgccgagguggccgugaagauguucgacgccuacgucaacaccuucagcuccaccuucaacgugcccauggagaagcugaagacccugguggccacggcggaggccgagcucgccaagaacgucagccuggacaacgugcuguccaccuucaucagcgccgcgcgccagggguucguggacuccgacgucgagaccaaggacgugguggagugccucaagcugagccaccaguccgacaucgaggucaccggcgacagcugcaacaacuacaugcugacguacaacaagguggagaacaugaccccgcgggaccucggggccugcaucgacugcuccgcccgccacaucaacgcccagguggccaagagccacaacaucgcgcugaucuggaacgucaaggacuucaugucccugagcgagcagcuccggaagcagauccgcuccgccgccaagaagaacaaccugcccuucaagcugaccugcgccaccacgcgccagguggugaacgucgugaccaccaagaucgcccucaagggcgggugaggacuagucccuguucccagagcccacuuuuuuuucuuuuuuugaaauaaaauagccugucuuucagaucucaaaggcucuuuucagagccaccaaaaaaaaaaaaaaaaaaaaaaaaaaaaaaaaaaaaaaaaaaaaaaaaaaaaaaaaaaaaaaaaaaaaaaaaaaaaaaaaaaaaaaaaaaaaaaaaaaaaa

SEQ ID NO: 20014 - RNA, 6113 nt, Artificial Sequence
  SARS-CoV-2__MT576689.1__non-structural protein 3 (NSP3) mRNA gc
aggagagucccgcagucggcguccagcggcucugcuuguucgugugugugucguugcaggccuuauucaagcuuaccauggcccccaccaaggugaccuucggcgacgacacggucaucgaggugcagggguaccgcagcgugaacaucaccuucgagcuggacgagcggaucgacaagguccucaacgagaagugcuccgccuacaccguggagcugggcaccgaggugaacgaguucgcgugcgucguggccgacgccgugaucaagacgcugcagccggucagcgagcuccugaccccccuggggaucgaccucgacgagugguccauggccaccuacuaccuguucgacgagagcggcgaguucaagcuggccucccacauguacugcagcuucuacccccccgacgaggacgaggaggagggggacugcgaggaggaggaguucgagccguccacccaguacgaguacggcacggaggacgacuaccagggcaagccccucgaguucggggcgaccagcgccgcccugcagcccgaggaggagcaggaggaggacuggcuggacgacgacucccagcagaccgugggccagcaggacgggagcgaggacaaccagaccacgaccauccagaccaucguggagguccagccccagcucgagauggagcugaccccgguggugcagacgaucgaggucaacuccuucagcggcuaccugaagcucaccgacaacguguacaucaagaacgccgacaucguggaggaggcgaagaaggucaagcccaccgugguggucaacgccgccaacguguaccugaagcacgggggcggcguggccggggcccugaacaaggcgaccaacaacgccaugcaggucgaguccgacgacuacaucgccacgaacggcccccucaagguggggggcagcugcguccuguccggccacaaccuggccaagcacugccuccacgugguggggcccaacgucaacaagggcgaggacauccagcugcugaagagcgccuacgagaacuucaaccagcacgaggugcuccuggcgccgcugcucuccgccgggaucuucggcgccgaccccauccacagccugcgcgugugcgucgacaccgugcggaccaacguguaccuggccgucuucgacaagaaccucuacgacaagcugguguccagcuuccuggagaugaagagcgagaagcagguggagcagaagaucgccgagauccccaaggaggaggucaagcccuucaucaccgaguccaagccgagcguggagcagcgcaagcaggacgacaagaagaucaaggcgugcguggaggaggucacgaccacccucgaggagaccaaguuccugacggagaaccugcuccuguacaucgacaucaacgggaaccugcaccccgacuccgccacccucgugagcgacaucgacaucaccuuccugaagaaggacgcccccuacaucgugggcgacgucgugcaggagggcgugcugaccgccgucgugauccccacgaagaaggccgggggcaccaccgagaugcucgcgaaggcccugcggaaggugccgaccgacaacuacaucacgaccuaccccgggcagggccugaacggguacaccgucgaggaggccaagaccgugcucaagaagugcaaguccgccuucuacauccugcccagcaucaucuccaacgagaagcaggagauccugggcaccgugagcuggaaccuccgcgagaugcuggcgcacgccgaggagacgcggaagcugaugcccgucugcguggagaccaaggccaucguguccaccauccagcgcaaguacaagggcaucaagauccaggagggggucguggacuacggcgcccgguucuacuucuacaccagcaagacgaccguggccucccugaucaacacccucaacgaccugaacgagacccuggucacgaugccgcucggguacgugacccacggccugaaccuggaggaggcggcccgcuacaugcggagccucaaggugcccgccaccgucuccgugagcucccccgacgccgugaccgccuacaacggguaccugacgagcuccagcaagacccccgaggagcacuucaucgagaccaucucccuggcgggcagcuacaaggacuggagcuacuccggccagagcacccagcucgggaucgaguuccugaagcgcggcgacaaguccgucuacuacacgagcaacccgaccaccuuccaccuggacggggaggugaucaccuucgacaaccucaagacgcugcugucccuccgggaggugcgcaccaucaaggucuucaccaccguggacaacaucaaccugcacacgcagguggucgacaugagcaugaccuacggccagcaguucggccccaccuaccuggacggggccgacgugaccaagaucaagccccacaacucccacgagggcaagacguucuacgugcucccgaacgacgacacccugcgggucgaggccuucgaguacuaccacaccaccgaccccagcuuccuggggcgcuacauguccgcccucaaccacacgaagaaguggaaguacccccaggugaacggccugaccagcaucaagugggccgacaacaacugcuaccuggcgaccgcccuccugacccugcagcagaucgagcucaaguucaaccccccggcccugcaggacgccuacuaccgggcgcgcgccggggaggccgccaacuucugcgcccugauccucgcguacugcaacaagacggugggcgagcugggcgacguccgggagaccauguccuaccuguuccagcacgccaaccucgacagcugcaagcgcgugcugaacgucgugugcaagaccugcgggcagcagcagaccacccugaagggcguggaggccgucauguacauggggacgcucuccuacgagcaguucaagaagggcgugcagauccccugcaccugcgggaagcaggccaccaaguaccuggugcagcaggagagccccuucgucaugauguccgcccccccggcgcaguacgagcugaagcacggcaccuucacgugcgccagcgaguacaccggcaacuaccagugcgggcacuacaagcacaucaccuccaaggagacccucuacugcaucgacggcgcccugcugacgaagagcagcgaguacaaggggcccaucaccgacguguucuacaaggagaacuccuacaccaccacgaucaagcccgugaccuacaagcucgacggcgucgugugcaccgagaucgaccccaagcuggacaacuacuacaagaaggacaacagcuacuucaccgagcagccgaucgaccuggugcccaaccagcccuaccccaacgccuccuucgacaacuucaaguucgucugcgacaacaucaaguucgccgacgaccucaaccagcugacgggguacaagaagccggcgagccgggagcugaaggugaccuucuuccccgaccucaacggcgacguggucgccaucgacuacaagcacuacacccccuccuucaagaagggcgccaagcugcugcacaagcccaucguguggcacgugaacaacgccaccaacaaggcgacguacaagccgaacaccuggugcauccgcugccucuggagcaccaagcccgucgagaccuccaacagcuucgacgugcugaaguccgaggacgcccaggggauggacaaccuggccugcgaggaccucaagcccgugagcgaggaggucguggagaaccccacgauccagaaggacgugcuggagugcaacgucaagaccaccgagguggugggcgacaucauccugaagccggccaacaacucccucaagaucaccgaggaggucgggcacacggaccugauggccgcguacguggacaacagcucccugaccaucaagaagcccaacgagcucagccgcgugcugggccugaagacccucgccacccacgggcuggccgccgucaacuccgugcccugggacacgaucgccaacuacgcgaagccguuccugaacaagguggucagcaccaccaccaacaucgugacgcggugccucaaccgcgugugcaccaacuacaugcccuacuucuucacccugcugcuccagcugugcaccuucacccgguccacgaacagccgcaucaaggccuccaugcccaccaccaucgccaagaacaccgucaagagcgugggcaaguucugccuggaggccagcuucaacuaccucaagucccccaacuucagcaagcugaucaacaucaucaucugguuccugcuccuguccgugugccugggcagccucaucuacuccacggccgcgcuggggguccugaugagcaaccucggcaugccguccuacugcaccggguaccgggagggcuaccugaacagcaccaacgugaccaucgccacguacugcaccggcuccauccccugcagcgugugccuguccgggcucgacagccuggacaccuaccccucccuggagaccauccagaucacgaucagcuccuucaagugggaccucaccgccuucggccuggucgccgagugguuccuggccuacauccucuucacccgcuucuucuacgugcuggggcuggcggccaucaugcagcucuucuucagcuacuucgccgugcacuucaucuccaacagcuggcugauguggcugaucaucaaccugguccagauggcccccaucuccgcgauggugcggauguacaucuucuucgccagcuucuacuacguguggaagagcuacguccacgugguggacggcugcaacuccagcaccugcaugaugugcuacaagcgcaaccgggccacgcgcgucgagugcaccaccaucgugaacgggguccggcgcuccuucuacguguacgccaacggcggcaagggguucugcaagcuccacaacuggaacugcgugaacugcgacaccuucugcgccggcagcacguucaucuccgacgaggucgcgcgggaccugagccugcaguucaagcgcccgaucaaccccaccgaccaguccagcuacaucguggacuccgugaccgucaagaacgggagcauccaccucuacuucgacaaggccggccagaagaccuacgagcggcacucccugagccacuucgugaaccuggacaaccuccgcgccaacaacacgaaggggucccugcccaucaacgugaucgucuucgacggcaagagcaagugcgaggaguccagcgccaaguccgccagcguguacuacucccagcugaugugccagcccauccuccugcuggaccaggcgcucgugagcgacgucggcgacagcgccgagguggccgugaagauguucgacgccuacgucaacaccuucuccagcaccuucaacgugccgauggagaagcugaagacccugguggccacggcggaggccgagcucgccaagaacgucucccuggacaacgugcugagcaccuucaucuccgccgcgcggcagggguucguggacagcgacgucgagaccaaggacgugguggagugccucaagcugucccaccagagcgacaucgaggucaccggcgacuccugcaacaacuacaugcugacguacaacaagguggagaacaugaccccccgcgaccucggggccugcaucgacugcagcgcccggcacaucaacgcccagguggccaagucccacaacaucgcgcugaucuggaacgucaaggacuucaugagccuguccgagcagcuccgcaagcagauccgcagcgccgccaagaagaacaaccugcccuucaagcugaccugcgccaccacgcggcagguggugaacgucgugaccaccaagaucgcccucaagggcgggugaggacuagucccuguucccagagcccacuuuuuuuucuuuuuuugaaauaaaauagccugucuuucagaucucaaaggcucuuuucagagccaccaaaaaaaaaaaaaaaaaaaaaaaaaaaaaaaaaaaaaaaaaaaaaaaaaaaaaaaaaaaaaaaaaaaaaaaaaaaaaaaaaaaaaaaaaaaaaaaaaaaaa

SEQ ID NO: 20015 - RNA, 6113 nt, Artificial Sequence
  SARS-CoV-2__MT569474.1__non-structural protein 3 (NSP3) mRNA gc
aggagagucccgcagucggcguccagcggcucugcuuguucgugugugugucguugcaggccuuauucaagcuuaccauggcccccaccaaggugaccuucggcgacgacacggucaucgaggugcagggguacaagagcgugaacaucaccuucgagcuggacgagcgcaucgacaagguccucaacgagaagugcuccgccuacaccguggagcugggcaccgaggugaacgaguucgcgugcgucguggccgacgccgugaucaagacgcugcagccggucagcgagcuccugaccccccuggggaucgaccucgacgagugguccauggccaccuacuaccuguucgacgagagcggcgaguucaagcuggccucccacauguacugcagcuucuacccccccgacgaggacgaggaggagggggacugcgaggaggaggaguucgagccguccacccaguacgaguacggcacggaggacgacuaccagggcaagccccucgaguucggggcgaccagcgccgcccugcagcccgaggaggagcaggaggaggacuggcuggacgacgacucccagcagaccgugggccagcaggacgggagcgaggacaaccagaccacgaccauccagaccaucguggagguccagccccagcucgagauggagcugaccccgguggugcagacgaucgaggucaacuccuucagcggcuaccugaagcucaccgacaacguguacaucaagaacgccgacaucguggaggaggcgaagaaggucaagcccaccgugguggucaacgccgccaacguguaccugaagcacgggggcggcguggccggggcccugaacaaggcgaccaacaacgccaugcaggucgaguccgacgacuacaucgccacgaacggcccccucaagguggggggcagcugcguccuguccggccacaaccuggccaagcacugccuccacgugguggggcccaacgucaacaagggcgaggacauccagcugcugaagagcgccuacgagaacuucaaccagcacgaggugcuccuggcgccgcugcucuccgccgggaucuucggcgccgaccccauccacagccugcgggugugcgucgacaccgugcgcaccaacguguaccuggccgucuucgacaagaaccucuacgacaagcugguguccagcuuccuggagaugaagagcgagaagcagguggagcagaagaucgccgagauccccaaggaggaggucaagcccuucaucaccgaguccaagccgagcguggagcagcggaagcaggacgacaagaagaucaaggcgugcguggaggaggucacgaccacccucgaggagaccaaguuccugacggagaaccugcuccuguacaucgacaucaacgggaaccugcaccccgacuccgccacccucgugagcgacaucgacaucaccuuccugaagaaggacgcccccuacaucgugggcgacgucgugcaggagggcgugcugaccgccgucgugauccccacgaagaaggccgggggcaccaccgagaugcucgcgaaggcccugcgcaaggugccgaccgacaacuacaucacgaccuaccccgggcagggccugaacggguacaccgucgaggaggccaagaccgugcucaagaagugcaaguccgccuucuacauccugcccagcaucaucuccaacgagaagcaggagauccugggcaccgugagcuggaaccuccgggagaugcuggcgcacgccgaggagacgcgcaagcugaugcccgucugcguggagaccaaggccaucguguccaccauccagcggaaguacaagggcaucaagauccaggagggggucguggacuacggcgcccgcuucuacuucuacaccagcaagacgaccguggccucccugaucaacacccucaacgaccugaacgagacccuggucacgaugccgcucggguacgugacccacggccugaaccuggaggaggcggcccgguacaugcgcagccucaaggugcccgccaccgucuccgugagcucccccgacgccgugaccgccuacaacggguaccugacgagcuccagcaagacccccgaggagcacuucaucgagaccaucucccuggcgggcagcuacaaggacuggagcuacuccggccagagcacccagcucgggaucgaguuccugaagcggggcgacaaguccgucuacuacacgagcaacccgaccaccuuccaccuggacggggaggugaucaccuucgacaaccucaagacgcugcugucccuccgcgaggugcggaccaucaaggucuucaccaccguggacaacaucaaccugcacacgcagguggucgacaugagcaugaccuacggccagcaguucggccccaccuaccuggacggggccgacgugaccaagaucaagccccacaacucccacgagggcaagacguucuacgugcucccgaacgacgacacccugcgcgucgaggccuucgaguacuaccacaccaccgaccccagcuuccuggggcgguacauguccgcccucaaccacacgaagaaguggaaguacccccaggugaacggccugaccagcaucaagugggccgacaacaacugcuaccuggcgaccgcccuccugacccugcagcagaucgagcucaaguucaaccccccggcccugcaggacgccuacuaccgcgcgcgggccggggaggccgccaacuucugcgcccugauccucgcguacugcaacaagacggugggcgagcugggcgacguccgcgagaccauguccuaccuguuccagcacgccaaccucgacagcugcaagcgggugcugaacgucgugugcaagaccugcgggcagcagcagaccacccugaagggcguggaggccgucauguacauggggacgcucuccuacgagcaguucaagaagggcgugcagauccccugcaccugcgggaagcaggccaccaaguaccuggugcagcaggagagccccuucgucaugauguccgcccccccggcgcaguacgagcugaagcacggcaccuucacgugcgccagcgaguacaccggcaacuaccagugcgggcacuacaagcacaucaccuccaaggagacccucuacugcaucgacggcgcccugcugacgaagagcagcgaguacaaggggcccaucaccgacguguucuacaaggagaacuccuacaccaccacgaucaagcccgugaccuacaagcucgacggcgucgugugcaccgagaucgaccccaagcuggacaacuacuacaagaaggacaacagcuacuucaccgagcagccgaucgaccuggugcccaaccagcccuaccccaacgccuccuucgacaacuucaaguucgucugcgacaacaucaaguucgccgacgaccucaaccagcugacgggguacaagaagccggcgagccgcgagcugaaggugaccuucuuccccgaccucaacggcgacguggucgccaucgacuacaagcacuacacccccuccuucaagaagggcgccaagcugcugcacaagcccaucguguggcacgugaacaacgccaccaacaaggcgacguacaagccgaacaccuggugcauccggugccucuggagcaccaagcccgucgagaccuccaacagcuucgacgugcugaaguccgaggacgcccaggggauggacaaccuggccugcgaggaccucaagcccgugagcgaggaggucguggagaaccccacgauccagaaggacgugcuggagugcaacgucaagaccaccgagguggugggcgacaucauccugaagccggccaacaacucccucaagaucaccgaggaggucgggcacacggaccugauggccgcguacguggacaacagcucccugaccaucaagaagcccaacgagcucagccgcgugcugggccugaagacccucgccacccacgggcuggccgccgucaacuccgugcccugggacacgaucgccaacuacgcgaagccguuccugaacaagguggucagcaccaccaccaacaucgugacgcgcugccucaaccgggugugcaccaacuacaugcccuacuucuucacccugcugcuccagcugugcaccuucacccgcuccacgaacagccggaucaaggccuccaugcccaccaccaucgccaagaacaccgucaagagcgugggcaaguucugccuggaggccagcuucaacuaccucaagucccccaacuucagcaagcugaucaacaucaucaucugguuccugcuccuguccgugugccugggcagccucaucuacuccacggccgcgcuggggguccugaugagcaaccucggcaugccguccuacugcaccggguaccgcgagggcuaccugaacagcaccaacgugaccaucgccacguacugcaccggcuccauccccugcagcgugugccuguccgggcucgacagccuggacaccuaccccucccuggagaccauccagaucacgaucagcuccuucaagugggaccucaccgccuucggccuggucgccgagugguuccuggccuacauccucuucacccgguucuucuacgugcuggggcuggcggccaucaugcagcucuucuucagcuacuucgccgugcacuucaucuccaacagcuggcugauguggcugaucaucaaccugguccagauggcccccaucuccgcgauggugcgcauguacaucuucuucgccagcuucuacuacguguggaagagcuacguccacgugguggacggcugcaacuccagcaccugcaugaugugcuacaagcggaaccgcgccacgcgggucgagugcaccaccaucgugaacgggguccgccgguccuucuacguguacgccaacggcggcaagggguucugcaagcuccacaacuggaacugcgugaacugcgacaccuucugcgccggcagcacguucaucuccgacgaggucgcgcgcgaccugagccugcaguucaagcggccgaucaaccccaccgaccaguccagcuacaucguggacuccgugaucgucaagaacgggagcauccaccucuacuucgacaaggccggccagaagaccuacgagcgccacucccugagccacuucgugaaccuggacaaccuccgggccaacaacaccaaggggucccugcccaucaacgugaucgucuucgacggcaagagcaagugcgaggaguccagcgccaaguccgccagcguguacuacucccagcugaugugccagcccauccuccugcuggaccaggcgcucgugagcgacgucggcgacagcgccgagguggccgugaagauguucgacgccuacgucaacacguucuccagcaccuucaacgugccgauggagaagcugaagacccugguggccaccgcggaggccgagcucgccaagaacgucucccuggacaacgugcugagcacguucaucuccgccgcgcgccagggguucguggacagcgacgucgagaccaaggacgugguggagugccucaagcugucccaccagagcgacaucgaggucaccggcgacuccugcaacaacuacaugcugaccuacaacaagguggagaacaugacgccccgggaccucggggccugcaucgacugcagcgcccgccacaucaacgcccagguggccaagucccacaacaucgcgcugaucuggaacgucaaggacuucaugagccuguccgagcagcuccggaagcagauccgcagcgccgccaagaagaacaaccugcccuucaagcugaccugcgccaccacccgccagguggugaacgucgugacgaccaagaucgcccucaagggcgggugaggacuagucccuguucccagagcccacuuuuuuuucuuuuuuugaaauaaaauagccugucuuucagaucucaaaggcucuuuucagagccaccaaaaaaaaaaaaaaaaaaaaaaaaaaaaaaaaaaaaaaaaaaaaaaaaaaaaaaaaaaaaaaaaaaaaaaaaaaaaaaaaaaaaaaaaaaaaaaaaaaaaa

SEQ ID NO: 20016 - RNA, 6113 nt, Artificial Sequence
  SARS-CoV-2__MT520189.1__non-structural protein 3 (NSP3) mRNA gc
aggagagucccgcagucggcguccagcggcucugcuuguucgugugugugucguugcaggccuuauucaagcuuaccauggcccccaccaaggugaccuucggcgacgacacggucaucgaggugcagggguacaagagcgugaacaucaccuucgagcuggacgagcgcaucgacaagguccucaacgagaagugcuccgccuacaccguggagcugggcaccgaggugaacgaguucgcgugcgucguggccgacgccgugaucaagacgcugcagccggucagcgagcuccugaccccccuggggaucgaccucgacgagugguccauggccaccuacuaccuguucgacgagagcggcgaguucaagcuggccucccacauguacugcagcuucuacccccccgacgaggacgaggaggagggggacugcgaggaggaggaguucgagccguccacccaguacgaguacggcacggaggacgacuaccagggcaagccccucgaguucggggcgaccagcgccgcccugcagcuggaggaggagcaggaggaggacuggcucgacgacgacucccagcagaccgugggccagcaggacgggagcgaggacaaccagaccacgaccauccagaccaucguggagguccagccccagcuggagauggagcugacccccguggugcagacgaucgaggucaacuccuucagcggcuaccucaagcugaccgacaacguguacaucaagaacgccgacaucguggaggaggcgaagaaggucaagccgaccgugguggucaacgccgccaacguguaccugaagcacgggggcggcguggccggggcccucaacaaggcgaccaacaacgccaugcaggucgaguccgacgacuacaucgccacgaacggcccccugaagguggggggcagcugcguccuguccggccacaaccucgccaagcacugccugcacgugguggggcccaacgucaacaagggcgaggacauccagcugcucaagagcgccuacgagaacuucaaccagcacgaggugcugcuggcgccccuccuguccgccgggaucuucggcgccgacccgauccacagccugcgggugugcgucgacaccgugcgcaccaacguguaccucgccgucuucgacaagaaccuguacgacaagcugguguccagcuuccucgagaugaagagcgagaagcagguggagcagaagaucgccgagauccccaaggaggaggucaagcccuucaucaccgaguccaagcccagcguggagcagcggaagcaggacgacaagaagaucaaggcgugcguggaggaggucacgaccacccuggaggagaccaaguuccugacggagaaccuccugcuguacaucgacaucaacgggaaccuccacccggacuccgccacccuggugagcgacaucgacaucaccuuccugaagaaggacgcccccuacaucgugggcgacgucgugcaggagggcgugcucaccgccgucgugauccccacgaagaaggccgggggcaccaccgagaugcuggcgaaggcccugcgcaaggugcccaccgacaacuacaucacgaccuacccggggcagggccucaacggguacaccgucgaggaggccaagaccgugcugaagaagugcaaguccgccuucuacauccugcccagcaucaucuccaacgagaagcaggagauccucggcaccgugagcuggaaccugcgggagaugcuggcgcacgccgaggagacgcgcaagcugaugcccgucugcguggagaccaaggccaucguguccaccauccagcggaaguacaagggcaucaagauccaggagggggucguggacuacggcgcccgcuucuacuucuacaccagcaagacgaccguggccucccucaucaacacccugaacgaccugaacgagacccucgucacgaugccccugggguacgugacccacggccugaaccucgaggaggcggcccgguacaugcgcagccugaaggugccggccaccgucuccgugagcucccccgacgccgugaccgccuacaacggguaccugacgagcuccagcaagacccccgaggagcacuucaucgagaccaucucccucgcgggcagcuacaaggacuggagcuacuccggccagagcacccagcuggggaucgaguuccugaagcggggcgacaaguccgucuacuacacgagcaaccccaccaccuuccaccucgacggggaggugaucaccuucgacaaccugaagacgcugcucucccugcgcgaggugcggaccaucaaggucuucaccaccguggacaacaucaaccugcacacgcagguggucgacaugagcaugaccuacggccagcaguucggcccgaccuaccucgacggggccgacgugaccaagaucaagccccacaacucccacgagggcaagacguucuacgugcugcccaacgacgacacccugcgcgucgaggccuucgaguacuaccacaccaccgacccgagcuuccucgggcgguacauguccgcccugaaccacacgaagaaguggaaguacccccaggugaacggccugaccagcaucaagugggccgacaacaacugcuaccucgcgaccgcccugcugacccuccagcagaucgagcugaaguucaacccccccgcccugcaggacgccuacuaccgcgcgcgggccggggaggccgccaacuucugcgcccucauccuggcguacugcaacaagacggugggcgagcugggcgacguccgcgagaccauguccuaccucuuccagcacgccaaccuggacagcugcaagcgggugcugaacgucgugugcaagaccugcgggcagcagcagaccacccucaagggcguggaggccgucauguacauggggacgcuguccuacgagcaguucaagaagggcgugcagaucccgugcaccugcgggaagcaggccaccaaguaccuggugcagcaggagagccccuucgucaugauguccgccccccccgcgcaguacgagcucaagcacggcaccuucacgugcgccagcgaguacaccggcaacuaccagugcgggcacuacaagcacaucaucuccaaggagacccuguacugcaucgacggcgcccugcucaccaagagcagcgaguacaaggggccgaucacggacguguucuacaaggagaacuccuacaccaccaccaucaagcccgugacguacaagcuggacggcgucgugugcaccgagaucgaccccaagcuggacaacuacuacaagaaggacaacagcuacuucaccgagcagcccaucgaccucgugccgaaccagcccuaccccaacgccuccuucgacaacuucaaguucgucugcgacaacaucaaguucgccgacgaccugaaccagcugaccggguacaagaagcccgcgagccgcgagcucaaggugacguucuucccggaccugaacggcgacguggucgccaucgacuacaagcacuacacccccuccuucaagaagggcgccaagcugcuccacaagcccaucguguggcacgugaacaacgccaccaacaaggcgaccuacaagcccaacacguggugcauccggugccuguggagcaccaagccggucgagaccuccaacagcuucgacgugcugaaguccgaggacgcccaggggauggacaaccucgccugcgaggaccugaagcccgugagcgaggaggucguggagaaccccaccauccagaaggacgugcuggagugcaacgucaagacgaccgagguggugggcgacaucauccucaagcccgccaacaacucccugaagaucaccgaggaggucgggcacaccgaccugauggccgcguacguggacaacagcucccucacgaucaagaagccgaacgagcugagccgcgugcugggccucaagacccuggccacccacgggcuggccgccgucaacuccgugcccugggacaccaucgccaacuacgcgaagcccuuccucaacaagguggucagcacgaccaccaacaucgugacccgcugccugaaccgggugugcacgaacuacaugccguacuucuucacccugcuccugcagcugugcaccuucacccgcuccaccaacagccggaucaaggccuccaugcccacgaccaucgccaagaacaccgucaagagcgugggcaaguucugccucgaggccagcuucaacuaccugaagucccccaacuucagcaagcugaucaacaucaucaucugguuccuccugcuguccgugugccucggcagccugaucuacuccaccgccgcgcuggggguccucaugagcaaccugggcaugcccuccuacugcacgggguaccgcgagggcuaccugaacagcaccaacgugaccaucgccaccuacugcacgggcuccaucccgugcagcgugugccucuccgggcuggacagccuggacaccuaccccucccucgagaccauccagaucaccaucagcuccuucaagugggaccugacggccuucggccuggucgccgagugguuccucgccuacauccuguucacccgguucuucuacgugcuggggcucgcggccaucaugcagcuguucuucagcuacuucgccgugcacuucaucuccaacagcuggcugauguggcugaucaucaaccucguccagauggcccccaucuccgcgauggugcgcauguacaucuucuucgccagcuucuacuacguguggaagagcuacguccacgugguggacggcugcaacuccagcaccugcaugaugugcuacaagcggaaccgcgccacccgggucgagugcacgaccaucgugaacgggguccgccgguccuucuacguguacgccaacggcggcaagggguucugcaagcugcacaacuggaacugcgugaacugcgacaccuucugcgccggcagcaccuucaucuccgacgaggucgcgcgcgaccugagccuccaguucaagcggcccaucaacccgacggaccaguccagcuacaucguggacuccgugaccgucaagaacgggagcauccaccuguacuucgacaaggccggccagaagaccuacgagcgccacucccugagccacuucgugaaccucgacaaccugcgggccaacaacaccaaggggucccugcccaucaacgugaucgucuucgacggcaagagcaagugcgaggaguccagcgccaaguccgccagcguguacuacucccagcucaugugccagcccauccugcugcucgaccaggcgcuggugagcgacgucggcgacagcgccgagguggccgugaagauguucgacgccuacgucaacacguucuccagcaccuucaacgugcccauggagaagcugaagacccucguggccaccgcggaggccgagcuggccaagaacgucucccuggacaacgugcucagcacguucaucuccgccgcgcgccagggguucguggacagcgacgucgagaccaaggacgugguggagugccugaagcugucccaccagagcgacaucgaggucaccggcgacuccugcaacaacuacaugcucaccuacaacaagguggagaacaugacgccgcgggaccugggggccugcaucgacugcagcgcccgccacaucaacgcccagguggccaagucccacaacaucgcgcugaucuggaacgucaaggacuucaugagccucuccgagcagcugcggaagcagauccgcagcgccgccaagaagaacaaccugcccuucaagcucaccugcgccaccacccgccagguggugaacgucgugacgaccaagaucgcccugaagggcgggugaggacuagucccuguucccagagcccacuuuuuuuucuuuuuuugaaauaaaauagccugucuuucagaucucaaaggcucuuuucagagccaccaaaaaaaaaaaaaaaaaaaaaaaaaaaaaaaaaaaaaaaaaaaaaaaaaaaaaaaaaaaaaaaaaaaaaaaaaaaaaaaaaaaaaaaaaaaaaaaaaaaaa

SEQ ID NO: 20017 - RNA, 6113 nt, Artificial Sequence
  SARS-CoV-2__MT520208.1__non-structural protein 3 (NSP3) mRNA gc
aggagagucccgcagucggcguccagcggcucugcuuguucgugugugugucguugcaggccuuauucaagcuuaccauggcccccaccaaggugaccuucggcgacgacacggucaucgaggugcagggguacaagagcgugaacaucaccuucgagcuggacgagcgcaucgacaagguccucaacgagaagugcuccgccuacaccguggagcugggcaccgaggugaacgaguucgcgugcgucguggccgacgccgugaucaagacgcugcagccggucagcgagcuccugaccccccuggggaucgaccucgacgagugguccauggccaccuacuaccuguucgacgagagcggcgaguucaagcuggccucccacauguacugcagcuucuacccccccgacgaggacgaggaggagggggacugcgaggaggaggaguucgagccguccacccaguacgaguacggcacggaggacgacuaccagggcaagccccucgaguucggggcgaccagcgccgcccugcagcccgaggaggagcaggaggaggacuggcuggacgacgacucccagcagaccgugggccagcaggacgggagcgaggacaaccagaccacgaccauccagaccaucguggagguccagccccagcucgagauggagcugaccccgguggugcagacgaucgaggucaacuccuucagcggcuaccugaagcucaccgacaacguguacaucaagaacgccgacaucguggaggaggcgaagaaggucaagcccaccgugguggucaacgccgccaacguguaccugaagcacgggggcggcguggccggggcccugaacaaggcgaccaacaacgccaugcaggucgaguccgacgacuacaucgccacgaacggcccccucaagguggggggcagcugcguccuguccggccacaaccuggccaagcacugccuccacgugguggggcccaacgucaacaagggcgaggacauccagcugcugaagagcgccuacgagaacuucaaccagcacgaggugcuccuggcgccgcugcucuccgccgggaucuucggcgccgaccccauccacagccugcgggugugcgucgacaccgugcgcaccaacguguaccuggccgucuucgacaagaaccucuacgacaagcugguguccagcuuccuggagaugaagagcgagaagcagguggagcagaagaucgccgagauccccaaggacgaggucaagcccuucaucaccgaguccaagccgagcguggagcagcggaagcaggacgacaagaagaucaaggcgugcguggaggaggucacgaccacccucgaggagaccaaguuccugacggagaaccugcuccuguacaucgacaucaacgggaaccugcaccccgacuccgccacccucgugagcgacaucgacaucaccuuccugaagaaggacgcccccuacaucgugggcgacgucgugcaggagggcgugcugaccgccgucgugauccccacgaagaaggccgggggcaccaccgagaugcucgcgaaggcccugcgcaaggugccgaccgacaacuacaucacgaccuaccccgggcagggccugaacggguacaccgucgaggaggccaagaccgugcucaagaagugcaaguccgccuucuacauccugcccagcaucaucuccaacgagaagcaggagauccugggcaccgugagcuggaaccuccgggagaugcuggcgcacgccgaggagacgcgcaagcugaugcccgucugcguggagaccaaggccaucguguccaccauccagcggaaguacaagggcaucaagauccaggagggggucguggacuacggcgcccgcuucuacuucuacaccagcaagacgaccguggccucccugaucaacacccucaacgaccugaacgagacccuggucacgaugccgcucggguacgugacccacggccugaaccuggaggaggcggcccgguacaugcgcagccucaaggugcccgccaccgucuccgugagcucccccgacgccgugaccgccuacaacggguaccugacgagcuccagcaagacccccgaggagcacuucaucgagaccaucucccuggcgggcagcuacaaggacuggagcuacuccggccagagcacccagcucgggaucgaguuccugaagcggggcgacaaguccgucuacuacacgagcaacccgaccaccuuccaccuggacggggaggugaucaccuucgacaaccucaagacgcugcugucccuccgcgaggugcggaccaucaaggucuucaccaccguggacaacaucaaccugcacacgcagguggucgacaugagcaugaccuacggccagcaguucggccccaccuaccuggacggggccgacgugaccaagaucaagccccacaacucccacgagggcaagacguucuacgugcucccgaacgacgacacccugcgcgucgaggccuucgaguacuaccacaccaccgaccccagcuuccuggggcgguacauguccgcccucaaccacacgaagaaguggaaguacccccaggugaacggccugaccagcaucaagugggccgacaacaacugcuaccuggcgaccgcccuccugacccugcagcagaucgagcucaaguucaaccccccggcccugcaggacgccuacuaccgcgcgcgggccggggaggccgccaacuucugcgcccugauccucgcguacugcaacaagacggugggcgagcugggcgacguccgcgagaccauguccuaccuguuccagcacgccaaccucgacagcugcaagcgggugcugaacgucgugugcaagaccugcgggcagcagcagaccacccugaagggcguggaggccgucauguacauggggacgcucuccuacgagcaguucaagaagggcgugcagauccccugcaccugcgggaagcaggccaccaaguaccuggugcagcaggagagccccuucgucaugauguccgcccccccggcgcaguacgagcugaagcacggcaccuucacgugcgccagcgaguacaccggcaacuaccagugcgggcacuacaagcacaucaccuccaaggagacccucuacugcaucgacggcgcccugcugacgaagagcagcgaguacaaggggcccaucaccgacguguucuacaaggagaacuccuacaccaccacgaucaagcccgugaccuacaagcucgacggcgucgugugcaccgagaucgaccccaagcuggacaacuacuacaagaaggacaacagcuacuucaccgagcagccgaucgaccuggugcccaaccagcccuaccccaacgccuccuucgacaacuucaaguucgucugcgacaacaucaaguucgccgacgaccucaaccagcugacgggguacaagaagccggcgagccgcgagcugaaggugaccuucuuccccgaccucaacggcgacguggucgccaucgacuacaagcacuacacccccuccuucaagaagggcgccaagcugcugcacaagcccaucguguggcacgugaacaacgccaccaacaaggcgacguacaagccgaacaccuggugcauccggugccucuggagcaccaagcccgucgagaccuccaacagcuucgacgugcugaaguccgaggacgcccaggggauggacaaccuggccugcgaggaccucaagcccgugagcgaggaggucguggagaaccccacgauccagaaggacgugcuggagugcaacgucaagaccaccgagguggugggcgacaucauccugaaguccgccaacaacagccucaagaucaccgaggaggucgggcacacggaccugauggccgcguacguggacaacuccagccugaccaucaagaagccgaacgagcucucccgcgugcugggccugaagacccucgccacccacgggcuggccgccgucaacagcgugcccugggacacgaucgccaacuacgcgaagcccuuccugaacaagguggucuccaccaccaccaacaucgugacgcgcugccucaaccgggugugcaccaacuacaugccguacuucuucacccugcugcuccagcugugcaccuucacccgcagcacgaacucccggaucaaggccagcaugcccaccaccaucgccaagaacaccgucaagagcgugggcaaguucugccuggaggccuccuucaacuaccucaagagccccaacuucuccaagcugaucaacaucaucaucugguuccugcuccugagcgugugccugggcucccucaucuacagcacggccgcgcuggggguccugauguccaaccucggcaugcccagcuacugcaccggguaccgcgagggcuaccugaacuccaccaacgugaccaucgccacguacugcaccggcagcaucccgugcuccgugugccugagcgggcucgacucccuggacaccuaccccagccuggagaccauccagaucacgaucuccagcuucaagugggaccucaccgccuucggccuggucgccgagugguuccuggccuacauccucuucacccgguucuucuacgugcuggggcuggcggccaucaugcagcucuucuucuccuacuucgccgugcacuucaucagcaacuccuggcugauguggcugaucaucaaccugguccagauggcccccaucagcgcgauggugcgcauguacaucuucuucgccagcuucuacuacguguggaaguccuacguccacgugguggacggcugcaacagcuccaccugcaugaugugcuacaagcggaaccgcgccacgcgggucgagugcaccaccaucgugaacgggguccgccggagcuucuacguguacgccaacggcggcaagggguucugcaagcuccacaacuggaacugcgugaacugcgacaccuucugcgccggcuccacguucaucagcgacgaggucgcgcgcgaccugucccugcaguucaagcggcccaucaacccgaccgaccagagcuccuacaucguggacagcgugaccgucaagaacggguccauccaccucuacuucgacaaggccggccagaagaccuacgagcgccacagccugucccacuucgugaaccuggacaaccuccgggccaacaacacgaaggggagccugcccaucaacgugaucgucuucgacggcaaguccaagugcgaggagagcuccgugaagagcgccuccguguacuacagccagcugaugugccagcccauccuccugcuggaccaggcccucgucagcgacgugggcgacuccgcggagguggccgucaagauguucgacgccuacgugaacaccuucagcuccaccuucaacgugcccauggagaagcugaagacccuggucgccacggccgaggcggagcucgccaagaacgugagccuggacaacgugcuguccaccuucaucagcgccgcccgccagggguucgucgacuccgacguggagaccaaggacguggucgagugccucaagcugagccaccaguccgacaucgaggugaccggcgacagcugcaacaacuacaugcugacguacaacaagguggagaacaugaccccgcgggaccucggggcgugcaucgacugcuccgcccgccacaucaacgcccaggucgccaagagccacaacaucgcccugaucuggaacgugaaggacuucaugucccugagcgagcagcuccggaagcagauccgcuccgcggccaagaagaacaaccugcccuucaagcugaccugcgccaccacgcgccagguggucaacguggugaccaccaagaucgcccucaagggcgggugaggacuagucccuguucccagagcccacuuuuuuuucuuuuuuugaaauaaaauagccugucuuucagaucucaaaggcucuuuucagagccaccaaaaaaaaaaaaaaaaaaaaaaaaaaaaaaaaaaaaaaaaaaaaaaaaaaaaaaaaaaaaaaaaaaaaaaaaaaaaaaaaaaaaaaaaaaaaaaaaaaaaa

SEQ ID NO: 20018 - RNA, 6113 nt, Artificial Sequence
  SARS-CoV-2__MT520254.1__non-structural protein 3 (NSP3) mRNA gc
aggagagucccgcagucggcguccagcggcucugcuuguucgugugugugucguugcaggccuuauucaagcuuaccauggcccccaccaaggugaccuucggcgacgacacggucaucgaggugcagggguacaagagcgugaacaucaccuucgagcuggacgagcgcaucgacaagguccucaacgagaagugcuccgccuacaccguggagcugggcaccgaggugaacgaguucgcgugcgucguggccgacgccgugaucaagacgcugcagccggucagcgagcuccugaccccccuggggaucgaccucgacgagugguccauggccaccuacuaccuguucgacgagagcggcgaguucaagcuggccucccacauguacugcagcuucuacccccccgacgaggacgaggaggagggggacugcgaggaggaggaguucgagccguccacccaguacgaguacggcacggaggacgacuaccagggcaagccccucgaguucggggcgaccagcgccgcccugcagcuggaggaggagcaggaggaggacuggcucgacgacgacucccagcagaccgugggccagcaggacgggagcgaggacaaccagaccacgaccauccagaccaucguggagguccagccccagcuggagauggagcugacccccguggugcagacgaucgaggucaacuccuucagcggcuaccucaagcugaccgacaacguguacaucaagaacgccgacaucguggaggaggcgaagaaggucaagccgaccgugguggucaacgccgccaacguguaccugaagcacgggggcggcguggccggggcccucaacaaggcgaccaacaacgccaugcaggucgaguccgacgacuacaucgccacgaacggcccccugaagguggggggcagcugcguccuguccggccacaaccucgccaagcacugccugcacgugguggggcccaacgucaacaagggcgaggacauccagcugcucaagagcgccuacgagaacuucaaccagcacgaggugcugcuggcgccccuccuguccgccgggaucuucggcgccgacccgauccacagccugcgggugugcgucgacaccgugcgcaccaacguguaccucgccgucuucgacaagaaccuguacgacaagcugguguccagcuuccucgagaugaagagcgagaagcagguggagcagaagaucgccgagauccccaaggaggaggucaagcccuucaucaccgaguccaagcccagcguggagcagcggaagcaggacgacaagaagaucaaggcgugcguggaggaggucacgaccacccuggaggagaccaaguuccugacggagaaccuccugcuguacaucgacaucaacgggaaccuccacccggacuccgccacccuggugagcgacaucgacaucaccuuccugaagaaggacgcccccuacaucgugggcgacgucgugcaggagggcgugcucaccgccgucgugauccccacgaagaaggccgggggcaccaccgagaugcuggcgaaggcccugcgcaaggugcccaccgacaacuacaucacgaccuacccggggcagggccucaacggguacaccgucgaggaggccaagaccgugcugaagaagugcaaguccgccuucuacauccugcccagcaucaucuccaacgagaagcaggagauccucggcaccgugagcuggaaccugcgggagaugcuggcgcacgccgaggagacgcgcaagcugaugcccgucugcguggagaccaaggccaucguguccaccauccagcggaaguacaagggcaucaagauccaggagggggucguggacuacggcgcccgcuucuacuucuacaccagcaagacgaccguggccucccucaucaacacccugaacgaccugaacgagacccucgucacgaugccccugggguacgugacccacggccugaaccucgaggaggcggcccgguacaugcgcagccugaaggugccggccaccgucuccgugagcucccccgacgccgugaccgccuacaacggguaccugacgagcuccagcaagacccccgaggagcacuucaucgagaccaucucccucgcgggcagcuacaaggacuggagcuacuccggccagagcacccagcuggggaucgaguuccugaagcggggcgacaaguccgucuacuacacgagcaaccccaccgccuuccaccucgacggggaggugaucaccuucgacaaccugaagacccugcucucccugcgcgaggugcggacgaucaaggucuucaccaccguggacaacaucaaccugcacacccagguggucgacaugagcaugacguacggccagcaguucggcccgaccuaccucgacggggccgacgugaccaagaucaagccccacaacucccacgagggcaagaccuucuacgugcugcccaacgacgacacgcugcgcgucgaggccuucgaguacuaccacaccaccgacccgagcuuccucgggcgguacauguccgcccugaaccacaccaagaaguggaaguacccccaggugaacggccugacgagcaucaagugggcggacaacaacugcuaccucgccaccgcccugcugacccuccagcagaucgagcugaaguucaacccccccgcccugcaggacgcguacuaccgcgcccgggccggggaggccgccaacuucugcgcgcucauccuggccuacugcaacaagaccgugggcgagcugggcgacguccgcgagacgauguccuaccucuuccagcacgccaaccuggacagcugcaagcgggugcugaacgucgugugcaagaccugcgggcagcagcagaccacccucaagggcguggaggccgucauguacauggggacccuguccuacgagcaguucaagaagggcgugcagaucccgugcacgugcgggaagcaggccaccaaguaccuggugcagcaggagagccccuucgucaugauguccgcgccccccgcccaguacgagcucaagcacggcaccuucaccugcgccagcgaguacacgggcaacuaccagugcgggcacuacaagcacaucaccuccaaggagacccuguacugcaucgacggcgcccugcucaccaagagcagcgaguacaaggggccgaucacggacguguucuacaaggagaacuccuacaccaccaccaucaagcccgugacguacaagcuggacggcgucgugugcaccgagaucgaccccaagcuggacaacuacuacaagaaggacaacagcuacuucaccgagcagcccaucgaccucgugccgaaccagcccuaccccaacgccuccuucgacaacuucaaguucgucugcgacaacaucaaguucgcggacgaccugaaccagcugaccggguacaagaagcccgccagccgcgagcucaaggugacguucuucccggaccugaacggcgacguggucgccaucgacuacaagcacuacacccccuccuucaagaagggcgccaagcugcuccacaagcccaucguguggcacgugaacaacgcgaccaacaaggccaccuacaagcccaacacguggugcauccggugccuguggagcaccaagccggucgagaccuccaacagcuucgacgugcugaagcucgaggacgcccaggggauggacaaccuggccugcgaggaccugaagcccguguccgaggaggucguggagaaccccaccauccagaaggacgugcucgagugcaacgucaagacgaccgagguggugggcgacaucauccugaagcccgccaacaacagccugaagaucaccgaggaggucgggcacaccgaccucauggcggccuacguggacaacuccagccugacgaucaagaagccgaacgagcugucccgcgugcucggccugaagacccuggccacccacgggcucgccgccgucaacagcgugcccugggacaccaucgcgaacuacgccaagcccuuccugaacaagguggucuccacgaccaccaacaucgugacccgcugccugaaccgggugugcacgaacuacaugccguacuucuucacccuccugcugcagcucugcaccuucacccgcagcaccaacucccggaucaaggccagcaugcccacgaccaucgccaagaacaccgucaaguccgugggcaaguucugccuggaggccagcuucaacuaccugaagagccccaacuucuccaagcucaucaacaucaucaucugguuccugcugcucagcgugugccugggcucccugaucuacagcaccgcggcccucgggguccugauguccaaccugggcaugcccagcuacugcacgggguaccgcgagggcuaccucaacuccaccaacgugaccaucgccaccuacugcacgggcagcaucccgugcuccgugugccugagcgggcuggacucccucgacaccuaccccagccuggagaccauccagaucaccaucuccagcuucaagugggaccugacggccuucggccucgucgccgagugguuccuggcguacauccuguucacccgguucuucuacgugcucgggcuggccgccaucaugcagcuguucuucuccuacuucgccgugcacuucaucagcaacuccuggcugauguggcucaucaucaaccugguccagauggcgcccaucagcgccauggugcgcauguacaucuucuucgccuccuucuacuacguguggaagagcuacguccacgugguggacggcugcaacagcuccaccugcaugaugugcuacaagcggaaccgcgccacccgggucgagugcacgaccaucgugaacgggguccgccggagcuucuacguguacgccaacggcggcaagggguucugcaagcugcacaacuggaacugcgugaacugcgacaccuucugcgcgggcuccaccuucaucagcgacgaggucgcccgcgaccucucccugcaguucaagcggcccaucaacccgacggaccagagcuccuacaucguggacagcgugaccgucaagaacggguccauccaccuguacuucgacaaggccggccagaagaccuacgagcgccacagccucucccacuucgugaaccuggacaaccugcgggccaacaacaccaaggggagccuccccaucaacgugaucgucuucgacggcaaguccaagugcgaggagagcuccgccaagagcgcguccguguacuacagccagcugaugugccagcccauccugcuccuggaccaggcccugguguccgacgucggcgacagcgccgagguggccgugaagauguucgacgccuacgucaacacguucagcuccaccuucaacgugcccauggagaagcucaagacccugguggcgaccgccgaggccgagcuggccaagaacgucagccucgacaacgugcuguccacguucaucagcgcggcccgccagggguucguggacuccgacgucgagaccaaggacgugguggagugccugaagcucagccaccaguccgacaucgaggucaccggcgacagcugcaacaacuacaugcugaccuacaacaagguggagaacaugacgccgcgggaccugggggccugcaucgacugcuccgcccgccacaucaacgcccagguggcgaagagccacaacaucgcccucaucuggaacgucaaggacuucaugucccugagcgagcagcugcggaagcagauccgcuccgccgccaagaagaacaaccuccccuucaagcugaccugcgccaccacccgccagguggugaacgucgugacgaccaagaucgcgcugaagggcgggugaggacuagucccuguucccagagcccacuuuuuuuucuuuuuuugaaauaaaauagccugucuuucagaucucaaaggcucuuuucagagccaccaaaaaaaaaaaaaaaaaaaaaaaaaaaaaaaaaaaaaaaaaaaaaaaaaaaaaaaaaaaaaaaaaaaaaaaaaaaaaaaaaaaaaaaaaaaaaaaaaaaaa

SEQ ID NO: 20019 - RNA, 6113 nt, Artificial Sequence
  SARS-CoV-2__MT520255.1__non-structural protein 3 (NSP3) mRNA gc
aggagagucccgcagucggcguccagcggcucugcuuguucgugugugugucguugcaggccuuauucaagcuuaccauggcccccaccaaggugaccuucggcgacgacacggucaucgaggugcagggguacaagagcgugaacaucaccuucgagcuggacgagcgcaucgacaagguccucaacgagaagugcuccgccuacaccguggagcugggcaccgaggugaacgaguucgcgugcgucguggccgacgccgugaucaagacgcugcagccggucagcgagcuccugaccccccuggggaucgaccucgacgagugguccauggccaccuacuaccuguucgacgagagcggcgaguucaagcuggccucccacauguacugcagcuucuacccccccgacgaggacgaggaggagggggacugcgaggaggaggaguucgagccguccacccaguacgaguacggcacggaggacgacuaccagggcaagccccucgaguucggggcgaccagcgccgcccugcagcccgaggaggagcaggaggaggacuggcuggacgacgacucccagcagaccgugggccagcaggacgggagcgaggacaaccagaccacgaccauccagaccaucguggagguccagccccagcucgagauggagcugaccccgguggugcagacgaucgaggucaacuccuucagcggcuaccugaagcucaccgacaacguguacaucaagaacgccgacaucguggaggaggcgaagaaggucaagcccaccgugguggucaacgccgccaacguguaccugaagcacgggggcggcguggccggggcccugaacaaggcgaccaacaacgccaugcaggucgaguccgacgacuacaucgccacgaacggcccccucaagguggggggcagcugcguccuguccggccacaaccuggccaagcacugccuccacgugguggggcccaacgucaacaagggcgaggacauccagcugcugaagagcgccuacgagaacuucaaccagcacgaggugcuccuggcgccgcugcucuccgccgggaucuucggcgccgaccccauccacagccugcgggugugcgucgacaccgugcgcaccaacguguaccuggccgucuucgacaagaaccucuacgacaagcugguguccagcuuccuggagaugaagagcgagaagcagguggagcagaagaucgccgagauccccaaggaggaggucaagcccuucaucaccgaguccaagccgagcguggagcagcggaagcaggacgacaagaagaucaaggcgugcguggaggaggucacgaccacccucgaggagaccaaguuccugacggagaaccugcuccuguacaucgacaucaacgggaaccugcaccccgacuccgccacccucgugagcgacaucgacaucaccuuccugaagaaggacgcccccuacaucgugggcgacgucgugcaggagggcgugcugaccgccgucgugauccccacgaagaaggccgggggcaccaccgagaugcucgcgaaggcccugcgcaaggugccgaccgacaacuacaucacgaccuaccccgggcagggccugaacggguacaccgucgaggaggccaagaccgugcucaagaagugcaaguccgccuucuacauccugcccagcaucaucuccaacgagaagcaggagauccugggcaccgugagcuggaaccuccgggagaugcuggcgcacgccgaggagacgcgcaagcugaugcccgucugcguggagaccaaggccaucguguccaccauccagcggaaguacaagggcaucaagauccaggagggggucguggacuacggcgcccgcuucuacuucuacaccagcaagacgaccguggccucccugaucaacacccucaacgaccugaacgagacccuggucacgaugccgcucggguacgugacccacggccugaaccuggaggaggcggcccgguacaugcgcagccucaaggugcccgccaccgucuccgugagcucccccgacgccgugaccgccuacaacggguaccugacgagcuccagcaagacccccgaggagcacuucaucgagaccaucucccuggcgggcagcuacaaggacuggagcuacuccggccagagcacccagcucgggaucgaguuccugaagcggggcgacaaguccgucuacuacacgagcaacccgaccaccuuccaccuggacggggaggugaucaccuucgacaaccucaagacgcugcugucccuccgcgaggugcggaccaucaaggucuucaccaccguggacaacaucaaccugcacacgcagguggucgacaugagcaugaccuacggccagcaguucggccccaccuaccuggacggggccgacgugaccaagaucaagccccacaacucccacgagggcaagacguucuacgugcucccgaacgacgacacccugcgcgucgaggccuucgaguacuaccacaccaccgaccccagcuuccuggggcgguacauguccgcccucaaccacacgaagaaguggaaguacccccaggugaacggccugaccagcaucaagugggccgacaacaacugcuaccuggcgaccgcccuccugacccugcagcagaucgagcucaaguucaaccccccggcccugcaggacgccuacuaccgcgcgcgggccggggaggccgccaacuucugcgcccugauccucgcguacugcaacaagacggugggcgagcugggcgacguccgcgagaccauguccuaccuguuccagcacgccaaccucgacagcugcaagcgggugcugaacgucgugugcaagaccugcgggcagcagcagaccacccugaagggcguggaggccgucauguacauggggacgcucuccuacgagcaguucaagaagggcgugcagauccccugcaccugcgggaagcaggccaccaaguaccuggugcagcaggagagccccuucgucaugauguccgcccccccggcgcaguacgagcugaagcacggcaccuucacgugcgccagcgaguacaccggcaacuaccagugcgggcacuacaagcacaucaccuccaaggagacccucuacugcaucgacggcgcccugcugacgaagagcagcgaguacaaggggcccaucaccgacguguucuacaaggagaacuccuacaccaccacgaucaagcccgugaccuacaagcucgacggcgucgugugcaccgagaucgaccccaagcuggacaacuacuacaagaaggacaacagcuacuucaccgagcagccgaucgaccuggugcccaaccagcccuaccccaacgccuccuucgacaacuucaaguucgucugcgacaacacgaaguucgccgacgaccucaaccagcugaccggguacaagaagccggcgagccgcgagcugaaggugaccuucuuccccgaccucaacggcgacguggucgccaucgacuacaagcacuacacccccuccuucaagaagggcgccaagcugcugcacaagcccaucguguggcacgugaacaacgccacgaacaaggcgaccuacaagccgaacaccuggugcauccggugccucuggagcaccaagcccgucgagacguccaacagcuucgacgugcugaaguccgaggacgcccaggggauggacaaccuggccugcgaggaccucaagcccgugagcgaggaggucguggagaaccccaccauccagaaggacgugcuggagugcaacgucaagaccaccgagguggugggcgacaucauccugaagccggccaacaacucccucaagaucacggaggaggucgggcacaccgaccugauggccgcguacguggacaacagcucccugaccaucaagaagcccaacgagcucagccgcgugcugggccugaagacccucgccacgcacgggcuggccgccgucaacuccgugcccugggacaccaucgccaacuacgcgaagccguuccugaacaagguggucagcaccaccacgaacaucgugacccgcugccucaaccgggugugcaccaacuacaugcccuacuucuucacccugcugcuccagcugugcaccuucacgcgcuccaccaacagccggaucaaggccuccaugcccaccaccaucgccaagaacacggucaagagcgugggcaaguucugccuggaggccagcuucaacuaccucaagucccccaacuucagcaagcugaucaacaucaucaucugguuccugcuccuguccgugugccugggcagccucaucuacuccaccgccgcgcuggggguccugaugagcaaccucggcaugccguccuacugcaccggguaccgcgagggcuaccugaacagcaccaacgugacgaucgccaccuacugcaccggcuccauccccugcagcgugugccuguccgggcucgacagccuggacaccuaccccucccuggagacgauccagaucaccaucagcuccuucaagugggaccucaccgccuucggccuggucgccgagugguuccuggccuacauccucuucacccgguucuucuacgugcuggggcuggcggccaucaugcagcucuucuucagcuacuucgccgugcacuucaucuccaacagcuggcugauguggcugaucaucaaccugguccagauggcccccaucuccgcgauggugcgcauguacaucuucuucgccagcuucuacuacguguggaagagcuacguccacgugguggacggcugcaacuccagcacgugcaugaugugcuacaagcggaaccgcgccacccgggucgagugcaccaccaucgugaacgggguccgccgguccuucuacguguacgccaacggcggcaagggguucugcaagcuccacaacuggaacugcgugaacugcgacacguucugcgccggcagcaccuucaucuccgacgaggucgcgcgcgaccugagccugcaguucaagcggccgaucaaccccaccgaccaguccagcuacaucguggacuccgugaccgucaagaacgggagcauccaccucuacuucgacaaggccggccagaagacguacgagcgccacucccugagccacuucgugaaccuggacaaccuccgggccaacaacaccaaggggucccugcccaucaacgugaucgucuucgacggcaagagcaagugcgaggaguccagcgccaaguccgccagcguguacuacucccagcugaugugccagcccauccuccugcuggaccaggcgcucgugagcgacgucggcgacagcgccgagguggccgugaagauguucgacgccuacgucaacaccuucuccagcaccuucaacgugccgauggagaagcugaagacgcugguggccaccgcggaggccgagcucgccaagaacgucucccuggacaacgugcugagcaccuucaucuccgccgcgcgccagggguucguggacagcgacgucgagaccaaggacgugguggagugccucaagcugucccaccagagcgacaucgaggucacgggcgacuccugcaacaacuacaugcugaccuacaacaagguggagaacaugaccccccgggaccucggggccugcaucgacugcagcgcccgccacaucaacgcccagguggccaagucccacaacaucgcgcugaucuggaacgucaaggacuucaugagccuguccgagcagcuccggaagcagauccgcagcgccgccaagaagaacaaccugcccuucaagcugaccugcgccacgacccgccagguggugaacgucgugaccaccaagaucgcccucaagggcgggugaggacuagucccuguucccagagcccacuuuuuuuucuuuuuuugaaauaaaauagccugucuuucagaucucaaaggcucuuuucagagccaccaaaaaaaaaaaaaaaaaaaaaaaaaaaaaaaaaaaaaaaaaaaaaaaaaaaaaaaaaaaaaaaaaaaaaaaaaaaaaaaaaaaaaaaaaaaaaaaaaaaaa

SEQ ID NO: 20020 - RNA, 6113 nt, Artificial Sequence
  SARS-CoV-2__MT520265.1__non-structural protein 3 (NSP3) mRNA gc
aggagagucccgcagucggcguccagcggcucugcuuguucgugugugugucguugcaggccuuauucaagcuuaccauggcccccaccaaggugaccuucggcgacgacacggucaucgaggugcagggguacaagagcgugaacaucaccuucgagcuggacgagcgcaucgacaagguccucaacgagaagugcuccgccuacaccguggagcugggcaccgaggugaacgaguucgcgugcgucguggccgacgccgugaucaagacgcugcagccggucagcgagcuccugaccccccuggggaucgaccucgacgagugguccauggccaccuacuaccuguucgacgagagcggcgaguucaagcuggccucccacauguacugcagcuucuacccccccgacgaggacgaggaggagggggacugcgaggaggaggaguucgagccguccacccaguacgaguacggcacggaggacgacuaccagggcaagccccucgaguucggggcgaccagcgccgcccugcagcccgaggaggagcaggaggaggacuggcuggacgacgacucccagcagaccgugggccagcaggacgggagcgaggacaaccagaccacgaccauccagaccaucguggagguccagccccagcucgagauggagcugaccccgguggugcagacgaucgaggucaacuccuucagcggcuaccugaagcucaccgacaacguguacaucaagaacgccgacaucguggaggaggcgaagaaggucaagcccaccgugguggucaacgccgccaacguguaccugaagcacgggggcggcguggccggggcccugaacaaggcgaccaacaacgccaugcaggucgaguccgacgacuacaucgccacgaacggcccccucaagguggggggcagcugcguccuguccggccacaaccuggccaagcacugccuccacgugguggggcccaacgucaacaagggcgaggacauccagcugcugaagagcgccuacgagaacuucaaccagcacgaggugcuccuggcgccgcugcucuccgccgggaucuucggcgccgaccccauccacagccugcgggugugcgucgacaccgugcgcaccaacguguaccuggccgucuucgacaagaaccucuacgacaagcugguguccagcuuccuggagaugaagagcgagaagcagguggagcagaagaucgccgagauccccaaggaggaggucaagcccuucaucaccgaguccaagccgagcguggagcagcggaagcaggacgacaagaagaucaaggcgugcguggaggaggucacgaccacccucgaggagaccaaguuccugacggagaaccugcuccuguacaucgacaucaacgggaaccugcaccccgacuccgccacccucgugagcgacaucgacaucaccuuccugaagaaggacgcccccuacaucgugggcgacgucgugcaggagggcgugcugaccgccgucgugauccccacgaagaaggccgggggcaccaccgagaugcucgcgaaggcccugcgcaaggugccgaccgacaacuacaucacgaccuaccccgggcagggccugaacggguacaccgucgaggaggccaagaccgugcucaagaagugcaaguccgccuucuacauccugcccagcaucaucuccaacgagaagcaggagauccugggcaccgugagcuggaaccuccgggagaugcuggcgcacgccgaggagacgcgcaagcugaugcccgucugcguggagaccaaggccaucguguccaccauccagcggaaguacaagggcaucaagauccaggagggggucguggacuacggcgcccgcuucuacuucuacaccagcaagacgaccguggccucccugaucaacacccucaacgaccugaacgagacccuggucacgaugccgcucggguacgugacccacggccugaaccuggaggaggcggcccgguacaugcgcagccucaaggugcccgccaccgucuccgugagcucccccgacgccgugaccgccuacaacggguaccugacgagcuccagcaagacccccgaggagcacuucaucgagaccaucucccuggcgggcagcuacaaggacuggagcuacuccggccagagcacccagcucgggaucgaguuccugaagcggggcgacaaguccgucuacuacacgagcaacccgaccaccuuccaccuggacggggaggugaucaccuucgacaaccucaagacgcugcugucccuccgcgaggugcggaccaucaaggucuucaccaccguggacaacaucaaccugcacacgcagguggucgacaugagcaugaccuacggccagcaguucggccccaccuaccuggacggggccgacgugaccaagaucaagccccacaacucccacgagggcaagacguucuacgugcucccgaacgacgacacccugcgcgucgaggccuucgaguacuaccacaccaccgaccccagcuuccuggggcgguacauguccgcccucaaccacacgaagaaguggaaguacccccaggugaacggccugaccagcaucaagugggccgacaacaacugcuaccuggcgaccgcccuccugacccugcagcagaucgagcucaaguucaaccccccggcccugcaggacgccuacuaccgcgcgcgggccggggaggccgccaacuucugcgcccugauccucgcguacugcaacaagacggugggcgagcugggcgacguccgcgagaccauguccuaccuguuccagcacgccaaccucgacagcugcaagcgggugcugaacgucgugugcaagaccugcgggcagcagcagaccacccugaagggcguggaggccgucauguacauggggacgcucuccuacgagcaguucaagaagggcgugcagauccccugcaccugcgggaagcaggccaccaaguaccuggugcagcaggagagccccuucgucaugauguccgcccccccggcgcaguacgagcugaagcacggcaccuucacgugcgccagcgaguacaccggcaacuaccagugcgggcacuacaagcacaucaccuccaaggagacccucuacugcaucgacggcgcccugcugacgaagagcagcgaguacaaggggcccaucaccgacguguucuacaaggagaacuccuacaccaccacgaucaagcccgugaccuacaagcucgacggcgucgugugcaccgagaucgaccccaagcuggacaacuacuacaagaaggacaacagcuacuucaccgagcagccgaucgaccuggugcccaaccagcccuaccccaacgccuccuucgacaacuucaaguucgucugcgacaacaucaaguucgccgacgaccucaaccagcugacgggguacaagaagccggcgagccgcgagcugaaggugaccuucuuccccgaccucaacggcgacguggucgccaucgacuacaagcacuacacccccuccuucaagaagggcgccaagcugcugcacaagcccaucguguggcacgugaacaacgccaccaacaaggcgacguacaagccgaacaccuggugcauccggugccucuggagcaccaagcccgucgagaccuccaacagcuucgacgugcugaaguccgaggacgcccaggggauggacaaccuggccugcgaggaccucaagcccgugagcgaggaggucguggagaaccccacgauccagaaggacgugcuggagugcaacgucaagaccaccgagguggugggcgacaucauccugaagccggccaacaacucccucaagaucaccgaggaggucgggcacacggaccugauggccgcguacguggacaacagcucccugaccaucaagaagcccaacgagcucagccgcgugcugggccugaagacccucgccacccacgggcuggccgccgucaacuccgugcccugggacacgaucgccaacuacgcgaagccguuccugaacaagguggucagcaccaccaccaacaucgugacgcgcugccucaaccgggugugcaccaacuacaugcccuacuucuucacccugcugcuccagcugugcaccuucacccgcuccacgaacagccggaucaaggccuccaugcccaccaccaucgccaagaacaccgucaagagcgugggcaaguucugccuggaggccagcuucaacuaccucaagucccccaacuucagcaagcugaucaacaucaucaucugguuccugcuccuguccgugugccugggcagccucaucuacuccacggccgcgcuggggguccugaugagcaaccucggcaugccguccuacugcaccggguaccgcgagggcuaccugaacagcaccaacgugaccaucgccacguacugcaccggcuccauccccugcagcgugugccuguccgggcucgacagccuggacaccuaccccucccuggagaccauccagaucacgaucagcuccuucaagugggaccucaccgccuucggccuggucgccgagugguuccuggccuacauccucuucacccgguucuucuacgugcuggggcuggcggccaucaugcagcucuucuucagcuacuucgccgugcacuucaucuccaacagcuggcugauguggcugaucaucaaccugguccagauggcccccaucuccgcgauggugcgcauguacaucuucuucgccagcuucuacuacguguggaagagcuacguccacgugguggacggcugcaacuccagcaccugcaugaugugcuacaagcggaaccgcgccacgcgggucgagugcaccaccaucgugaacgggguccgccgguccuucuacguguacgccaacggcggcaagggguucugcaagcuccacaacuggaacugcgugaacugcgacaccuucugcgccggcagcacguucaucuccgacgaggucgcgcgcgaccugagccugcaguucaagcggccgaucaaccccaccgaccaguccagcuacaucguggacuccgugaccgucaagaacgggagcauccaccucuacuucgacaaggccggccagaagaccuacgagcgccacucccugagccacuucgugaaccuggacaaccuccgggccaacaacacgaaggggucccugcccaucaacgugaucgucuucgacggcaagagcaagugcgaggaguccagcgccaaguccgccagcguguacuacucccagcugaugugccagcccauccuccugcuggaccaggcgcucgugagcgacgucggcgacagcgccgagguggccgugaagauguucgacgccuacgucaacaccuucuccagcaccuucaacgugccgauggagaaguucaagacccugguggccacggcggaggccgagcuggccaagaacgucucccucgacaacgugcugagcaccuucaucuccgccgcgcgccagggguucguggacagcgacgucgagaccaaggacgugguggagugccugaagcucucccaccagagcgacaucgaggucaccggcgacuccugcaacaacuacaugcugacguacaacaagguggagaacaugaccccccgggaccugggggccugcaucgacugcagcgcccgccacaucaacgcccagguggccaagucccacaacaucgcgcucaucuggaacgucaaggacuucaugagccuguccgagcagcugcggaagcagauccgcagcgccgccaagaagaacaaccuccccuucaagcugaccugcgccaccacgcgccagguggugaacgucgugaccaccaagaucgcccugaagggcgggugaggacuagucccuguucccagagcccacuuuuuuuucuuuuuuugaaauaaaauagccugucuuucagaucucaaaggcucuuuucagagccaccaaaaaaaaaaaaaaaaaaaaaaaaaaaaaaaaaaaaaaaaaaaaaaaaaaaaaaaaaaaaaaaaaaaaaaaaaaaaaaaaaaaaaaaaaaaaaaaaaaaaa

SEQ ID NO: 20021 - RNA, 6113 nt, Artificial Sequence
  SARS-CoV-2__MT520343.1__non-structural protein 3 (NSP3) mRNA gc
aggagagucccgcagucggcguccagcggcucugcuuguucgugugugugucguugcaggccuuauucaagcuuaccauggcccccaccaaggugaccuucggcgacgacacggucaucgaggugcagggguacaagagcgugaacaucaccuucgagcuggacgagcgcaucgacaagguccucaacgagaagugcuccgccuacaccguggagcugggcaccgaggugaacgaguucgcgugcgucguggccgacgccgugaucaagacgcugcagccggucagcgagcuccugaccccccuggggaucgaccucgacgagugguccauggccaccuacuaccuguucgacgagagcggcgaguucaagcuggccucccacauguacugcagcuucuacccccccgacgaggacgaggaggagggggacugcgaggaggaggaguucgagccguccacccaguacgaguacggcacggaggacgacuaccagggcaagccccucgaguucggggcgaccagcgccgcccugcagcccgaggaggagcaggaggaggacuggcuggacgacgacucccagcagaccgugggccagcaggacgggagcgaggacaaccagaccacgaccauccagaccaucguggagguccagccccagcucgagauggagcugaccccgguggugcagacgaucgaggucaacuccuucagcggcuaccugaagcucaccgacaacguguacaucaagaacgccgacaucguggaggaggcgaagaaggucaagcccaccgugguggucaacgccgccaacguguaccugaagcacgggggcggcguggccggggcccugaacaaggcgaccaacaacgccaugcaggucgaguccgacgacuacaucgccacgaacggcccccucaagguggggggcagcugcguccuguccggccacaaccuggccaagcacugccuccacgugguggggcccaacgucaacaagggcgaggacauccagcugcugaagagcgccuacgagaacuucaaccagcacgaggugcuccuggcgccgcugcucuccgccgggaucuucggcgccgaccccauccacagccugcgggugugcgucgacaccgugcgcaccaacguguaccuggccgucuucgacaagaaccucuacgacaagcugguguccagcuuccuggagaugaagagcgagaagcagguggagcagaagaucgccgagauccccaaggaggaggucaagcccuucaucaccgaguccaagccgagcguggagcagcggaagcaggacgacaagaagaucaaggcgugcguggaggaggucacgaccacccucgaggagaccaaguuccugacggagaaccugcuccuguacaucgacaucaacgggaaccugcaccccgacuccgccacccucgugagcgacaucgacaucaccuuccugaagaaggacgcccccuacaucgugggcgacgucgugcaggagggcgugcugaccgccgucgugauccccacgaagaaggccgggggcaccaccgagaugcucgcgaaggcccugcgcaaggugccgaccgacaacuacaucacgaccuaccccgggcagggccugaacggguacaccgucgaggaggccaagaccgugcucaagaagugcaaguccgccuucuacauccugcccagcaucaucuccaacgagaagcaggagauccugggcaccgugagcuggaaccuccgggagaugcuggcgcacgccgaggagacgcgcaagcugaugcccgucugcguggagaccaaggccaucguguccaccauccagcggaaguacaagggcaucaagauccaggagggggucguggacuacggcgcccgcuucuacuucuacaccagcaagacgaccguggccucccugaucaacacccucaacgaccugaacgagacccuggucacgaugccgcucggguacgugacccacggccugaaccuggaggaggcggcccgguacaugcgcagccucaaggugcccgccaccgucuccgugagcucccccgacgccgugaccgccuacaacggguaccugacgagcuccagcaagacccccgaggagcacuucaucgagaccaucucccuggcgggcagcuacaaggacuggagcuacuccggccagagcacccagcucgggaucgaguuccugaagcggggcgacaaguccgucuacuacacgagcaacccgaccaccuuccaccuggacggggaggugaucaccuucgacaaccucaagacgcugcugucccuccgcgaggugcggaccaucaaggucuucaccaccguggacaacaucaaccugcacacgcagguggucgacaugagcaugaccuacggccagcaguucggccccaccuaccuggacggggccgacgugaccaagaucaagccccacaacucccacgagggcaagacguucuacgugcucccgaacgacgacacccugcgcgucgaggccuucgaguacuaccacaccaccgaccccagcuuccuggggcgguacauguccgcccucaaccacacgaagaaguggaaguacccccaggugaacggccugaccagcaucaagugggccgacaacaacugcuaccuggcgaccgcccuccugacccugcagcagaucgagcucaaguucaaccccccggcccugcaggacgccuacuaccgcgcgcgggccggggaggccgccaacuucugcgcccugauccucgcguacugcaacaagacggugggcgagcugggcgacguccgcgagaccauguccuaccuguuccagcacgccaaccucgacagcugcaagcgggugcugaacgucgugugcaagaccugcgggcagcagcagaccacccugaagggcguggaggccgucauguacauggggacgcucuccuacgagcaguucaagaagggcgugcagauccccugcaccugcgggaagcaggccaccaaguaccuggugcagcaggagagccccuucgucaugauguccgcccccccggcgcaguacgagcugaagcacggcaccuucacgugcgccagcgaguacaccggcaacuaccagugcgggcacuacaagcacaucaccuccaaggagacccucuacugcaucgacggcgcccugcugacgaagagcagcgaguacaaggggcccaucaccgacguguucuacaaggagaacuccuacaccaccacgaucaagcccgugaccuacaagcucgacggcgucgugugcaccgagaucgaccccaagcuggacaacuacuacaagaaggacaacagcuacuucaccgagcagccgaucgaccuggugcccaaccagcccuaccccaacgccuccuucgacaacuucaaguucgucugcgacaacaucaaguucgccgacgaccucaaccagcugacgggguacaagaagccggcgagccgcgagcugaaggugaccuucuuccccgaccucaacggcgacguggucgccaucgacuacaagcacuacacccccuccuucaagaagggcgccaagcugcugcacaagcccaucguguggcacgugaacaacgccaccaacaaggcgacguacaagccgaacaccuggugcauccggugccucuggagcaccaagcccgucgagaccuccaacagcuucgacgugcugaaguccgaggacgcccaggggauggacaaccuggccugcgaggaccucaagcccgugagcgaggaggucguggagaaccccacgauccagaaggacgugcuggagugcaacgucaagaccaccgagguggugggcgacaucauccugaagccggccaacaacucccucaagaucaccgaggaggucgggcacacggaccugauggccgcguacguggacaacagcucccugaccaucaagaagcccaacgagcucagccgcgugcugggccugaagacccucgccacccacgggcuggccgccgucaacuccgugcccugggacacgaucgccaacuacgcgaagccguuccugaacaagguggucagcaccaccaccaacaucgugacgcgcugccucaaccgggugugcaccaacuacaugcccuacuucuucacccugcugcuccagcugugcaccuucacccgcuccacgaacagccggaucaaggccuccaugcccaccaccaucgccaagaacaccgucaagagcgugggcaaguucugccuggaggccagcuucaacuaccucaagucccccaacuucagcaagcugaucaacaucaucaucugguuccugcuccuguccgugugccugggcagccucaucuacuccacggccgcgcuggggguccugaugagcaaccucggcaugccguccuacugcaccggguaccgcgagggcuaccugaacagcaccaacgugaccaucgccacguacugcaccggcuccauccccugcggggugugccugagcggccucgacucccuggacaccuaccccagccuggagaccauccagaucacgaucuccagcuucaagugggaccucaccgccuucgggcuggucgccgagugguuccuggccuacauccucuucacccgguucuucuacgugcugggccuggcggccaucaugcagcucuucuucuccuacuucgccgugcacuucaucagcaacuccuggcugauguggcugaucaucaaccugguccagauggcccccaucagcgcgauggugcgcauguacaucuucuucgccuccuucuacuacguguggaagagcuacguccacgugguggacgggugcaacagcuccaccugcaugaugugcuacaagcggaaccgcgccacgcgggucgagugcaccaccaucgugaacggcguccgccggagcuucuacguguacgccaacggcgggaagggcuucugcaagcuccacaacuggaacugcgugaacugcgacaccuucugcgccggguccacguucaucagcgacgaggucgcgcgcgaccugucccugcaguucaagcggccgaucaaccccaccgaccagagcuccuacaucguggacagcgugaccgucaagaacggcuccauccaccucuacuucgacaaggccgggcagaagaccuacgagcgccacagccugucccacuucgugaaccuggacaaccuccgggccaacaacacgaagggcagccugcccaucaacgugaucgucuucgacggcaaguccaagugcgaggagagcuccgccaagagcgccuccguguacuacagccagcugaugugccagcccauccuccugcuggaccaggcgcucguguccgacgucggggacagcgccgagguggccgugaagauguucgacgccuacgucaacaccuucagcuccaccuucaacgugccgauggagaagcugaagacccugguggccacggcggaggccgagcucgccaagaacgucagccuggacaacgugcuguccaccuucaucagcgccgcgcgccagggcuucguggacuccgacgucgagaccaaggacgugguggagugccucaagcugagccaccaguccgacaucgaggucaccggggacagcugcaacaacuacaugcugacguacaacaagguggagaacaugaccccccgggaccucggcgccugcaucgacugcuccgcccgccacaucaacgcccagguggccaagagccacaacaucgcgcugaucuggaacgucaaggacuucaugucccugagcgagcagcuccggaagcagauccgcuccgccgccaagaagaacaaccugcccuucaagcugaccugcgccaccacgcgccagguggugaacgucgugaccaccaagaucgcccucaaggggggcugaggacuagucccuguucccagagcccacuuuuuuuucuuuuuuugaaauaaaauagccugucuuucagaucucaaaggcucuuuucagagccaccaaaaaaaaaaaaaaaaaaaaaaaaaaaaaaaaaaaaaaaaaaaaaaaaaaaaaaaaaaaaaaaaaaaaaaaaaaaaaaaaaaaaaaaaaaaaaaaaaaaaa

SEQ ID NO: 20022 - RNA, 6113 nt, Artificial Sequence
  SARS-CoV-2__MT520344.1__non-structural protein 3 (NSP3) mRNA gc
aggagagucccgcagucggcguccagcggcucugcuuguucgugugugugucguugcaggccuuauucaagcuuaccauggcccccaccaaggugaccuucggcgacgacacggucaucgaggugcagggguacaagagcgugaacaucaccuucgagcuggacgagcgcaucgacaagguccucaacgagaagugcuccgccuacaccguggagcugggcaccgaggugaacgaguucgcgugcgucguggccgacgccgugaucaagacgcugcagccggucagcgagcuccugaccccccuggggaucgaccucgacgagugguccauggccaccuacuaccuguucgacgagagcggcgaguucaagcuggccucccacauguacugcagcuucuacccccccgacgaggacgaggaggagggggacugcgaggaggaggaguucgagccguccacccaguacgaguacggcacggaggacgacuaccagggcaagccccucgaguucggggcgaccagcgccgcccugcagcccgaggaggagcaggaggaggacuggcuggacgacgacucccagcagaccgugggccagcaggacgggagcgaggacaaccagaccacgaccauccagaccaucguggagguccagccccagcucgagauggagcugaccccgguggugcagacgaucgaggucaacuccuucagcggcuaccugaagcucaccgacaacguguacaucaagaacgccgacaucguggaggaggcgaagaaggucaagcccaccgugguggucaacgccgccaacguguaccugaagcacgggggcggcguggccggggcccugaacaaggcgaccaacaacgccaugcaggucgaguccgacgacuacaucgccacgaacggcccccucaagguggggggcagcugcguccuguccggccacaaccuggccaagcacugccuccacgugguggggcccaacgucaacaagggcgaggacauccagcugcugaagagcgccuacgagaacuucaaccagcacgaggugcuccuggcgccgcugcucuccgccgggaucuucggcgccgaccccauccacagccugcgggugugcgucgacaccgugcgcaccaacguguaccuggccgucuucgacaagaaccucuacgacaagcugguguccagcuuccuggagaugaagagcgagaagcagguggagcagaagaucgccgagauccccaaggaggaggucaagcccuucaucaccgaguccaagccgagcguggagcagcggaagcaggacgacaagaagaucaaggcgugcguggaggaggucacgaccacccucgaggagaccaaguuccugacggagaaccugcuccuguacaucgacaucaacgggaaccugcaccccgacuccgccacccucgugagcgacaucgacaucaccuuccugaagaaggacgcccccuacaucgugggcgacgucgugcaggagggcgugcugaccgccgucgugauccccacgaagaaggccgggggcaccaccgagaugcucgcgaaggcccugcgcaaggugccgaccgacaacuacaucacgaccuaccccgggcagggccugaacggguacaccgucgaggaggccaagaccgugcucaagaagugcaaguccgccuucuacauccugcccagcaucaucuccaacgagaagcaggagauccugggcaccgugagcuggaaccuccgggagaugcuggcgcacgccgaggagacgcgcaagcugaugcccgucugcguggagaccaaggccaucguguccaccauccagcggaaguacaagggcaucaagauccaggagggggucguggacuacggcgcccgcuucuacuucuacaccagcaagacgaccguggccucccugaucaacacccucaacgaccugaacgagacccuggucacgaugccgcucggguacgugacccacggccugaaccuggaggaggcggcccgguacaugcgcagccucaaggugcccgccaccgucuccgugagcucccccgacgccgugaccgccuacaacggguaccugacgagcuccagcaagacccccgaggagcacuucaucgagaccaucucccuggcgggcagcuacaaggacuggagcuacuccggccagagcacccagcucgggaucgaguuccugaagcggggcgacaaguccgucuacuacacgagcaacccgaccaccuuccaccuggacggggaggugaucaccuucgacaaccucaagacgcugcugucccuccgcgaggugcggaccaucaaggucuucaccaccguggacaacaucaaccugcacacgcagguggucgacaugagcaugaccuacggccagcaguucggccccaccuaccuggacggggccgacgugaccaagaucaagccccacaacucccacgagggcaagacguucuacgugcucccgaacgacgacacccugcgcgucgaggccuucgaguacuaccacaccaccgaccccagcuuccuggggcgguacauguccgcccucaaccacacgaagaaguggaaguacccccaggugaacggccugaccagcaucaagugggccgacaacaacugcuaccuggcgaccgcccuccugacccugcagcagaucgagcucaaguucaaccccccggcccugcaggacgccuacuaccgcgcgcgggccggggaggccgccaacuucugcgcccugauccucgcguacugcaacaagacggugggcgagcugggcgacguccgcgagaccauguccuaccuguuccagcacgccaaccucgacagcugcaagcgggugcugaacgucgugugcaagaccugcgggcagcagcagaccacccugaagggcguggaggccgucauguacauggggacgcucuccuacgagcaguucaagaagggcgugcagauccccugcaccugcgggaagcaggccaccaaguaccuggugcagcaggagagccccuucgucaugauguccgcccccccggcgcaguacgagcugaagcacggcaccuucacgugcgccagcgaguacaccggcaacuaccagugcgggcacuacaagcacaucaccuccaaggagacccucuacugcaucgacggcgcccugcugacgaagagcagcgaguacaaggggcccaucaccgacguguucuacaaggagaacuccuacaccaccacgaucaagcccgugaccuacaagcucgacggcgucgugugcaccgagaucgaccccaagcuggacaacuacuacaagaaggacaacagcuacuucaccgagcagccgaucgaccuggugcccaaccagcccuaccccaacgccuccuucgacaacuucaaguucgucugcgacaacaucaaguucgccgacgaccucaaccagcugacgggguacaagaagccggcgagccgcgagcugaaggugaccuucuuccccgaccucaacggcgacguggucgccaucgacuacaagcacuacacccccuccuucaagaagggcgccaagcugcugcacaagcccaucguguggcacgugaacaacgccaccaacaaggcgacguacaagccgaacaccuggugcauccggugccucuggagcaccaagcccgucgagaccuccaacagcuucgacgugcugaaguccgaggacgcccaggggauggacaaccuggccugcgaggaccucaagcccgugagcgaggaggucguggagaaccccacgauccagaaggacgugcuggagugcaacgucaagaccaccgagguggugggcgacaucauccugaagccggccaacaacucccucaagaucaccgaggaggucgggcacacggaccugauggccgcguacguggacaacagcucccugaccaucaagaagcccaacgagcucagccgcgugcugggccugaagacccucgccacccacgggcuggccgccgucaacuccgugcccugggacacgaucgccaacuacgcgaagccguuccugaacaagguggucagcaccaccaccaacaucgugacgcgcugccucaaccgggugugcaccaacuacaugcccuacuucuucacccugcugcuccagcugugcaccuucacccgcggcacgaacucccggaucaaggccagcaugcccaccaccaucgccaagaacaccgucaaguccgugggcaaguucugccuggaggccagcuucaacuaccucaagagccccaacuucuccaagcugaucaacaucaucaucugguuccugcuccugagcgugugccuggggucccucaucuacagcacggccgcgcugggcguccugauguccaaccucgggaugccgagcuacugcaccggcuaccgcgagggcuaccugaacuccaccaacgugaccaucgccacguacugcaccgggagcauccccugcuccgugugccugagcggccucgacucccuggacaccuaccccagccuggagaccauccagaucacgaucuccagcuucaagugggaccucaccgccuucgggcuggucgccgagugguuccuggccuacauccucuucacccgguucuucuacgugcugggccuggcggccaucaugcagcucuucuucuccuacuucgccgugcacuucaucagcaacuccuggcugauguggcugaucaucaaccugguccagauggcccccaucagcgcgauggugcgcauguacaucuucuucgccuccuucuacuacguguggaagagcuacguccacgugguggacgggugcaacagcuccaccugcaugaugugcuacaagcggaaccgcgccacgcgggucgagugcaccaccaucgugaacggcguccgccggagcuucuacguguacgccaacggcgggaagggcuucugcaagcuccacaacuggaacugcgugaacugcgacaccuucugcgccggguccacguucaucagcgacgaggucgcgcgcgaccugucccugcaguucaagcggccgaucaaccccaccgaccagagcuccuacaucguggacagcgugaccgucaagaacggcuccauccaccucuacuucgacaaggccgggcagaagaccuacgagcgccacagccugucccacuucgugaaccuggacaaccuccgggccaacaacacgaagggcagccugcccaucaacgugaucgucuucgacggcaaguccaagugcgaggagagcuccgccaagagcgccuccguguacuacagccagcugaugugccagcccauccuccugcuggaccaggcgcucguguccgacgucggggacagcgccgagguggccgugaagauguucgacgccuacgucaacaccuucagcuccaccuucaacgugccgauggagaagcugaagacccugguggccacggcggaggccgagcucgccaagaacgucagccuggacaacgugcuguccaccuucaucagcgccgcgcgccagggcuucguggacuccgacgucgagaccaaggacgugguggagugccucaagcugagccaccaguccgacaucgaggucaccggggacagcugcaacaacuacaugcugacguacaacaagguggagaacaugaccccccgggaccucggcgccugcaucgacugcuccgcccgccacaucaacgcccagguggccaagagccacaacaucgcgcugaucuggaacgucaaggacuucaugucccugagcgagcagcuccggaagcagauccgcuccgccgccaagaagaacaaccugcccuucaagcugaccugcgccaccacgcgccagguggugaacgucgugaccaccaagaucgcccucaaggggggcugaggacuagucccuguucccagagcccacuuuuuuuucuuuuuuugaaauaaaauagccugucuuucagaucucaaaggcucuuuucagagccaccaaaaaaaaaaaaaaaaaaaaaaaaaaaaaaaaaaaaaaaaaaaaaaaaaaaaaaaaaaaaaaaaaaaaaaaaaaaaaaaaaaaaaaaaaaaaaaaaaaaaa

SEQ ID NO: 20023 - RNA, 6113 nt, Artificial Sequence
  SARS-CoV-2__MT520353.1__non-structural protein 3 (NSP3) mRNA gc
aggagagucccgcagucggcguccagcggcucugcuuguucgugugugugucguugcaggccuuauucaagcuuaccauggcccccaccaaggugaccuucggcgacgacacggucaucgaggugcagggguacaagagcgugaacaucaccuucgagcuggacgagcgcaucgacaagguccucaacgagaagugcuccgccuacaccguggagcugggcaccgaggugaacgaguucgcgugcgucguggccgacgccgugaucaagacgcugcagccggucagcgagcuccugaccccccuggggaucgaccucgacgagugguccauggccaccuacuaccuguucgacgagagcggcgaguucaagcuggccucccacauguacugcagcuucuacccccccgacgaggacgaggaggagggggacugcgaggaggaggaguucgagccguccacccaguacgaguacggcacggaggacgacuaccagggcaagccccucgaguucggggcgaccagcgccgcccugcagcccgaggaggagcaggaggaggacuggcuggacgacgacucccagcagaccgugggccagcaggacgggagcgaggacaaccagaccacgaccauccagaccaucguggagguccagccccagcucgagauggagcugaccccgguggugcagacgaucgaggucaacuccuucagcggcuaccugaagcucaccgacaacguguacaucaagaacgccgacaucguggaggaggcgaagaaggucaagcccaccgugguggucaacgccgccaacguguaccugaagcacgggggcggcguggccggggcccugaacaaggcgaccaacaacgccaugcaggucgaguccgacgacuacaucgccacgaacggcccccucaagguggggggcagcugcguccuguccggccacaaccuggccaagcacugccuccacgugguggggcccaacgucaacaagggcgaggacauccagcugcugaagagcgccuacgagaacuucaaccagcacgaggugcuccuggcgccgcugcucuccgccgggaucuucggcgccgaccccauccacagccugcgggugugcgucgacaccgugcgcaccaacguguaccuggccgucuucgacaagaaccucuacgacaagcugguguccagcuuccuggagaugaagagcgagaagcagguggagcagaagaucgccgagauccccaaggaggaggucaagcccuucaucaccgaguccaagccgagcguggagcagcggaagcaggacgacaagaagaucaaggcgugcguggaggaggucacgaccacccucgaggagaccaaguuccugacggagaaccugcuccuguacaucgacaucaacgggaaccugcaccccgacuccgccacccucgugagcgacaucgacaucaccuuccugaagaaggacgcccccuacaucgugggcgacgucgugcaggagggcgugcugaccgccgucgugauccccacgaagaaggccgggggcaccaccgagaugcucgcgaaggcccugcgcaaggugccgaccgacaacuacaucacgaccuaccccgggcagggccugaacggguacaccgucgaggaggccaagaccgugcucaagaagugcaaguccgccuucuacauccugcccagcaucaucuccaacgagaagcaggagauccugggcaccgugagcuggaaccuccgggagaugcuggcgcacgccgaggagacgcgcaagcugaugcccgucugcguggagaccaaggccaucguguccaccauccagcggaaguacaagggcaucaagauccaggagggggucguggacuacggcgcccgcuucuacuucuacaccagcaagacgaccguggccucccugaucaacacccucaacgaccugaacgagacccuggucacgaugccgcucggguacgugacccacggccugaaccuggaggaggcggcccgguacaugcgcagccucaaggugcccgccaccgucuccgugagcucccccgacgccgugaccgccuacaacggguaccugacgagcuccagcaagacccccgaggagcacuucaucgagaccaucucccuggcgggcagcuacaaggacuggagcuacuccggccagagcacccagcucgggaucgaguuccugaagcggggcgacaaguccgucuacuacacgagcaacccgaccaccuuccaccuggacggggaggugaucaccuucgacaaccucaagacgcugcugucccuccgcgaggugcggaccaucaaggucuucaccaccguggacaacaucaaccugcacacgcagguggucgacaugagcaugaccuacggccagcaguucggccccaccuaccuggacggggccgacgugaccaagaucaagccccacaacucccacgagggcaagacguucuacgugcucccgaacgacgacacccugcgcgucgaggccuucgaguacuaccacaccaccgaccccagcuuccuggggcgguacauguccgcccucaaccacacgaagaaguggaaguacccccaggugaacggccugaccagcaucaagugggccgacaacaacugcuaccuggcgaccgcccuccugacccugcagcagaucgagcucaaguucaaccccccggcccugcaggacgccuacuaccgcgcgcgggccggggaggccgccaacuucugcgcccugauccucgcguacugcaacaagacggugggcgagcugggcgacguccgcgagaccauguccuaccuguuccagcacgccaaccucgacagcugcaagcgggugcugaacgucgugugcaagaccugcgggcagcagcagaccacccugaagggcguggaggccgucauguacauggggacgcucuccuacgagcaguucaagaagggcgugcagauccccugcaccugcgggaagcaggccaccaaguaccuggugcagcaggagagccccuucgucaugauguccgcccccccggcgcaguacgagcugaagcacggcaccuucacgugcgccagcgaguacaccggcaacuaccagugcgggcacuacaagcacaucaccuccaaggagacccucuacugcaucgacggcgcccugcugacgaagagcagcgaguacaaggggcccaucaccgacguguucuacaaggagaacuccuacaccaccacgaucaagcccgugaccuacaagcucgacggcgucgugugcaccgagaucgaccccaagcuggacaacuacuacaagaaggacaacagcuacuucaccgagcagccgaucgaccuggugcccaaccagcccuaccccaacgccuccuucgacaacuucaaguucgucugcgacaacaucaaguucgccgacgaccucaaccagcugacgggguacaagaagccggcgagccgcgagcugaaggugaccuucuuccccgaccucaacggcgacguggucgccaucgacuacaagcacuacacccccuccuucaagaagggcgccaagcugcugcacaagcccaucguguggcacgugaacaacgccaccaacaaggcgacguacaagccgaacaccuggugcauccggugccucuggagcaccaagcccgucgagaccuccaacagcuucgacgugcugaaguccgaggacgcccaggggauggacaaccuggccugcgaggaccucaagcccgugagcgaggaggucguggagaaccccacgauccagaaggacgugcuggagugcaacgucaagaccaccgagguggugggcgacaucauccugaagccggccaacaacucccucaagaucaccgaggaggucgggcacacggaccugauggccgcguacguggacaacagcucccugaccaucaagaagcccaacgagcucagccgcgugcugggccugaagacccucgccacccacgggcuggccgccgucaacuccgugcccuggggcacgaucgccaacuacgcgaagccguuccugaacaagguggucagcaccaccaccaacaucgugacgcgcugccucaaccgggugugcaccaacuacaugcccuacuucuucacccugcugcuccagcugugcaccuucacccgcuccacgaacagccggaucaaggccuccaugcccaccaccaucgccaagaacaccgucaagagcgugggcaaguucugccuggaggccagcuucaacuaccucaagucccccaacuucagcaagcugaucaacaucaucaucugguuccugcuccuguccgugugccuggggagccucaucuacuccacggccgcgcugggcguccugaugagcaaccucgggaugccguccuacugcaccggcuaccgcgagggcuaccugaacagcaccaacgugaccaucgccacguacugcaccggguccauccccugcagcgugugccuguccggccucgacagccuggacaccuaccccucccuggagaccauccagaucacgaucagcuccuucaagugggaccucaccgccuucgggcuggucgccgagugguuccuggccuacauccucuucacccgguucuucuacgugcugggccuggcggccaucaugcagcucuucuucagcuacuucgccgugcacuucaucuccaacagcuggcugauguggcugaucaucaaccugguccagauggcccccaucuccgcgauggugcgcauguacaucuucuucgccagcuucuacuacguguggaagagcuacguccacgugguggacgggugcaacuccagcaccugcaugaugugcuacaagcggaaccgcgccacgcgggucgagugcaccaccaucgugaacggcguccgccgguccuucuacguguacgccaacggcgggaagggcuucugcaagcuccacaacuggaacugcgugaacugcgacaccuucugcgccgggagcacguucaucuccgacgaggucgcgcgcgaccugagccugcaguucaagcggccgaucaaccccaccgaccaguccagcuacaucguggacuccgugaccgucaagaacggcagcauccaccucuacuucgacaaggccgggcagaagaccuacgagcgccacucccugagccacuucgugaaccuggacaaccuccgggccaacaacacgaagggcucccugcccaucaacgugaucgucuucgacggcaagagcaagugcgaggaguccagcgccaaguccgccagcguguacuacucccagcugaugugccagcccauccuccugcuggaccaggcgcucgugagcgacgucggggacagcgccgagguggccgugaagauguucgacgccuacgucaacaccuucuccagcaccuucaacgugccgauggagaagcugaagacccugguggccacggcggaggccgagcucgccaagaacgucucccuggacaacgugcugagcaccuucaucuccgccgcgcgccagggcuucguggacagcgacgucgagaccaaggacgugguggagugccucaagcugucccaccagagcgacaucgaggucaccggggacuccugcaacaacuacaugcugacguacaacaagguggagaacaugaccccccgggaccucggcgccugcaucgacugcagcgcccgccacaucaacgcccagguggccaagucccacaacaucgcgcugaucuggaacgucaaggacuucaugagccuguccgagcagcuccggaagcagauccgcagcgccgccaagaagaacaaccugcccuucaagcugaccugcgccaccacgcgccagguggugaacgucgugaccaccaagaucgcccucaaggggggcugaggacuagucccuguucccagagcccacuuuuuuuucuuuuuuugaaauaaaauagccugucuuucagaucucaaaggcucuuuucagagccaccaaaaaaaaaaaaaaaaaaaaaaaaaaaaaaaaaaaaaaaaaaaaaaaaaaaaaaaaaaaaaaaaaaaaaaaaaaaaaaaaaaaaaaaaaaaaaaaaaaaaa

SEQ ID NO: 20024 - RNA, 6113 nt, Artificial Sequence
  SARS-CoV-2__MT520369.1__non-structural protein 3 (NSP3) mRNA gc
aggagagucccgcagucggcguccagcggcucugcuuguucgugugugugucguugcaggccuuauucaagcuuaccauggcccccaccaaggugaccuucggcgacgacacggucaucgaggugcagggguacaagagcgugaacaucaccuucgagcuggacgagcgcaucgacaagguccucaacgagaagugcuccgccuacaccguggagcugggcaccgaggugaacgaguucgcgugcgucguggccgacgccgugaucaagacgcugcagccggucagcgagcuccugaccccccuggggaucgaccucgacgagugguccauggccaccuacuaccuguucgacgagagcggcgaguucaagcuggccucccacauguacugcagcuucuacccccccgacgaggacgaggaggagggggacugcgaggaggaggaguucgagccguccacccaguacgaguacggcacggaggacgacuaccagggcaagccccucgaguucggggcgaccagcgccgcccugcagcccgaggaggagcaggaggaggacuggcuggacgacgacucccagcagaccgugggccagcaggacgggagcgaggacaaccagaccacgaccauccagaccaucguggagguccagccccagcucgagauggagcugaccccgguggugcagacgaucgaggucaacuccuucagcggcuaccugaagcucaccgacaacguguacaucaagaacgccgacaucguggaggaggcgaagaaggucaagcccaccgugguggucaacgccgccaacguguaccugaagcacgggggcggcguggccggggcccugaacaaggcgaccaacaacgccaugcaggucgaguccgacgacuacaucgccacgaacggcccccucaagguggggggcagcugcguccuguccggccacaaccuggccaagcacugccuccacgugguggggcccaacgucaacaagggcgaggacauccagcugcugaagagcgccuacgagaacuucaaccagcacgaggugcuccuggcgccgcugcucuccgccgggaucuucggcgccgaccccauccacagccugcgggugugcgucgacaccgugcgcaccaacguguaccuggccgucuucgacaagaaccucuacgacaagcugguguccagcuuccuggagaugaagagcgagaagcagguggagcagaagaucgccgagauccccaaggacgaggucaagcccuucaucaccgaguccaagccgagcguggagcagcggaagcaggacgacaagaagaucaaggcgugcguggaggaggucacgaccacccucgaggagaccaaguuccugacggagaaccugcuccuguacaucgacaucaacgggaaccugcaccccgacuccgccacccucgugagcgacaucgacaucaccuuccugaagaaggacgcccccuacaucgugggcgacgucgugcaggagggcgugcugaccgccgucgugauccccacgaagaaggccgggggcaccaccgagaugcucgcgaaggcccugcgcaaggugccgaccgacaacuacaucacgaccuaccccgggcagggccugaacggguacaccgucgaggaggccaagaccgugcucaagaagugcaaguccgccuucuacauccugcccagcaucaucuccaacgagaagcaggagauccugggcaccgugagcuggaaccuccgggagaugcuggcgcacgccgaggagacgcgcaagcugaugcccgucugcguggagaccaaggccaucguguccaccauccagcggaaguacaagggcaucaagauccaggagggggucguggacuacggcgcccgcuucuacuucuacaccagcaagacgaccguggccucccugaucaacacccucaacgaccugaacgagacccuggucacgaugccgcucggguacgugacccacggccugaaccuggaggaggcggcccgguacaugcgcagccucaaggugcccgccaccgucuccgugagcucccccgacgccgugaccgccuacaacggguaccugacgagcuccagcaagacccccgaggagcacuucaucgagaccaucucccuggcgggcagcuacaaggacuggagcuacuccggccagagcacccagcucgggaucgaguuccugaagcggggcgacaaguccgucuacuacacgagcaacccgaccaccuuccaccuggacggggaggugaucaccuucgacaaccucaagacgcugcugucccuccgcgaggugcggaccaucaaggucuucaccaccguggacaacaucaaccugcacacgcagguggucgacaugagcaugaccuacggccagcaguucggccccaccuaccuggacggggccgacgugaccaagaucaagccccacaacucccacgagggcaagacguucuacgugcucccgaacgacgacacccugcgcgucgaggccuucgaguacuaccacaccaccgaccccagcuuccuggggcgguacauguccgcccucaaccacacgaagaaguggaaguacccccaggugaacggccugaccagcaucaagugggccgacaacaacugcuaccuggcgaccgcccuccugacccugcagcagaucgagcucaaguucaaccccccggcccugcaggacgccuacuaccgcgcgcgggccggggaggccgccaacuucugcgcccugauccucgcguacugcaacaagacggugggcgagcugggcgacguccgcgagaccauguccuaccuguuccagcacgccaaccucgacagcugcaagcgggugcugaacgucgugugcaagaccugcgggcagcagcagaccacccugaagggcguggaggccgucauguacauggggacgcucuccuacgagcaguucaagaagggcgugcagauccccugcaccugcgggaagcaggccaccaaguaccuggugcagcaggagagccccuucgucaugauguccgcccccccggcgcaguacgagcugaagcacggcaccuucacgugcgccagcgaguacaccggcaacuaccagugcgggcacuacaagcacaucaccuccaaggagacccucuacugcaucgacggcgcccugcugacgaagagcagcgaguacaaggggcccaucaccgacguguucuacaaggagaacuccuacaccaccacgaucaagcccgugaccuacaagcucgacggcgucgugugcaccgagaucgaccccaagcuggacaacuacuacaagaaggacaacagcuacuucaccgagcagccgaucgaccuggugcccaaccagcccuaccccaacgccuccuucgacaacuucaaguucgucugcgacaacaucaaguucgccgacgaccucaaccagcugacgggguacaagaagccggcgagccgcgagcugaaggugaccuucuuccccgaccucaacggcgacguggucgccaucgacuacaagcacuacacccccuccuucaagaagggcgccaagcugcugcacaagcccaucguguggcacgugaacaacgccaccaacaaggcgacguacaagccgaacaccuggugcauccggugccucuggagcaccaagcccgucgagaccuccaacagcuucgacgugcugaaguccgaggacgcccaggggauggacaaccuggccugcgaggaccucaagcccgugagcgaggaggucguggagaaccccacgauccagaaggacgugcuggagugcaacgucaagaccaccgagguggugggcgacaucauccugaagccggccaacaacucccucaagaucaccgaggaggucgggcacacggaccugauggccgcguacguggacaacagcucccugaccaucaagaagcccaacgagcucagccgcgugcugggccugaagacccucgccacccacgggcuggccgccgucaacuccgugcccugggacacgaucgccaacuacgcgaagccguuccugaacaagguggucagcaccaccaccaacaucgugacgcgcugccucaaccgggugugcaccaacuacaugcccuacuucuucacccugcugcuccagcugugcaccuucacccgcuccacgaacagccggaucaaggccuccaugcccaccaccaucgccaagaacaccgucaagagcgugggcaaguucugccuggaggccagcuucaacuaccucaagucccccaacuucagcaagcugaucaacaucaucaucugguuccugcuccuguccgugugccugggcagccucaucuacuccacggccgcgcuggggguccugaugagcaaccucggcaugccguccuacugcaccggguaccgcgagggcuaccugaacagcaccaacgugaccaucgccacguacugcaccggcuccauccccugcagcgugugccuguccgggcucgacagccuggacaccuaccccucccuggagaccauccagaucacgaucagcuccuucaagugggaccucaccgccuucggccuggucgccgagugguuccuggccuacauccucuucacccgguucuucuacgugcuggggcuggcggccaucaugcagcucuucuucagcuacuucgccgugcacuucaucuccaacagcuggcugauguggcugaucaucaaccugguccagauggcccccaucuccgcgauggugcgcauguacaucuucuucgccagcuucuacuacguguggaagagcuacguccacgugguggacggcugcaacuccagcaccugcaugaugugcuacaagcggaaccgcgccacgcgggucgagugcaccaccaucgugaacgggguccgccgguccuucuacguguacgccaacggcggcaagggguucugcaagcuccacaacuggaacugcgugaacugcgacaccuucugcgccggcagcacguucaucuccgacgaggucgcgcgcgaccugagccugcaguucaagcggccgaucaaccccaccgaccaguccagcuacaucguggacuccgugaccgucaagaacgggagcauccaccucuacuucgacaaggccggccagaagaccuacgagcgccacucccugagccacuucgugaaccuggacaaccuccgggccaacaacacgaaggggucccugcccaucaacgugaucgucuucgacggcaagagcaagugcgaggaguccagcgugaaguccgccagcguguacuacucccagcugaugugccagcccauccuccugcuggaccaggcccucgucagcgacgugggcgacagcgcggagguggccgucaagauguucgacgccuacgugaacaccuucuccagcaccuucaacgugccgauggagaagcugaagacccuggucgccacggccgaggcggagcucgccaagaacgugucccuggacaacgugcugagcaccuucaucuccgccgcccgccagggguucgucgacagcgacguggagaccaaggacguggucgagugccucaagcugucccaccagagcgacaucgaggugaccggcgacuccugcaacaacuacaugcugacguacaacaagguggagaacaugaccccccgggaccucggggcgugcaucgacugcagcgcccgccacaucaacgcccaggucgccaagucccacaacaucgcccugaucuggaacgugaaggacuucaugagccuguccgagcagcuccggaagcagauccgcagcgcggccaagaagaacaaccugcccuucaagcugaccugcgccaccacgcgccagguggucaacguggugaccaccaagaucgcccucaagggcgggugaggacuagucccuguucccagagcccacuuuuuuuucuuuuuuugaaauaaaauagccugucuuucagaucucaaaggcucuuuucagagccaccaaaaaaaaaaaaaaaaaaaaaaaaaaaaaaaaaaaaaaaaaaaaaaaaaaaaaaaaaaaaaaaaaaaaaaaaaaaaaaaaaaaaaaaaaaaaaaaaaaaaa

SEQ ID NO: 20025 - RNA, 6113 nt, Artificial Sequence
  SARS-CoV-2__MT520390.1__non-structural protein 3 (NSP3) mRNA gc
aggagagucccgcagucggcguccagcggcucugcuuguucgugugugugucguugcaggccuuauucaagcuuaccauggcccccaccaaggugaccuucggcgacgacacggucaucgaggugcagggguacaagagcgugaacaucaccuucgagcuggacgagcgcaucgacaagguccucaacgagaagugcuccgccuacaccguggagcugggcaccgaggugaacgaguucgcgugcgucguggccgacgccgugaucaagacgcugcagccggucagcgagcuccugaccccccuggggaucgaccucgacgagugguccauggccaccuacuaccuguucgacgagagcggcgaguucaagcuggccucccacauguacugcagcuucuacccccccgacgaggacgaggaggagggggacugcgaggaggaggaguucgagccguccacccaguacgaguacggcacggaggacgacuaccagggcaagccccucgaguucggggcgaccagcgccgcccugcagcccgaggaggagcaggaggaggacuggcuggacgacgacucccagcagaccgugggccagcaggacgggagcgaggacaaccagaccacgaccauccagaccaucguggagguccagccccagcucgagauggagcugaccccgguggugcagacgaucgaggucaacuccuucagcggcuaccugaagcucaccgacaacguguacaucaagaacgccgacaucguggaggaggcgaagaaggucaagcccaccgugguggucaacgccgccaacguguaccugaagcacgggggcggcguggccggggcccugaacaaggcgaccaacaacgccaugcaggucgaguccgacgacuacaucgccacgaacggcccccucaagguggggggcagcugcguccuguccggccacaaccuggccaagcacugccuccacgugguggggcccaacgucaacaagggcgaggacauccagcugcugaagagcgccuacgagaacuucaaccagcacgaggugcuccuggcgccgcugcucuccgccgggaucuucggcgccgaccccauccacagccugcgggugugcgucgacaccgugcgcaccaacguguaccuggccgucuucgacaagaaccucuacgacaagcugguguccagcuuccuggagaugaagagcgagaagcagguggagcagaagaucgccgagauccccaaggaggaggucaagcccuucaucaccgaguccaagccgagcguggagcagcggaagcaggacgacaagaagaucaaggcgugcguggaggaggucacgaccacccucgaggagaccaaguuccugacggagaaccugcuccuguacaucgacaucaacgggaaccugcaccccgacuccgccacccucgugagcgacaucgacaucaccuuccugaagaaggacgcccccuacaucgugggcgacgucgugcaggagggcgugcugaccgccgucgugauccccacgaagaaggccgggggcaccaccgagaugcucgcgaaggcccugcgcaaggugccgaccgacaacuacaucacgaccuaccccgggcagggccugaacggguacaccgucgaggaggccaagaccgugcucaagaagugcaaguccgccuucuacauccugcccagcaucaucuccaacgagaagcaggagauccugggcaccgugagcuggaaccuccgggagaugcuggcgcacgccgaggagacgcgcaagcugaugcccgucugcguggagaccaaggccaucguguccaccauccagcggaaguacaagggcaucaagauccaggagggggucguggacuacggcgcccgcuucuacuucuacaccagcaagacgaccguggccucccugaucaacacccucaacgaccugaacgagacccuggucacgaugccgcucggguacgugacccacggccugaaccuggaggaggcggcccgguacaugcgcagccucaaggugcccgccaccgucuccgugagcucccccgacgccgugaccgccuacaacggguaccugacgagcuccagcaagacccccgaggagcacuucaucgagaccaucucccuggcgggcagcuacaaggacuggagcuacuccggccagagcacccagcucgggaucgaguuccugaagcggggcgacaaguccgucuacuacacgagcaacccgaccaccuuccaccuggacggggaggugaucaccuucgacaaccucaagacgcugcugucccuccgcgaggugcggaccaucaaggucuucaccaccguggacaacaucaaccugcacacgcagguggucgacaugagcaugaccuacggccagcaguucggccccaccuaccuggacggggccgacgugaccaagaucaagccccacaacucccacgagggcaagacguucuacgugcucccgaacgacgacacccugcgcgucgaggccuucgaguacuaccacaccaccgaccccagcuuccuggggcgguacauguccgcccucaaccacacgaagaaguggaaguacccccaggugaacggccugaccagcaucaagugggccgacaacaacugcuaccuggcgaucgcccuccugacccugcagcagaucgagcucaaguucaaccccccggcccugcaggacgccuacuaccgcgcgcgggccggggaggccgccaacuucugcgcccugauccucgcguacugcaacaagaccgugggcgagcugggcgacguccgcgagacgauguccuaccuguuccagcacgccaaccucgacagcugcaagcgggugcugaacgucgugugcaagaccugcgggcagcagcagaccacccugaagggcguggaggccgucauguacauggggacccucuccuacgagcaguucaagaagggcgugcagauccccugcacgugcgggaagcaggccaccaaguaccuggugcagcaggagagccccuucgucaugauguccgcccccccggcgcaguacgagcugaagcacggcaccuucaccugcgccagcgaguacacgggcaacuaccagugcgggcacuacaagcacaucaccuccaaggagacccucuacugcaucgacggcgcccugcugaccaagagcagcgaguacaaggggcccaucacggacguguucuacaaggagaacuccuacaccaccaccaucaagcccgugacguacaagcucgacggcgucgugugcaccgagaucgaccccaagcuggacaacuacuacaagaaggacaacagcuacuucaccgagcagccgaucgaccuggugcccaaccagcccuaccccaacgccuccuucgacaacuucaaguucgucugcgacaacaucaaguucgccgacgaccucaaccagcugaccggguacaagaagccggcgagccgcgagcugaaggugacguucuuccccgaccucaacggcgacguggucgccaucgacuacaagcacuacacccccuccuucaagaagggcgccaagcugcugcacaagcccaucguguggcacgugaacaacgccaccaacaaggcgaccuacaagccgaacacguggugcauccggugccucuggagcaccaagcccgucgagaccuccaacagcuucgacgugcugaaguccgaggacgcccaggggauggacaaccuggugugcgaggaccucaagcccgucagcgaggaggugguggagaaccccaccauccagaaggacguccuggagugcaacgugaagacgaccgagguggucggcgacaucauccugaagccggccaacaacucccucaagaucaccgaggagguggggcacaccgaccugauggccgccuacguggacaacagcucccugacgaucaagaagcccaacgagcucagccgcguccugggccugaagacccucgcgacccacgggcuggccgccgugaacuccgugcccugggacaccaucgccaacuacgccaagccguuccugaacaaggucgugagcacgaccaccaacaucgugacccgcugccucaaccgggucugcacgaacuacaugcccuacuucuucacccugcugcuccagcugugcaccuucacccgcuccaccaacagccggaucaaggcguccaugcccacgaccaucgccaagaacaccgugaagagcgugggcaaguucugccuggaggccagcuucaacuaccucaagucccccaacuucagcaagcugaucaacaucaucaucugguuccugcuccuguccgucugccugggcagccucaucuacuccaccgccgcccugggggugcugaugagcaaccucggcaugccguccuacugcacgggguaccgcgagggcuaccugaacagcaccaacgugaccaucgcgaccuacugcacgggcuccauccccugcagcgucugccuguccgggcucgacagccuggacaccuaccccucccuggagaccauccagaucaccaucagcuccuucaagugggaccucacggccuucggccugguggccgagugguuccuggccuacauccucuucacccgguucuucuacgugcuggggcuggccgcgaucaugcagcucuucuucagcuacuucgccguccacuucaucuccaacagcuggcugauguggcugaucaucaaccuggugcagauggcccccaucuccgccauggugcgcauguacaucuucuucgcgagcuucuacuacgucuggaagagcuacgugcacguggucgacggcugcaacuccagcaccugcaugaugugcuacaagcggaaccgcgccacccggguggagugcacgaccaucgucaacggggugcgccgguccuucuacguguacgccaacggcggcaagggguucugcaagcuccacaacuggaacugcgucaacugcgacaccuucugcgccggcagcaccuucaucuccgacgagguggcccgcgaccugagccugcaguucaagcggccgaucaaccccacggaccaguccagcuacaucguggacuccgucaccgugaagaacgggagcauccaccucuacuucgacaaggcgggccagaagaccuacgagcgccacucccugagccacuucgugaaccuggacaaccuccgggccaacaacaccaaggggucccugcccaucaacgucaucguguucgacggcaagagcaagugcgaggaguccagcgccaaguccgccagcguguacuacucccagcugaugugccagcccauccuccugcuggaccaggcccucgucagcgacgugggcgacagcgcggagguggccgucaagauguucgacgccuacgugaacacguucuccagcaccuucaacgugccgauggagaagcugaagacccuggucgccaccgccgaggcggagcucgccaagaacgugucccuggacaacgugcugagcacguucaucuccgccgcccgccagggguucgucgacagcgacguggagaccaaggacguggucgagugccucaagcugucccaccagagcgacaucgaggugaccggcgacuccugcaacaacuacaugcugaccuacaacaagguggagaacaugacgccccgggaccucggggcgugcaucgacugcagcgcccgccacaucaacgcccaggucgccaagucccacaacaucgcccugaucuggaacgugaaggacuucaugagccuguccgagcagcuccggaagcagauccgcagcgcggccaagaagaacaaccugcccuucaagcugaccugcgccaccacccgccagguggucaacguggugacgaccaagaucgcccucaagggcgggugaggacuagucccuguucccagagcccacuuuuuuuucuuuuuuugaaauaaaauagccugucuuucagaucucaaaggcucuuuucagagccaccaaaaaaaaaaaaaaaaaaaaaaaaaaaaaaaaaaaaaaaaaaaaaaaaaaaaaaaaaaaaaaaaaaaaaaaaaaaaaaaaaaaaaaaaaaaaaaaaaaaaa

SEQ ID NO: 20026 - RNA, 6113 nt, Artificial Sequence
  SARS-CoV-2__MT520466.1__non-structural protein 3 (NSP3) mRNA gc
aggagagucccgcagucggcguccagcggcucugcuuguucgugugugugucguugcaggccuuauucaagcuuaccauggcccccaccaaggugaccuucggcgacgacacggucaucgaggugcagggguacaagagcgugaacaucaccuucgagcuggacgagcgcaucgacaagguccucaacgagaagugcuccgccuacaccguggagcugggcaccgaggugaacgaguucgcgugcgucguggccgacgccgugaucaagacgcugcagccggucagcgagcuccugaccccccuggggaucgaccucgacgagugguccauggccaccuacuaccuguucgacgagagcggcgaguucaagcuggccucccacauguacugcagcuucuacccccccgacgaggacgaggaggagggggacugcgaggaggaggaguucgagccguccacccaguacgaguacggcacggaggacgacuaccagggcaagccccucgaguucggggcgaccagcgccgcccugcagcccgaggaggagcaggaggaggacuggcuggacgacgacucccagcagaccgugggccagcaggacgggagcgaggacaaccagaccacgaccauccagaccaucguggagguccagccccagcucgagauggagcugaccccgguggugcagacgaucgaggucaacuccuucagcggcuaccugaagcucaccgacaacguguacaucaagaacgccgacaucguggaggaggcgaagaaggucaagcccaccgugguggucaacgccgccaacguguaccugaagcacgggggcggcguggccggggcccugaacaaggcgaccaacaacgccaugcaggucgaguccgacgacuacaucgccacgaacggcccccucaagguggggggcagcugcguccuguccggccacaaccuggccaagcacugccuccacgugguggggcccaacgucaacaagggcgaggacauccagcugcugaagagcgccuacgagaacuucaaccagcacgaggugcuccuggcgccgcugcucuccgccgggaucuucggcgccgaccccauccacagccugcgggugugcgucgacaccgugcgcaccaacguguaccuggccgucuucgacaagaaccucuacgacaagcugguguccagcuuccuggagaugaagagcgagaagcagguggagcagaagaucgccgagauccccaaggaggaggucaagcccuucaucaccgaguccaagccgagcguggagcagcggaagcaggacgacaagaagaucaaggcgugcguggaggaggucacgaccacccucgaggagaccaaguuccugacggagaaccugcuccuguacaucgacaucaacgggaaccugcaccccgacuccgccacccucgugagcgacaucgacaucaccuuccugaagaaggacgcccccuacaucgugggcgacgucgugcaggagggcgugcugaccgccgucgugauccccacgaagaaggccgggggcaccaccgagaugcucgcgaaggcccugcgcaaggugccgaccgacaacuacaucacgaccuaccccgggcagggccugaacggguacaccgucgaggaggccaagaccgugcucaagaagugcaaguccgccuucuacauccugcccagcaucaucuccaacgagaagcaggagauccugggcaccgugagcuggaaccuccgggagaugcuggcgcacgccgaggagacgcgcaagcugaugcccgucugcguggagaccaaggccaucguguccaccauccagcggaaguacaagggcaucaagauccaggagggggucguggacuacggcgcccgcuucuacuucuacaccagcaagacgaccguggccucccugaucaacacccucaacgaccugaacgagacccuggucacgaugccgcucggguacgugacccacggccugaaccuggaggaggcggcccgguacaugcgcagccucaaggugcccgccaccgucuccgugagcucccccgacgccgugaccgccuacaacggguaccugacgagcuccagcaagacccccgaggagcacuucaucgagaccaucucccuggcgggcagcuacaaggacuggagcuacuccggccagagcacccagcucgggaucgaguuccugaagcggggcgacaaguccgucuacuacacgagcaacccgaccaccuuccaccuggacggggaggugaucaccuucgacaaccucaagacgcugcugucccuccgcgaggugcggaccaucaaggucuucaccaccguggacaacaucaaccugcacacgcagguggucgacaugagcaugaccuacggccagcaguucggccccaccuaccuggacggggccgacgugaccaagaucaagccccacaacucccacgagggcaagacguucuacgugcucccgaacgacgacacccugcgcgucgaggccuucgaguacuaccacaccaccgaccccagcuuccuggggcgguacauguccgcccucaaccacacgaagaaguggaaguacccccaggugaacggccugaccagcaucaagugggccgacaacaacugcuaccuggcgaccgcccuccugacccugcagcagaucgagcucaaguucaaccccccggcccugcaggacgccuacuaccgcgcgcgggccggggaggccgccaacuucugcgcccugauccucgcguacugcaacaagacggugggcgagcugggcgacguccgcgagaccauguccuaccuguuccagcacgccaaccucgacagcugcaagcgggugcugaacgucgugugcaagaccugcgggcagcagcagaccacccugaagggcguggaggccgucauguacauggggacgcucuccuacgagcaguucaagaagggcgugcagauccccugcaccugcgggaagcaggccaccaaguaccuggugcagcaggagagccccuucgucaugauguccgcccccccggcgcaguacgagcugaagcacggcaccuucacgugcgccagcgaguacaccggcaacuaccagugcgggcacuacaagcacaucaccuccaaggagacccucuacugcaucgacggcgcccugcugacgaagagcagcgaguacaaggggcccaucaccgacguguucuacaaggagaacuccuacaccaccacgaucaagcccgugaccuacaagcucgacggcgucgugugcaccgagaucgaccccaagcuggacaacuacuacaagaaggacaacagcuacuucaccgagcagccgaucgaccuggugcccaaccagcccuaccccaacgccuccuucgacaacuucaaguucgucugcgacaacaucaaguucgccgacgaccucaaccagcugacgggguacaagaagccggcgagccgcgagcugaaggugaccuucuuccccgaccucaacggcgacguggucgccaucgacuacaagcacuacacccccuccuucaagaagggcgccaagcugcugcacaagcccaucguguggcacgugaacaacgccaccaacaaggcgacguacaagccgaacaccuggugcauccggugccucuggagcaccaagcccgucgagaccuccaacagcuucgacgugcugaaguccgaggacgcccaggggauggacaaccuggccugcgaggaccucaagcccgugagcgaggaggucguggagaaccccacgauccagaaggacgugcuggagugcaacgucaagaccaccgagguggugggcgacaucauccugaagccggccaacaacucccucaagaucaccgaggaggucgggcacacggaccugauggccgcguacguggacaacagcucccugaccaucaagaagcccaacgagcucagccgcgugcugggccugaagacccucgccacccacgggcuggccgccgucaacuccgugcccugggacacgaucgccaacuacgcgaagccguuccugaacaagguggucagcaccaccaccaacaucgugacgcgcugccucaaccgggugugcaucaacuacaugcccuacuucuucacccugcugcuccagcugugcaccuucacccgcuccaccaacagccggaucaaggccuccaugcccacgaccaucgccaagaacaccgucaagagcgugggcaaguucugccuggaggccagcuucaacuaccucaagucccccaacuucagcaagcugaucaacaucaucaucugguuccugcuccuguccgugugccugggcagccucaucuacuccaccgccgcgcuggggguccugaugagcaaccucggcaugccguccuacugcacgggguaccgcgagggcuaccugaacagcaccaacgugaccaucgccaccuacugcacgggcuccauccccugcagcgugugccuguccgggcucgacagccuggacaccuaccccucccuggagaccauccagaucaccaucagcuccuucaagugggaccucacggccuucggccuggucgccgagugguuccuggccuacauccucuucacccgguucuucuacgugcuggggcuggcggccaucaugcagcucuucuucagcuacuucgccgugcacuucaucuccaacagcuggcugauguggcugaucaucaaccugguccagauggcccccaucuccgcgauggugcgcauguacaucuucuucgccagcuucuacuacguguggaagagcuacguccacgugguggacggcugcaacuccagcaccugcaugaugugcuacaagcggaaccgcgccacccgggucgagugcacgaccaucgugaacgggguccgccgguccuucuacguguacgccaacggcggcaagggguucugcaagcuccacaacuggaacugcgugaacugcgacaccuucugcgccggcagcaccuucaucuccgacgaggucgcgcgcgaccugagccugcaguucaagcggccgaucaaccccacggaccaguccagcuacaucguggacuccgugaccgucaagaacgggagcauccaccucuacuucgacaaggccggccagaagaccuacgagcgccacucccugagccacuucgugaaccuggacaaccuccgggccaacaacaccaaggggucccugcccaucaacgugaucgucuucgacggcaagagcaagugcgaggaguccagcgccaaguccgccagcguguacuacucccagcugaugugccagcccauccuccugcuggaccaggcgcucgugagcgacgucggcgacagcgccgagguggccgugaagauguucgacgccuacgucaacacguucuccagcaccuucaacgugccgauggagaagcugaagacccugguggccaccgcggaggccgagcucgccaagaacgucucccuggacaacgugcugagcacguucaucuccgccgcgcgccagggguucguggacagcgacgucgagaccaaggacgugguggagugccucaagcugucccaccagagcgacaucgaggucaccggcgacuccugcaacaacuacaugcugaccuacaacaagguggagaacaugacgccccgggaccucggggccugcaucgacugcagcgcccgccacaucaacgcccagguggccaagucccacaacaucgcgcugaucuggaacgucaaggacuucaugagccuguccgagcagcuccggaagcagauccgcagcgccgccaagaagaacaaccugcccuucaagcugaccugcgccaccacccgccagguggugaacgucgugacgaccaagaucgcccucaagggcgggugaggacuagucccuguucccagagcccacuuuuuuuucuuuuuuugaaauaaaauagccugucuuucagaucucaaaggcucuuuucagagccaccaaaaaaaaaaaaaaaaaaaaaaaaaaaaaaaaaaaaaaaaaaaaaaaaaaaaaaaaaaaaaaaaaaaaaaaaaaaaaaaaaaaaaaaaaaaaaaaaaaaaa

SEQ ID NO: 20027 - RNA, 6113 nt, Artificial Sequence
  SARS-CoV-2__MT520472.1__non-structural protein 3 (NSP3) mRNA gc
aggagagucccgcagucggcguccagcggcucugcuuguucgugugugugucguugcaggccuuauucaagcuuaccauggcccccaccaaggugaccuucggcgacgacacggucaucgaggugcagggguacaagagcgugaacaucaccuucgagcuggacgagcgcaucgacaagguccucaacgagaagugcuccgccuacaccguggagcugggcaccgaggugaacgaguucgcgugcgucguggccgacgccgugaucaagacgcugcagccggucagcgagcuccugaccccccuggggaucgaccucgacgagugguccauggccaccuacuaccuguucgacgagagcggcgaguucaagcuggccucccacauguacugcagcuucuacccccccgacgaggacgaggaggagggggacugcgaggaggaggaguucgagccguccacccaguacgaguacggcacggaggacgacuaccagggcaagccccucgaguucggggcgaccagcgccgcccugcagcccgaggaggagcaggaggaggacuggcuggacgacgacucccagcagaccgugggccagcaggacgggagcgaggacaaccagaccacgaccauccagaccaucguggagguccagccccagcucgagauggagcugaccccgguggugcagacgaucgaggucaacuccuucagcggcuaccugaagcucaccgacaacguguacaucaagaacgccgacaucguggaggaggcgaagaaggucaagcccaccgugguggucaacgccgccaacguguaccugaagcacgggggcggcguggccggggcccugaacaaggcgaccaacaacgccaugcaggucgaguccgacgacuacaucgccacgaacggcccccucaagguggggggcagcugcguccuguccggccacaaccuggccaagcacugccuccacgugguggggcccaacgucaacaagggcgaggacauccagcugcugaagagcgccuacgagaacuucaaccagcacgaggugcuccuggcgccgcugcucuccgccgggaucuucggcgccgaccccauccacagccugcgggugugcgucgacaccgugcgcaccaacguguaccuggccgucuucgacaagaaccucuacgacaagcugguguccagcuuccuggagaugaagagcgagaagcagguggagcagaagaucgccgagauccccaaggaggaggucaagcccuucaucaccgaguccaagccgagcguggagcagcggaagcaggacgacaagaagaucaaggcgugcguggaggaggucacgaccacccucgaggagaccaaguuccugacggagaaccugcuccuguacaucgacaucaacgggaaccugcaccccgacuccgccacccucgugagcgacaucgacaucaccuuccugaagaaggacgcccccuacaucgugggcgacgucgugcaggagggcgugcugaccgccgucgugauccccacgaagaaggccgggggcaccaccgagaugcucgcgaaggcccugcgcaaggugccgaccgacaacuacaucacgaccuaccccgggcagggccugaacggguacaccgucgaggaggccaagaccgugcucaagaagugcaaguccgccuucuacauccugcccagcaucaucuccaacgagaagcaggagauccugggcaccgugagcuggaaccuccgggagaugcuggcgcacgccgaggagacgcgcaagcugaugcccgucugcguggagaccaaggccaucguguccaccauccagcggaaguacaagggcaucaagauccaggagggggucguggacuacggcgcccgcuucuacuucuacaccagcaagacgaccguggccucccugaucaacacccucaacgaccugaacgagacccuggucacgaugccgcucggguacgugacccacggccugaaccuggaggaggcggcccgguacaugcgcagccucaaggugcccgccaccgucuccgugagcucccccgacgccgugaccgccuacaacggguaccugacgagcuccagcaagacccccgaggagcacuucaucgagaccaucucccuggcgggcagcuacaaggacuggagcuacuccggccagagcacccagcucgggaucgaguuccugaagcggggcgacaaguccgucuacuacacgagcaacccgaccaccuuccaccuggacggggaggugaucaccuucgacaaccucaagacgcugcugucccuccgcgaggugcggaccaucaaggucuucaccaccguggacaacaucaaccugcacacgcagguggucgacaugagcaugaccuacggccagcaguucggccccaccuaccuggacggggccgacgugaccaagaucaagccccacaacucccacgagggcaagacguucuacgugcucccgaacgacgacacccugcgcgucgaggccuucgaguacuaccacaccaccgaccccagcuuccuggggcgguacauguccgcccucaaccacacgaagaaguggaaguacccccaggugaacggccugaccagcaucaagugggccgacaacaacugcuaccuggcgaccgcccuccugacccugcagcagaucgagcucaaguucaaccccccggcccugcaggacgccuacuaccgcgcgcgggccggggaggccgccaacuucugcgcccugauccucgcguacugcaacaagacggugggcgagcugggcgacguccgcgagaccaucuccuaccuguuccagcacgccaaccucgacagcugcaagcgggugcugaacgucgugugcaagaccugcgggcagcagcagaccacccugaagggcguggaggccgucauguacauggggacgcucuccuacgagcaguucaagaagggcgugcagauccccugcaccugcgggaagcaggccaccaaguaccuggugcagcaggagagccccuucgucaugauguccgcccccccggcgcaguacgagcugaagcacggcaccuucacgugcgccagcgaguacaccggcaacuaccagugcgggcacuacaagcacaucaccuccaaggagacccucuacugcaucgacggcgcccugcugacgaagagcagcgaguacaaggggcccaucaccgacguguucuacaaggagaacuccuacaccaccacgaucaagcccgugaccuacaagcucgacggcgucgugugcaccgagaucgaccccaagcuggacaacuacuacaagaaggacaacagcuacuucaccgagcagccgaucgaccuggugcccaaccagcccuaccccaacgccuccuucgacaacuucaaguucgucugcgacaacaucaaguucgccgacgaccucaaccagcugacgggguacaagaagccggcgagccgcgagcugaaggugaccuucuuccccgaccucaacggcgacguggucgccaucgacuacaagcacuacacccccuccuucaagaagggcgccaagcugcugcacaagcccaucguguggcacgugaacaacgccaccaacaaggcgacguacaagccgaacaccuggugcauccggugccucuggagcaccaagcccgucgagaccuccaacagcuucgacgugcugaaguccgaggacgcccaggggauggacaaccuggccugcgaggaccucaagcccgugagcgaggaggucguggagaaccccacgauccagaaggacgugcuggagugcaacgucaagaccaccgagguggugggcgacaucauccugaagccggccaacaacucccucaagaucaccgaggaggucgggcacacggaccugauggccgcguacguggacaacagcucccugaccaucaagaagcccaacgagcucagccgcgugcugggccugaagacccucgccacccacgggcuggccgccgucaacuccgugcccugggacacgaucgccaacuacgcgaagccguuccugaacaagguggucagcaccaccaccaacaucgugacgcgcugccucaaccgggugugcaccaacuacaugcccuacuucuucacccugcugcuccagcugugcaccuucacccgcuccacgaacagccggaucaaggccuccaugcccaccaccaucgccaagaacaccgucaagagcgugggcaaguucugccuggaggccagcuucaacuaccucaagucccccaacuucagcaagcugaucaacaucaucaucugguuccugcuccuguccgugugccugggcagccucaucuacuccacggccgcgcuggggguccugaugagcaaccucggcaugccguccuacugcaccggguaccgcgagggcuaccugaacagcaccaacgugaccaucgccacguacugcaccggcuccauccccugcagcgugugccuguccgggcucgacagccuggacaccuaccccucccuggagaccauccagaucacgaucagcuccuucaagugggaccucaccgccuucggccuggucgccgagugguuccuggccuacauccucuucacccgguucuucuacgugcuggggcuggcggccaucaugcagcucuucuucagcuacuucgccgugcacuucaucuccaacagcuggcugauguggcugaucaucaaccugguccagauggcccccaucuccgcgauggugcgcauguacaucuucuucgccagcuucuacuacguguggaagagcuacguccacgugguggacggcugcaacuccagcaccugcaugaugugcuacaagcggaaccgcgccacgcgggucgagugcaccaccaucgugaacgggguccgccgguccuucuacguguacgccaacggcggcaagggguucugcaagcuccacaacuggaacugcgugaacugcgacaccuucugcgccggcagcacguucaucuccgacgaggucgcgcgcgaccugagccugcaguucaagcggccgaucaaccccaccgaccaguccagcuacaucguggacuccgugaccgucaagaacgggagcauccaccucuacuucgacaaggccggccagaagaccuacgagcgccacucccugagccacuucgugaaccuggacaaccuccgggccaacaacacgaaggggucccugcccaucaacgugaucgucuucgacggcaagagcaagugcgaggaguccagcgccaaguccgccagcguguacuacucccagcugaugugccagcccauccuccugcuggaccaggcgcucgugagcgacgucggcgacagcgccgagguggccgugaagauguucgacgccuacgucaacaccuucuccagcaccuucaacgugccgauggagaagcugaagacccugguggccacggcggaggccgagcucgccaagaacgucucccuggacaacgugcugagcaccuucaucuccgccgcgcgccagggguucguggacagcgacgucgagaccaaggacgugguggagugccucaagcugucccaccagagcgacaucgaggucaccggcgacuccugcaacaacuacaugcugacguacaacaagguggagaacaugaccccccgggaccucggggccugcaucgacugcagcgcccgccacaucaacgcccagguggccaagucccacaacaucgcgcugaucuggaacgucaaggacuucaugagccuguccgagcagcuccggaagcagauccgcagcgccgccaagaagaacaaccugcccuucaagcugaccugcgccaccacgcgccagguggugaacgucgugaccaccaagaucgcccucaagggcgggugaggacuagucccuguucccagagcccacuuuuuuuucuuuuuuugaaauaaaauagccugucuuucagaucucaaaggcucuuuucagagccaccaaaaaaaaaaaaaaaaaaaaaaaaaaaaaaaaaaaaaaaaaaaaaaaaaaaaaaaaaaaaaaaaaaaaaaaaaaaaaaaaaaaaaaaaaaaaaaaaaaaaa

SEQ ID NO: 20028 - RNA, 6113 nt, Artificial Sequence
  SARS-CoV-2__MT520486.1__non-structural protein 3 (NSP3) mRNA gc
aggagagucccgcagucggcguccagcggcucugcuuguucgugugugugucguugcaggccuuauucaagcuuaccauggcccccaccaaggugaccuucggcgacgacacggucaucgaggugcagggguacaagagcgugaacaucaccuucgagcuggacgagcgcaucgacaagguccucaacgagaagugcuccgccuacaccguggagcugggcaccgaggugaacgaguucgcgugcgucguggccgacgccgugaucaagacgcugcagccggucagcgagcuccugaccccccuggggaucgaccucgacgagugguccauggccaccuacuaccuguucgacgagagcggcgaguucaagcuggccucccacauguacugcagcuucuacccccccgacgaggacgaggaggagggggacugcgaggaggaggaguucgagccguccacccaguacgaguacggcacggaggacgacuaccagggcaagccccucgaguucggggcgaccagcgccgcccugcagcccgaggaggagcaggaggaggacuggcuggacgacgacucccagcagaccgugggccagcaggacgggagcgaggacaaccagaccacgaccauccagaccaucguggagguccagccccagcucgagauggagcugaccccgguggugcagacgaucgaggucaacuccuucagcggcuaccugaagcucaccgacaacguguacaucaagaacgccgacaucguggaggaggcgaagaaggucaagcccaccgugguggucaacgccgccaacguguaccugaagcacgggggcggcguggccggggcccugaacaaggcgaccaacaacgccaugcaggucgaguccgacgacuacaucgccacgaacggcccccucaagguggggggcagcugcguccuguccggccacaaccuggccaagcacugccuccacgugguggggcccaacgucaacaagggcgaggacauccagcugcugaagagcgccuacgagaacuucaaccagcacgaggugcuccuggcgccgcugcucuccgccgggaucuucggcgccgaccccauccacagccugcgggugugcgucgacaccgugcgcaccaacguguaccuggccgucuucgacaagaaccucuacgacaagcugguguccagcuuccuggagaugaagagcgagaagcagguggagcagaagaucgccaagcccuucaucaccgaguccaagcccagcgucgagcagcggaagcaggacgacaagaagaucaaggcgugcguggaggaggugacgaccacccucgaggagaccaaguuccugacggagaaccugcuccuguacaucgacaucaacgggaaccugcacccggacuccgccacccucgucagcgacaucgacaucaccuuccugaagaaggacgcccccuacaucgugggcgacgugguccaggagggcgugcugaccgccguggucauccccacgaagaaggccgggggcaccaccgagaugcucgcgaaggcccugcgcaaggugcccaccgacaacuacaucacgaccuacccggggcagggccugaacggguacaccguggaggaggccaagaccguccucaagaagugcaaguccgccuucuacauccugcccagcaucaucuccaacgagaagcaggagauccugggcaccgugagcuggaaccuccgggagaugcuggcgcacgccgaggagacgcgcaagcugaugcccgugugcgucgagaccaaggccaucguguccaccauccagcggaaguacaagggcaucaagauccaggaggggguggucgacuacggcgcccgcuucuacuucuacaccagcaagacgaccguggccucccugaucaacacccucaacgaccugaacgagacccuggugacgaugccccucggguacgucacccacggccugaaccuggaggaggcggcccgguacaugcgcagccucaaggugccggccaccguguccgucagcucccccgacgccgugaccgccuacaacggguaccugacgagcuccagcaagacccccgaggagcacuucaucgagaccaucucccuggcgggcagcuacaaggacuggagcuacuccggccagagcacccagcucgggaucgaguuccugaagcggggcgacaaguccguguacuacacgagcaaccccaccaccuuccaccuggacggggaggucaucaccuucgacaaccucaagacgcugcugucccuccgcgaggugcggaccaucaagguguucaccaccgucgacaacaucaaccugcacacgcaggugguggacaugagcaugaccuacggccagcaguucggcccgaccuaccuggacggggccgacgucaccaagaucaagccccacaacucccacgagggcaagacguucuacgugcuccccaacgacgacacccugcgcguggaggccuucgaguacuaccacaccaccgacccgagcuuccuggggcgguacauguccgcccucaaccacacgaagaaguggaaguacccccaggucaacggccugaccagcaucaagugggccgacaacaacugcuaccuggcgaccgcccuccugacccugcagcagaucgagcucaaguucaacccccccgcccugcaggacgccuacuaccgcgcgcgggccggggaggccgccaacuucugcgcccugauccucgcguacugcaacaagacggugggcgagcugggcgacgugcgcgagaccauguccuaccuguuccagcacgccaaccucgacagcugcaagcggguccugaacguggucugcaagaccugcgggcagcagcagaccacccugaagggcguggaggccgugauguacauggggacgcucuccuacgagcaguucaagaagggcguccagaucccgugcaccugcgggaagcaggccaccaaguaccuggugcagcaggagagccccuucgugaugauguccgccccccccgcgcaguacgagcugaagcacggcaccuucacgugcgccagcgaguacaccggcaacuaccagugcgggcacuacaagcacaucaccuccaaggagacccucuacugcaucgacggcgcccugcugacgaagagcagcgaguacaaggggccgaucaccgacgucuucuacaaggagaacuccuacaccaccacgaucaagcccgugaccuacaagcucgacggcguggucugcaccgagaucgaccccaagcuggacaacuacuacaagaaggacaacagcuacuucaccgagcagcccaucgaccuggugccgaaccagcccuaccccaacgccuccuucgacaacuucaaguucgugugcgacaacaucaaguucgccgacgaccucaaccagcugacgggguacaagaagcccgcgagccgcgagcugaaggucaccuucuucccggaccucaacggcgacgugguggccaucgacuacaagcacuacacccccuccuucaagaagggcgccaagcugcugcacaagcccaucgucuggcacgugaacaacgccaccaacaaggcgacguacaagcccaacaccuggugcauccggugccucuggagcaccaagccgguggagaccuccaacagcuucgacguccugaaguccgaggacgcccaggggauggacaaccuggccugcgaggaccucaagcccgugagcgaggagguggucgagaaccccacgauccagaaggacgugcuggagugcaacgugaagaccaccgaggucgugggcgacaucauccugaagcccgccaacaacucccucaagaucaccgaggagguggggcacacggaccugauggccgcguacgucgacaacagcucccugaccaucaagaagccgaacgagcucagccgcgugcugggccugaagacccucgccacccacgggcuggccgccgugaacuccguccccugggacacgaucgccaacuacgcgaagcccuuccugaacaagguggugagcaccaccaccaacaucgucacgcgcugccucaaccgggugugcaccaacuacaugccguacuucuucacccugcugcuccagcugugcaccuucacccgcuccacgaacagccggaucaaggccuccaugcccaccaccaucgccaagaacaccgugaagagcgucggcaaguucugccuggaggccagcuucaacuaccucaagucccccaacuucagcaagcugaucaacaucaucaucugguuccugcuccuguccgugugccugggcagccucaucuacuccacggccgcgcugggggugcugaugagcaaccucggcaugcccuccuacugcaccggguaccgcgagggcuaccugaacagcaccaacgucaccaucgccacguacugcaccggcuccaucccgugcagcgugugccuguccgggcucgacagccuggacaccuaccccucccuggagaccauccagaucacgaucagcuccuucaagugggaccucaccgccuucggccugguggccgagugguuccuggccuacauccucuucacccgguucuucuacguccuggggcuggcggccaucaugcagcucuucuucagcuacuucgccgugcacuucaucuccaacagcuggcugauguggcugaucaucaaccuggugcagauggcccccaucuccgcgaugguccgcauguacaucuucuucgccagcuucuacuacguguggaagagcuacgugcacgucguggacggcugcaacuccagcaccugcaugaugugcuacaagcggaaccgcgccacgcggguggagugcaccaccaucgucaacggggugcgccgguccuucuacgucuacgccaacggcggcaagggguucugcaagcuccacaacuggaacugcgugaacugcgacaccuucugcgccggcagcacguucaucuccgacgagguggcgcgcgaccugagccugcaguucaagcggcccaucaacccgaccgaccaguccagcuacaucgucgacuccgugaccgugaagaacgggagcauccaccucuacuucgacaaggccggccagaagaccuacgagcgccacucccugagccacuucgucaaccuggacaaccuccgggccaacaacacgaaggggucccugcccaucaacgugaucguguucgacggcaagagcaagugcgaggaguccagcgccaaguccgccagcgucuacuacucccagcugaugugccagcccauccuccugcuggaccaggcgcucgugagcgacgugggcgacagcgccgaggucgccgugaagauguucgacgccuacgugaacaccuucuccagcaccuucaacguccccauggagaagcugaagacccugguggccacggcggaggccgagcucgccaagaacgugucccuggacaacguccugagcaccuucaucuccgccgcgcgccagggguucguggacagcgacguggagaccaaggacgucguggagugccucaagcugucccaccagagcgacaucgaggugaccggcgacuccugcaacaacuacaugcugacguacaacaaggucgagaacaugaccccgcgggaccucggggccugcaucgacugcagcgcccgccacaucaacgcccagguggccaagucccacaacaucgcgcugaucuggaacgugaaggacuucaugagccuguccgagcagcuccggaagcagauccgcagcgccgccaagaagaacaaccugcccuucaagcugaccugcgccaccacgcgccaggucgugaacguggucaccaccaagaucgcccucaagggcgggaagaucgugaacaacuggcugugaggacuagucccuguucccagagcccacuuuuuuuucuuuuuuugaaauaaaauagccugucuuucagaucucaaaggcucuuuucagagccaccaaaaaaaaaaaaaaaaaaaaaaaaaaaaaaaaaaaaaaaaaaaaaaaaaaaaaaaaaaaaaaaaaaaaaaaaaaaaaaaaaaaaaaaaaaaaaaaaaaaaa

SEQ ID NO: 20029 - RNA, 6113 nt, Artificial Sequence
  SARS-CoV-2__MT520534.1__non-structural protein 3 (NSP3) mRNA gc
aggagagucccgcagucggcguccagcggcucugcuuguucgugugugugucguugcaggccuuauucaagcuuaccauggcccccaccaaggugaccuucggcgacgacacggucaucgaggugcagggguacaagagcgugaacaucaccuucgagcuggacgagcgcaucgacaagguccucaacgagaagugcuccgccuacaccguggagcugggcaccgaggugaacgaguucgcgugcgucguggccgacgccgugaucaagacgcugcagccggucagcgagcuccugaccccccuggggaucgaccucgacgagugguccauggccaccuacuaccuguucgacgagagcggcgaguucaagcuggccucccacauguacugcagcuucuacccccccgacgaggacgaggaggagggggacugcgaggaggaggaguucgagccguccacccaguacgaguacggcacggaggacgacuaccagggcaagccccucgaguucggggcgaccagcgccgcccugcagcccgaggaggagcaggaggaggacuggcuggacgacgacucccagcagaccgugggccagcaggacgggagcgaggacaaccagaccacgaccauccagaccaucguggagguccagccccagcucgagauggagcugaccccgguggugcagacgaucgaggucaacuccuucagcggcuaccugaagcucaccgacaacguguacaucaagaacgccgacaucguggaggaggcgaagaaggucaagcccaccgugguggucaacgccgccaacguguaccugaagcacgggggcggcguggccggggcccugaacaaggcgaccaacaacgccaugcaggucgaguccgacgacuacaucgccacgaacggcccccucaagguggggggcagcugcguccuguccggccacaaccuggccaagcacugccuccacgugguggggcccaacgucaacaagggcgaggacauccagcugcugaagagcgccuacgagaacuucaaccagcacgaggugcuccuggcgccgcugcucuccgccgggaucuucggcgccgaccccauccacagccugcgggugugcgucgacaccgugcgcaccaacguguaccuggccgucuucgacaagaaccucuacgacaagcugguguccagcuuccuggagaugaagagcgagaagcagguggagcagaagaucgccgagauccccaaggaggaggucaagcccuucaucaccgaguccaagccgagcguggagcagcggaagcaggacgacaagaagaucaaggcgugcguggaggaggucacgaccacccucgaggagaccaaguuccugacggagaaccugcuccuguacaucgacaucaacgggaaccugcaccccgacuccgccacccucgugagcgacaucgacaucaccuuccugaagaaggacgcccccuacaucgugggcgacgucgugcaggagggcgugcugaccgccgucgugauccccacgaagaaggccgggggcaccaccgagaugcucgcgaaggcccugcgcaaggugccgaccgacaacuacaucacgaccuaccccgggcagggccugaacggguacaccgucgaggaggccaagaccgugcucaagaagugcaaguccgccuucuacauccugcccagcaucaucuccaacgagaagcaggagauccugggcaccgugagcuggaaccuccgggagaugcuggcgcacgccgaggagacgcgcaagcugaugcccgucugcguggagaccaaggccaucguguccaccauccagcggaaguacaagggcaucaagauccaggagggggucguggacuacggcgcccgcuucuacuucuacaccagcaagacgaccguggccucccugaucaacacccucaacgaccugaacgagacccuggucacgaugccgcucggguacgugacccacggccugaaccuggaggaggcggcccgguacaugcgcagccucaaggugcccgccaccgucuccgugagcucccccgacgccgugaccgccuacaacggguaccugacgagcuccagcaagacccccgaggagcacuucaucgagaccaucucccuggcgggcagcuacaaggacuggagcuacuccggccagagcacccagcucgggaucgaguuccugaagcggggcgacaaguccgucuacuacacgagcaacccgaccaccuuccaccuggacggggaggugaucaccuucgacaaccucaagacgcugcugucccuccgcgaggugcggaccaucaaggucuucaccaccguggacaacaucaaccugcacacgcagguggucgacaugagcaugaccuacggccagcaguucggccccaccuaccuggacggggccgacgugaccaagaucaagccccacaacucccacgagggcaagacguucuacgugcucccgaacgacgacacccugcgcgucgaggccuucgaguacuaccacaccaccgaccccagcuuccuggggcgguacauguccgcccucaaccacacgaagaaguggaaguacccccaggugaacggccugaccagcaucaagugggccgacaacaacugcuaccuggcgaccgcccuccugacccugcagcagaucgagcucaaguucaaccccccggcccugcaggacgccuacuaccgcgcgcgggccggggaggccgccaacuucugcgcccugauccucgcguacugcaacaagacggugggcgagcugggcgacguccgcgagaccauguccuaccuguuccagcacgccaaccucgacagcugcaagcgggugcugaacgucgugugcaagaccugcgggcagcagcagaccacccugaagggcguggaggccgucauguacauggggacgcucuccuacgagcaguucaagaagggcgugcagauccccugcaccugcgggaagcaggccaccaaguaccuggugcagcaggagagccccuucgucaugauguccgcccccccggcgcaguacgagcugaagcacggcaccuucacgugcgccagcgaguacaccggcaacuaccagugcgggcacuacaagcacaucaccuccaaggagacccucuacugcaucgacggcgcccugcugacgaagagcagcgaguacaaggggcccaucaccgacguguucuacaaggagaacuccuacaccaccacgaucaagcccgugaccuacaagcucgacggcgucgugugcaccgagaucgaccccaagcuggacaacuacuacaagaaggacaacagcuacuucaccgagcagccgaucgaccuggugcccaaccagcccuaccccaacgccuccuucgacaacuucaaguucgucugcgacaacaucaaguucgccgacgaccucaaccagcugacgggguacaagaagccggcgagccgcgagcugaaggugaccuucuuccccgaccucaacggcgacguggucgccaucgacuacaagcacuacacccccuccuucaagaagggcgccaagcugcugcacaagcccaucguguggcacgugaacaacgccaccaacaaggcgacguacaagccgaacaccuggugcauccggugccucuggagcaccaagcccgucgagaccuccaacagcuucgacgugcugaaguccgaggacgcccaggggauggacaaccuggccugcgaggaccucaagcccgugagcgaggaggucguggagaaccccacgauccagaaggacgugcuggagugcaacgucaagaccaccgagguggugggcgacaucauccugaagccggccaacaacucccucaagaucaccgaggaggucgggcacacggaccugauggccgcguacguggacaacagcucccugaccaucaagaagcccaacgagcucagccgcgugcugggccugaagacccucgccacccacgggcuggccgccgucaacuccgugcccugggacacgaucgccaacuacgcgaagccguuccugaacaagguggucagcaccaccaccaacaucgugacgcgcugccucaaccgggugugcaccaacuacaugcccuacuucuucacccugcugcuccagcugugcaccuucacccgcuccacgaacagccggaucaaggccuccaugcccaccaccaucgccaagaacaccgucaagagcgugggcaaguucugccuggaggccagcuucaacuaccucaagucccccaacuucagcaagcugaucaacaucaucaucugguuccugcuccuguccgugugccugggcagccucaucuacuccacggccgcgcuggggguccugaugagcaaccucggcaugccguccuacugcaccggguaccgcgagggcuaccugaacagcaccaacgugaccaucgccacguacugcaccggcuccauccccugcagcgugugccuguccgggcucgacagccuggacaccuaccccucccuggagaccauccagaucacgaucagcuccuucaagugggaccucaccgccuucggccuggucgccgagugguuccuggccuacauccucuucacccgguucuucuacgugcuggggcuggcggccaucaugcagcucuucuucagcuacuucgccgugcacuucaucuccaacagcuggcugauguggcugaucaucaaccugguccagauggcccccaucuccgcgauggugcgcauguacaucuucuucgccagcuucuacuacguguggaagagcuacguccacgugguggacggcugcaacuccagcaccugcaugaugugcuacaagcggaaccgcgccacgcgggucgagugcaccaccaucgugaacgggguccgccgguccuucuacguguacgccaacggcggcaagggguucugcaagcuccacaacuggaacugcgugaacugcgacaccuucugcgccggcagcacguucaucuccgacgaggucgcgcgcgaccugagccugcaguucaagcggccgaucaaccccaccgaccaguccagcuacaucguggacuccgugaccgucaagaacgggagcauccaccucuacuucgacaaggccggccagaagaccuacgagcgccacucccugagccacuucgugaaccuggacaaccuccgggccaacaacacgaaggggucccugcccaucaacgugaucgucuucgacggcaagagcaagugcgaggaguccagcgccaaguccgccagcguguacuacucccagcugaugugccagcccauccuccugcuggaccaggcgcucgugagcgacgucggcgacagcgccgagguggccgugaagauguucgacgccuacgucaacaccuucuccagcaccuucaacgugccgauggagaagcugaagacccugguggccacggcggaggccgagcucgccaagaacgucucccuggacaacgugcugagcaccuucaucuccgccgcgcgccagggguucguggacagcgacgucgagaccaaggacgugguggagugcuucaagcucucccaccagagcgacaucgaggucaccggcgacuccugcaacaacuacaugcugacguacaacaagguggagaacaugaccccccgggaccugggggccugcaucgacugcagcgcccgccacaucaacgcccagguggccaagucccacaacaucgcgcucaucuggaacgucaaggacuucaugagccuguccgagcagcugcggaagcagauccgcagcgccgccaagaagaacaaccuccccuucaagcugaccugcgccaccacgcgccagguggugaacgucgugaccaccaagaucgcccugaagggcgggugaggacuagucccuguucccagagcccacuuuuuuuucuuuuuuugaaauaaaauagccugucuuucagaucucaaaggcucuuuucagagccaccaaaaaaaaaaaaaaaaaaaaaaaaaaaaaaaaaaaaaaaaaaaaaaaaaaaaaaaaaaaaaaaaaaaaaaaaaaaaaaaaaaaaaaaaaaaaaaaaaaaaa

SEQ ID NO: 20030 - RNA, 6113 nt, Artificial Sequence
  SARS-CoV-2__MT520543.1__non-structural protein 3 (NSP3) mRNA gc
aggagagucccgcagucggcguccagcggcucugcuuguucgugugugugucguugcaggccuuauucaagcuuaccauggcccccaccaaggugaccuucggcgacgacacggucaucgaggugcagggguacaagagcgugaacaucaccuucgagcuggacgagcgcaucgacaagguccucaacgagaagugcuccgccuacaccguggagcugggcaccgaggugaacgaguucgcgugcgucguggccgacgccgugaucaagacgcugcagccggucagcgagcuccugaccccccuggggaucgaccucgacgagugguccauggccaccuacuaccuguucgacgagagcggcgaguucaagcuggccucccacauguacugcagcuucuacccccccgacgaggacgaggaggagggggacugcgaggaggaggaguucgagccguccacccaguacgaguacggcacggaggacgacuaccagggcaagccccucgaguucggggcgaccagcgccgcccugcagcccgaggaggagcaggaggaggacuggcuggacgacgacucccagcagaccgugggccagcaggacgggagcgaggacaaccagaccacgaccauccagaccaucguggagguccagccccagcucgagauggagcugaccccgguggugcagacgaucgaggucaacuccuucagcggcuaccugaagcucaccgacaacguguacaucaagaacgccgacaucguggaggaggcgaagaaggucaagcccaccgugguggucaacgccgccaacguguaccugaagcacgggggcggcguggccggggcccugaacaaggcgaccaacaacgccaugcaggucgaguccgacgacuacaucgccacgaacggcccccucaagguggggggcagcugcguccuguccggccacaaccuggccaagcacugccuccacgugguggggcccaacgucaacaagggcgaggacauccagcugcugaagagcgccuacgagaacuucaaccagcacgaggugcuccuggcgccgcugcucuccgccgggaucuucggcgccgaccccauccacagccugcgggugugcgucgacaccgugcgcaccaacguguaccuggccgucuucgacaagaaccucuacgacaagcugguguccagcuuccuggagaugaagagcgagaagcagguggagcagaagaucgccgagauccccaaggaggaggucaagcccuucaucaccgaguccaagccgagcguggagcagcggaagcaggacgacaagaagaucaaggcgugcguggaggaggucacgaccacccucgaggagaccaaguuccugacggagaaccugcuccuguacaucgacaucaacgggaaccugcaccccgacuccgccacccucgugagcgacaucgacaucaccuuccugaagaaggacgcccccuacaucgugggcgacgucgugcaggagggcgugcugaacgccgucgugauccccaccaagaaggccgggggcacgaccgagaugcucgcgaaggcccugcgcaaggugccgaccgacaacuacaucaccacguaccccgggcagggccugaacggguacaccgucgaggaggccaagaccgugcucaagaagugcaaguccgccuucuacauccugcccagcaucaucuccaacgagaagcaggagauccugggcaccgugagcuggaaccuccgggagaugcuggcgcacgccgaggagacccgcaagcugaugcccgucugcguggagacgaaggccaucguguccaccauccagcggaaguacaagggcaucaagauccaggagggggucguggacuacggcgcccgcuucuacuucuacaccagcaagaccacgguggccucccugaucaacacccucaacgaccugaacgagacccuggucaccaugccgcucggguacgugacgcacggccugaaccuggaggaggcggcccgguacaugcgcagccucaaggugcccgccaccgucuccgugagcucccccgacgccgugaccgccuacaacggguaccugaccagcuccagcaagacgcccgaggagcacuucaucgagaccaucucccuggcgggcagcuacaaggacuggagcuacuccggccagagcacccagcucgggaucgaguuccugaagcggggcgacaaguccgucuacuacaccagcaacccgacgaccuuccaccuggacggggaggugaucaccuucgacaaccucaagacccugcugucccuccgcgaggugcggacgaucaaggucuucaccaccguggacaacaucaaccugcacacccagguggucgacaugagcaugacguacggccagcaguucggccccaccuaccuggacggggccgacgugaccaagaucaagccccacaacucccacgagggcaagaccuucuacgugcucccgaacgacgacacgcugcgcgucgaggccuucgaguacuaccacaccaccgaccccagcuuccuggggcgguacauguccgcccucaaccacaccaagaaguggaaguacccccaggugaacggccugacgagcaucaagugggccgacaacaacugcuaccuggcgaccgcccuccugacccugcagcagaucgagcucaaguucaaccccccggcccugcaggacgccuacuaccgcgcgcgggccggggaggccgccaacuucugcgcccugauccucgcguacugcaacaagaccgugggcgagcugggcgacguccgcgagacgauguccuaccuguuccagcacgccaaccucgacagcugcaagcgggugcugaacgucgugugcaagaccugcgggcagcagcagaccacccugaagggcguggaggccgucauguacauggggacccucuccuacgagcaguucaagaagggcgugcagauccccugcacgugcgggaagcaggccaccaaguaccuggugcagcaggagagccccuucgucaugauguccgcccccccggcgcaguacgagcugaagcacggcaccuucaccugcgccagcgaguacacgggcaacuaccagugcgggcacuacaagcacaucaccuccaaggagacccucuacugcaucgacggcgcccugcugaccaagagcagcgaguacaaggggcccaucacggacguguucuacaaggagaacuccuacaccaccaccaucaagcccgugacguacaagcucgacggcgucgugugcaccgagaucgaccccaagcuggacaacuacuacaagaaggacaacagcuacuucaccgagcagccgaucgaccuggugcccaaccagcccuaccccaacgccuccuucgacaacuucaaguucgucugcgacaacaucaaguucgccgacgaccucaaccagcugaccggguacaagaagccggcgagccgcgagcugaaggugacguucuuccccgaccucaacggcgacguggucgccaucgacuacaagcacuacacccccuccuucaagaagggcgccaagcugcugcacaagcccaucguguggcacgugaacaacgccaccaacaaggcgaccuacaagccgaacacguggugcauccggugccucuggagcaccaagcccgucgagaccuccaacagcuucgacgugcugaaguccgaggacgcccaggggauggacaaccuggccugcgaggaccucaagcccgugagcgaggaggucguggagaaccccaccauccagaaggacgugcuggagugcaacgucaagacgaccgagguggugggcgacaucauccugaagccggccaacaacucccucaagaucaccgaggaggucgggcacaccgaccugauggccgcguacguggacaacagcucccugacgaucaagaagcccaacgagcucagccgcgugcugggccugaagacccucgccacccacgggcuggccgccgucaacuccgugcccugggacaccaucgccaacuacgcgaagccguuccugaacaagguggucagcacgaccaccaacaucgugacccgcugccucaaccgggugugcacgaacuacaugcccuacuucuucacccugcugcuccagcugugcaccuucacccgcuccaccaacagccggaucaaggccuccaugcccacgaccaucgccaagaacaccgucaagagcgugggcaaguucugccuggaggccagcuucaacuaccucaagucccccaacuucagcaagcugaucaacaucaucaucugguuccugcuccuguccgugugccugggcagccucaucuacuccaccgccgcgcuggggguccugaugagcaaccucggcaugccguccuacugcacgggguaccgcgagggcuaccugaacagcaccaacgugaccaucgccaccuacugcacgggcuccauccccugcagcgugugccuguccgggcucgacagccuggacaccuaccccucccuggagaccauccagaucaccaucagcuccuucaagugggaccucacggccuucggccuggucgccgagugguuccuggccuacauccucuucacccgguucuucuacgugcuggggcuggcggccaucaugcagcucuucuucagcuacuucgccgugcacuucaucuccaacagcuggcugauguggcugaucaucaaccugguccagauggcccccaucuccgcgauggugcgcauguacaucuucuucgccagcuucuacuacguguggaagagcuacguccacgugguggacggcugcaacuccagcaccugcaugaugugcuacaagcggaaccgcgccacccgggucgagugcacgaccaucgugaacgggguccgccgguccuucuacguguacgccaacggcggcaagggguucugcaagcuccacaacuggaacugcgugaacugcgacaccuucugcgccggcagcaccuucaucuccgacgaggucgcgcgcgaccugagccugcaguucaagcggccgaucaaccccacggaccaguccagcuacaucguggacuccgugaccgucaagaacgggagcauccaccucuacuucgacaaggccggccagaagaccuacgagcgccacucccugagccacuucgugaaccuggacaaccuccgggccaacaacaccaaggggucccugcccaucaacgugaucgucuucgacggcaagagcaagugcgaggaguccagcgccaaguccgccagcguguacuacucccagcugaugugccagcccauccuccugcuggaccaggcgcucgugagcgacgucggcgacagcgccgagguggccgugaagauguucgacgccuacgucaacacguucuccagcaccuucaacgugccgauggagaagcugaagacccugguggccaccgcggaggccgagcucgccaagaacgucucccuggacaacgugcugagcacguucaucuccgccgcgcgccagggguucguggacagcgacgucgagaccaaggacgugguggagugccucaagcugucccaccagagcgacaucgaggucaccggcgacuccugcaacaacuacaugcugaccuacaacaagguggagaacaugacgccccgggaccucggggccugcaucgacugcagcgcccgccacaucaacgcccagguggccaagucccacaacaucgcgcugaucuggaacgucaaggacuucaugagccuguccgagcagcuccggaagcagauccgcagcgccgccaagaagaacaaccugcccuucaagcugaccugcgccaccacccgccagguggugaacgucgugacgaccaagaucgcccucaagggcgggugaggacuagucccuguucccagagcccacuuuuuuuucuuuuuuugaaauaaaauagccugucuuucagaucucaaaggcucuuuucagagccaccaaaaaaaaaaaaaaaaaaaaaaaaaaaaaaaaaaaaaaaaaaaaaaaaaaaaaaaaaaaaaaaaaaaaaaaaaaaaaaaaaaaaaaaaaaaaaaaaaaaaa

SEQ ID NO: 20031 - RNA, 6113 nt, Artificial Sequence
  SARS-CoV-2__MT560667.1__non-structural protein 3 (NSP3) mRNA gc
aggagagucccgcagucggcguccagcggcucugcuuguucgugugugugucguugcaggccuuauucaagcuuaccauggcccccaccaaggugaccuucggcgacgacacggucaucgaggugcagggguacaagagcgugaacaucaccuucgagcuggacgagcgcaucgacaagguccucaacgagaagugcuccgccuacaccguggagcugggcaccgaggugaacgaguucgcgugcgucguggccgacgccgugaucaagacgcugcagccggucagcgagcuccugaccccccuggggaucgaccucgacgagugguccauggccaccuacuaccuguucgacgagagcggcgaguucaagcuggccucccacauguacugcagcuucuacccccccgacgaggacgaggaggagggggacugcgaggaggaggaguucgagccguccacccaguacgaguacggcacggaggacgacuaccagggcaagccccucgaguucggggcgaccagcgccgcccugcagcccgaggaggagcaggaggaggacuggcuggacgacgacucccagcagaccgugggccagcaggacgggagcgaggacaaccagaccacgaccauccagaccaucguggagguccagccccagcucgagauggagcugaccccgguggugcagacgaucgaggucaacuccuucagcggcuaccugaagcucaccgacaacguguacaucaagaacgccgacaucguggaggaggcgaagaaggucaagcugaccgugguggucaacgccgccaacguguaccugaagcacgggggcggcguggccggggcccucaacaaggcgaccaacaacgccaugcaggucgaguccgacgacuacaucgccacgaacggcccccugaagguggggggcagcugcguccuguccggccacaaccucgccaagcacugccugcacgugguggggcccaacgucaacaagggcgaggacauccagcugcucaagagcgccuacgagaacuucaaccagcacgaggugcugcuggcgccccuccuguccgccgggaucuucggcgccgacccgauccacagccugcgggugugcgucgacaccgugcgcaccaacguguaccucgccgucuucgacaagaaccuguacgacaagcugguguccagcuuccucgagaugaagagcgagaagcagguggagcagaagaucgccgagauccccaaggaggaggucaagcccuucaucaccgaguccaagcccagcguggagcagcggaagcaggacgacaagaagaucaaggcgugcguggaggaggucacgaccacccuggaggagaccaaguuccugacggagaaccuccugcuguacaucgacaucaacgggaaccuccacccggacuccgccacccuggugagcgacaucgacaucaccuuccugaagaaggacgcccccuacaucgugggcgacgucgugcaggagggcgugcucaccgccgucgugauccccacgaagaaggccgggggcaccaccgagaugcuggcgaaggcccugcgcaaggugcccaccgacaacuacaucacgaccuacccggggcagggccucaacggguacaccgucgaggaggccaagaccgugcugaagaagugcaaguccgccuucuacauccugcccagcaucaucuccaacgagaagcaggagauccucggcaccgugagcuggaaccugcgggagaugcuggcgcacgccgaggagacgcgcaagcugaugcccgucugcguggagaccaaggccaucguguccaccauccagcggaaguacaagggcaucaagauccaggagggggucguggacuacggcgcccgcuucuacuucuacaccagcaagacgaccguggccucccucaucaacacccugaacgaccugaacgagacccucgucacgaugccccugggguacgugacccacggccugaaccucgaggaggcggcccgguacaugcgcagccugaaggugccggccaccgucuccgugagcucccccgacgccgugaccgccuacaacggguaccugacgagcuccagcaagacccccgaggagcacuucaucgagaccaucucccucgcgggcagcuacaaggacuggagcuacuccggccagagcacccagcuggggaucgaguuccugaagcggggcgacaaguccgucuacuacacgagcaaccccaccaccuuccaccucgacggggaggugaucaccuucgacaaccugaagacgcugcucucccugcgcgaggugcggaccaucaaggucuucaccaccguggacaacaucaaccugcacacgcagguggucgacaugagcaugaccuacggccagcaguucggcccgaccuaccucgacggggccgacgugaccaagaucaagccccacaacucccacgagggcaagacguucuacgugcugcccaacgacgacacccugcgcgucgaggccuucgaguacuaccacaccaccgacccgagcuuccucgggcgguacauguccgcccugaaccacacgaagaaguggaaguacccccaggugaacggccugaccagcaucaagugggccgacaacaacugcuaccucgcgaccgcccugcugacccuccagcagaucgagcugaaguucaacccccccgcccugcaggacgccuacuaccgcgcgcgggccggggaggccgccaacuucugcgcccucauccuggcguacugcaacaagacggugggcgagcugggcgacguccgcgagaccauguccuaccucuuccagcacgccaaccuggacagcugcaagcgggugcugaacgucgugugcaagaccugcgggcagcagcagaccacccucaagggcguggaggccgucauguacauggggacgcuguccuacgagcaguucaagaagggcgugcagaucccgugcaccugcgggaagcaggccaccaaguaccuggugcagcaggagagccccuucgucaugauguccgccccccccgcgcaguacgagcucaagcacggcaccuucacgugcgccagcgaguacaccggcaacuaccagugcgggcacuacaagcacaucaccuccaaggagacccuguacugcaucgacggcgcccugcucacgaagagcagcgaguacaaggggccgaucaccgacguguucuacaaggagaacuccuacaccaccacgaucaagcccgugaccuacaagcuggacggcgucgugugcaccgagaucgaccccaagcuggacaacuacuacaagaaggacaacagcuacuucaccgagcagcccaucgaccucgugccgaaccagcccuaccccaacgccuccuucgacaacuucaaguucgucugcgacaacaucaaguucgccgacgaccugaaccagcugacgggguacaagaagcccgcgagccgcgagcucaaggugaccuucuucccggaccugaacggcgacguggucgccaucgacuacaagcacuacacccccuccuucaagaagggcgccaagcugcuccacaagcccaucguguggcacgugaacaacgccaccaacaaggcgacguacaagcccaacaccuggugcauccggugccuguggagcaccaagccggucgagaccuccaacagcuucgacgugcugaaguccgaggacgcccaggggauggacaaccucgccugcgaggaccugaagcccgugagcgaggaggucguggagaaccccacgauccagaaggacgugcuggagugcaacgucaagaccaccgagguggugggcgacaucauccucaagcccgccaacaacucccugaagaucaccgaggaggucgggcacacggaccugauggccgcguacguggacaacagcucccucaccaucaagaagccgaacgagcugagccgcgugcugggccucaagacccuggccacccacgggcuggccgccgucaacuccgugcccugggacacgaucgccaacuacgcgaagcccuuccucaacaagguggucagcaccaccaccaacaucgugacgcgcugccugaaccgggugugcaccaacuacaugccguacuucuucacccugcuccugcagcugugcaccuucacccgcuccacgaacagccggaucaaggccuccaugcccaccaccaucgccaagaacaccgucaagagcgugggcaaguucugccucgaggccagcuucaacuaccugaagucccccaacuucagcaagcugaucaacaucaucaucugguuccuccugcuguccgugugccucggcagccugaucuacuccacggccgcgcuggggguccucaugagcaaccugggcaugcccuccuacugcaccggguaccgcgagggcuaccugaacagcaccaacgugaccaucgccacguacugcaccggcuccaucccgugcagcgugugccucuccgggcuggacagccuggacaccuaccccucccucgagaccauccagaucacgaucagcuccuucaagugggaccugaccgccuucggccuggucgccgagugguuccucgccuacauccuguucacccgguucuucuacgugcuggggcucgcggccaucaugcagcuguucuucagcuacuucgccgugcacuucaucuccaacagcuggcugauguggcugaucaucaaccucguccagauggcccccaucuccgcgauggugcgcauguacaucuucuucgccagcuucuacuacguguggaagagcuacguccacgugguggacggcugcaacuccagcaccugcaugaugugcuacaagcggaaccgcgccacgcgggucgagugcaccaccaucgugaacgggguccgccgguccuucuacguguacgccaacggcggcaagggguucugcaagcugcacaacuggaacugcgugaacugcgacaccuucugcgccggcagcacguucaucuccgacgaggucgcgcgcgaccugagccuccaguucaagcggcccaucaacccgaccgaccaguccagcuacaucguggacuccgugaccgucaagaacgggagcauccaccuguacuucgacaaggccggccagaagaccuacgagcgccacucccugagccacuucgugaaccucgacaaccugcgggccaacaacacgaaggggucccugcccaucaacgugaucgucuucgacggcaagagcaagugcgaggaguccagcgccaaguccgccagcguguacuacucccagcucaugugccagcccauccugcugcucgaccaggcgcuggugagcgacgucggcgacagcgccgagguggccgugaagauguucgacgccuacgucaacaccuucuccagcaccuucaacgugcccauggagaagcugaagacccucguggccacggcggaggccgagcuggccaagaacgucucccuggacaacgugcucagcaccuucaucuccgccgcgcgccagggguucguggacagcgacgucgagaccaaggacgugguggagugccugaagcugucccaccagagcgacaucgaggucaccggcgacuccugcaacaacuacaugcucacguacaacaagguggagaacaugaccccgcgggaccugggggccugcaucgacugcagcgcccgccacaucaacgcccagguggccaagucccacaacaucgcgcugaucuggaacgucaaggacuucaugagccucuccgagcagcugcggaagcagauccgcagcgccgccaagaagaacaaccugcccuucaagcucaccugcgccaccacgcgccagguggugaacgucgugaccaccaagaucgcccugaagggcgggugaggacuagucccuguucccagagcccacuuuuuuuucuuuuuuugaaauaaaauagccugucuuucagaucucaaaggcucuuuucagagccaccaaaaaaaaaaaaaaaaaaaaaaaaaaaaaaaaaaaaaaaaaaaaaaaaaaaaaaaaaaaaaaaaaaaaaaaaaaaaaaaaaaaaaaaaaaaaaaaaaaaaa

SEQ ID NO: 20032 - RNA, 6113 nt, Artificial Sequence
  SARS-CoV-2__MT560679.1__non-structural protein 3 (NSP3) mRNA gc
aggagagucccgcagucggcguccagcggcucugcuuguucgugugugugucguugcaggccuuauucaagcuuaccauggcccccaccaaggugaccuucggcgacgacacggucaucgaggugcagggguacaagagcgugaacaucaccuucgagcuggacgagcgcaucgacaagguccucaacgagaagugcuccgccuacaccguggagcugggcaccgaggugaacgaguucgcgugcgucguggccgacgccgugaucaagacgcugcagccggucagcgagcuccugaccccccuggggaucgaccucgacgagugguccauggccaccuacuaccuguucgacgagagcggcgaguucaagcuggccucccacauguacugcagcuucuacccccccgacgaggacgaggaggagggggacugcgaggaggaggaguucgagccguccacccaguacgaguacggcacggaggacgacuaccagggcaagccccucgaguucggggcgaccagcgccgcccugcagcccgaggaggagcaggaggaggacuggcuggacgacgacucccagcagaccgugggccagcaggacgggagcgaggacaaccagaccacgaccauccagaccaucguggagguccagccccagcucgagauggagcugaccccgguggugcagacgaucgaggucaacuccuucagcggcuaccugaagcucaccgacaacguguacaucaagaacgccgacaucguggaggaggcgaagaaggucaagcccaccgugguggucaacgccgccaacguguaccugaagcacgggggcggcguggccggggcccugaacaaggcgaccaacaacgccaugcaggucgaguccgacgacuacaucgccacgaacggcccccucaagguggggggcagcugcguccuguccggccacaaccuggccaagcacugccuccacgugguggggcccaacgucaacaagggcgaggacauccagcugcugaagagcgccuacgagaacuucaaccagcacgaggugcuccuggcgccgcugcucuccgccgggaucuucggcgccgaccccauccacagccugcgggugugcgucgacaccgugcgcaccaacguguaccuggccgucuucgacaagaaccucuacgacaagcugguguccagcuuccuggagaugaagagcgagaagcagguggagcagaagaucgccgagauccccaaggaggaggucaagcccuucaucaccgaguccaagccgagcguggagcagcggaagcaggacgacaagaagaucaaggcgugcguggaggaggucacgaccacccucgaggagaccaaguuccugacggagaaccugcuccuguacaucgacaucaacgggaaccugcaccccgacuccgccacccucgugagcgacaucgacaucaccuuccugaagaaggacgcccccuacaucgugggcgacgucgugcaggagggcgugcugaccgucguggugauccccacgaagaaggccgggggcaccaccgagaugcucgccaaggcgcugcgcaaggucccgaccgacaacuacaucacgaccuaccccgggcagggccugaacggguacaccguggaggaggccaagaccgugcucaagaagugcaaguccgccuucuacauccugcccagcaucaucuccaacgagaagcaggagauccugggcaccgucagcuggaaccuccgggagaugcuggcccacgcggaggagacgcgcaagcugaugcccgugugcguggagaccaaggccaucgucuccaccauccagcggaaguacaagggcaucaagauccaggagggggugguggacuacggcgcccgcuucuacuucuacaccagcaagacgaccgucgccucccugaucaacacccucaacgaccugaacgagacccuggugacgaugccgcucggguacgugacccacggccugaaccuggaggaggccgcgcgguacaugcgcagccucaagguccccgccaccguguccgugagcucccccgacgccgucaccgccuacaacggguaccugacgagcuccagcaagacccccgaggagcacuucaucgagaccaucucccuggccggcagcuacaaggacuggagcuacuccggccagagcacccagcucgggaucgaguuccugaagcggggcgacaaguccguguacuacacgagcaacccgaccaccuuccaccuggacggggaggugaucaccuucgacaaccucaagacgcugcugucccuccgcgagguccggaccaucaagguguucaccaccguggacaacaucaaccugcacacgcaggucguggacaugagcaugaccuacggccagcaguucggccccaccuaccuggacggggcggacgugaccaagaucaagccccacaacucccacgagggcaagacguucuacguccucccgaacgacgacacccugcgcguggaggccuucgaguacuaccacaccaccgaccccagcuuccuggggcgguacauguccgcccucaaccacacgaagaaguggaaguacccccaggugaacggccugaccagcaucaagugggccgacaacaacugcuaccuggccaccgcgcuccugacccugcagcagaucgagcucaaguucaaccccccggcccugcaggacgccuacuaccgcgcccgggcgggggaggccgccaacuucugcgcccugauccucgccuacugcaacaagacggucggcgagcugggcgacgugcgcgagaccauguccuaccuguuccagcacgcgaaccucgacagcugcaagcggguccugaacguggugugcaagaccugcgggcagcagcagaccacccugaagggcgucgaggccgugauguacauggggacgcucuccuacgagcaguucaagaagggcgugcagauccccugcaccugcgggaagcaggccaccaaguaccugguccagcaggagagccccuucgugaugauguccgcccccccggcccaguacgagcugaagcacggcaccuucacgugcgcgagcgaguacaccggcaacuaccagugcgggcacuacaagcacaucaccuccaaggagacccucuacugcaucgacggcgcccugcugaucaagagcagcgaguacaaggggcccaucacggacguguucuacaaggagaacuccuacaccaccaccaucaagcccgucacguacaagcucgacggcguggugugcaccgagaucgaccccaagcuggacaacuacuacaagaaggacaacagcuacuucaccgagcagccgaucgaccugguccccaaccagcccuaccccaacgccuccuucgacaacuucaaguucgugugcgacaacaucaaguucgccgacgaccucaaccagcugaccggguacaagaagccggccagccgcgagcugaaggugacguucuuccccgaccucaacggcgacgucguggcgaucgacuacaagcacuacacccccuccuucaagaagggcgccaagcugcugcacaagcccaucguguggcacgucaacaacgccaccaacaaggccaccuacaagccgaacacguggugcauccggugccucuggagcaccaagcccguggagaccuccaacagcuucgacgugcugaaguccgaggacgcgcaggggauggacaaccuggccugcgaggaccucaagcccgucagcgaggaggugguggagaaccccaccauccagaaggacguccuggagugcaacgugaagacgaccgagguggucggcgacaucauccugaagccggccaacaacucccucaagaucaccgaggagguggggcacaccgaccugauggccgccuacguggacaacagcucccugacgaucaagaagcccaacgagcucagccgcguccugggccugaagacccucgcgacccacgggcuggccgccgugaacuccgugcccugggacaccaucgccaacuacgccaagccguuccugaacaaggucgugagcacgaccaccaacaucgugacccgcugccucaaccgggucugcacgaacuacaugcccuacuucuucacccugcugcuccagcugugcaccuucacccgcuccaccaacagccggaucaaggcguccaugcccacgaccaucgccaagaacaccgugaagagcgugggcaaguucugccuggaggccagcuucaacuaccucaagucccccaacuucagcaagcugaucaacaucaucaucugguuccugcuccuguccgucugccugggcagccucaucuacuccaccgccgcccugggggugcugaugagcaaccucggcaugccguccuacugcacgggguaccgcgagggcuaccugaacagcaccaacgugaccaucgcgaccuacugcacgggcuccauccccugcagcgucugccuguccgggcucgacagccuggacaccuaccccucccuggagaccauccagaucaccaucagcuccuucaagugggaccucacggccuucggccugguggccgagugguuccuggccuacauccucuucacccgguucuucuacgugcuggggcuggccgcgaucaugcagcucuucuucagcuacuucgccguccacuucaucuccaacagcuggcugauguggcugaucaucaaccuggugcagauggcccccaucuccgccauggugcgcauguacaucuucuucgcgagcuucuacuacgucuggaagagcuacgugcacguggucgacggcugcaacuccagcaccugcaugaugugcuacaagcggaaccgcgccacccggguggagugcacgaccaucgucaacggggugcgccgguccuucuacguguacgccaacggcggcaagggguucugcaagcuccacaacuggaacugcgucaacugcgacaccuucugcgccggcagcaccuucaucuccgacgagguggcccgcgaccugagccugcaguucaagcggccgaucaaccccacggaccaguccagcuacaucguggacuccgucaccgugaagaacgggagcauccaccucuacuucgacaaggcgggccagaagaccuacgagcgccacucccugagccacuucgugaaccuggacaaccuccgggccaacaacaccaaggggucccugcccaucaacgucaucguguucgacggcaagagcaagugcgaggaguccagcgccaaguccgccagcguguacuacucccagcugaugugccagcccauccuccugcuggaccaggcccucgucagcgacgugggcgacagcgcggagguggccgucaagauguucgacgccuacgugaacacguucuccagcaccuucaacgugccgauggagaagcugaagacccuggucgccaccgccgaggcggagcucgccaagaacgugucccuggacaacgugcugagcacguucaucuccgccgcccgccagggguucgucgacagcgacguggagaccaaggacguggucgagugccucaagcugucccaccagagcgacaucgaggugaccggcgacuccugcaacaacuacaugcugaccuacaacaagguggagaacaugacgccccgggaccucggggcgugcaucgacugcagcgcccgccacaucaacgcccaggucgccaagucccacaacaucgcccugaucuggaacgugaaggacuucaugagccuguccgagcagcuccggaagcagauccgcagcgcggccaagaagaacaaccugcccuucaagcugaccugcgccaccacccgccagguggucaacguggugacgaccaagaucgcccucaagggcgggugaggacuagucccuguucccagagcccacuuuuuuuucuuuuuuugaaauaaaauagccugucuuucagaucucaaaggcucuuuucagagccaccaaaaaaaaaaaaaaaaaaaaaaaaaaaaaaaaaaaaaaaaaaaaaaaaaaaaaaaaaaaaaaaaaaaaaaaaaaaaaaaaaaaaaaaaaaaaaaaaaaaaa

SEQ ID NO: 20033 - RNA, 6113 nt, Artificial Sequence
  SARS-CoV-2__MT558672.1__non-structural protein 3 (NSP3) mRNA gc
aggagagucccgcagucggcguccagcggcucugcuuguucgugugugugucguugcaggccuuauucaagcuuaccauggcccccaccaaggugaccuucggcgacgacacggucaucgaggugcagggguacaagagcgugaacaucaccuucgagcuggacgagcgcaucgacaagguccucaacgagaagugcuccgccuacaccguggagcugggcaccgaggugaacgaguucgcgugcgucguggccgacgccgugaucaagacgcugcagccggucagcgagcuccugaccccccuggggaucgaccucgacgagugguccauggccaccuacuaccuguucgacgagagcggcgaguucaagcuggccucccacauguacugcagcuucuacccccccgacgaggacgaggaggagggggacugcgaggaggaggaguucgagccguccacccaguacgaguacggcacggaggacgacuaccagggcaagccccucgaguucggggcgaccagcgccgcccugcagcccgaggaggagcaggaggaggacuggcuggacgacgacucccagcagaccgugggccagcaggacgggagcgaggacaaccagaccacgaccauccagaccaucguggagguccagccccagcucgagauggagcugaccccgguggugcagacgaucgaggucaacuccuucagcggcuaccugaagcucaccgacaacguguacaucaagaacgccgacaucguggaggaggcgaagaaggucaagcccaccgugguggucaacgccgccaacguguaccugaagcacgggggcggcguggccggggcccugaacaaggcgaccaacaacgccaugcaggucgaguccgacgacuacaucgccacgaacggcccccucaagguggggggcagcugcguccuguccggccacaaccuggccaagcacugccuccacgugguggggcccaacgucaacaagggcgaggacauccagcugcugaagagcgccuacgagaacuucaaccagcacgaggugcuccuggcgccgcugcucuccgccgggaucuucggcgccgaccccauccacagccugcgggugugcgucgacaccgugcgcaccaacguguaccuggccgucuucgacaagaaccucuacgacaagcugguguccagcuuccuggagaugaagagcgagaagcagguggagcagaagaucgccgagauccccaaggaggaggucaagcccuucaucaccgaguccaagccgagcguggagcagcggaagcaggacgacaagaagaucaaggcgugcguggaggaggucacgaccacccucgaggagaccaaguuccugacggagaaccugcuccuguacaucgacaucaacgggaaccugcaccccgacuccgccacccucgugagcgacaucgacaucaccuuccugaagaaggacgcccccuacaucgugggcgacgucgugcaggagggcgugcugaccgccgucgugauccccacgaagaaggccgggggcaccaccgagaugcucgcgaaggcccugcgcaaggugccgaccgacaacuacaucacgaccuaccccgggcagggccugaacggguacaccgucgaggaggccaagaccgugcucaagaagugcaaguccgccuucuacauccugcccagcaucaucuccaacgagaagcaggagauccugggcaccgugagcuggaaccuccgggagaugcuggcgcacgccgaggagacgcgcaagcugaugcccgucugcguggagaccaaggccaucguguccaccauccagcggaaguacaagggcaucaagauccaggagggggucguggacuacggcgcccgcuucuacuucuacaccagcaagacgaccguggccucccugaucaacacccucaacgaccugaacgagacccuggucacgaugccgcucggguacgugacccacggccugaaccuggaggaggcggcccgguacaugcgcagccucaaggugcccgccaccgucuccgugagcucccccgacgccgugaccgccuacaacggguaccugacgagcuccagcaagacccccgaggagcacuucaucgagaccaucucccuggcgggcagcuacaaggacuggagcuacuccggccagagcacccagcucgggaucgaguuccugaagcggggcgacaaguccgucuacuacacgagcaacccgaccaccuuccaccuggacggggaggugaucaccuucgacaaccucaagacgcugcugucccuccgcgaggugcggaccaucaaggucuucaccaccguggacaacaucaaccugcacacgcagguggucgacaugagcaugaccuacggccagcaguucggccccaccuaccuggacggggccgacgugaccaagaucaagccccacaacucccacgagggcaagacguucuacgugcucccgaacgacgacacccugcgcgucgaggccuucgaguacuaccacaccaccgaccccagcuuccuggggcgguacauguccgcccucaaccacacgaagaaguggaaguacccccaggugaacggccugaccagcaucaagugggccgacaacaacugcuaccuggcgaccgcccuccugacccugcagcagaucgagcucaaguucaaccccccggcccugcaggacgccuacuaccgcgcgcgggccggggaggccgccaacuucugcgcccugauccucgcguacugcaacaagacggugggcgagcugggcgacguccgcgagaccauguccuaccuguuccagcacgccaaccucgacagcugcaagcgggugcugaacgucgugugcaagaccugcgggcagcagcagaccacccugaagggcguggaggccgucauguacauggggacgcucuccuacgagcaguucaagaagggcgugcagauccccugcaccugcgggaagcaggccaccaaguaccuggugcagcaggagagccccuucgucaugauguccgcccccccggcgcaguacgagcugaagcacggcaccuucacgugcgccagcgaguacaccggcaacuaccagugcgggcacuacaagcacaucaccuccaaggagacccucuacugcaucgacggcgcccugcugacgaagagcagcgaguacaaggggcccaucaccgacguguucuacaaggagaacuccuacaccaccacgaucaagcccgugaccuacaagcucgacggcgucgugugcaccgagaucgaccccaagcuggacaacuacuacaagaaggacaacagcuacuucaccgagcagccgaucgaccuggugcccaaccagcccuaccccaacgccuccuucgacaacuucaaguucgucugcgacaacaucaaguucgccgacgaccucaaccagcugacgggguacaagaagccggcgagccgcgagcugaaggugaccuucuuccccgaccucaacggcgacguggucgccaucgacuacaagcacuacacccccuccuucaagaagggcgccaagcugcugcacaagcccaucguguggcacgugaacaacgccaccaacaaggcgacguacaagccgaacaccuggugcauccggugccucuggagcaccaagcccgucgagaccuccaacagcuucgacgugcugaaguccgaggacgcccaggggauggacaaccuggccugcgaggaccucaagcccgugagcgaggaggucguggagaaccccacgauccagaaggacgugcuggagugcaacgucaagaccaccgagguggugggcgacaucauccugaagccggccaacaacucccucaagaucaccgaggaggucgggcacacggaccugauggccgcguacguggacaacagcucccugaccaucaagaagcccaacgagcucagccgcgugcugggccugaagacccucgccacccacgggcuggccgccgucaacuccgugcccugggacacgaucgccaacuacgcgaagccguuccugaacaagguggucagcaccaccaccaacaucgugacgcgcugccucaaccgggugugcaccaacuacaugcccuacuucuucacccugcugcuccagcugugcaccuucacccgcuccacgaacagccggaucaaggccuccaugcccaccaccaucgccaagaacaccgucaagagcgugggcaaguucugccuggaggccagcuucaacuaccucaagucccccaacuucagcaagcugaucaacaucaucaucugguuccugcuccuguccgugugccugggcagccucaucuacuccacggccgcgcuggggguccugaugagcaaccucggcaugccguccuacugcaccggguaccgcgagggcuaccugaacagcaccaacgugaccaucgccacguacugcaccggcuccauccccugcagcgugugccuguccgggcucgacagccuggacaccuaccccucccuggagaccauccagaucacgaucagcuccuucaagugggaccucaccgccuucggccuggucgccgagugguuccuggccuacauccucuucacccgguucuucuacgugcuggggcuggcggccaucaugcagcucuucuucagcuacuucgccgugcacuucaucuccaacagcuggcugauguggcugaucaucaaccugguccagauggcccccaucuccgcgauggugcgcauguacaucuucuucgccagcuucuacuacguguggaagagcuacguccacgugguggacggcugcaacuccagcaccugcaugaugugcuacaagcggaaccgcgccacgcgggucgagugcaccaccaucgugaacgggguccgccgguccuucuacguguacgccaacggcggcaagggguucugcaagcuccacaacuggaacugcgugaacugcgacaccuucugcgccggcagcacguucaucuccgacgaggucgcgcgcgaccugagccugcaguucaagcggccgaucaaccccaccgaccaguccagcuacaucguggacuccgugaccgucaagaacgggagcauccaccucuacuucgacaaggccggccagaagaccuacgagcgccacucccugagccacuucgugaaccuggacaaccuccgggccaacaacacgaaggggucccugcccaucaacgugaucgucuucgacggcaagagcaagugcgaggaguccagcgccaaguccgccagcguguacuacucccagcugaugugccagcccauccuccugcuggaccaggcgcucgugagcgacgucggcgacagcgccgagguggccgugaagauguucgacgccuacgucaacaccuucuccagcaccuucaacgugccgauggagaagcugaagacccugguggccacggcggaggccgagcucgccaagaacgucucccuggacaacgugcugagcaccuucaucuccgccgcgcgccagggguucguggacagcgacgucgagaccaaggacgugguggagugccucaagcuguccuaccagagcgacaucgaggucaccggcgacuccugcaacaacuacaugcugacguacaacaagguggagaacaugaccccccgggaccucggggccugcaucgacugcagcgcccgccacaucaacgcccagguggccaagucccacaacaucgcgcugaucuggaacgucaaggacuucaugagccuguccgagcagcuccggaagcagauccgcagcgccgccaagaagaacaaccugcccuucaagcugaccugcgccaccacgcgccagguggugaacgucgugaccaccaagaucgcccucaagggcgggugaggacuagucccuguucccagagcccacuuuuuuuucuuuuuuugaaauaaaauagccugucuuucagaucucaaaggcucuuuucagagccaccaaaaaaaaaaaaaaaaaaaaaaaaaaaaaaaaaaaaaaaaaaaaaaaaaaaaaaaaaaaaaaaaaaaaaaaaaaaaaaaaaaaaaaaaaaaaaaaaaaaaa

SEQ ID NO: 20034 - RNA, 6113 nt, Artificial Sequence
  SARS-CoV-2__MT558681.1__non-structural protein 3 (NSP3) mRNA gc
aggagagucccgcagucggcguccagcggcucugcuuguucgugugugugucguugcaggccuuauucaagcuuaccauggcccccaccaaggugaccuucggcgacgacacggucaucgaggugcagggguacaagagcgugaacaucaccuucgagcuggacgagcgcaucgacaagguccucaacgagaagugcuccgccuacaccguggagcugggcaccgaggugaacgaguucgcgugcgucguggccgacgccgugaucaagacgcugcagccggucagcgagcuccugaccccccuggggaucgaccucgacgagugguccauggccaccuacuaccuguucgacgagagcggcgaguucaagcuggccucccacauguacugcagcuucuacccccccgacgaggacgaggaggagggggacugcgaggaggaggaguucgagccguccacccaguacgaguacggcacggaggacgacuaccagggcaagccccucgaguucggggcgaccagcgccgcccugcagcccgaggaggagcaggaggaggacuggcuggacgacgacucccagcagaccgugggccagcaggacgggagcgaggacaaccagaccacgaccauccagaccaucguggagguccagccccagcucgagauggagcugaccccgguggugcagacgaucgaggucaacuccuucagcggcuaccugaagcucaccgacaacguguacaucaagaacgccgacaucguggaggaggcgaagaaggucaagcccaccgugguggucaacgccgccaacguguaccugaagcacgggggcggcguggccggggcccugaacaaggcgaccaacaacgccaugcaggucgaguccgacgacuacaucgccacgaacggcccccucaagguggggggcagcugcguccuguccggccacaaccuggccaagcacugccuccacgugguggggcccaacgucaacaagggcgaggacauccagcugcugaagagcgccuacgagaacuucaaccagcacgaggugcuccuggcgccgcugcucuccgccgggaucuucggcgccgaccccauccacagccugcgggugugcgucgacaccgugcgcaccaacguguaccuggccgucuucgacaagaaccucuacgacaagcugguguccagcuuccuggagaugaagagcgagaagcagguggagcagaagaucgccgagauccccaaggaggaggucaagcccuucaucaccgaguccaagccgagcguggagcagcggaagcaggacgacaagaagaucaaggcgugcguggaggaggucacgaccacccucgaggagaccaaguuccugacggagaaccugcuccuguacaucgacaucaacgggaaccugcaccccgacuccgccacccucgugagcgacaucgacaucaccuuccugaagaaggacgcccccuacaucgugggcgacgucgugcaggagggcgugcugaccgccgucgugauccccacgaagaaggccgggggcaccaccgagaugcucgcgaaggcccugcgcaaggugccgaccgacaacuacaucacgaccuaccccgggcagggccugaacggguacaccgucgaggaggccaagaccgugcucaagaagugcaaguccgccuucuacauccugcccagcaucaucuccaacgagaagcaggagauccugggcaccgugagcuggaaccuccgggagaugcuggcgcacgccgaggagacgcgcaagcugaugcccgucugcguggagaccaaggccaucguguccaccauccagcggaaguacaagggcaucaagauccaggagggggucguggacuacggcgcccgcuucuacuucuacaccagcaagacgaccguggccucccugaucaacacccucaacgaccugaacgagacccuggucacgaugccgcucggguacgugacccacggccugaaccuggaggaggcggcccgguacaugcgcagccucaaggugcccgccaccgucuccgugagcucccccgacgccgugaccgccuacaacggguaccugacgagcuccagcaagacccccgaggagcacuucaucgagaccaucucccuggcgggcagcuacaaggacuggagcuacuccggccagagcacccagcucgggaucgaguuccugaagcggggcgacaaguccgucuacuacacgagcaacccgaccaccuuccaccuggacggggaggugaucaccuucgacaaccucaagacgcugcugucccuccgcgaggugcggaccaucaaggucuucaccaccguggacaacaucaaccugcacacgcagguggucgacaugagcaugaccuacggccagcaguucggccccaccuaccuggacggggccgacgugaccaagaucaagccccacaacucccacgagggcaagacguucuacgugcucccgaacgacgacacccugcgcgucgaggccuucgaguacuaccacaccaccgaccccagcuuccuggggcgguacauguccgcccucaaccacacgaagaaguggaaguacccccaggugaacggccugaccagcaucaagugggccgacaacaacugcuaccuggcgaccgcccuccugacccugcagcagaucgagcucaaguucaaccccccggcccugcaggacgccuacuaccgcgcgcgggccggggaggccgccaacuucugcgcccugauccucgcguacugcaacaagacggugggcgagcugggcgacguccgcgagaccauguccuaccuguuccagcacgccaaccucgacagcugcaagcgggugcugaacgucgugugcaagaccugcgggcagcagcagaccacccugaagggcguggaggccgucauguacauggggacgcucuccuacgagcaguucaagaagggcgugcagauccccugcaccugcgggaagcaggccaccaaguaccuggugcagcaggagagccccuucgucaugauguccgcccccccggcgcaguacgagcugaagcacggcaccuucacgugcgccagcgaguacaccggcaacuaccagugcgggcacuacaagcacaucaccuccaaggagacccucuacugcaucgacggcgcccugcugacgaagagcagcgaguacaaggggcccaucaccgacguguucuacaaggagaacuccuacaccaccacgaucaagcccgugaccuacaagcucgacggcgucgugugcaccgagaucgaccccaagcuggacaacuacuacaagaaggacaacagcuacuucaccgagcagccgaucgaccuggugcccaaccagcccuaccccaacgccuccuucgacaacuucaaguucgucugcgacaacaucaaguucgccgacgaccucaaccagcugacgggguacaagaagccggcgagccgcgagcugaaggugaccuucuuccccgaccucaacggcgacguggucgccaucgacuacaagcacuacacccccuccuucaagaagggcgccaagcugcugcacaagcccaucguguggcacgugaacaacgccaccaacaaggcgacguacaagccgaacaccuggugcauccggugccucuggagcaccaagcccgucgagaccuccaacagcuucgacgugcugaaguccgaggacgcccaggggauggacaaccuggccugcgaggaccucaagcccgugagcgaggaggucguggagaaccccacgauccagaaggacgugcuggagugcaacgucaagaccaccgagguggugggcgacaucauccugaagccggccaacaacucccucaagaucaccgaggaggucgggcacacggaccugauggccgcguacguggacaacagcucccugaccaucaagaagcccaacgagcucagccgcgugcugggccugaagacccucgccaccuacgggcuggccgccgucaacuccgugcccugggacacgaucgccaacuacgcgaagccguuccugaacaagguggucagcaccaccaccaacaucgugacgcgcugccucaaccgggugugcaccaacuacaugcccuacuucuucacccugcugcuccagcugugcaccuucacccgcuccacgaacagccggaucaaggccuccaugcccaccaccaucgccaagaacaccgucaagagcgugggcaaguucugccuggaggccagcuucaacuaccucaagucccccaacuucagcaagcugaucaacaucaucaucugguuccugcuccuguccgugugccugggcagccucaucuacuccacggccgcgcuggggguccugaugagcaaccucggcaugccguccuacugcaccggguaccgcgagggcuaccugaacagcaccaacgugaccaucgccacguacugcaccggcuccauccccugcagcgugugccuguccgggcucgacagccuggacaccuaccccucccuggagaccauccagaucacgaucagcuccuucaagugggaccucaccgccuucggccuggucgccgagugguuccuggccuacauccucuucacccgguucuucuacgugcuggggcuggcggccaucaugcagcucuucuucagcuacuucgccgugcacuucaucuccaacagcuggcugauguggcugaucaucaaccugguccagauggcccccaucuccgcgauggugcgcauguacaucuucuucgccagcuucuacuacguguggaagagcuacguccacgugguggacggcugcaacuccagcaccugcaugaugugcuacaagcggaaccgcgccacgcgggucgagugcaccaccaucgugaacgggguccgccgguccuucuacguguacgccaacggcggcaagggguucugcaagcuccacaacuggaacugcgugaacugcgacaccuucugcgccggcagcacguucaucuccgacgaggucgcgcgcgaccugagccugcaguucaagcggccgaucaaccccaccgaccaguccagcuacaucguggacuccgugaccgucaagaacgggagcauccaccucuacuucgacaaggccggccagaagaccuacgagcgccacucccugagccacuucgugaaccuggacaaccuccgggccaacaacacgaaggggucccugcccaucaacgugaucgucuucgacggcaagagcaagugcgaggaguccagcgccaaguccgccagcguguacuacucccagcugaugugccagcccauccuccugcuggaccaggcgcucgugagcgacgucggcgacagcgccgagguggccgugaagauguucgacgccuacgucaacaccuucuccagcaccuucaacgugccgauggagaagcugaagacccugguggccacggcggaggccgagcucgccaagaacgucucccuggacaacgugcugagcaccuucaucuccgccgcgcgccagggguucguggacagcgacgucgagaccaaggacgugguggagugccucaagcugucccaccagagcgacaucgaggucaccggcgacuccugcaacaacuacaugcugacguacaacaagguggagaacaugaccccccgggaccucggggccugcaucgacugcagcgcccgccacaucaacgcccagguggccaagucccacaacaucgcgcugaucuggaacgucaaggacuucaugagccuguccgagcagcuccggaagcagauccgcagcgccgccaagaagaacaaccugcccuucaagcugaccugcgccaccacgcgccagguggugaacgucgugaccaccaagaucgcccucaagggcgggugaggacuagucccuguucccagagcccacuuuuuuuucuuuuuuugaaauaaaauagccugucuuucagaucucaaaggcucuuuucagagccaccaaaaaaaaaaaaaaaaaaaaaaaaaaaaaaaaaaaaaaaaaaaaaaaaaaaaaaaaaaaaaaaaaaaaaaaaaaaaaaaaaaaaaaaaaaaaaaaaaaaaa

SEQ ID NO: 20035 - RNA, 6113 nt, Artificial Sequence
  SARS-CoV-2__MT539166.1__non-structural protein 3 (NSP3) mRNA gc
aggagagucccgcagucggcguccagcggcucugcuuguucgugugugugucguugcaggccuuauucaagcuuaccauggcccccaccaaggugaccuucggcgacgacacggucaucgaggugcagggguacaagagcgugaacaucaccuucgagcuggacgagcgcaucgacaagguccucaacgagaagugcuccgccuacaccguggagcugggcaccgaggugaacgaguucgcgugcgucguggccgacgccgugaucaagacgcugcagccggucagcgagcuccugaccccccuggggaucgaccucgacgagugguccauggccaccuacuaccuguucgacgagagcggcgaguucaagcuggccucccacauguacugcagcuucuacccccccgacgaggacgaggaggagggggacugcgaggaggaggaguucgagccguccacccaguacgaguacggcacggaggacgacuaccagggcaagccccucgaguucggggcgaccagcgccgcccugcagcccgaggaggagcaggaggaggacuggcuggacgacgacucccagcagaccgugggccagcaggacgggagcgaggacaaccagaccacgaccauccagaccaucguggagguccagccccagcucgagauggagcugaccccgguggugcagacgaucgaggucaacuccuucagcggcuaccugaagcucaccgggaacguguacaucaagaacgccgacaucguggaggaggcgaagaaggucaagcccaccgugguggucaacgccgccaacguguaccugaagcacggcggcgggguggccggcgcccugaacaaggcgaccaacaacgccaugcaggucgaguccgacgacuacaucgccacgaacgggccccucaaggugggcggcagcugcguccuguccgggcacaaccuggccaagcacugccuccacguggugggccccaacgucaacaagggggaggacauccagcugcugaagagcgccuacgagaacuucaaccagcacgaggugcuccuggcgccgcugcucuccgccggcaucuucggggccgaccccauccacagccugcgggugugcgucgacaccgugcgcaccaacguguaccuggccgucuucgacaagaaccucuacgacaagcugguguccagcuuccuggagaugaagagcgagaagcagguggagcagaagaucgccgagauccccaaggaggaggucaagcccuucaucaccgaguccaagccgagcguggagcagcggaagcaggacgacaagaagaucaaggcgugcguggaggaggucacgaccacccucgaggagaccaaguuccugacggagaaccugcuccuguacaucgacaucaacggcaaccugcaccccgacuccgccacccucgugagcgacaucgacaucaccuuccugaagaaggacgcccccuacaucgugggcgacgucgugcaggagggggugcugaccgccgucgugauccccacgaagaaggccggcgggaccaccgagaugcucgcgaaggcccugcgcaaggugccgaccgacaacuacaucacgaccuaccccggccaggggcugaacggcuacaccgucgaggaggccaagaccgugcucaagaagugcaaguccgccuucuacauccugcccagcaucaucuccaacgagaagcaggagauccugggcaccgugagcuggaaccuccgggagaugcuggcgcacgccgaggagacgcgcaagcugaugcccgucugcguggagaccaaggccaucguguccaccauccagcggaaguacaaggggaucaagauccaggagggcgucguggacuacggggcccgcuucuacuucuacaccagcaagacgaccguggccucccugaucaacacccucaacgaccugaacgagacccuggucacgaugccgcucggcuacgugacccacgggcugaaccuggaggaggcggcccgguacaugcgcagccucaaggugcccgccaccgucuccgugagcucccccgacgccgugaccgccuacaacggcuaccugacgagcuccagcaagacccccgaggagcacuucaucgagaccaucucccuggcgggcagcuacaaggacuggagcuacuccgggcagagcacccagcucggcaucgaguuccugaagcggggggacaaguccgucuacuacacgagcaacccgaccaccuuccaccuggacggcgaggugaucaccuucgacaaccucaagacgcugcugucccuccgcgaggugcggaccaucaaggucuucaccaccguggacaacaucaaccugcacacgcagguggucgacaugagcaugaccuacggccagcaguucgggcccaccuaccuggacggcgccgacgugaccaagaucaagccccacaacucccacgaggggaagacguucuacgugcucccgaacgacgacacccugcgcgucgaggccuucgaguacuaccacaccaccgaccccagcuuccugggccgguacauguccgcccucaaccacacgaagaaguggaaguacccccaggugaacgggcugaccagcaucaagugggccgacaacaacugcuaccuggcgaccgcccuccugacccugcagcagaucgagcucaaguucaaccccccggcccugcaggacgccuacuaccgcgcgcgggccggcgaggccgccaacuucugcgcccugauccucgcguacugcaacaagacggugggcgagcugggggacguccgcgagaccauguccuaccuguuccagcacgccaaccucgacagcugcaagcgggugcugaacgucgugugcaagaccugcggccagcagcagaccacccugaaggggguggaggccgucauguacaugggcacgcucuccuacgagcaguucaagaagggggugcagauccccugcaccugcggcaagcaggccaccaaguaccuggugcagcaggagagccccuucgucaugauguccgcccccccggcgcaguacgagcugaagcacggcaccuucacgugcgccagcgaguacaccgggaacuaccagugcggccacuacaagcacaucaccuccaaggagacccucuacugcaucgacggggcccugcugacgaagagcagcgaguacaagggccccaucaccgacguguucuacaaggagaacuccuacaccaccacgaucaagcccgugaccuacaagcucgacggggucgugugcaccgagaucgaccccaagcuggacaacuacuacaagaaggacaacagcuacuucaccgagcagccgaucgaccuggugcccaaccagcccuaccccaacgccuccuucgacaacuucaaguucgucugcgacaacaucaaguucgccgacgaccucaaccagcugacgggcuacaagaagccggcgagccgcgagcugaaggugaccuucuuccccgaccucaacggcgacguggucgccaucgacuacaagcacuacacccccuccuucaagaagggggccaagcugcugcacaagcccaucguguggcacgugaacaacgccaccaacaaggcgacguacaagccgaacaccuggugcauccggugccucuggagcaccaagcccgucgagaccuccaacagcuucgacgugcugaaguccgaggacgcccagggcauggacaaccuggccugcgaggaccucaagcccgugagcgaggaggucguggagaaccccacgauccagaaggacgugcuggagugcaacgucaagaccaccgagguggugggggacaucauccugaagccggccaacaacucccucaagaucaccgaggaggucggccacacggaccugauggccgcguacguggacaacagcucccugaccaucaagaagcccaacgagcucagccgcgugcuggggcugaagacccucgccacccacggccuggccgccgucaacuccgugcccugggacacgaucgccaacuacgcgaagccguuccugaacaagguggucagcaccaccaccaacaucgugacgcgcugccucaaccgggugugcaccaacuacaugcccuacuucuucacccugcugcuccagcugugcaccuucacccgcuccacgaacagccggaucaaggccuccaugcccaccaccaucgccaagaacaccgucaagagcgugggcaaguucugccuggaggccagcuucaacuaccucaagucccccaacuucagcaagcugaucaacaucaucaucugguuccugcuccuguccgugugccuggggagccucaucuacuccacggccgcgcugggcguccugaugagcaaccucgggaugccguccuacugcaccggcuaccgcgagggcuaccugaacagcaccaacgugaccaucgccacguacugcaccggguccauccccugcagcgugugccuguccggccucgacagccuggacaccuaccccucccuggagaccauccagaucacgaucagcuccuucaagugggaccucaccgccuucgggcuggucgccgagugguuccuggccuacauccucuucacccgguucuucuacgugcugggccuggcggccaucaugcagcucuucuucagcuacuucgccgugcacuucaucuccaacagcuggcugauguggcugaucaucaaccugguccagauggcccccaucuccgcgauggugcgcauguacaucuucuucgccagcuucuacuacguguggaagagcuacguccacgugguggacgggugcaacuccagcaccugcaugaugugcuacaagcggaaccgcgccacgcgggucgagugcaccaccaucgugaacggcguccgccgguccuucuacguguacgccaacggcgggaagggcuucugcaagcuccacaacuggaacugcgugaacugcgacaccuucugcgccgggagcacguucaucuccgacgaggucgcgcgcgaccugagccugcaguucaagcggccgaucaaccccaccgaccaguccagcuacaucguggacuccgugaccgucaagaacggcagcauccaccucuacuucgacaaggccgggcagaagaccuacgagcgccacucccugagccacuucgugaaccuggacaaccuccgggccaacaacacgaagggcucccugcccaucaacgugaucgucuucgacggcaagagcaagugcgaggaguccagcgccaaguccgccagcguguacuacucccagcugaugugccagcccauccuccugcuggaccaggcgcucgugagcgacgucggggacagcgccgagguggccgugaagauguucgacgccuacgucaacaccuucuccagcaccuucaacgugccgauggagaagcugaagacccugguggccacggcggaggccgagcucgccaagaacgucucccuggacaacgugcugagcaccuucaucuccgccgcgcgccagggcuucguggacagcgacgucgagaccaaggacgugguggagugccucaagcugucccaccagagcgacaucgaggucaccggggacuccugcaacaacuacaugcugacguacaacaagguggagaacaugaccccccgggaccucggcgccugcaucgacugcagcgcccgccacaucaacgcccagguggccaagucccacaacaucgcgcugaucuggaacgucaaggacuucaugagccuguccgagcagcuccggaagcagauccgcagcgccgccaagaagaacaaccugcccuucaagcugaccugcgccaccacgcgccagguggugaacgucgugaccaccaagaucgcccucaaggggggcugaggacuagucccuguucccagagcccacuuuuuuuucuuuuuuugaaauaaaauagccugucuuucagaucucaaaggcucuuuucagagccaccaaaaaaaaaaaaaaaaaaaaaaaaaaaaaaaaaaaaaaaaaaaaaaaaaaaaaaaaaaaaaaaaaaaaaaaaaaaaaaaaaaaaaaaaaaaaaaaaaaaaa

SEQ ID NO: 20036 - RNA, 6113 nt, Artificial Sequence
  SARS-CoV-2__MT407653.1__non-structural protein 3 (NSP3) mRNA gc
aggagagucccgcagucggcguccagcggcucugcuuguucgugugugugucguugcaggccuuauucaagcuuaccauggcccccaccaaggugaccuucggcgacgacacggucaucgaggugcagggguacaagagcgugaacaucaccuucgagcuggacgagcgcaucgacaagguccucaacgagaagugcuccgccuacaccguggagcugggcaccgaggugaacgaguucgcgugcgucguggccgacgccgugaucaagacgcugcagccggucagcgagcuccugaccccccuggggaucgaccucgacgagugguccauggccaccuacuaccuguucgacgagagcggcgaguucaagcuggccucccacauguacugcagcuucuacccccccgacgaggacgaggaggagggggacugcgaggaggaggaguucgagccguccacccaguacgaguacggcacggaggacgacuaccagggcaagccccucgaguucggggcgaccagcgccgcccugcagcccgaggaggagcaggaggaggacuggcuggacgacgacucccagcagaccgugggccagcaggacgggagcgaggacaaccagaccacgaccauccagaccaucguggagguccagccccagcucgagauggagcugaccccgguggugcagacgaucgaggucaacuccuucagcggcuaccugaagcucaccgacaacgugcacaucaagaacgccgacaucguggaggaggcgaagaaggucaagcccaccgugguggucaacgccgccaacguguaccugaagcacgggggcggcguggccggggcccugaacaaggcgaccaacaacgccaugcaggucgaguccgacgacuacaucgccacgaacggcccccucaagguggggggcagcugcguccuguccggccacaaccuggccaagcacugccuccacgugguggggcccaacgucaacaagggcgaggacauccagcugcugaagagcgccuacgagaacuucaaccagcacgaggugcuccuggcgccgcugcucuccgccgggaucuucggcgccgaccccauccacagccugcgggugugcgucgacaccgugcgcaccaacguguaccuggccgucuucgacaagaaccucuacgacaagcugguguccagcuuccuggagaugaagagcgagaagcagguggagcagaagaucgccgagauccccaaggaggaggucaagcccuucaucaccgaguccaagccgagcguggagcagcggaagcaggacgacaagaagaucaaggcgugcguggaggaggucacgaccacccucgaggagaccaaguuccugacggagaaccugcuccuguacaucgacaucaacgggaaccugcaccccgacuccgccacccucgugagcgacaucgacaucaccuuccugaagaaggacgcccccuacaucgugggcgacgucgugcaggagggcgugcugaccgccgucgugauccccacgaagaaggccgggggcaccaccgagaugcucgcgaaggcccugcgcaaggugccgaccgacaacuacaucacgaccuaccccgggcagggccugaacggguacaccgucgaggaggccaagaccgugcucaagaagugcaaguccgccuucuacauccugcccagcaucaucuccaacgagaagcaggagauccugggcaccgugagcuggaaccuccgggagaugcuggcgcacgccgaggagacgcgcaagcugaugcccgucugcguggagaccaaggccaucguguccaccauccagcggaaguacaagggcaucaagauccaggagggggucguggacuacggcgcccgcuucuacuucuacaccagcaagacgaccguggccucccugaucaacacccucaacgaccugaacgagacccuggucacgaugccgcucggguacgugacccacggccugaaccuggaggaggcggcccgguacaugcgcagccucaaggugcccgccaccgucuccgugagcucccccgacgccgugaccgccuacaacggguaccugacgagcuccagcaagacccccgaggagcacuucaucgagaccaucucccuggcgggcagcuacaaggacuggagcuacuccggccagagcacccagcucgggaucgaguuccugaagcggggcgacaaguccgucuacuacacgagcaacccgaccaccuuccaccuggacggggaggugaucaccuucgacaaccucaagacgcugcugucccuccgcgaggugcggaccaucaaggucuucaccaccguggacaacaucaaccugcacacgcagguggucgacaugagcaugaccuacggccagcaguucggccccaccuaccuggacggggccgacgugaccaagaucaagccccacaacucccacgagggcaagacguucuacgugcucccgaacgacgacacccugcgcgucgaggccuucgaguacuaccacaccaccgaccccagcuuccuggggcgguacauguccgcccucaaccacacgaagaaguggaaguacccccaggugaacggccugaccagcaucaagugggccgacaacaacugcuaccuggcgaccgcccuccugacccugcagcagaucgagcucaaguucaaccccccggcccugcaggacgccuacuaccgcgcgcgggccggggaggccgccaacuucugcgcccugauccucgcguacugcaacaagacggugggcgagcugggcgacguccgcgagaccauguccuaccuguuccagcacgccaaccucgacagcugcaagcgggugcugaacgucgugugcaagaccugcgggcagcagcagaccacccugaagggcguggaggccgucauguacauggggacgcucuccuacgagcaguucaagaagggcgugcagauccccugcaccugcgggaagcaggccaccaaguaccuggugcagcaggagagccccuucgucaugauguccgcccccccggcgcaguacgagcugaagcacggcaccuucacgugcgccagcgaguacaccggcaacuaccagugcgggcacuacaagcacaucaccuccaaggagacccucuacugcaucgacggcgcccugcugacgaagagcagcgaguacaaggggcccaucaccgacguguucuacaaggagaacuccuacaccaccacgaucaagcccgugaccuacaagcucgacggcgucgugugcaccgagaucgaccccaagcuggacaacuacuacaagaaggacaacagcuacuucaccgagcagccgaucgaccuggugcccaaccagcccuaccccaacgccuccuucgacaacuucaaguucgucugcgacaacaucaaguucgccgacgaccucaaccagcugacgggguacaagaagccggcgagccgcgagcugaaggugaccuucuuccccgaccucaacggcgacguggucgccaucgacuacaagcacuacacccccuccuucaagaagggcgccaagcugcugcacaagcccaucguguggcacgugaacaacgccaccaacaaggcgacguacaagccgaacaccuggugcauccggugccucuggagcaccaagcccgucgagaccuccaacagcuucgacgugcugaaguccgaggacgcccaggggauggacaaccuggccugcgaggaccucaagcccgugagcgaggaggucguggagaaccccacgauccagaaggacgugcuggagugcaacgucaagaccaccgagguggugggcgacaucauccugaagccggccaacaacucccucaagaucaccgaggaggucgggcacacggaccugauggccgcguacguggacaacagcucccugaccaucaagaagcccaacgagcucagccgcgugcugggccugaagacccucgccacccacgggcuggccgccgucaacuccgugcccugggacacgaucgccaacuacgcgaagccguuccugaacaagguggucagcaccaccaccaacaucgugacgcgcugccucaaccgggugugcaccaacuacaugcccuacuucuucacccugcugcuccagcugugcaccuucacccgcuccacgaacagccggaucaaggccuccaugcccaccaccaucgccaagaacaccgucaagagcgugggcaaguucugccuggaggccagcuucaacuaccucaagucccccaacuucagcaagcugaucaacaucaucaucugguuccugcuccuguccgugugccugggcagccucaucuacuccacggccgcgcuggggguccugaugagcaaccucggcaugccguccuacugcaccggguaccgcgagggcuaccugaacagcaccaacgugaccaucgccacguacugcaccggcuccauccccugcagcgugugccuguccgggcucgacagccuggacaccuaccccucccuggagaccauccagaucacgaucagcuccuucaagugggaccucaccgccuucggccuggucgccgagugguuccuggccuacauccucuucacccgguucuucuacgugcuggggcuggcggccaucaugcagcucuucuucagcuacuucgccgugcacuucaucuccaacagcuggcugauguggcugaucaucaaccugguccagauggcccccaucuccgcgauggugcgcauguacaucuucuucgccagcuucuacuacguguggaagagcuacguccacgugguggacggcugcaacuccagcaccugcaugaugugcuacaagcggaaccgcgccacgcgggucgagugcaccaccaucgugaacgggguccgccgguccuucuacguguacgccaacggcggcaagggguucugcaagcuccacaacuggaacugcgugaacugcgacaccuucugcgccggcagcacguucaucuccgacgaggucgcgcgcgaccugagccugcaguucaagcggccgaucaaccccaccgaccaguccagcuacaucguggacuccgugaccgucaagaacgggagcauccaccucuacuucgacaaggccggccagaagaccuacgagcgccacucccugagccacuucgugaaccuggacaaccuccgggccaacaacacgaaggggucccugcccaucaacgugaucgucuucgacggcaagagcaagugcgaggaguccagcgccaaguccgccagcguguacuacucccagcugaugugccagcccauccuccugcuggaccaggcgcucgugagcgacgucggcgacagcgccgagguggccgugaagauguucgacgccuacgucaacaccuucuccagcaccuucaacgugccgauggagaagcugaagacccugguggccacggcggaggccgagcucgccaagaacgucucccuggacaacgugcugagcaccuucaucuccgccgcgcgccagggguucguggacagcgacgucgagaccaaggacgugguggagugccucaagcugucccaccagagcgacaucgaggucaccggcgacuccugcaacaacuacaugcugacguacaacaagguggagaacaugaccccccgggaccucggggccugcaucgacugcagcgcccgccacaucaacgcccagguggccaagucccacaacaucgcgcugaucuggaacgucaaggacuucaugagccuguccgagcagcuccggaagcagauccgcagcgccgccaagaagaacaaccugcccuucaagcugaccugcgccaccacgcgccagguggugaacgucgugaccaccaagaucgcccucaagggcgggugaggacuagucccuguucccagagcccacuuuuuuuucuuuuuuugaaauaaaauagccugucuuucagaucucaaaggcucuuuucagagccaccaaaaaaaaaaaaaaaaaaaaaaaaaaaaaaaaaaaaaaaaaaaaaaaaaaaaaaaaaaaaaaaaaaaaaaaaaaaaaaaaaaaaaaaaaaaaaaaaaaaaa

SEQ ID NO: 20037 - RNA, 6113 nt, Artificial Sequence
  SARS-CoV-2__MT534313.1__non-structural protein 3 (NSP3) mRNA gc
aggagagucccgcagucggcguccagcggcucugcuuguucgugugugugucguugcaggccuuauucaagcuuaccauggcccccaccaaggugaccuucggcgacgacacggucaucgaggugcagggguacaagagcgugaacaucaccuucgagcuggacgagcgcaucgacaagguccucaacgagaagugcuccgccuacaccguggagcugggcaccgaggugaacgaguucgcgugcgucguggccgacgccgugaucaagacgcugcagccggucagcgagcuccugaccccccuggggaucgaccucgacgagugguccauggccaccuacuaccuguucgacgagagcggcgaguucaagcuggccucccacauguacugcagcuucuacccccccgacgaggacgaggaggagggggacugcgaggaggaggaguucgagccguccacccaguacgaguacggcacggaggacgacuaccagggccggccccucgaguucggggcgaccagcgccgcccugcagcccgaggaggagcaggaggaggacuggcuggacgacgacucccagcagaccgugggccagcaggacgggagcgaggacaaccagaccacgaccauccagaccaucguggagguccagccccagcucgagauggagcugaccccgguggugcagacgaucgaggucaacuccuucagcggcuaccugaagcucaccgacaacguguacaucaagaacgccgacaucguggaggaggcgaagaaggucaagcccaccgugguggucaacgccgccaacguguaccugaagcacgggggcggcguggccggggcccugaacaaggcgaccaacaacgccaugcaggucgaguccgacgacuacaucgccacgaacggcccccucaagguggggggcagcugcguccuguccggccacaaccuggccaagcacugccuccacgugguggggcccaacgucaacaagggcgaggacauccagcugcugaagagcgccuacgagaacuucaaccagcacgaggugcuccuggcgccgcugcucuccgccgggaucuucggcgccgaccccauccacagccugcgcgugugcgucgacaccgugcggaccaacguguaccuggccgucuucgacaagaaccucuacgacaagcugguguccagcuuccuggagaugaagagcgagaagcagguggagcagaagaucgccgagauccccaaggaggaggucaagcccuucaucaccgaguccaagccgagcguggagcagcgcaagcaggacgacaagaagaucaaggcgugcguggaggaggucacgaccacccucgaggagaccaaguuccugacggagaaccugcuccuguacaucgacaucaacgggaaccugcaccccgacuccgccacccucgugagcgacaucgacaucaccuuccugaagaaggacgcccccuacaucgugggcgacgucgugcaggagggcgugcugaccgccgucgugauccccacgaagaaggccgggggcaccaccgagaugcucgcgaaggcccugcggaaggugccgaccgacaacuacaucacgaccuaccccgggcagggccugaacggguacaccgucgaggaggccaagaccgugcucaagaagugcaaguccgccuucuacauccugcccagcaucaucuccaacgagaagcaggagauccugggcaccgugagcuggaaccuccgcgagaugcuggcgcacgccgaggagacgcggaagcugaugcccgucugcguggagaccaaggccaucguguccaccauccagcgcaaguacaagggcaucaagauccaggagggggucguggacuacggcgcccgguucuacuucuacaccagcaagacgaccguggccucccugaucaacacccucaacgaccugaacgagacccuggucacgaugccgcucggguacgugacccacggccugaaccuggaggaggcggcccgcuacaugcggagccucaaggugcccgccaccgucuccgugagcucccccgacgccgugaccgccuacaacggguaccugacgagcuccagcaagacccccgaggagcacuucaucgagaccaucucccuggcgggcagcuacaaggacuggagcuacuccggccagagcacccagcucgggaucgaguuccugaagcgcggcgacaaguccgucuacuacacgagcaacccgaccaccuuccaccuggacggggaggugaucaccuucgacaaccucaagacgcugcugucccuccgggaggugcgcaccaucaaggucuucaccaccguggacaacaucaaccugcacacgcagguggucgacaugagcaugaccuacggccagcaguucggccccaccuaccuggacggggccgacgugaccaagaucaagccccacaacucccacgagggcaagacguucuacgugcucccgaacgacgacacccugcgggucgaggccuucgaguacuaccacaccaccgaccccagcuuccuggggcgcuacauguccgcccucaaccacacgaagaaguggaaguacccccaggugaacggccugaccagcaucaagugggccgacaacaacugcuaccuggcgaccgcccuccugacccugcagcagaucgagcucaaguucaaccccccggcccugcaggacgccuacuaccgggcgcgcgccggggaggccgccaacuucugcgcccugauccucgcguacugcaacaagacggugggcgagcugggcgacguccgggagaccauguccuaccuguuccagcacgccaaccucgacagcugcaagcgcgugcugaacgucgugugcaagaccugcgggcagcagcagaccacccugaagggcguggaggccgucauguacauggggacgcucuccuacgagcaguucaagaagggcgugcagauccccugcaccugcgggaagcaggccaccaaguaccuggugcagcaggagagccccuucgucaugauguccgcccccccggcgcaguacgagcugaagcacggcaccuucacgugcgccagcgaguacaccggcaacuaccagugcgggcacuacaagcacaucaccuccaaggagacccucuacugcaucgacggcgcccugcugacgaagagcagcgaguacaaggggcccaucaccgacguguucuacaaggagaacuccuacaccaccacgaucaagcccgugaccuacaagcucgacggcgucgugugcaccgagaucgaccccaagcuggacaacuacuacaagaaggacaacagcuacuucaccgagcagccgaucgaccuggugcccaaccagcccuaccccaacgccuccuucgacaacuucaaguucgucugcgacaacaucaaguucgccgacgaccucaaccagcugacgggguacaagaagccggcgagccgggagcugaaggugaccuucuuccccgaccucaacggcgacguggucgccaucgacuacaagcacuacacccccuccuucaagaagggcgccaagcugcugcacaagcccaucguguggcacgugaacaacgccaccaacaaggcgacguacaagccgaacaccuggugcauccgcugccucuggagcaccaagcccgucgagaccuccaacagcuucgacgugcugaaguccgaggacgcccaggggauggacaaccuggccugcgaggaccucaagcccgugagcgaggaggucguggagaaccccacgauccagaaggacgugcuggagugcaacgucaagaccaccgagguggugggcgacaucauccugaagccggccaacaacucccucaagaucaccgaggaggucgggcacacggaccugauggccgcguacguggacaacagcucccugaccaucaagaagcccaacgagcucagccgcgugcugggccugaagacccucgccacccacgggcuggccgccgucaacuccgugcccugggacacgaucgccaacuacgcgaagccguuccugaacaagguggucagcaccaccaccaacaucgugacgcggugccucaaccgcgugugcaccaacuacaugcccuacuucuucacccugcugcuccagcugugcaccuucacccgguccacgaacagccgcaucaaggccuccaugcccaccaccaucgccaagaacaccgucaagagcgugggcaaguucugccuggaggccagcuucaacuaccucaagucccccaacuucagcaagcugaucaacaucaucaucugguuccugcuccuguccgugugccugggcagccucaucuacuccacggccgcgcuggggguccugaugagcaaccucggcaugccguccuacugcaccggguaccgggagggcuaccugaacagcaccaacgugaccaucgccacguacugcaccggcuccauccccugcagcgugugccuguccgggcucgacagccuggacaccuaccccucccuggagaccauccagaucacgaucagcuccuucaagugggaccucaccgccuucggccuggucgccgagugguuccuggccuacauccucuucacccgcuucuucuacgugcuggggcuggcggccaucaugcagcucuucuucagcuacuucgccgugcacuucaucuccaacagcuggcugauguggcugaucaucaaccugguccagauggcccccaucuccgcgauggugcggauguacaucuucuucgccagcuucuacuacguguggaagagcuacguccacgugguggacggcugcaacuccagcaccugcaugaugugcuacaagcgcaaccgggccacgcgcgucgagugcaccaccaucgugaacgggguccggcgcuccuucuacguguacgccaacggcggcaagggguucugcaagcuccacaacuggaacugcgugaacugcgacaccuucugcgccggcagcacguucaucuccgacgaggucgcgcgggaccugagccugcaguucaagcgcccgaucaaccccaccgaccaguccagcuacaucguggacuccgugaccgucaagaacgggagcauccaccucuacuucgacaaggccggccagaagaccuacgagcggcacucccugagccacuucgugaaccuggacaaccuccgcgccaacaacacgaaggggucccugcccaucaacgugaucgucuucgacggcaagagcaagugcgaggaguccagcgccaaguccgccagcguguacuacucccagcugaugugccagcccauccuccugcuggaccaggcgcucgugagcgacgucggcgacagcgccgagguggccgugaagauguucgacgccuacgucaacaccuucuccagcaccuucaacgugccgauggagaagcugaagacccugguggccacggcggaggccgagcucgccaagaacgucucccuggacaacgugcugagcaccuucaucuccgccgcgcggcagggguucguggacagcgacgucgagaccaaggacgugguggagugccucaagcugucccaccagagcgacaucgaggucaccggcgacuccugcaacaacuacaugcugacguacaacaagguggagaacaugaccccccgcgaccucggggccugcaucgacugcagcgcccggcacaucaacgcccagguggccaagucccacaacaucgcgcugaucuggaacgucaaggacuucaugagccuguccgagcagcuccgcaagcagauccgcagcgccgccaagaagaacaaccugcccuucaagcugaccugcgccaccacgcggcagguggugaacgucgugaccaccaagaucgcccucaagggcgggugaggacuagucccuguucccagagcccacuuuuuuuucuuuuuuugaaauaaaauagccugucuuucagaucucaaaggcucuuuucagagccaccaaaaaaaaaaaaaaaaaaaaaaaaaaaaaaaaaaaaaaaaaaaaaaaaaaaaaaaaaaaaaaaaaaaaaaaaaaaaaaaaaaaaaaaaaaaaaaaaaaaaa

SEQ ID NO: 20038 - RNA, 6113 nt, Artificial Sequence
  SARS-CoV-2__MT536961.1__non-structural protein 3 (NSP3) mRNA gc
aggagagucccgcagucggcguccagcggcucugcuuguucgugugugugucguugcaggccuuauucaagcuuaccauggcccccaccaaggugaccuucggcgacgacacggucaucgaggugcagggguacaagagcgugaacaucaccuucgagcuggacgagcgcaucgacaagguccucaacgagaagugcuccgccuacaccguggagcugggcaccgaggugaacgaguucgcgugcgucguggccgacgccgugaucaagacgcugcagccggucagcgagcuccugaccccccuggggaucgaccucgacgagugguccauggccaccuacuaccuguucgacgagagcggcgaguucaagcuggccucccacauguacugcagcuucuacccccccgacgaggacgaggaggagggggacugcgaggaggaggaguucgagccguccacccaguacgaguacggcacggaggacgacuaccagggcaagccccucgaguucggggcgaccagcgccgcccugcagcccgaggaggagcaggaggaggacuggcuggacgacgacucccagcagaccgugggccagcaggacgggagcgaggacaaccagaccacgaccauccagaccaucguggagguccagccccagcucgagauggagcugaccccgguggugcagacgaucgaggucaacuccuucagcggcuaccugaagcucaccgacaacguguacaucaagaacgccgacaucguggaggaggcgaagaaggucaagcccaccgugguggucaacgccgccaacguguaccugaagcacgggggcggcguggccggggcccugaacaaggcgaccaacaacgccaugcaggucgaguccgacgacuacaucgccacgaacggcccccucaagguggggggcagcugcguccuguccggccacaaccuggccaagcacugccuccacgugguggggcccaacgucaacaagggcgaggacauccagcugcugaagagcgccuacgagaacuucaaccagcacgaggugcuccuggcgccgcugcucuccgccgggaucuucggcgccgaccccauccacagccugcgggugugcgucgacaccgugcgcaccaacguguaccuggccgucuucgacaagaaccucuacgacaagcugguguccagcuuccuggagaugaagagcgagaagcagguggagcagaagaucgccgagauccccaaggaggaggucaagcccuucaucaccgaguccaagccgagcguggagcagcggaagcaggacgacaagaagaucaaggcgugcguggaggaggucacgaccacccucgaggagaccaaguuccugacggagaaccugcuccuguacaucgacaucaacgggaaccugcaccccgacuccgccacccucgugagcgacaucgacaucaccuuccugaagaaggacgcccccuacaucgugggcgacgucgugcaggagggcgugcugaccgccgucgugauccccacgaagaaggccgggggcaccaccgagaugcucgcgaaggcccugcgcaaggugccgaccgacaacuacaucacgaccuaccccgggcagggccugaacggguacaccgucgaggaggccaagaccgugcucaagaagugcaaguccgccuucuacauccugcccagcaucaucuccaacgagaagcaggagauccugggcaccgugagcuggaaccuccgggagaugcuggcgcacgccgaggagacgcgcaagcugaugcccgucugcguggagaccaaggccaucguguccaccauccagcggaaguacaagggcaucaagauccaggagggggucguggacuacggcgcccgcuucuacuucuacaccagcaagacgaccguggccucccugaucaacacccucaacgaccugaacgagacccuggucacgaugccgcucggguacgugacccacggccugaaccuggaggaggcggcccgguacaugcgcagccucaaggugcccgccaccgucuccgugagcucccccgacgccgugaccgccuacaacggguaccugacgagcuccagcaagacccccgaggagcacuucaucgagaccaucucccuggcgggcagcuacaaggacuggagcuacuccggccagagcacccagcucgggaucgaguuccugaagcggggcgacaaguccgucuacuacacgagcaacccgaccaccuuccaccuggacggggaggugaucaccuucgacaaccucaagacgcugcugucccuccgcgaggugcggaccaucaaggucuucaccaccguggacaacaucaaccugcacacgcagguggucgacaugagcaugaccuacggccagcaguucggccccaccuaccuggacggggccgacgugaccaagaucaagccccacaacucccacgagggcaagacguucuacgugcucccgaacgacgacacccugcgcgucgaggccuucgaguacuaccacaccaccgaccccagcuuccuggggcgguacauguccgcccucaaccacacgaagaaguggaaguacccccaggugaacggccugaccagcaucaagugggccgacaacaacugcuaccuggcgaccgcccuccugacccugcagcagaucgagcucaaguucaaccccccggcccugcaggacgccuacuaccgcgcgcgggccggggaggccgccaacuucugcgcccugauccucgcguacugcaacaagacggugggcgagcugggcgacguccgcgagaccauguccuaccuguuccagcacgccaaccucgacagcugcaagcgggugcugaacgucgugugcaagaccugcgggcagcagcagaccacccugaagggcguggaggccgucauguacauggggacgcucuccuacgagcaguucaagaagggcgugcagauccccugcaccugcgggaagcaggccaccaaguaccuggugcagcaggagagccccuucgucaugauguccgcccccccggcgcaguacgagcugaagcacggcaccuucacgugcgccagcgaguacaccggcaacuaccagugcgggcacuacaagcacaucaccuccaaggagacccucuacugcaucgacggcgcccugcugacgaagagcagcgaguacaaggggcccaucaccgacguguucuacaaggagaacuccuacaccaccacgaucaagcccgugaccuacaagcucgacggcgucgugugcaccgagaucgaccccaagcuggacaacuacuacaagaaggacaacagcuacuucaccgagcagccgaucgaccuggugcccaaccagcccuaccccaacgccuccuucgacaacuucaaguucgucugcgacaacaucaaguucgccgacgaccucaaccagcugacgggguacaagaagccggcgagccgcgagcugaaggugaccuucuuccccgaccucaacggcgacguggucgccaucgacuacaagcacuacacccccuccuucaagaagggcgccaagcugcugcacaagcccaucguguggcacgugaacaacgccaccaacaaggcgacguacaagccgaacaccuggugcauccggugccucuggagcaccaagcccgucgagaccuccaacagcuucgacgugcugaaguccgaggacgcccaggggauggacaaccuggccugcgaggaccucaagcccgugagcgaggaggucguggagaaccccacgauccagaaggacgugcuggagugcaacgucaagaccaccgagguggugggcgacaucauccugaagccggccaacaaccgccucaagaucaccgaggaggucgggcacacggaccugauggccgcguacguggacaacuccagccugaccaucaagaagcccaacgagcucucccgcgugcugggccugaagacccucgccacccacgggcuggccgccgucaacagcgugcccugggacacgaucgccaacuacgcgaagccguuccugaacaagguggucuccaccaccaccaacaucgugacgcggugccucaaccgcgugugcaccaacuacaugcccuacuucuucacccugcugcuccagcugugcaccuucacccggagcacgaacucccgcaucaaggccagcaugcccaccaccaucgccaagaacaccgucaaguccgugggcaaguucugccuggaggccagcuucaacuaccucaagagccccaacuucuccaagcugaucaacaucaucaucugguuccugcuccugagcgugugccugggcucccucaucuacagcacggccgcgcuggggguccugauguccaaccucggcaugccgagcuacugcaccggguaccgggagggcuaccugaacuccaccaacgugaccaucgccacguacugcaccggcagcauccccugcuccgugugccugagcgggcucgacucccuggacaccuaccccagccuggagaccauccagaucacgaucuccagcuucaagugggaccucaccgccuucggccuggucgccgagugguuccuggccuacauccucuucacccgcuucuucuacgugcuggggcuggcggccaucaugcagcucuucuucuccuacuucgccgugcacuucaucagcaacuccuggcugauguggcugaucaucaaccugguccagauggcccccaucagcgcgauggugcggauguacaucuucuucgccuccuucuacuacguguggaagagcuacguccacgugguggacggcugcaacagcuccaccugcaugaugugcuacaagcgcaaccgggccacgcgcgucgagugcaccaccaucgugaacgggguccggcgcagcuucuacguguacgccaacggcggcaagggguucugcaagcuccacaacuggaacugcgugaacugcgacaccuucugcgccggcuccacguucaucagcgacgaggucgcgcgggaccugucccugcaguucaagcgcccgaucaaccccaccgaccagagcuccuacaucguggacagcgugaccgucaagaacggguccauccaccucuacuucgacaaggccggccagaagaccuacgagcggcacagccugucccacuucgugaaccuggacaaccuccgcgccaacaacacgaaggggagccugcccaucaacgugaucgucuucgacggcaaguccaagugcgaggagagcuccgccaagagcgccuccguguacuacagccagcugaugugccagcccauccuccugcuggaccaggcgcucguguccgacgucggcgacagcgccgagguggccgugaagauguucgacgccuacgucaacaccuucagcuccaccuucaacgugccgauggagaagcugaagacccugguggccacggcggaggccgagcucgccaagaacgucagccuggacaacgugcuguccaccuucaucagcgccgcgcggcagggguucguggacuccgacgucgagaccaaggacgugguggagugccucaagcugagccaccaguccgacaucgaggucaccggcgacagcugcaacaacuacaugcugacguacaacaagguggagaacaugaccccccgcgaccucggggccugcaucgacugcuccgcccggcacaucaacgcccagguggccaagagccacaacaucgcgcugaucuggaacgucaaggacuucaugucccugagcgagcagcuccgcaagcagauccgcuccgccgccaagaagaacaaccugcccuucaagcugaccugcgccaccacgcggcagguggugaacgucgugaccaccaagaucgcccucaagggcgggugaggacuagucccuguucccagagcccacuuuuuuuucuuuuuuugaaauaaaauagccugucuuucagaucucaaaggcucuuuucagagccaccaaaaaaaaaaaaaaaaaaaaaaaaaaaaaaaaaaaaaaaaaaaaaaaaaaaaaaaaaaaaaaaaaaaaaaaaaaaaaaaaaaaaaaaaaaaaaaaaaaaaa

SEQ ID NO: 20039 - RNA, 6113 nt, Artificial Sequence
  SARS-CoV-2__MT536977.1__non-structural protein 3 (NSP3) mRNA gc
aggagagucccgcagucggcguccagcggcucugcuuguucgugugugugucguugcaggccuuauucaagcuuaccauggcccccaccaaggugaccuucggcgacgacacggucaucgaggugcagggguacaagagcgugaacaucaccuucgagcuggacgagcgcaucgacaagguccucaacgagaagugcuccgccuacaccguggagcugggcaccgaggugaacgaguucgcgugcgucguggccgacgccgugaucaagacgcugcagccggucagcgagcuccugaccccccuggggaucgaccucgacgagugguccauggccaccuacuaccuguucgacgagagcggcgaguucaagcuggccucccacauguacugcagcuucuacccccccgacgaggacgaggaggagggggacugcgaggaggaggaguucgagccguccacccaguacgaguacggcacggaggacgacuaccagggcaagccccucgaguucggggcgaccagcgccgcccugcagcccgaggaggagcaggaggaggacuggcuggacgacgacucccagcagaccgugggccagcaggacgggagcgaggacaaccagaccacgaccauccagaccaucguggagguccagccccagcucgagauggagcugaccccgguggugcagacgaucgaggucaacuccuucagcggcuaccugaagcucaccgacaacguguacaucaagaacgccgacaucguggaggaggcgaagaaggucaagcccaccgugguggucaacgccgccaacguguaccugaagcacgggggcggcguggccggggcccugaacaaggcgaccaacaacgccaugcaggucgaguccgacgacuacaucgccacgaacggcccccucaagguggggggcagcugcguccuguccggccacaaccuggccaagcacugccuccacgugguggggcccaacgucaacaagggcgaggacauccagcugcugaagagcgccuacgagaacuucaaccagcacgaggugcuccuggcgccgcugcucuccgccgggaucuucggcgccgaccccauccacagccugcgggugugcgucgacaccgugcgcaccaacguguaccuggccgucuucgacaagaaccucuacgacaagcugguguccagcuuccuggagaugaagagcgagaagcagguggagcagaagaucgccgagauccccaaggaggaggucaagcccuucaucaccgaguccaagccgagcguggagcagcggaagcaggacgacaagaagaucaaggcgugcguggaggaggucacgaccacccucgaggagaccaaguuccugacggagaaccugcuccuguacaucgacaucaacgggaaccugcaccccgacuccgccacccucgugagcgacaucgacaucaccuuccugaagaaggacgcccccuacaucgugggcgacgucgugcaggagggcgugcugaccgccgucgugauccccacgaagaaggccgggggcaccaccgagaugcucgcgaaggcccugcgcaaggugccgaccgacaacuacaucacgaccuaccccgggcagggccugaacggguacaccgucgaggaggccaagaccgugcucaagaagugcaaguccgccuucuacauccugcccagcaucaucuccaacgagaagcaggagauccugggcaccgugagcuggaaccuccgggagaugcuggcgcacgccgaggagacgcgcaagcugaugcccgucugcguggagaccaaggccaucguguccaccauccagcggaaguacaagggcaucaagauccaggagggggucguggacuacggcgcccgcuucuacuucuacaccagcaagacgaccguggccucccugaucaacacccucaacgaccugaacgagacccuggucacgaugccgcucggguacgugacccacggccugaaccuggaggaggcggcccgguacaugcgcagccucaaggugcccgccaccgucuccgugagcucccccgacgccgugaccgccuacaacggguaccugacgagcuccagcaagacccccgaggagcacuucaucgagaccaucucccuggcgggcagcuacaaggacuggagcuacuccggccagagcacccagcucgggaucgaguuccugaagcggggcgacaaguccgucuacuacacgagcaacccgaccaccuuccaccuggacggggaggugaucaccuucgacaaccucaagacgcugcugucccuccgcgaggugcggaccaucaaggucuucaccaccguggacaacaucaaccugcacacgcagguggucgacaugagcaugaccuacggccagcaguucggccccaccuaccuggacggggccgacgugaccaagaucaagccccacaacucccacgagggcaagacguucuacgugcucccgaacgacgacacccugcgcgucgaggccuucgaguacuaccacaccaccgaccccagcuuccuggggcgguacauguccgcccucaaccacacgaagaaguggaaguacccccaggugaacggccugaccagcaucaagugggccgacaacaacugcuaccuggcgaccgcccuccugacccugcagcagaucgagcucaaguucaaccccccggcccugcaggacgccuacuaccgcgcgcgggccggggaggccgccaacuucugcgcccugauccucgcguacugcaacaagacggugggcgagcugggcgacguccgcgagaccauguccuaccuguuccagcacgccaaccucgacagcugcaagcgggugcugaacgucgugugcaagaccugcgggcagcagcagaccacccugaagggcguggaggccgucauguacauggggacgcucuccuacgagcaguucaagaagggcgugcagauccccugcaccugcgggaagcaggccaccaaguaccuggugcagcaggagagccccuucgucaugauguccgcccccccggcgcaguacgagcugaagcacggcaccuucacgugcgccagcgaguacaccggcaacuaccagugcgggcacuacaagcacaucaccuccaaggagacccucuacugcaucgacggcgcccugcugacgaagagcagcgaguacaaggggcccaucaccgacguguucuacaaggagaacuccuacaccaccacgaucaagcccgugaccuacaagcucgacggcgucgugugcaccgagaucgaccccaagcuggacaacuacuacaagaaggacaacagcuacuucaccgagcagccgaucgaccuggugcccaaccagcccuaccccaacgccuccuucgacaacuucaaguucgucugcgacaacaucaaguucgccgacgaccucaaccagcugacgggguacaagaagccggcgagccgcgagcugaaggugaccuucuuccccgaccucaacggcgacguggucgccaucgacuacaagcacuacacccccuccuucaagaagggcgccaagcugcugcacaagcccaucguguggcacgugaacaacgccaccaacaaggcgacguacaagccgaacaccuggugcauccggugccucuggagcaccaagcccgucgagaccuccaacagcuucgacgugcugaaguccgaggacgcccaggggauggacaaccuggccugcgaggaccucaagcccgugagcgaggagguccuggagaaccccacgauccagaaggacgugcuggagugcaacgugaagaccaccgaggucgugggcgacaucauccucaagccggccaacaacucccugaagaucaccgaggagguggggcacacggaccugauggccgcguacgucgacaacagcucccucaccaucaagaagcccaacgagcugagccgcgugcugggccucaagacccuggccacccacgggcuggccgccgugaacuccguccccugggacacgaucgccaacuacgcgaagccguuccucaacaagguggugagcaccaccaccaacaucgucacgcgcugccugaaccgggugugcaccaacuacaugcccuacuucuucacccugcuccugcagcugugcaccuucacccgcuccacgaacagccggaucaaggccuccaugcccaccaccaucgccaagaacaccgugaagagcgucggcaaguucugccucgaggccagcuucaacuaccugaagucccccaacuucagcaagcugaucaacaucaucaucugguuccuccugcuguccgugugccucggcagccugaucuacuccacggccgcgcugggggugcucaugagcaaccugggcaugccguccuacugcaccggguaccgcgagggcuaccugaacagcaccaacgucaccaucgccacguacugcaccggcuccauccccugcagcgugugccucuccgggcuggacagccuggacaccuaccccucccucgagaccauccagaucacgaucagcuccuucaagugggaccugaccgccuucggccugguggccgagugguuccucgccuacauccuguucacccgguucuucuacguccuggggcucgcggccaucaugcagcuguucuucagcuacuucgccgugcacuucaucuccaacagcuggcugauguggcugaucaucaaccucgugcagauggcccccaucuccgcgaugguccgcauguacaucuucuucgccagcuucuacuacguguggaagagcuacgugcacgucguggacggcugcaacuccagcaccugcaugaugugcuacaagcggaaccgcgccacgcggguggagugcaccaccaucgucaacggggugcgccgguccuucuacgucuacgccaacggcggcaagggguucugcaagcugcacaacuggaacugcgugaacugcgacaccuucugcgccggcagcacguucaucuccgacgagguggcgcgcgaccugagccuccaguucaagcggccgaucaaccccaccgaccaguccagcuacaucgucgacuccgugaccgugaagaacgggagcauccaccuguacuucgacaaggccggccagaagaccuacgagcgccacucccugagccacuucgucaaccucgacaaccugcgggccaacaacacgaaggggucccugcccaucaacgugaucguguucgacggcaagagcaagugcgaggaguccagcgccaaguccgccagcgucuacuacucccagcucaugugccagcccauccugcugcucgaccaggcgcuggugagcgacgugggcgacagcgccgaggucgccgugaagauguucgacgccuacgugaacaccuucuccagcaccuucaacgucccgauggagaagcugaagacccucguggccacggcggaggccgagcuggccaagaacgugucccuggacaacguccucagcaccuucaucuccgccgcgcgccagggguucguggacagcgacguggagaccaaggacgucguggagugccugaagcugucccaccagagcgacaucgaggugaccggcgacuccugcaacaacuacaugcucacguacaacaaggucgagaacaugaccccccgggaccugggggccugcaucgacugcagcgcccgccacaucaacgcccagguggccaagucccacaacaucgcgcugaucuggaacgugaaggacuucaugagccucuccgagcagcugcggaagcagauccgcagcgccgccaagaagaacaaccugcccuucaagcucaccugcgccaccacgcgccaggucgugaacguggucaccaccaagaucgcccugaagggcgggugaggacuagucccuguucccagagcccacuuuuuuuucuuuuuuugaaauaaaauagccugucuuucagaucucaaaggcucuuuucagagccaccaaaaaaaaaaaaaaaaaaaaaaaaaaaaaaaaaaaaaaaaaaaaaaaaaaaaaaaaaaaaaaaaaaaaaaaaaaaaaaaaaaaaaaaaaaaaaaaaaaaaa

SEQ ID NO: 20040 - RNA, 6113 nt, Artificial Sequence
  SARS-CoV-2__MT532437.1__non-structural protein 3 (NSP3) mRNA gc
aggagagucccgcagucggcguccagcggcucugcuuguucgugugugugucguugcaggccuuauucaagcuuaccauggcccccaccaaggugaccuucggcgacgacacggucaucgaggugcagggguacaagagcgugaacaucaccuucgagcuggacgagcgcaucgacaagguccucaacgagaagugcuccgccuacaccguggagcugggcaccgaggugaacgaguucgcgugcgucguggccgacgccgugaucaagacgcugcagccggucagcgagcuccugaccccccuggggaucgaccucgacgagugguccauggccaccuacuaccuguucgacgagagcggcgaguucaagcuggccucccacauguacugcagcuucuacccccccgacgaggacgaggaggagggggacugcgaggaggaggaguucgagccguccacccaguacgaguacggcacggaggacgacuaccagggcaagccccucgaguucggggcgaccagcgccgcccugcagcccgaggaggagcaggaggaggacuggcuggacgacgacucccagcagaccgugggccagcaggacgggagcgaggacaaccagaccacgaccauccagaccaucguggagguccagccccagcucgagauggagcugaccccgguggugcagacgaucgaggucaacuccuucagcggcuaccugaagcucaccgacaacguguacaucaagaacgccgacaucguggaggaggcgaagaaggucaagcccaccgugguggucaacgccgccaacguguaccugaagcacgggggcggcguggccggggcccugaacaaggcgaccaacaacgccaugcaggucgaguccgacgacuacaucgccacgaacggcccccucaagguggggggcagcugcguccuguccggccacaaccuggccaagcacugccuccacgugguggggcccaacgucaacaagggcgaggacauccagcugcugaagagcgccuacgagaacuucaaccagcacgaggugcuccuggcgccgcugcucuccgccgggaucuucggcgccgaccccauccacagccugcgggugugcgucgacaccgugcgcaccaacguguaccuggccgucuucgacaagaaccucuacgacaagcugguguccagcuuccuggagaugaagagcgagaagcagguggagcagaagaucgccgagauccccaaggaggaggucaagcccuucaucaccgaguccaagccgagcguggagcagcggaagcaggacgacaagaagaucaaggcgugcguggaggaggucacgaccacccucgaggagaccaaguuccugacggagaaccugcuccuguacaucgacaucaacgggaaccugcaccccgacuccgccacccucgugagcgacaucgacaucaccuuccugaagaaggacgcccccuacaucgugggcgacgucgugcaggagggcgugcugaccgccgucgugauccccacgaagaaggccgggggcaccaccgagaugcucgcgaaggcccugcgcaaggugccgaccgacaacuacaucacgaccuaccccgggcagggccugaacggguacaccgucgaggaggccaagaccgugcucaagaagugcaaguccgccuucuacauccugcccagcaucaucuccaacgagaagcaggagauccugggcaccgugagcuggaaccuccgggagaugcuggcgcacgccgaggagacgcgcaagcugaugcccgucugcguggagaccaaggccaucguguccaccauccagcggaaguacaagggcaucaagauccaggagggggucguggacuacggcgcccgcuucuacuucuacaccagcaagacgaccguggccucccugaucaacacccucaacgaccugaacgagacccuggucacgaugccgcucggguacgugacccacggccugaaccuggaggaggcggcccgguacaugcgcagccucaaggugcccgccaccgucuccgugagcucccccgacgccgugaccgccuacaacggguaccugacgagcuccagcaagacccccgaggagcacuucaucgagaccaucucccuggcgggcagcuacaaggacuggagcuacuccggccagagcacccagcucgggaucgaguuccugaagcggggcgacaaguccgucuacuacacgagcaacccgaccaccuuccaccuggacggggaggugaucaccuucgacaaccucaagacgcugcugucccuccgcgaggugcggaccaucaaggucuucaccaccguggacaacaucaaccugcacacgcagguggucgacaugagcaugaccuacggccagcaguucggccccaccuaccuggacggggccgacgugaccaagaucaagccccacaacucccacgagggcaagacguucuacgugcucccgaacgacgacacccugcgcgucgaggccuucgaguacuaccacaccaccgaccccagcuuccuggggcgguacauguccgcccucaaccacacgaagaaguggaaguacccccaggugaacggccugaccagcaucaagugggccgacaacaacugcuaccuggcgaccgcccuccugacccugcagcagaucgagcucaaguucaaccccccggcccugcaggacgccuacuaccgcgcgcgggccggggaggccgccaacuucugcgcccugauccucgcguacugcaacaagacggugggcgagcugggcgacguccgcgagaccauguccuaccuguuccagcacgccaaccucgacagcugcaagcgggugcugaacgucgugugcaagaccugcgggcagcagcagaccacccugaagggcguggaggccgucauguacauggggacgcucuccuacgagcaguucaagaagggcgugcagauccccugcaccugcgggaagcaggccaccaaguaccuggugcagcaggagagccccuucgucaugauguccgcccccccggcgcaguacgagcugaagcacggcaccuucacgugcgccagcgaguacaccggcaacuaccagugcgggcacuacaagcacaucaccuccaaggagacccucuacugcaucgacggcgcccugcugacgaagagcagcgaguacaaggggcccaucaccgacguguucuacaaggagaacuccuacaccaccacgaucaagcccgugaccuacaagcucgacggcgucgugugcaccgagaucgaccccaagcuggacaacuacuacaagaaggacaacagcuacuucaccgagcagccgaucgaccuggugcccaaccagcccuaccccaacgccuccuucgacaacuucaaguucgucugcgacaacaucaaguucgccgacgaccucaaccagcugacgggguacaagaagccggcgagccgcgagcugaaggugaccuucuuccccgaccucaacggcgacguggucgccaucgacuacaagcacuacacccccuccuucaagaagcgggccaagcugcugcacaagcccaucguguggcacgugaacaacgccaccaacaaggcgacguacaagccgaacaccuggugcauccgcugccucuggagcaccaagcccgucgagaccuccaacagcuucgacgugcugaaguccgaggacgcccagggcauggacaaccuggccugcgaggaccucaagcccgugagcgaggaggucguggagaaccccacgauccagaaggacgugcuggagugcaacgucaagaccaccgagguggugggggacaucauccugaagccggccaacaacucccucaagaucaccgaggaggucggccacacggaccugauggccgcguacguggacaacagcucccugaccaucaagaagcccaacgagcucagccgcgugcuggggcugaagacccucgccacccacggccuggccgccgucaacuccgugcccugggacacgaucgccaacuacgcgaagccguuccugaacaagguggucagcaccaccaccaacaucgugacgcggugccucaaccgcgugugcaccaacuacaugcccuacuucuucacccugcugcuccagcugugcaccuucacccgguccacgaacagccgcaucaaggccuccaugcccaccaccaucgccaagaacaccgucaagagcguggggaaguucugccuggaggccagcuucaacuaccucaagucccccaacuucagcaagcugaucaacaucaucaucugguuccugcuccuguccgugugccugggcagccucaucuacuccacggccgcgcugggcguccugaugagcaaccucgggaugccguccuacugcaccggcuaccgggagggguaccugaacagcaccaacgugaccaucgccacguacugcaccggcuccauccccugcagcgugugccuguccggccucgacagccuggacaccuaccccucccuggagaccauccagaucacgaucagcuccuucaagugggaccucaccgccuucgggcuggucgccgagugguuccuggccuacauccucuucacccgcuucuucuacgugcugggccuggcggccaucaugcagcucuucuucagcuacuucgccgugcacuucaucuccaacagcuggcugauguggcugaucaucaaccugguccagauggcccccaucuccgcgauggugcggauguacaucuucuucgccagcuucuacuacguguggaagagcuacguccacgugguggacgggugcaacuccagcaccugcaugaugugcuacaagcgcaaccgggccacgcgcgucgagugcaccaccaucgugaacggcguccggcgcuccuucuacguguacgccaacgggggcaagggcuucugcaagcuccacaacuggaacugcgugaacugcgacaccuucugcgccgggagcacguucaucuccgacgaggucgcgcgggaccugagccugcaguucaagcgcccgaucaaccccaccgaccaguccagcuacaucguggacuccgugaccgucaagaacggcagcauccaccucuacuucgacaaggccgggcagaagaccuacgagcggcacucccugagccacuucgugaaccuggacaaccuccgcgccaacaacacgaagggcucccugcccaucaacgugaucgucuucgacgggaagagcaagugcgaggaguccagcgccaaguccgccagcguguacuacucccagcugaugugccagcccauccuccugcuggaccaggcgcucgugagcgacgucggcgacagcgccgagguggccgugaagauguucgacgccuacgucaacaccuucuccagcaccuucaacgugccgauggagaagcugaagacccugguggccacggcggaggccgagcucgccaagaacgucucccuggacaacgugcugagcaccuucaucuccgccgcgcggcagggcuucguggacagcgacgucgagaccaaggacgugguggagugccucaagcugucccaccagagcgacaucgaggucaccggggacuccugcaacaacuacaugcugacguacaacaagguggagaacaugaccccccgcgaccucggcgccugcaucgacugcagcgcccggcacaucaacgcccagguggccaagucccacaacaucgcgcugaucuggaacgucaaggacuucaugagccuguccgagcagcuccgcaagcagauccgcagcgccgccaagaagaacaaccugcccuucaagcugaccugcgccaccacgcggcagguggugaacgucgugaccaccaagaucgcccucaaggggggcugaggacuagucccuguucccagagcccacuuuuuuuucuuuuuuugaaauaaaauagccugucuuucagaucucaaaggcucuuuucagagccaccaaaaaaaaaaaaaaaaaaaaaaaaaaaaaaaaaaaaaaaaaaaaaaaaaaaaaaaaaaaaaaaaaaaaaaaaaaaaaaaaaaaaaaaaaaaaaaaaaaaaa

SEQ ID NO: 20041 - RNA, 6113 nt, Artificial Sequence
  SARS-CoV-2__MT517420.1__non-structural protein 3 (NSP3) mRNA gc
aggagagucccgcagucggcguccagcggcucugcuuguucgugugugugucguugcaggccuuauucaagcuuaccauggcccccaccaaggugaccuucggcgacgacacggucaucgaggugcagggguacaagagcgugaacaucaccuucgagcuggacgagcgcaucgacaagguccucaacgagaagugcuccgccuacaccguggagcugggcaccgaggugaacgaguucgcgugcgucguggccgacgccgugaucaagacgcugcagccggucagcgagcuccugaccccccuggggaucgaccucgacgagugguccauggccaccuacuaccuguucgacgagagcggcgaguucaagcuggccucccacauguacugcagcuucuacccccccgacgaggacgaggaggagggggacugcgaggaggaggaguucgagccguccacccaguacgaguacggcacggaggacgacuaccagggcaagccccucgaguucggggcgaccagcgccgcccugcagcacgaggaggagcaggaggaggacuggcuggacgacgacucccagcagaccgugggccagcaggacgggagcgaggacaaccagaccacgaccauccagaccaucguggagguccagccccagcucgagauggagcugacccccguggugcagacgaucgaggucaacuccuucagcggcuaccugaagcucaccgacaacguguacaucaagaacgccgacaucguggaggaggcgaagaaggucaagccgaccgugguggucaacgccgccaacguguaccugaagcacgggggcggcguggccggggcccugaacaaggcgaccaacaacgccaugcaggucgaguccgacgacuacaucgccacgaacggcccccucaagguggggggcagcugcguccuguccggccacaaccuggccaagcacugccuccacgugguggggcccaacgucaacaagggcgaggacauccagcugcugaagagcgccuacgagaacuucaaccagcacgaggugcuccuggcgccccugcucuccgccgggaucuucggcgccgacccgauccacagccugcgggugugcgucgacaccgugcgcaccaacguguaccuggccgucuucgacaagaaccucuacgacaagcugguguccagcuuccuggagaugaagagcgagaagcagguggagcagaagaucgccgagauccccaaggaggaggucaagcccuucaucaccgaguccaagcccagcguggagcagcggaagcaggacgacaagaagaucaaggcgugcguggaggaggucacgaccacccucgaggagaccaaguuccugacggagaaccugcuccuguacaucgacaucaacgggaaccugcacccggacuccgccacccucgugagcgacaucgacaucaccuuccugaagaaggacgcccccuacaucgugggcgacgucgugcaggagggcgugcugaccgccgucgugauccccacgaagaaggccgggggcaccaccgagaugcucgcgaaggcccugcgcaaggugcccaccgacaacuacaucacgaccuacccggggcagggccugaacggguacaccgucgaggaggccaagaccgugcucaagaagugcaaguccgccuucuacauccugcccagcaucaucuccaacgagaagcaggagauccugggcaccgugagcuggaaccuccgggagaugcuggcgcacgccgaggagacgcgcaagcugaugcccgucugcguggagaccaaggccaucguguccaccauccagcggaaguacaagggcaucaagauccaggagggggucguggacuacggcgcccgcuucuacuucuacaccagcaagacgaccguggccucccugaucaacacccucaacgaccugaacgagacccuggucacgaugccccucggguacgugacccacggccugaaccuggaggaggcggcccgguacaugcgcagccucaaggugccggccaccgucuccgugagcucccccgacgccgugaccgccuacaacggguaccugacgagcuccagcaagacccccgaggagcacuucaucgagaccaucucccuggcgggcagcuacaaggacuggagcuacuccggccagagcacccagcucgggaucgaguuccugaagcggggcgacaaguccgucuacuacacgagcaaccccaccaccuuccaccuggacggggaggugaucaccuucgacaaccucaagacgcugcugucccuccgcgaggugcggaccaucaaggucuucaccaccguggacaacaucaaccugcacacgcagguggucgacaugagcaugaccuacggccagcaguucggcccgaccuaccuggacggggccgacgugaccaagaucaagccccacaacucccacgagggcaagacguucuacgugcuccccaacgacgacacccugcgcgucgaggccuucgaguacuaccacaccaccgacccgagcuuccuggggcgguacauguccgcccucaaccacacgaagaaguggaaguacccccaggugaacggccugaccagcaucaagugggccgacaacaacugcuaccuggcgaccgcccuccugacccugcagcagaucgagcucaaguucaacccccccgcccugcaggacgccuacuaccgcgcgcgggccggggaggccgccaacuucugcgcccugauccucgcguacugcaacaagacggugggcgagcugggcgacguccgcgagaccauguccuaccuguuccagcacgccaaccucgacagcugcaagcgggugcugaacgucgugugcaagaccugcgggcagcagcagaccacccugaagggcguggaggccgucauguacauggggacgcucuccuacgagcaguucaagaagggcgugcagaucccgugcaccugcgggaagcaggccaccaaguaccuggugcagcaggagagccccuucgucaugauguccgccccccccgcgcaguacgagcugaagcacggcaccuucacgugcgccagcgaguacaccggcaacuaccagugcgggcacuacaagcacaucaccuccaaggagacccucuacugcaucgacggcgcccugcugacgaagagcagcgaguacaaggggccgaucaccgacguguucuacaaggagaacuccuacaccaccacgaucaagcccgugaccuacaagcucgacggcgucgugugcaccgagaucgaccccaagcuggacaacuacuacaagaaggacaacagcuacuucaccgagcagcccaucgaccuggugccgaaccagcccuaccccaacgccuccuucgacaacuucaaguucgucugcgacaacaucaaguucgccgacgaccucaaccagcugacgggguacaagaagcccgcgagccgcgagcugaaggugaccuucuucccggaccucaacggcgacguggucgccaucgacuacaagcacuacacccccuccuucaagaagggcgccaagcugcugcacaagcccaucguguggcacgugaacaacgccaccaacaaggcgacguacaagcccaacaccuggugcauccggugccucuggagcaccaagccggucgagaccuccaacagcuucgacgugcugaaguccgaggacgcccaggggauggacaaccuggccugcgaggaccucaagcccgugagcgaggaggucguggagaaccccacgauccagaaggacgugcuggagugcaacgucaagaccaccgagguggugggcgacaucauccugaagcccgccaacaacucccucaagaucaccgaggaggucgggcacacggaccugauggccgcguacguggacaacagcucccugaccaucaagaagccgaacgagcucagccgcgugcugggccugaagacccucgccacccacgggcuggccgccgucaacuccgugcccugggacacgaucgccaacuacgcgaagcccuuccugaacaagguggucagcaccaccaccaacaucgugacgcgcugccucaaccgggugugcaccaacuacaugccguacuucuucacccugcugcuccagcugugcaccuucacccgcuccacgaacagccggaucaaggccuucaugcccaccaccaucgccaagaacaccgucaaguccgugggcaaguucugccuggaggccagcuucaacuaccucaagagccccaacuucuccaagcugaucaacaucaucaucugguuccugcuccugagcgugugccugggcucccucaucuacagcacggccgcgcuggggguccugauguccaaccucggcaugcccagcuacugcaccggguaccgcgagggcuaccugaacuccaccaacgugaccaucgccacguacugcaccggcagcaucccgugcuccgugugccugagcgggcucgacucccuggacaccuaccccagccuggagaccauccagaucacgaucuccagcuucaagugggaccucaccgccuucggccuggucgccgagugguuccuggccuacauccucuucacccgguucuucuacgugcuggggcuggcggccaucaugcagcucuucuucuccuacuucgccgugcacuucaucagcaacuccuggcugauguggcugaucaucaaccugguccagauggcccccaucagcgcgauggugcgcauguacaucuucuucgccuccuucuacuacguguggaagagcuacguccacgugguggacggcugcaacagcuccaccugcaugaugugcuacaagcggaaccgcgccacgcgggucgagugcaccaccaucgugaacgggguccgccggagcuucuacguguacgccaacggcggcaagggguucugcaagcuccacaacuggaacugcgugaacugcgacaccuucugcgccggcuccacguucaucagcgacgaggucgcgcgcgaccugucccugcaguucaagcggcccaucaacccgaccgaccagagcuccuacaucguggacagcgugaccgucaagaacggguccauccaccucuacuucgacaaggccggccagaagaccuacgagcgccacagccugucccacuucgugaaccuggacaaccuccgggccaacaacacgaaggggagccugcccaucaacgugaucgucuucgacggcaaguccaagugcgaggagagcuccgccaagagcgccuccguguacuacagccagcugaugugccagcccauccuccugcuggaccaggcgcucguguccgacgucggcgacagcgccgagguggccgugaagauguucgacgccuacgucaacaccuucagcuccaccuucaacgugcccauggagaagcugaagacccugguggccacggcggaggccgagcucgccaagaacgucagccuggacaacgugcuguccaccuucaucagcgccgcgcgccagggguucguggacuccgacgucgagaccaaggacgugguggagugccucaagcugagccaccaguccgacaucgaggucaccggcgacagcugcaacaacuacaugcugacguacaacaagguggagaacaugaccccgcgggaccucggggccugcaucgacugcuccgcccgccacaucaacgcccagguggccaagagccacaacaucgcgcugaucuggaacgucaaggacuucaugucccugagcgagcagcuccggaagcagauccgcuccgccgccaagaagaacaaccugcccuucaagcugaccugcgccaccacgcgccagguggugaacgucgugaccaccaagaucgcccucaagggcgggugaggacuagucccuguucccagagcccacuuuuuuuucuuuuuuugaaauaaaauagccugucuuucagaucucaaaggcucuuuucagagccaccaaaaaaaaaaaaaaaaaaaaaaaaaaaaaaaaaaaaaaaaaaaaaaaaaaaaaaaaaaaaaaaaaaaaaaaaaaaaaaaaaaaaaaaaaaaaaaaaaaaaa

SEQ ID NO: 20042 - RNA, 6113 nt, Artificial Sequence
  SARS-CoV-2__MT517423.1__non-structural protein 3 (NSP3) mRNA gc
aggagagucccgcagucggcguccagcggcucugcuuguucgugugugugucguugcaggccuuauucaagcuuaccauggcccccaccaaggugaccuucggcgacgacacggucaucgaggugcagggguacaagagcgugaacaucaccuucgagcuggacgagcgcaucgacaagguccucaacgagaagugcuccgccuacaccguggagcugggcaccgaggugaacgaguucgcgugcgucguggccgacgccgugaucaagacgcugcagccggucagcgagcuccugaccccccuggggaucgaccucgacgagugguccauggccaccuacuaccuguucgacgagagcggcgaguucaagcuggccucccacauguacugcagcuucuacccccccgacgaggacgaggaggagggggacugcgaggaggaggaguucgagccguccacccaguacgaguacggcacggaggacgacuaccagggcaagccccucgaguucggggcgaccagcgccgcccugcagcccgaggaggagcaggaggaggacuggcuggacgacgacucccagcagaccgugggccagcaggacgggagcgaggacaaccagaccacgaccauccagaccaucguggagguccagccccagcucgagauggagcugaccccgguggugcagacgaucgaggucaacuccuucagcggcuaccugaagcucaccgacaacguguacaucaagaacgccgacaucguggaggaggcgaagaaggucaagcccaccgugguggucaacgccgccaacguguaccugaagcacgggggcggcguggccggggcccugaacaaggcgaccaacaacgccaugcaggucgaguccgacgacuacaucgccacgaacggcccccucaagguggggggcagcugcguccuguccggccacaaccuggccaagcacugccuccacgugguggggcccaacgucaacaagggcgaggacauccagcugcugaagagcgccuacgagaacuucaaccagcacgaggugcuccuggcgccgcugcucuccgccgggaucuucggcgccgaccccauccacagccugcgggugugcgucgacaccgugcgcaccaacguguaccuggccgucuucgacaagaaccucuacgacaagcugguguccagcuuccuggagaugaagagcgagaagcagguggagcagaagaucgccgagauccccaaggaggaggucaagcccuucaucaccgaguccaagccgagcguggagcagcggaagcaggacgacaacaagaucaaggcgugcguggaggaggucacgaccacccucgaggagaccaaguuccugacggagaaccugcuccuguacaucgacaucaacgggaaccugcaccccgacuccgccacccucgugagcgacaucgacaucaccuuccugaagaaggacgcccccuacaucgugggcgacgucgugcaggagggcgugcugaccgccgucgugauccccacgaagaaggccgggggcaccaccgagaugcucgcgaaggcccugcgcaaggugccgaccgacaacuacaucacgaccuaccccgggcagggccugaacggguacaccgucgaggaggccaagaccgugcucaagaagugcaaguccgccuucuacauccugcccagcaucaucuccaacgagaagcaggagauccugggcaccgugagcuggaaccuccgggagaugcuggcgcacgccgaggagacgcgcaagcugaugcccgucugcguggagaccaaggccaucguguccaccauccagcggaaguacaagggcaucaagauccaggagggggucguggacuacggcgcccgcuucuacuucuacaccagcaagacgaccguggccucccugaucaacacccucaacgaccugaacgagacccuggucacgaugccgcucggguacgugacccacggccugaaccuggaggaggcggcccgguacaugcgcagccucaaggugcccgccaccgucuccgugagcucccccgacgccgugaccgccuacaacggguaccugacgagcuccagcaagacccccgaggagcacuucaucgagaccaucucccuggcgggcagcuacaaggacuggagcuacuccggccagagcacccagcucgggaucgaguuccugaagcggggcgacaaguccgucuacuacacgagcaacccgaccaccuuccaccuggacggggaggugaucaccuucgacaaccucaagacguuccugucccugcgcgaggugcggaccaucaaggucuucaccaccguggacaacaucaaccuccacacgcagguggucgacaugagcaugaccuacggccagcaguucggccccaccuaccuggacggggccgacgugaccaagaucaagccccacaacucccacgagggcaagacguucuacgugcugccgaacgacgacacccuccgcgucgaggccuucgaguacuaccacaccaccgaccccagcuuccuggggcgguacauguccgcccugaaccacacgaagaaguggaaguacccccaggugaacggccucaccagcaucaagugggccgacaacaacugcuaccuggcgaccgcccugcucacccugcagcagaucgagcugaaguucaaccccccggcccuccaggacgccuacuaccgcgcgcgggccggggaggccgccaacuucugcgcccugauccuggcguacugcaacaagacggugggcgagcucggcgacguccgcgagaccauguccuaccuguuccagcacgccaaccuggacagcugcaagcgggugcucaacgucgugugcaagaccugcgggcagcagcagaccacccugaagggcguggaggccgucauguacauggggacgcuguccuacgagcaguucaagaagggcgugcagauccccugcaccugcgggaagcaggccaccaaguaccucgugcagcaggagagccccuucgucaugauguccgcccccccggcgcaguacgagcugaagcacggcaccuucacgugcgccagcgaguacaccggcaacuaccagugcgggcacuacaagcacaucaccuccaaggagacccuguacugcaucgacggcgcccuccugacgaagagcagcgaguacaaggggcccaucaccgacguguucuacaaggagaacuccuacaccaccacgaucaagcccgugaccuacaagcuggacggcgucgugugcaccgagaucgaccccaagcucgacaacuacuacaagaaggacaacagcuacuucaccgagcagccgaucgaccuggugcccaaccagcccuaccccaacgccuccuucgacaacuucaaguucgucugcgacaacaucaaguucgccgacgaccugaaccagcucacgggguacaagaagccggcgagccgcgagcugaaggugaccuucuuccccgaccugaacggcgacguggucgccaucgacuacaagcacuacacccccuccuucaagaagggcgccaagcuccugcacaagcccaucguguggcacgugaacaacgccaccaacaaggcgacguacaagccgaacaccuggugcauccggugccuguggagcaccaagcccgucgagaccuccaacagcuucgacgugcucaaguccgaggacgcccaggggauggacaaccuggccugcgaggaccugaagcccgugagcgaggaggucguggagaaccccacgauccagaaggacgugcucgagugcaacgucaagaccaccgagguggugggcgacaucauccugaagccggccaacaacucccugaagaucaccgaggaggucgggcacacggaccucauggccgcguacguggacaacagcucccugaccaucaagaagcccaacgagcugagccgcgugcucggccugaagacccuggccacccacgggcucgccgccgucaacuccgugcccugggacacgaucgccaacuacgcgaagccguuccugaacaagguggucagcaccaccaccaacaucgugacgcgcugccugaaccgggugugcaccaacuacaugcccuacuucuucacccuccugcugcagcucugcaccuucacccgcuccacgaacagccggaucaaggccuccaugcccaccaccaucgccaagaacaccgucaagagcgugggcaaguucugccuggaggccagcuucaacuaccugaagucccccaacuucagcaagcucaucaacaucaucaucugguuccugcugcucuccgugugccugggcagccugaucuacuccacggccgcgcucgggguccugaugagcaaccugggcaugccguccuacugcaccggguaccgcgagggcuaccucaacagcaccaacgugaccaucgccacguacugcaccggcuccauccccugcagcgugugccuguccgggcuggacagccucgacaccuaccccucccuggagaccauccagaucacgaucagcuccuucaagugggaccugaccgccuucggccucgucgccgagugguuccuggccuacauccuguucacccgguucuucuacgugcucgggcuggcggccaucaugcagcuguucuucagcuacuucgccgugcacuucaucuccaacagcuggcucauguggcugaucaucaaccugguccagauggcccccaucuccgcgauggugcgcauguacaucuucuucgccagcuucuacuacguguggaagagcuacguccacgugguggacggcugcaacuccagcaccugcaugaugugcuacaagcggaaccgcgccacgcgggucgagugcaccaccaucgugaacgggguccgccgguccuucuacguguacgccaacggcggcaagggguucugcaagcugcacaacuggaacugcgugaacugcgacaccuucugcgccggcagcacguucaucuccgacgaggucgcgcgcgaccucagccugcaguucaagcggccgaucaaccccaccgaccaguccagcuacaucguggacuccgugaccgucaagaacgggagcauccaccuguacuucgacaaggccggccagaagaccuacgagcgccacucccucagccacuucgugaaccuggacaaccugcgggccaacaacacgaaggggucccuccccaucaacgugaucgucuucgacggcaagagcaagugcgaggaguccagcgccaaguccgccagcguguacuacucccagcugaugugccagcccauccugcuccuggaccaggcgcuggugagcgacgucggcgacagcgccgagguggccgugaagauguucgacgccuacgucaacaccuucuccagcaccuucaacgugccgauggagaagcucaagacccugguggccacggcggaggccgagcuggccaagaacgucucccucgacaacgugcugagcaccuucaucuccgccgcgcgccagggguucguggacagcgacgucgagaccaaggacgugguggagugccugaagcucucccaccagagcgacaucgaggucaccggcgacuccugcaacaacuacaugcugacguacaacaagguggagaacaugaccccccgggaccugggggccugcaucgacugcagcgcccgccacaucaacgcccagguggccaagucccacaacaucgcgcucaucuggaacgucaaggacuucaugagccuguccgagcagcugcggaagcagauccgcagcgccgccaagaagaacaaccuccccuucaagcugaccugcgccaccacgcgccagguggugaacgucgugaccaccaagaucgcccugaagggcgggugaggacuagucccuguucccagagcccacuuuuuuuucuuuuuuugaaauaaaauagccugucuuucagaucucaaaggcucuuuucagagccaccaaaaaaaaaaaaaaaaaaaaaaaaaaaaaaaaaaaaaaaaaaaaaaaaaaaaaaaaaaaaaaaaaaaaaaaaaaaaaaaaaaaaaaaaaaaaaaaaaaaaa

SEQ ID NO: 20043 - RNA, 6113 nt, Artificial Sequence
  SARS-CoV-2__MT517424.1__non-structural protein 3 (NSP3) mRNA gc
aggagagucccgcagucggcguccagcggcucugcuuguucgugugugugucguugcaggccuuauucaagcuuaccauggcccccaccaaggugaccuucggcgacgacacggucaucgaggugcagggguacaagagcgugaacaucaccuucgagcuggacgagcgcaucgacaagguccucaacgagaagugcuccgccuacaccguggagcugggcaccgaggugaacgaguucgcgugcgucguggccgacgccgugaucaagacgcugcagccggucagcgagcuccugaccccccuggggaucgaccucgacgagugguccauggccaccuacuaccuguucgacgagagcggcgaguucaagcuggccucccacauguacugcagcuucuacccccccgacgaggacgaggaggagggggacugcgaggaggaggaguucgagccguccacccaguacgaguacggcacggaggacgacuaccagggcaagccccucgaguucggggcgaccagcgccgcccugcagcacgaggaggagcaggaggaggacuggcuggacgacgacucccagcagaccgugggccagcaggacgggagcgaggacaaccagaccacgaccauccagaccaucguggagguccagccccagcucgagauggagcugacccccguggugcagacgaucgaggucaacuccuucagcggcuaccugaagcucaccgacaacguguacaucaagaacgccgacaucguggaggaggcgaagaaggucaagccgaccgugguggucaacgccgccaacguguaccugaagcacgggggcggcguggccggggcccugaacaaggcgaccaacaacgccaugcaggucgaguccgacgacuacaucgccacgaacggcccccucaagguggggggcagcugcguccuguccggccacaaccuggccaagcacugccuccacgugguggggcccaacgucaacaagggcgaggacauccagcugcugaagagcgccuacgagaacuucaaccagcacgaggugcuccuggcgccccugcucuccgccgggaucuucggcgccgacccgauccacagccugcgggugugcgucgacaccgugcgcaccaacguguaccuggccgucuucgacaagaaccucuacgacaagcugguguccagcuuccuggagaugaagagcgagaagcagguggagcagaagaucgccgagauccccaaggaggaggucaagcccuucaucaccgaguccaagcccagcguggagcagcggaagcaggacgacaagaagaucaaggcgugcguggaggaggucacgaccacccucgaggagaccaaguuccugacggagaaccugcuccuguacaucgacaucaacgggaaccugcacccggacuccgccacccucgugagcgacaucgacaucaccuuccugaagaaggacgcccccuacaucgugggcgacgucgugcaggagggcgugcugaccgccgucgugauccccacgaagaaggccgggggcaccaccgagaugcucgcgaaggcccugcgcaaggugcccaccgacaacuacaucacgaccuacccggggcagggccugaacggguacaccgucgaggaggccaagaccgugcucaagaagugcaaguccgccuucuacauccugcccagcaucaucuccaacgagaagcaggagauccugggcaccgugagcuggaaccuccgggagaugcuggcgcacgccgaggagacgcgcaagcugaugcccgucugcguggagaccaaggccaucguguccaccauccagcggaaguacaagggcaucaagauccaggagggggucguggacuacggcgcccgcuucuacuucuacaccagcaagacgaccguggccucccugaucaacacccucaacgaccugaacgagacccuggucacgaugccccucggguacgugacccacggccugaaccuggaggaggcggcccgguacaugcgcagccucaaggugccggccaccgucuccgugagcucccccgacgccgugaccgccuacaacggguaccugacgagcuccagcaagacccccgaggagcacuucaucgagaccaucucccuggcgggcagcuacaaggacuggagcuacuccggccagagcacccagcucgggaucgaguuccugaagcggggcgacaaguccgucuacuacacgagcaaccccaccaccuuccaccuggacggggaggugaucaccuucgacaaccucaagacgcugcugucccuccgcgaggugcggaccaucaaggucuucaccaccguggacaacaucaaccugcacacgcagguggucgacaugagcaugaccuacggccagcaguucggcccgaccuaccuggacggggccgacgugaccaagaucaagccccacaacucccacgagggcaagacguucuacgugcuccccaacgacgacacccugcgcgucgaggccuucgaguacuaccacaccaccgacccgagcuuccuggggcgguacauguccgcccucaaccacacgaagaaguggaaguacccccaggugaacggccugaccagcaucaagugggccgacaacaacugcuaccuggcgaccgcccuccugacccugcagcagaucgagcucaaguucaacccccccgcccugcaggacgccuacuaccgcgcgcgggccggggaggccgccaacuucugcgcccugauccucgcguacugcaacaagacggugggcgagcugggcgacguccgcgagaccauguccuaccuguuccagcacgccaaccucgacagcugcaagcgggugcugaacgucgugugcaagaccugcgggcagcagcagaccacccugaagggcguggaggccgucauguacauggggacgcucuccuacgagcaguucaagaagggcgugcagaucccgugcaccugcgggaagcaggccaccaaguaccuggugcagcaggagagccccuucgucaugauguccgccccccccgcgcaguacgagcugaagcacggcaccuucacgugcgccagcgaguacaccggcaacuaccagugcgggcacuacaagcacaucaccuccaaggagacccucuacugcaucgacggcgcccugcugacgaagagcagcgaguacaaggggccgaucaccgacguguucuacaaggagaacuccuacaccaccacgaucaagcccgugaccuacaagcucgacggcgucgugugcaccgagaucgaccccaagcuggacaacuacuacaagaaggacaacagcuacuucaccgagcagcccaucgaccuggugccgaaccagcccuaccccaacgccuccuucgacaacuucaaguucgucugcgacaacaucaaguucgccgacgaccucaaccagcugacgggguacaagaagcccgcgagccgcgagcugaaggugaccuucuucccggaccucaacggcgacguggucgccaucgacuacaagcacuacacccccuccuucaagaagggcgccaagcugcugcacaagcccaucguguggcacgugaacaacgccaccaacaaggcgacguacaagcccaacaccuggugcauccggugccucuggagcaccaagccggucgagaccuccaacagcuucgacgugcugaaguccgaggacgcccaggggauggacaaccuggccugcgaggaccucaagcccgugagcgaggaggucguggagaaccccacgauccagaaggacgugcuggagugcaacgucaagaccaccgagguggugggcgacaucauccugaagcccgccaacaacucccucaagaucaccgaggaggucgggcacacggaccugauggccgcguacguggacaacagcucccugaccaucaagaagccgaacgagcucagccgcgugcugggccugaagacccucgccacccacgggcuggccgccgucaacuccgugcccugggacacgaucgccaacuacgcgaagcccuuccugaacaagguggucagcaccaccaccaacaucgugacgcgcugccucaaccgggugugcaccaacuacaugccguacuucuucacccugcugcuccagcugugcaccuucacccgcuccacgaacagccggaucaaggccuccaugcccaccaccaucgccaagaacaccgucaagagcgugggcaaguucugccuggaggccagcuucaacuaccucaagucccccaacuucagcaagcugaucaacaucaucaucugguuccugcuccuguccgugugccugggcagccucaucuacuccacggccgcgcuggggguccugaugagcaaccucggcaugcccuccuacugcaccggguaccgcgagggcuaccugaacagcaccaacgugaccaucgccacguacugcaccggcuccaucccgugcagcgugugccuguccgggcucgacagccuggacaccuaccccucccuggagaccauccagaucacgaucagcuccuucaagugggaccucaccgccuucggccuggucgccgagugguuccuggccuacauccucuucacccgguucuucuacgugcuggggcuggcggccaucaugcagcucuucuucagcuacuucgccgugcacuucaucuccaacagcuggcugauguggcugaucaucaaccugguccagauggcccccaucuccgcgauggugcgcauguacaucuucuucgccagcuucuacuacguguggaagagcuacguccacgugguggacggcugcaacuccagcaccugcaugaugugcuacaagcggaaccgcgccacgcgggucgagugcaccaccaucgugaacgggguccgccgguccuucuacguguacgccaacggcggcaagggguucugcaagcuccacaacuggaacugcgugaacugcgacaccuucugcgccggcagcacguucaucuccgacgaggucgcgcgcgaccugagccugcaguucaagcggcccaucaacccgaccgaccaguccagcuacaucguggacuccgugaccgucaagaacgggagcauccaccucuacuucgacaaggccggccagaagaccuacgagcgccacucccugagccacuucgugaaccuggacaaccuccgggccaacaacacgaaggggucccugcccaucaacgugaucgucuucgacggcaagagcaagugcgaggaguccagcgccaaguccgccagcguguacuacucccagcugaugugccagcccauccuccugcuggaccaggcgcucgugagcgacgucggcgacagcgccgagguggccgugaagauguucgacgccuacgucaacaccuucuccagcaccuucaacgugcccauggagaagcugaagacccugguggccacggcggaggccgagcucgccaagaacgucucccuggacaacgugcugagcaccuucaucuccgccgcgcgccagggguucguggacagcgacgucgagaccaaggacgugguggagugccucaagcugucccaccagagcgacaucgaggucaccggcgacuccugcaacaacuacaugcugacguacaacaagguggagaacaugaccccgcgggaccucggggccugcaucgacugcagcgcccgccacaucaacgcccagguggccaagucccacaacaucgcgcugaucuggaacgucaaggacuucaugagccuguccgagcagcuccggaagcagauccgcagcgccgccaagaagaacaaccugcccuucaagcugaccugcgccaccacgcgccagguggugaacgucgugaccaccaagaucgcccucaagggcgggugaggacuagucccuguucccagagcccacuuuuuuuucuuuuuuugaaauaaaauagccugucuuucagaucucaaaggcucuuuucagagccaccaaaaaaaaaaaaaaaaaaaaaaaaaaaaaaaaaaaaaaaaaaaaaaaaaaaaaaaaaaaaaaaaaaaaaaaaaaaaaaaaaaaaaaaaaaaaaaaaaaaaa

SEQ ID NO: 20044 - RNA, 6113 nt, Artificial Sequence
  SARS-CoV-2__MT517425.1__non-structural protein 3 (NSP3) mRNA gc
aggagagucccgcagucggcguccagcggcucugcuuguucgugugugugucguugcaggccuuauucaagcuuaccauggcccccaccaaggugaccuucggcgacgacacggucaucgaggugcagggguacaagagcgugaacaucaccuucgagcuggacgagcgcaucgacaagguccucaacgagaagugcuccgccuacaccguggagcugggcaccgaggugaacgaguucgcgugcgucguggccgacgccgugaucaagacgcugcagccggucagcgagcuccugaccccccuggggaucgaccucgacgagugguccauggccaccuacuaccuguucgacgagagcggcgaguucaagcuggccucccacauguacugcagcuucuacccccccgacgaggacgaggaggagggggacugcgaggaggaggaguucgagccguccacccaguacgaguacggcacggaggacgacuaccagggcaagccccucgaguucggggcgaccagcgccgcccugcagcccgaggaggagcaggaggaggacuggcuggacgacgacucccagcagaccgugggccagcaggacgggagcgaggacaaccagaccacgaccauccagaccaucguggagguccagccccagcucgagauggagcugaccccgguggugcagacgaucgaggucaacuccuucagcggcuaccugaagcucaccgacaacguguacaucaagaacgccgacaucguggaggaggcgaagaaggucaagcccaccgugguggucaacgccgccaacguguaccugaagcacgggggcggcguggccggggcccugaacaaggcgaccaacaacgccaugcaggucgaguccgacgacuacaucgccacgaacggcccccucaagguggggggcagcugcguccuguccggccacaaccuggccaagcacugccuccacgugguggggcccaacgucaacaagggcgaggacauccagcugcugaagagcgccuacgagaacuucaaccagcacgaggugcuccuggcgccgcugcucuccgccgggaucuucggcgccgaccccauccacagccugcgggugugcgucgacaccgugcgcaccaacguguaccuggccgucuucgacaagaaccucuacgacaagcugguguccagcuuccuggagaugaagagcgagaagcagguggagcagaagaucgccgagauccccaaggaggaggucaagcccuucaucaccgaguccaagccgagcguggagcagcggaagcaggacgacaagaagaucaaggcgugcguggaggaggucacgaccacccucgaggagaccaaguuccugacggagaaccugcuccuguacaucgacaucaacgggaaccugcaccccgacuccgccacccucgugagcgacaucgacaucaccuuccugaagaaggacgcccccuacaucgugggcgacgucgugcaggagggcgugcugaccgccgucgugauccccacgaagaaggccgggggcaccaccgagaugcucgcgaaggcccugcgcaaggugccgaccgacaacuacaucacgaccuaccccgggcagggccugaacggguacaccgucgaggaggccaagaccgugcucaagaagugcaaguccgccuucuacauccugcccagcaucaucuccaacgagaagcaggagauccugggcaccgugagcuggaaccuccgggagaugcuggcgcacgccgaggagacgcgcaagcugaugcccgucugcguggagaccaaggccaucguguccaccauccagcggaaguacaagggcaucaagauccaggagggggucguggacuacggcgcccgcuucuacuucuacaccagcaagacgaccguggccucccugaucaacacccucaacgaccugaacgagacccuggucacgaugccgcucggguacgugacccacggccugaaccuggaggaggcggcccgguacaugcgcagccucaaggugcccgccaccgucuccgugagcucccccgacgccgugaccgccuacaacggguaccugacgagcuccagcaagacccccgaggagcacuucaucgagaccaucucccuggcgggcagcuacaaggacuggagcuacuccggccagagcacccagcucgggaucgaguuccugaagcggggcgacaaguccgucuacuacacgagcaacccgaccaccuuccaccuggacggggaggugaucaccuucgacaaccucaagacgcugcugucccuccgcgaggugcggaccaucaaggucuucaccaccguggacaacaucaaccugcacacgcagguggucgacaugagcaugaccuacggccagcaguucggccccaccuaccuggacggggccgacgugaccaagaucaagccccacaacucccacgagggcaagacguucuacgugcucccgaacgacgacacccugcgcgucgaggccuucgaguacuaccacaccaccgaccccagcuuccuggggcgguacauguccgcccucaaccacacgaagaaguggaaguacccccaggugaacggccugaccagcaucaagugggccgacaacaacugcuaccuggcgaccgcccuccugacccugcagcagaucgagcucaaguucaaccccccggcccugcaggacgccuacuaccgcgcgcgggccggggaggccgccaacuucugcgcccugauccucgcguacugcaacaagacggugggcgagcugggcgacguccgcgagaccauguccuaccuguuccagcacgccaaccucgacagcugcaagcgggugcugaacgucgugugcaagaccugcgggcagcagcagaccacccugaagggcguggaggccgucauguacauggggacgcucuccuacgagcaguucaagaagggcgugcagauccccugcaccugcgggaagcaggccaccaaguaccuggugcagcaggagagccccuucgucaugauguccgcccccccggcgcaguacgagcugaagcacggcaccuucacgugcgccagcgaguacaccggcaacuaccagugcgggcacuacaagcacaucaccuccaaggagacccucuacugcaucgacggcgcccugcugacgaagagcagcgaguacaaggggcccaucaccgacguguucuacaaggagaacuccuacaccaccacgaucaagcccgugaccuacaagcucgacggcgucgugugcaccgagaucgaccccaagcuggacaacuacuacaagaaggacaacagcuacuucaccgagcagccgaucgaccuggugcccaaccagcccuaccccaacgccuccuucgacaacuucaaguucgucugcgacaacaucaaguucgccgacgaccucaaccagcugacgggguacaagaagccggcgagccgcgagcugaaggugaccuucuuccccgaccucaacggcgacguggucgccaucgacuacaagcacuacacccccuccuucaagaagggcgccaagcugcugcacaagcccaucguguggcacgugaacaacgccaccaacaaggcgacguacaagccgaacaccuggugcauccggugccucuggagcaccaagcccgucgagaccuccaacagcuucgacgugcugaaguccgaggacgcccaggggauggacaaccuggccugcgaggaccucaagcccgugagcgaggaggucguggagaaccccacgauccagaaggacgugcuggagugcaacgucaagaccaccgagguggugggcgacaucauccugaagccggccaacaacucccucaagaucaccgaggaggucgggcacacggaccugaugguggccuacguggacaacagcucccugaccaucaagaagcccaacgagcucagccgcguccugggccugaagacccucgcgacccacgggcuggccgccgugaacuccgugcccugggacacgaucgccaacuacgccaagccguuccugaacaaggucgugagcaccaccaccaacaucgugacgcgcugccucaaccgggucugcaccaacuacaugcccuacuucuucacccugcugcuccagcugugcaccuucacccgcuccacgaacagccggaucaaggcguccaugcccaccaccaucgccaagaacaccgugaagagcgugggcaaguucugccuggaggccagcuucaacuaccucaagucccccaacuucagcaagcugaucaacaucaucaucugguuccugcuccuguccgucugccugggcagccucaucuacuccacggccgcccugggggugcugaugagcaaccucggcaugccguccuacugcaccggguaccgcgagggcuaccugaacagcaccaacgugaccaucgcgacguacugcaccggcuccauccccugcagcgucugccuguccgggcucgacagccuggacaccuaccccucccuggagaccauccagaucacgaucagcuccuucaagugggaccucaccgccuucggccugguggccgagugguuccuggccuacauccucuucacccgguucuucuacgugcuggggcuggccgcgaucaugcagcucuucuucagcuacuucgccguccacuucaucuccaacagcuggcugauguggcugaucaucaaccuggugcagauggcccccaucuccgccauggugcgcauguacaucuucuucgcgagcuucuacuacgucuggaagagcuacgugcacguggucgacggcugcaacuccagcaccugcaugaugugcuacaagcggaaccgcgccacgcggguggagugcaccaccaucgucaacggggugcgccgguccuucuacguguacgccaacggcggcaagggguucugcaagcuccacaacuggaacugcgucaacugcgacaccuucugcgccggcagcacguucaucuccgacgagguggcccgcgaccugagccugcaguucaagcggccgaucaaccccaccgaccaguccagcuacaucguggacuccgucaccgugaagaacgggagcauccaccucuacuucgacaaggcgggccagaagaccuacgagcgccacucccugagccacuucgugaaccuggacaaccuccgggccaacaacacgaaggggucccugcccaucaacgucaucguguucgacggcaagagcaagugcgaggaguccagcgccaaguccgccagcguguacuacucccagcugaugugccagcccauccuccugcuggaccaggcccucgucagcgacgugggcgacagcgcggagguggccgucaagauguucgacgccuacgugaacaccuucuccagcaccuucaacgugccgauggagaagcugaagacccuggucgccacggccgaggcggagcucgccaagaacgugucccuggacaacgugcugagcaccuucaucuccgccgcccgccagggguucgucgacagcgacguggagaccaaggacguggucgagugccucaagcugucccaccagagcgacaucgaggugaccggcgacuccugcaacaacuacaugcugacguacaacaagguggagaacaugaccccccgggaccucggggcgugcaucgacugcagcgcccgccacaucaacgcccaggucgccaagucccacaacaucgcccugaucuggaacgugaaggacuucaugagccuguccgagcagcuccggaagcagauccgcagcgcggccaagaagaacaaccugcccuucaagcugaccugcgccaccacgcgccagguggucaacguggugaccaccaagaucgcccucaagggcgggugaggacuagucccuguucccagagcccacuuuuuuuucuuuuuuugaaauaaaauagccugucuuucagaucucaaaggcucuuuucagagccaccaaaaaaaaaaaaaaaaaaaaaaaaaaaaaaaaaaaaaaaaaaaaaaaaaaaaaaaaaaaaaaaaaaaaaaaaaaaaaaaaaaaaaaaaaaaaaaaaaaaaa

SEQ ID NO: 20045 - RNA, 6113 nt, Artificial Sequence
  SARS-CoV-2__MT517427.1__non-structural protein 3 (NSP3) mRNA gc
aggagagucccgcagucggcguccagcggcucugcuuguucgugugugugucguugcaggccuuauucaagcuuaccauggcccccaccaaggugaccuucggcgacgacacggucaucgaggugcagggguacaagagcgugaacaucaccuucgagcuggacgagcgcaucgacaagguccucaacgagaagugcuccgccuacaccguggagcugggcaccgaggugaacgaguucgcgugcgucguggccgacgccgugaucaagacgcugcagccggucagcgagcuccugaccccccuggggaucgaccucgacgagugguccauggccaccuacuaccuguucgacgagagcggcgaguucaagcuggccucccacauguacugcagcuucuacccccccgacgaggacgaggaggagggggacugcgaggaggaggaguucgagccguccacccaguacgaguacggcacggaggacgacuaccagggcaagccccucgaguucggggcgaccagcgccgcccugcagcccgaggaggagcaggaggaggacuggcuggacgacgacucccagcagaccgugggccagcaggacgggagcgaggacaaccagaccacgaccauccagaccaucguggagguccagccccagcucgagauggagcugaccccgguggugcagacgaucgaggucaacuccuucagcggcuaccugaagcucaccgacaacguguacaucaagaacgccgacaucguggaggaggcgaagaaggucaagcccaccgugguggucaacgccgccaacguguaccugaagcacgggggcggcguggccggggcccugaacaaggcgaccaacaacgccaugcaggucgaguccgacgacuacaucgccacgaacggcccccucaagguggggggcagcugcguccuguccggccacaaccuggccaagcacugccuccacgugguggggcccaacgucaacaagggcgaggacauccagcugcugaagagcgccuacgagaacuucaaccagcacgaggugcuccuggcgccgcugcucuccgccgggaucuucggcgccgaccccauccacagccugcggguguucgucgacaccgugcgcaccaacguguaccuggccgucuucgacaagaaccucuacgacaagcugguguccagcuuccuggagaugaagagcgagaagcagguggagcagaagaucgccgagauccccaaggaggaggucaagcccuucaucaccgaguccaagccgagcguggagcagcggaagcaggacgacaagaagaucaaggcgugcguggaggaggucacgaccacccucgaggagaccaaguuccugacggagaaccugcuccuguacaucgacaucaacgggaaccugcaccccgacuccgccacccucgugagcgacaucgacaucaccuuccugaagaaggacgcccccuacaucgugggcgacgucgugcaggagggcgugcugaccgccgucgugauccccacgaagaaggccgggggcaccaccgagaugcucgcgaaggcccugcgcaaggugccgaccgacaacuacaucacgaccuaccccgggcagggccugaacggguacaccgucgaggaggccaagaccgugcucaagaagugcaaguccgccuucuacauccugcccagcaucaucuccaacgagaagcaggagauccugggcaccgugagcuggaaccuccgggagaugcuggcgcacgccgaggagacgcgcaagcugaugcccgucugcguggagaccaaggccaucguguccaccauccagcggaaguacaagggcaucaagauccaggagggggucguggacuacggcgcccgcuucuacuucuacaccagcaagacgaccguggccucccugaucaacacccucaacgaccugaacgagacccuggucacgaugccgcucggguacgugacccacggccugaaccuggaggaggcggcccgguacaugcgcagccucaaggugcccgccaccgucuccgugagcucccccgacgccgugaccgccuacaacggguaccugacgagcuccagcaagacccccgaggagcacuucaucgagaccaucucccuggcgggcagcuacaaggacuggagcuacuccggccagagcacccagcucgggaucgaguuccugaagcggggcgacaaguccgucuacuacacgagcaacccgaccaccuuccaccuggacggggaggugaucaccuucgacaaccucaagacgcugcugucccuccgcgaggugcggaccaucaaggucuucaccaccguggacaacaucaaccugcacacgcagguggucgacaugagcaugaccuacggccagcaguucggccccaccuaccuggacggggccgacgugaccaagaucaagccccacaacucccacgagggcaagacguucuacgugcucccgaacgacgacacccugcgcgucgaggccuucgaguacuaccacaccaccgaccccagcuuccuggggcgguacauguccgcccucaaccacacgaagaaguggaaguacccccaggugaacggccugaccagcaucaagugggccgacaacaacugcuaccuggcgaccgcccuccugacccugcagcagaucgagcucaaguucaaccccccggcccugcaggacgccuacuaccgcgcgcgggccggggaggccgccaacuucugcgcccugauccucgcguacugcaacaagacggugggcgagcugggcgacguccgcgagaccauguccuaccuguuccagcacgccaaccucgacagcugcaagcgggugcugaacgucgugugcaagaccugcgggcagcagcagaccacccugaagggcguggaggccgucauguacauggggacgcucuccuacgagcaguucaagaagggcgugcagauccccugcaccugcgggaagcaggccaccaaguaccuggugcagcaggagagccccuucgucaugauguccgcccccccggcgcaguacgagcugaagcacggcaccuucacgugcgccagcgaguacaccggcaacuaccagugcgggcacuacaagcacaucaccuccaaggagacccucuacugcaucgacggcgcccugcugacgaagagcagcgaguacaaggggcccaucaccgacguguucuacaaggagaacuccuacaccaccacgaucaagcccgugaccuacaagcucgacggcgucgugugcaccgagaucgaccccaagcuggacaacuacuacaagaaggacaacagcuacuucaccgagcagccgaucgaccuggugcccaaccagcccuaccccaacgccuccuucgacaacuucaaguucgucugcgacaacaucaaguucgccgacgaccucaaccagcugacgggguacaagaagccggcgagccgcgagcugaaggugaccuucuuccccgaccucaacggcgacguggucgccaucgacuacaagcacuacacccccuccuucaagaagggcgccaagcugcugcacaagcccaucguguggcacgugaacaacgccaccaacaaggcgacguacaagccgaacaccuggugcauccggugccucuggagcaccaagcccgucgagaccuccaacagcuucgacgugcugaaguccgaggacgcccaggggauggacaaccuggccugcgaggaccucaagcccgugagcgaggaggucguggagaaccccacgauccagaaggacgugcuggagugcaacgucaagaccaccgagguggugggcgacaucauccugaagccggccaacaacucccucaagaucaccgaggaggucgggcacacggaccugauggccgcguacguggacaacagcucccugaccaucaagaagcccaacgagcucagccgcgugcugggccugaagacccucgccacccacgggcuggccgccgucaacuccgugcccugggacacgaucgccaacuacgcgaagccguuccugaacaagguggucagcaccaccaccaacaucgugacgcgcugccucaaccgggugugcaccaacuacaugcccuacuucuucacccugcugcuccagcugugcaccuucacccgcuccacgaacagccggaucaaggccuccaugcccaccaccaucgccaagaacaccgucaagagcgugggcaaguucugccuggaggccagcuucaacuaccucaagucccccaacuucagcaagcugaucaacaucaucaucugguuccugcuccuguccgugugccugggcagccucaucuacuccacggccgcgcuggggguccugaugagcaaccucggcaugccguccuacugcaccggguaccgcgagggcuaccugaacagcaccaacgugaccaucgccacguacugcaccggcuccauccccugcagcgugugccuguccgggcucgacagccuggacaccuaccccucccuggagaccauccagaucacgaucagcuccuucaagugggaccucaccgccuucggccuggucgccgagugguuccuggccuacauccucuucacccgguucuucuacgugcuggggcuggcggccaucaugcagcucuucuucagcuacuucgccgugcacuucaucuccaacagcuggcugauguggcugaucaucaaccugguccagauggcccccaucuccgcgauggugcgcauguacaucuucuucgccagcuucuacuacguguggaagagcuacguccacgugguggacggcugcaacuccagcaccugcaugaugugcuacaagcggaaccgcgccacgcgggucgagugcaccaccaucgugaacgggguccgccgguccuucuacguguacgccaacggcggcaagggguucugcaagcuccacaacuggaacugcgugaacugcgacaccuucugcgccggcagcacguucaucuccgacgaggucgcgcgcgaccugagccugcaguucaagcggccgaucaaccccaccgaccaguccagcuacaucguggacuccgugaccgucaagaacgggagcauccaccucuacuucgacaaggccggccagaagaccuacgagcgccacucccugagccacuucgugaaccuggacaaccuccgggccaacaacacgaaggggucccugcccaucaacgugaucgucuucgacggcaagagcaagugcgaggaguccagcgccaaguccgccagcguguacuacucccagcugaugugccagcccauccuccugcuggaccaggcgcucgugagcgacgucggcgacagcgccgagguggccgugaagauguucgacgccuacgucaacaccuucuccagcaccuucaacgugccgauggagaagcugaagacccugguggccacggcggaggccgagcucgccaagaacgucucccuggacaacgugcugagcaccuucaucuccgccgcgcgccagggguucguggacagcgacgucgagaccaaggacgugguggagugccucaagcugucccaccagagcgacaucgaggucaccggcgacuccugcaacaacuacaugcugacguacaacaagguggagaacaugaccccccgggaccucggggccugcaucgacugcagcgcccgccacaucaacgcccagguggccaagucccacaacaucgcgcugaucuggaacgucaaggacuucaugagccuguccgagcagcuccggaagcagauccgcagcgccgccaagaagaacaaccugcccuucaagcugaccugcgccaccacgcgccagguggugaacgucgugaccaccaagaucgcccucaagggcgggugaggacuagucccuguucccagagcccacuuuuuuuucuuuuuuugaaauaaaauagccugucuuucagaucucaaaggcucuuuucagagccaccaaaaaaaaaaaaaaaaaaaaaaaaaaaaaaaaaaaaaaaaaaaaaaaaaaaaaaaaaaaaaaaaaaaaaaaaaaaaaaaaaaaaaaaaaaaaaaaaaaaaa

SEQ ID NO: 20046 - RNA, 6113 nt, Artificial Sequence
  SARS-CoV-2__MT511066.1__non-structural protein 3 (NSP3) mRNA gc
aggagagucccgcagucggcguccagcggcucugcuuguucgugugugugucguugcaggccuuauucaagcuuaccauggcccccaccaaggugaccuucggcgacgacacggucaucgaggugcagggguacaagagcgugaacaucaccuucgagcuggacgagcgcaucgacaagguccucaacgagaagugcuccgccuacaccguggagcugggcaccgaggugaacgaguucgcgugcgucguggccgacgccgugaucaagacgcugcagccggucagcgagcuccugaccccccuggggaucgaccucgacgagugguccauggccaccuacuaccuguucgacgagagcggcgaguucaagcuggccucccacauguacugcagcuucuacccccccgacgaggacgaggaggagggggacugcgaggaggaggaguucgagccguccacccaguacgaguacggcacggaggacgacuaccagggcaagccccucgaguucggggcgaccagcgccgcccugcagcccgaggaggagcaggaggaggacuggcuggacgacgacucccagcagaccgugggccagcaggacgggagcgaggacaaccagaccacgaccauccagaccaucguggagguccagccccagcucgagauggagcugaccccgguggugcagacgaucgaggucaacuccuucagcggcuaccugaagcucaccgacaacguguacaucaagaacgccgacaucguggaggaggcgaagaaggucaagcccaccgugguggucaacgccgccaacguguaccugaagcacgggggcggcguggccggggcccugaacaaggcgaccaacaacgccaugcaggucgaguccgacgacuacaucgccacgaacggcccccucaagguggggggcagcugcguccuguccggccacaaccuggccaagcacugccuccacgugguggggcccaacgucaacaagggcgaggacauccagcugcugaagagcgccuacgagaacuucaaccagcacgaggugcuccuggcgccgcugcucuccgccgggaucuucggcgccgaccccauccacagccugcgggugugcgucgacaccgugcgcaccaacguguaccuggccgucuucgacaagaaccucuacgacaagcugguguccagcuuccuggagaugaagagcgagaagcagguggagcagaagaucgccgagauccccaaggaggaggucaagcccuucaucaccgaguccaagccgagcguggagcagcggaagcaggacgacaagaagaucaaggcgugcguggaggaggucacgaccacccucgaggagaccaaguuccugacggagaaccugcuccuguacaucgacaucaacgggaaccugcaccccgacuccgccacccucgugagcgacaucgacaucaccuuccugaagaaggacgcccccuacaucgugggcgacgucgugcaggagggcgugcugaccgccgucgugauccccacgaagaaggccgggggcaccaccgagaugcucgcgaaggcccugcgcaaggugccgaccgacaacuacaucacgaccuaccccgggcagggccugaacggguacaccgucgaggaggccaagaccgugcucaagaagugcaaguccgccuucuacauccugcccagcaucaucuccaacgagaagcaggagauccugggcaccgugagcuggaaccuccgggagaugcuggcgcacgccgaggagacgcgcaagcugaugcccgucugcguggagaccaaggccaucguguccaccauccagcggaaguacaagggcaucaagauccaggagggggucguggacuacggcgcccgcuucuacuucuacaccagcaagacgaccguggccucccugaucaacacccucaacgaccugaacgagacccuggucacgaugccgcucggguacgugacccacggccugaaccuggaggaggcggcccgguacaugcgcagccucaaggugcccgccaccgucuccgugagcucccccgacgccgugaccgccuacaacggguaccugacgagcuccagcaagacccccgaggagcacuucaucgagaccaucucccuggcgggcagcuacaaggacuggagcuacuccggccagagcacccagcucgggaucgaguuccugaagcggggcgacaaguccgucuacuacacgagcaacccgaccaccuuccaccuggacggggaggugaucaccuucgacaaccucaagacgcugcugucccuccgcgaggugcggaccaucaaggucuucaccaccguggacaacaucaaccugcacacgcagguggucgacaugagcaugaccuacggccagcaguucggccccaccuaccuggacggggccgacgugaccaagaucaagccccacaacucccacgagggcaagacguucuacgugcucccgaacgacgacacccugcgcgucgaggccuucgaguacuaccacaccaccgaccccagcuuccuggggcgguacauguccgcccucaaccacacgaagaaguggaaguacccccaggugaacggccugaccagcaucaagugggccgacaacaacugcuaccuggcgaccgcccuccugacccugcagcagaucgagcucaaguucaaccccccggcccugcaggacgccuacuaccgcgcgcgggccggggaggccgccaacuucugcgcccugauccucgcguacugcaacaagacggugggcgagcugggcgacguccgcgagaccauguccuaccuguuccagcacgccaaccucgacagcugcaagcgggugcugaacgucgugugcaagaccugcgggcagcagcagaccacccugaagggcguggaggccgucauguacauggggacgcucuccuacgagcaguucaagaagggcgugcagauccccugcaccugcgggaagcaggccaccaaguaccuggugcagcaggagagccccuucgucaugauguccgcccccccggcgcaguacgagcugaagcacggcaccuucacgugcgccagcgaguacaccggcaacuaccagugcgggcacuacaagcacaucaccuccaaggagacccucuacugcaucgacggcgcccugcugacgaagagcagcgaguacaaggggcccaucaccgacguguucuacaaggagaacuccuacaccaccacgaucaagcccgugaccuacaagcucgacggcgucgugugcaccgagaucgaccccaagcuggacaacuacuacaagaaggacaacagcuacuucaccgagcagccgaucgaccuggugcccaaccagcccuaccccaacgccuccuucgacaacuucaaguucgucugcgacaacaucaaguucgccgacgaccucaaccagcugacgggguacaagaagccggcgagccgcgagcugaaggugaccuucuuccccgaccucaacggcgacguggucgccaucgacuacaagcacuacacccccuccuucaagaagggcgccaagcugcugcacaagcccaucguguggcacgugaacaacgccaccaacaaggcgacguacaagccgaacaccuggugcauccggugccucuggagcaccaagcccgucgagaccuccaacagcuucgacgugcugaaguccgaggacgcccaggggauggacaaccuggccugcgaggaccucaagcccgugagcgaggaggucguggagaaccccacgauccagaaggacgugcuggagugcaacgucaagaccaccgagguggugggcgacaucauccugaagccggccaacaacucccucaagaucaccgaggaggucgggcacacggaccugauggccgcguacguggacaacagcucccugaccaucaagaagcccaacgagcucagccgcgugcugggccugaagacccucgccacccacgggcuggccgccgucaacuccgugcccugggacacgaucgccaacuacgcgaagccguuccugaacaagguggucagcaccaccaccaacaucgugacgcgcugccucaaccgggugugcaccaacuacaugcccuacuucuucacccugcugcuccagcugugcaccuucacccgcuccacgaacagccggaucaaggccuccaugcccaccaccaucgccaagaacaccgucaagagcgugggcaaguucugccuggaggccagcuucaacuaccucaagucccccaacuucagcaagcugaucaacaucaucaucugguuccugcuccuguccgugugccugggcagccucaucuacuccacggccgcgcuggggguccugaugagcaaccucggcaugccguccuacugcaccggguaccgcgagggcuaccugaacagcaccaacgugaccaucgccacguacugcaccggcuccauccccugcagcgugugccuguccgggcucgacagccuggacaccuaccccucccuggagaccauccagaucacgaucagcuccuucaagugggaccucaccgccuucggccuggucgccgagugguuccuggccuacauccucuucacccgguucuucuacgugcuggggcuggcggccaucaugcagcucuucuucagcuacuucgccgugcacuucaucuccaacagcuggcugauguggcugaucaucaaccugguccagauggcccccaucuccgcgauggugcgcauguacaucuucuucgccagcuucuacuacguguggaagagcuacguccacgugguggacggcugcaacuccagcaccugcaugaugugcuacaagcggaaccgcgccacgcgggucgagugcaccaccaucgugaacgggguccgccgguccuucuacguguacgccaacggcggcaagggguucugcaagcuccacaacuggaacugcgugaacugcgacaccuucugcgccggcagcacguucaucuccgacgaggucgcgcgcgaccugagccugcaguucaagcggccgaucaaccccaccgaccaguccagcuacaucguggacuccgugaccgucaagaacgggagcauccaccucuacuucgacaaggccggccagaagaccuacgagcgccacucccugagccacuucgugaaccuggacaaccuccgggccaacaacacgaaggggucccugcccaucaacgugaucgucuucgacggcaagagcaagugcgaggaguccagcgccaaguccgccagcguguacuacucccagcugaugugccagcccauccuccugcuggaccaggcgcucgugagcgacgucggcgacagcgccgagguggccgugaagauguucgacgccuacgucaacaccuucuccagcaccuucgacgugccgauggagaagcugaagacccugguggccacggcggaggccgagcucgccaagaacgucucccuggacaacgugcugagcaccuucaucuccgccgcgcgccagggguucguggacagcgacgucgagaccaaggacgugguggagugccucaagcugucccaccagagcgacaucgaggucaccggcgacuccugcaacaacuacaugcugacguacaacaagguggagaacaugaccccccgggaccucggggccugcaucgacugcagcgcccgccacaucaacgcccagguggccaagucccacaacaucgcgcugaucuggaacgucaaggacuucaugagccuguccgagcagcuccggaagcagauccgcagcgccgccaagaagaacaaccugcccuucaagcugaccugcgccaccacgcgccagguggugaacgucgugaccaccaagaucgcccucaagggcgggugaggacuagucccuguucccagagcccacuuuuuuuucuuuuuuugaaauaaaauagccugucuuucagaucucaaaggcucuuuucagagccaccaaaaaaaaaaaaaaaaaaaaaaaaaaaaaaaaaaaaaaaaaaaaaaaaaaaaaaaaaaaaaaaaaaaaaaaaaaaaaaaaaaaaaaaaaaaaaaaaaaaaa

SEQ ID NO: 20047 - RNA, 6113 nt, Artificial Sequence
  SARS-CoV-2__MT511068.1__non-structural protein 3 (NSP3) mRNA gc
aggagagucccgcagucggcguccagcggcucugcuuguucgugugugugucguugcaggccuuauucaagcuuaccauggcccccaccaaggugaccuucggcgacgacacggucaucgaggugcagggguacaagagcgugaacaucaccuucgagcuggacgagcgcaucgacaagguccucaacgagaagugcuccgccuacaccguggagcugggcaccgaggugaacgaguucgcgugcgucguggccgacgccgugaucaagacgcugcagccggucagcgagcuccugaccccccuggggaucgaccucgacgagugguccauggccaccuacuaccuguucgacgagagcggcgaguucaagcuggccucccacauguacugcagcuucuacccccccgacgaggacgaggaggagggggacugcgaggaggaggaguucgagccguccacccaguacgaguacggcacggaggacgacuaccagggcaagccccucgaguucggggcgaccagcgccgcccugcagcccgaggaggagcaggaggaggacuggcuggacgacgacucccagcagaccgugggccagcaggacgggagcgaggacaaccagaccacgaccauccagaccaucguggagguccagccccagcucgagauggagcugaccccgguggugcagacgaucgaggucaacuccuucagcggcuaccugaagcucaccgacaacguguacaucaagaacgccgacaucguggaggaggcgaagaaggucaagcccaccgugguggucaacgccgccaacguguaccugaagcacgggggcggcguggccggggcccugaacaaggcgaccaacaacgccaugcaggucgaguccgacgacuacaucgccacgaacggcccccucaagguggggggcagcugcguccuguccggccacaaccuggccaagcacugccuccacgugguggggcccaacgucaacaagggcgaggacauccagcugcugaagagcgccuacgagaacuucaaccagcacgaggugcuccuggcgccgcugcucuccgccgggaucuucggcgccgaccccauccacagccugcgggugugcgucgacaccgugcgcaccaacguguaccuggccgucuucgacaagaaccucuacgacaagcugguguccagcuuccuggagaugaagagcgagaagcagguggagcagaagaucgccgagauccccaaggaggaggucaagcccuucaucaccgaguccaagccgagcguggagcagcggaagcaggacgacaagaagaucaaggcgugcguggaggaggucacgaccacccucgaggagaccaaguuccugacggagaaccugcuccuguacaucgacaucaacgggaaccugcaccccgacuccgccacccucgugagcgacaucgacaucaccuuccugaagaaggacgcccccuacaucgugggcgacgucgugcaggagggcgugcugaccgccgucgugauccccacgaagaaggccgggggcaccaccgagaugcucgcgaaggcccugcgcaaggugccgaccgacaacuacaucacgaccuaccccgggcagggccugaacggguacaccgucgaggaggccaagaccgugcucaagaagugcaaguccgccuucuacauccugcccagcaucaucuccaacgagaagcaggagauccugggcaccgugagcuggaaccuccgggagaugcuggcgcacgccgaggagacgcgcaagcugaugcccgucugcguggagaccaaggccaucguguccaccauccagcggaaguacaagggcaucaagauccaggagggggucguggacuacggcgcccgcuucuacuucuacaccagcaagacgaccguggccucccugaucaacacccucaacgaccugaacgagacccuggucacgaugccgcucggguacgugacccacggccugaaccuggaggaggcggcccgguacaugcgcagccucaaggugcccgccaccgucuccgugagcucccccgacgccgugaccgccuacaacggguaccugacgagcuccagcaagacccccgaggagcacuucaucgagaccaucucccuggcgggcagcuacaaggacuggagcuacuccggccagagcacccagcucgggaucgaguuccugaagcggggcgacaaguccgucuacuacacgagcaacccgaccaccuuccaccuggacggggaggugaucaccuucgacaaccucaagacgcugcugucccuccgcgaggugcggaccaucaaggucuucaccaccguggacaacaucaaccugcacacgcagguggucgacaugagcaugaccuacggccagcaguucggccccaccuaccuggacggggccgacgugaccaagaucaagccccacaacucccacgagggcaagacguucuacgugcucccgaacgacgacacccugcgcgucgaggccuucgaguacuaccacaccaccgaccccagcuuccuggggcgguacauguccgcccucaaccacacgaagaaguggaaguacccccaggugaacggccugaccagcaucaagugggccgacaacaacugcuaccuggcgaccgcccuccugacccugcagcagaucgagcucaaguucaaccccccggcccugcaggacgccuacuaccgcgcgcgggccggggaggccgccaacuucugcgcccugauccucgcguacugcaacaagacggugggcgagcugggcgacguccgcgagaccauguccuaccuguuccagcacgccaaccucgacagcugcaagcgggugcugaacgucgugugcaagaccugcgggcagcagcagaccacccugaagggcguggaggccgucauguacauggggacgcucuccuacgagcaguucaagaagggcgugcagauccccugcaccugcgggaagcaggccaccaaguaccuggugcagcaggagagccccuucgucaugauguccgcccccccggcgcaguacgagcugaagcacggcaccuucacgugcgccagcgaguacaccggcaacuaccagugcgggcacuacaagcacaucaccuccaaggagacccucuacugcaucgacggcgcccugcugacgaagagcagcgaguacaaggggcccaucaccgacguguucuacaaggagaacuccuacaccaccacgaucaagcccgugaccuacaagcucgacggcgucgugugcaccgagaucgaccccaagcuggacaacuacuacaagaaggacaacagcuacuucaccgagcagccgaucgaccuggugcccaaccagcccuaccccaacgccuccuucgacaacuucaaguucgucugcgacaacaucaaguucgccgacgaccucaaccagcugacgggguacaagaagccggcgagccgcgagcugaaggugaccuucuuccccgaccucaacggcgacguggucgccaucgacuacaagcacuacacccccuccuucaagaagggcgccaagcugcugcacaagcccaucguguggcacgugaacaacgccaccaacaaggcgacguacaagccgaacaccuggugcauccggugccucuggagcaccaagcccgucgagaccuccaacagcuucgacgugcugaaguccgaggacgcccaggggauggacaaccuggccugcgaggaccucaagcccgugagcgaggaggucguggagaaccccacgauccagaaggacgugcuggagugcaacgucaagaccaccgagguggugggcgacaucauccugaagccggccaacaacucccucaagaucaccgaggaggucgggcacacggaccugauggccgcguacguggacaacagcucccugaccaucaagaagcccaacgagcucagccgcgugcugggccugaagacccucgccacccacgggcuggccgccgucaacuccgugcccugggacacgaucgccaacuacgcgaagccguuccugaacaagguggucagcaccaccaccaacaucgugacgcgcugccucaaccgggugugcaccaacuacaugcccuacuucuucacccugcugcuccagcugugcaccuucacccgcuccacgaacagccggaucaaggccuccaugcccaccaccaucgccaagaacaccgucaagagcgugggcaaguucugccuggaggccagcuucaacuaccucaagucccccaacuucagcaagcugaucaacaucaucaucugguuccugcuccuguccgugugccugggcagccucaucuacuccacggccgcgcuggggguccugaugagcaaccucggcaugccguccuacugcaccggguaccgcgagggcuaccugaacagcaccaacgugaccaucgccacguacugcaccggcuccauccccugcagcgugugccuguccgggcucgacagccuggacaccuaccccucccuggagaccauccagaucacgaucagcuccuucaagugggaccucaccgccuucggccuggucgccgagugguuccuggccuacauccucuucacccgguucuucuacgugcuggggcuggcggccaucaugcagcucuucuucagcuacuucgccgugcacuucaucuccaacagcuggcugauguggcugaucaucaaccugguccagauggcccccaucuccgcgauggugcgcauguacaucuucuucgccagcuucuacuacguguggaagagcuacguccacgugguggacggcugcaacuccagcaccugcaugaugugcuacaagcggaaccgcgccacgcgggucgagugcaccaccaucgugaacgggguccgccgguccuucuacguguacgccaacggcggcaagggguucugcaagcuccacaacuggaacugcgugaacugcgacaccuucugcgccggcagcacguucaucuccgacgaggucgcgcgcgaccugagccugcaguucaagcggccgaucaaccccaccgaccaguccagcuacaucguggacuccgugaccgucaagaacgggagcauccaccucuacuucgacaaggccggccagaagaccuacgagcgccacucccugagccacuucgugaaccuggacaaccuccgggccaacaacacgaaggggucccugcccaucaacgugaucgucuucgacggcaagagcaagugcgaggaguccagcgccaaguccgccagcguguacuacucccagcugaugugccagcccauccuccugcuggaccaggcgcucgugagcgacgucggcgacagcgccgaggugguggucaagauguucgacgccuacgugaacaccuucuccagcaccuucgacgugccgauggagaagcugaagacccuggucgccacggccgaggcggagcucgccaagaacgugucccuggacaacgugcugagcaccuucaucuccgccgcccgccagggguucgucgacagcgacguggagaccaaggacguggucgagugccucaagcugucccaccagagcgacaucgaggugaccggcgacuccugcaacaacuacaugcugacguacaacaagguggagaacaugaccccccgggaccucggggcgugcaucgacugcagcgcccgccacaucaacgcccaggucgccaagucccacaacaucgcccugaucuggaacgugaaggacuucaugagccuguccgagcagcuccggaagcagauccgcagcgcggccaagaagaacaaccugcccuucaagcugaccugcgccaccacgcgccagguggucaacguggugaccaccaagaucgcccucaagggcgggugaggacuagucccuguucccagagcccacuuuuuuuucuuuuuuugaaauaaaauagccugucuuucagaucucaaaggcucuuuucagagccaccaaaaaaaaaaaaaaaaaaaaaaaaaaaaaaaaaaaaaaaaaaaaaaaaaaaaaaaaaaaaaaaaaaaaaaaaaaaaaaaaaaaaaaaaaaaaaaaaaaaaa

SEQ ID NO: 20048 - RNA, 6113 nt, Artificial Sequence
  SARS-CoV-2__MT511069.1__non-structural protein 3 (NSP3) mRNA gc
aggagagucccgcagucggcguccagcggcucugcuuguucgugugugugucguugcaggccuuauucaagcuuaccauggcccccaccaaggugaccuucggcgacgacacggucaucgaggugcagggguacaagagcgugaacaucaccuucgagcuggacgagcgcaucgacaagguccucaacgagaagugcuccgccuacaccguggagcugggcaccgaggugaacgaguucgcgugcgucguggccgacgccgugaucaagacgcugcagccggucagcgagcuccugaccccccuggggaucgaccucgacgagugguccauggccaccuacuaccuguucgacgagagcggcgaguucaagcuggccucccacauguacugcagcuucuacccccccgacgaggacgaggaggagggggacugcgaggaggaggaguucgagccguccacccaguacgaguacggcacggaggacgacuaccagggcaagccccucgaguucggggcgaccagcgccgcccugcagcccgaggaggagcaggaggaggacuggcuggacgacgacucccagcagaccgugggccagcaggacgggagcgaggacaaccagaccacgaccauccagaccaucguggagguccagccccagcucgagauggagcugaccccgguggugcagacgaucgaggucaacuccuucagcggcuaccugaagcucaccgacaacguguacaucaagaacgccgacaucguggaggaggcgaagaaggucaagcccaccgugguggucaacgccgccaacguguaccugaagcacgggggcggcguggccggggcccugaacaaggcgaccaacaacgccaugcaggucgaguccgacgacuacaucgccacgaacggcccccucaagguggggggcagcugcguccuguccggccacaaccuggccaagcacugccuccacgugguggggcccaacgucaacaagggcgaggacauccagcugcugaagagcgccuacgagaacuucaaccagcacgaggugcuccuggcgccgcugcucuccgccgggaucuucggcgccgaccccauccacagccugcgggugugcgucgacaccgugcgcaccaacguguaccuggccgucuucgacaagaaccucuacgacaagcugguguccagcuuccuggagaugaagagcgagaagcagguggagcagaagaucgccgagauccccaaggaggaggucaagcccuucaucaccgaguccaagccgagcguggagcagcggaagcaggacgacaagaagaucaaggcgugcguggaggaggucacgaccacccucgaggagaccaaguuccugacggagaaccugcuccuguacaucgacaucaacgggaaccugcaccccgacuccgccacccucgugagcgacaucgacaucaccuuccugaagaaggacgcccccuacaucgugggcgacgucgugcaggagggcgugcugaccgccgucgugauccccacgaagaacgccgggggcaccaccgagaugcucgcgaaggcccugcgcaaggugccgaccgacaacuacaucacgaccuaccccgggcagggccugaacggguacaccgucgaggaggccaagaccgugcucaagaagugcaaguccgccuucuacauccugcccagcaucaucuccaacgagaagcaggagauccugggcaccgugagcuggaaccuccgggagaugcuggcgcacgccgaggagacgcgcaagcugaugcccgucugcguggagaccaaggccaucguguccaccauccagcggaaguacaagggcaucaagauccaggagggggucguggacuacggcgcccgcuucuacuucuacaccagcaagacgaccguggccucccugaucaacacccucaacgaccugaacgagacccuggucacgaugccgcucggguacgugacccacggccugaaccuggaggaggcggcccgguacaugcgcagccucaaggugcccgccaccgucuccgugagcucccccgacgccgugaccgccuacaacggguaccugacgagcuccagcaagacccccgaggagcacuucaucgagaccaucucccuggcgggcagcuacaaggacuggagcuacuccggccagagcacccagcucgggaucgaguuccugaagcggggcgacaaguccgucuacuacacgagcaacccgaccaccuuccaccuggacggggaggugaucaccuucgacaaccucaagacgcugcugucccuccgcgaggugcggaccaucaaggucuucaccaccguggacaacaucaaccugcacacgcagguggucgacaugagcaugaccuacggccagcaguucggccccaccuaccuggacggggccgacgugaccaagaucaagccccacaacucccacgagggcaagacguucuacgugcucccgaacgacgacacccugcgcgucgaggccuucgaguacuaccacaccaccgaccccagcuuccuggggcgguacauguccgcccucaaccacacgaagaaguggaaguacccccaggugaacggccugaccagcaucaagugggccgacaacaacugcuaccuggcgaccgcccuccugacccugcagcagaucgagcucaaguucaaccccccggcccugcaggacgccuacuaccgcgcgcgggccggggaggccgccaacuucugcgcccugauccucgcguacugcaacaagacggugggcgagcugggcgacguccgcgagaccauguccuaccuguuccagcacgccaaccucgacagcugcaagcgggugcugaacgucgugugcaagaccugcgggcagcagcagaccacccugaagggcguggaggccgucauguacauggggacgcucuccuacgagcaguucaagaagggcgugcagauccccugcaccugcgggaagcaggccaccaaguaccuggugcagcaggagagccccuucgucaugauguccgcccccccggcgcaguacgagcugaagcacggcaccuucacgugcgccagcgaguacaccggcaacuaccagugcgggcacuacaagcacaucaccuccaaggagacccucuacugcaucgacggcgcccugcugacgaagagcagcgaguacaaggggcccaucaccgacguguucuacaaggagaacuccuacaccaccacgaucaagcccgugaccuacaagcucgacggcgucgugugcaccgagaucgaccccaagcuggacaacuacuacaagaaggacaacagcuacuucaccgagcagccgaucgaccuggugcccaaccagcccuaccccaacgccuccuucgacaacuucaaguucgucugcgacaacaucaaguucgccgacgaccucaaccagcugacgggguacaagaagccggcgagccgcgagcugaaggugaccuucuuccccgaccucaacggcgacguggucgccaucgacuacaagcacuacacccccuccuucaagaagggcgccaagcugcugcacaagcccaucguguggcacgugaacaacgccaccaacaaggcgacguacaagccgaacaccuggugcauccggugccucuggagcaccaagcccgucgagaccuccaacagcuucgacgugcugaaguccgaggacgcccaggggauggacaaccuggccugcgaggaccucaagcccgugagcgaggaggucguggagaaccccacgauccagaaggacgugcuggagugcaacgucaagaccaccgagguggugggcgacaucauccugaagccggccaacaacucccucaagaucaccgaggaggucgggcacacggaccugauggccgcguacguggacaacagcucccugaccaucaagaagcccaacgagcucagccgcgugcugggccugaagacccucgccacccacgggcuggccgccgucaacuccgugcccugggacacgaucgccaacuacgcgaagccguuccugaacaagguggucagcaccaccaccaacaucgugacgcgcugccucaaccgggugugcaccaacuacaugcccuacuucuucacccugcugcuccagcugugcaccuucacccgcuccacgaacagccggaucaaggccuccaugcccaccaccaucgccaagaacaccgucaagagcgugggcaaguucugccuggaggccagcuucaacuaccucaagucccccaacuucagcaagcugaucaacaucaucaucugguuccugcuccuguccgugugccugggcagccucaucuacuccacggccgcgcuggggguccugaugagcaaccucggcaugccguccuacugcaccggguaccgcgagggcuaccugaacagcaccaacgugaccaucgccacguacugcaccggcuccauccccugcagcgugugccuguccgggcucgacagccuggacaccuaccccucccuggagaccauccagaucacgaucagcuccuucaagugggaccucaccgccuucggccuggucgccgagugguuccuggccuacauccucuucacccgguucuucuacgugcuggggcuggcggccaucaugcagcucuucuucagcuacuucgccgugcacuucaucuccaacagcuggcugauguggcugaucaucaaccugguccagauggcccccaucuccgcgauggugcgcauguacaucuucuucgccagcuucuacuacguguggaagagcuacguccacgugguggacggcugcaacuccagcaccugcaugaugugcuacaagcggaaccgcgccacgcgggucgagugcaccaccaucgugaacgggguccgccgguccuucuacguguacgccaacggcggcaagggguucugcaagcuccacaacuggaacugcgugaacugcgacaccuucugcgccggcagcacguucaucuccgacgaggucgcgcgcgaccugagccugcaguucaagcggccgaucaaccccaccgaccaguccagcuacaucguggacuccgugaccgucaagaacgggagcacccaccucuacuucgacaaggccggccagaagacguacgagcgccacucccugagccacuucgugaaccuggacaaccuccgggccaacaacaccaaggggucccugcccaucaacgugaucgucuucgacggcaagagcaagugcgaggaguccagcgccaaguccgccagcguguacuacucccagcugaugugccagcccauccuccugcuggaccaggcgcucgugagcgacgucggcgacagcgccgagguggccgugaagauguucgacgccuacgucaacaccuucuccagcaccuucaacgugccgauggagaagcugaagacgcugguggccaccgcggaggccgagcucgccaagaacgucucccuggacaacgugcugagcaccuucaucuccgccgcgcgccagggguucguggacagcgacgucgagaccaaggacgugguggagugccucaagcugucccaccagagcgacaucgaggucacgggcgacuccugcaacaacuacaugcugaccuacaacaagguggagaacaugaccccccgggaccucggggccugcaucgacugcagcgcccgccacaucaacgcccagguggccaagucccacaacaucgcgcugaucuggaacgucaaggacuucaugagccuguccgagcagcuccggaagcagauccgcagcgccgccaagaagaacaaccugcccuucaagcugaccugcgccacgacccgccagguggugaacgucgugaccaccaagaucgcccucaagggcgggugaggacuagucccuguucccagagcccacuuuuuuuucuuuuuuugaaauaaaauagccugucuuucagaucucaaaggcucuuuucagagccaccaaaaaaaaaaaaaaaaaaaaaaaaaaaaaaaaaaaaaaaaaaaaaaaaaaaaaaaaaaaaaaaaaaaaaaaaaaaaaaaaaaaaaaaaaaaaaaaaaaaaa

SEQ ID NO: 20049 - RNA, 6113 nt, Artificial Sequence
  SARS-CoV-2__MT509958.1__non-structural protein 3 (NSP3) mRNA gc
aggagagucccgcagucggcguccagcggcucugcuuguucgugugugugucguugcaggccuuauucaagcuuaccauggcccccaccaaggugaccuucggcgacgacacggucaucgaggugcagggguacaagagcgugaacaucaccuucgagcuggacgagcgcaucgacaagguccucaacgagaagugcuccgccuacaccguggagcugggcaccgaggugaacgaguucgcgugcgucguggccgacgccgugaucaagacgcugcagccggucagcgagcuccugaccccccuggggaucgaccucgacgagugguccauggccaccuacuaccuguucgacgagagcggcgaguucaagcuggccucccacauguacugcagcuucuacccccccgacgaggacgaggaggagggggacugcgaggaggaggaguucgagccguccacccaguacgaguacggcacggaggacgacuaccagggcaagccccucgaguucggggcgaccagcgccgcccugcagcccgaggaggagcaggaggaggacuggcuggacgacgacucccagcagaccgugggccagcaggacgggagcgaggacaaccagaccacgaccauccagaccaucguggagguccagccccagcucgagauggagcugaccccgguggugcagacgaucgaggucaacuccuucagcggcuaccugaagcucaccgacaacguguacaucaagaacgccgacaucguggaggaggcgaagaaggucaagcccaccgugguggucaacgccgccaacguguaccugaagcacgggggcggcguggccggggcccugaacaaggcgaccaacaacgccaugcaggucgaguccgacgacuacaucgccacgaacggcccccucaagguggggggcagcugcguccuguccggccacaaccuggccaagcacugccuccacgugguggggcccaacgucaacaagggcgaggacauccagcugcugaagagcgccuacgagaacuucaaccagcacgaggugcuccuggcgccgcugcucuccgccgggaucuucggcgccgaccccauccacagccugcgggugugcgucgacaccgugcgcaccaacguguaccuggccgucuucgacaagaaccucuacgacaagcugguguccagcuuccuggagaugaagagcgagaagcagguggagcagaagaucgccgagauccccaaggaggaggucaagcccuucaucaccgaguccaagccgagcguggagcagcggaagcaggacgacaagaagaucaaggcgugcguggaggaggucacgaccacccucgaggagaccaaguuccugacggagaaccugcuccuguacaucgacaucaacgggaaccugcaccccgacuccgccacccucgugagcgacaucgacaucaccuuccugaagaaggacgcccccuacaucgugggcgacgucgugcaggagggcgugcugaccgccgucgugauccccacgaagaaggccgggggcaccaccgagaugcucgcgaaggcccugcgcaaggugccgaccgacaacuacaucacgaccuaccccgggcagggccugaacggguacaccgucgaggaggccaagaccgugcucaagaagugcaaguccgccuucuacauccugcccagcaucaucuccaacgagaagcaggagauccugggcaccgugagcuggaaccuccgggagaugcuggcgcacgccgaggagacgcgcaagcugaugcccgucugcguggagaccaaggccaucguguccaccauccagcggaaguacaagggcaucaagauccaggagggggucguggacuacggcgcccgcuucuacuucuacaccagcaagacgaccguggccucccugaucaacacccucaacgaccugaacgagacccuggucacgaugccgcucggguacgugacccacggccugaaccuggaggaggcggcccgguacaugcgcagccucaaggugcccgccaccgucuccgugagcucccccgacgccgugaccgccuacaacggguaccugacgagcuccagcaagacccccgaggagcacuucaucgagaccaucucccuggcgggcagcuacaaggacuggagcuacuccggccagagcacccagcucgggaucgaguuccugaagcggggcgacaaguccgucuacuacacgagcaacccgaccaccuuccaccuggacggggaggugaucaccuucgacaaccucaagacgcugcugucccuccgcgaggugcggaccaucaaggucuucaccaccguggacaacaucaaccugcacacgcagguggucgacaugagcaugaccuacggccagcaguucggccccaccuaccuggacggggccgacgugaccaagaucaagccccacaacucccacgagggcaagacguucuacgugcucccgaacgacgacacccugcgcgucgaggccuucgaguacuaccacaccaccgaccccagcuuccuggggcgguacauguccgcccucaaccacacgaagaaguggaaguacccccaguucaacggccugaccagcaucaagugggccgacaacaacugcuaccuggcgaccgcccuccugacccugcagcagaucgagcucaaguucaaccccccggcccugcaggacgccuacuaccgcgcgcgggccggggagguggccaacuucugcgcccugauccucgccuacugcaacaagacggugggcgagcugggcgacguccgcgagaccauguccuaccuguuccagcacgcgaaccucgacagcugcaagcgggugcugaacgucgugugcaagaccugcgggcagcagcagaccacccugaagggcguggaggccgucauguacauggggacgcucuccuacgagcaguucaagaagggcgugcagauccccugcaccugcgggaagcaggccaccaaguaccuggugcagcaggagagccccuucgucaugauguccgcccccccggcccaguacgagcugaagcacggcaccuucacgugcgcgagcgaguacaccggcaacuaccagugcgggcacuacaagcacaucaccuccaaggagacccucuacugcaucgacggcgcccugcugacgaagagcagcgaguacaaggggcccaucaccgacguguucuacaaggagaacuccuacaccaccacgaucaagcccgugaccuacaagcucgacggcgucgugugcaccgagaucgaccccaagcuggacaacuacuacaagaaggacaacagcuacuucaccgagcagccgaucgaccuggugcccaaccagcccuaccccaacgccuccuucgacaacuucaaguucgucugcgacaacaucaaguucgccgacgaccucaaccagcugacgggguacaagaagccggccagccgcgagcugaaggugaccuucuuccccgaccucaacggcgacguggucgcgaucgacuacaagcacuacacccccuccuucaagaagggcgccaagcugcugcacaagcccaucguguggcacgugaacaacgccaccaacaaggccacguacaagccgaacaccuggugcauccggugccucuggagcaccaagcccgucgagaccuccaacagcuucgacgugcugaaguccgaggacgcgcaggggauggacaaccuggccugcgaggaccucaagcccgugagcgaggaggucguggagaaccccacgauccagaaggacgugcuggagugcaacgucaagaccaccgagguggugggcgacaucauccugaagccggccaacaacucccucaagaucaccgaggaggucgggcacacggaccugauggccgccuacguggacaacagcucccugaccaucaagaagcccaacgagcucagccgcgugcugggccugaagacccucgcgacccacgggcuggccgccgucaacuccgugcccugggacacgaucgccaacuacgccaagccguuccugaacaagguggucagcaccaccaccaacaucgugacgcgcugccucaaccgggugugcaccaacuacaugcccuacuucuucacccugcugcuccagcugugcaccuucacccgcuccacgaacagccggaucaaggcguccaugcccaccaccaucgccaagaacaccgucaagagcgugggcaaguucugccuggaggccagcuucaacuaccucaagucccccaacuucagcaagcugaucaacaucaucaucugguuccugcuccuguccgugugccugggcagccucaucuacuccacggccgcccuggggguccugaugagcaaccucggcaugccguccuacugcaccggguaccgcgagggcuaccugaacagcaccaacgugaccaucgcgacguacugcaccggcuccauccccugcagcgugugccuguccgggcucgacagccuggacaccuaccccucccuggagaccauccagaucacgaucagcuccuucaagugggaccucaccgccuucggccuggucgccgagugguuccuggccuacauccucuucacccgguucuucuacgugcuggggcuggccgcgaucaugcagcucuucuucagcuacuucgccgugcacuucaucuccaacagcuggcugauguggcugaucaucaaccugguccagauggcccccaucuccgccauggugcgcauguacaucuucuucgcgagcuucuacuacguguggaagagcuacguccacgugguggacggcugcaacuccagcaccugcaugaugugcuacaagcggaaccgcgccacgcgggucgagugcaccaccaucgugaacgggguccgccgguccuucuacguguacgccaacggcggcaagggguucugcaagcuccacaacuggaacugcgugaacugcgacaccuucugcgccggcagcacguucaucuccgacgaggucgcccgcgaccugagccugcaguucaagcggccgaucaaccccaccgaccaguccagcuacaucguggacuccgugaccgucaagaacgggagcauccaccucuacuucgacaaggcgugccagaagaccuacgagcgccacucccugagccacuucgugaaccuggacaaccuccgggccaacaacacgaagggcucccugcccaucaacgugaucgucuucgacgggaagagcaagugcgaggaguccagcgccaaguccgccagcguguacuacucccagcugaugugccagcccauccuccugcuggaccaggcccucgugagcgacgucggcgacagcgcggagguggccgugaagauguucgacgccuacgucaacaccuucuccagcaccuucaacgugccgauggagaagcugaagacccugguggccacggccgaggcggagcucgccaagaacgucucccuggacaacgugcugagcaccuucaucuccaccgcccgccagggcuucguggacagcgacgucgagaccaaggacgugguggagugccucaagcugucccaccagagcgacaucgaggucacgggggacuccugcaacaacuacaugcugaccuacaacaagguggagaacaugaccccccgggaccucggcgccugcaucgacugcagcgcgcgccacaucaacgcccagguggccaagucccacaacaucgcccugaucuggaacgucaaggacuucaugagccuguccgagcagcuccggaagcagauccgcagcgccgcgaagaagaacaaccugcccuucaagcugaccugcgccacgacccgccagguggugaacgucgugaccaccaagaucgcccucaaggggggcugaggacuagucccuguucccagagcccacuuuuuuuucuuuuuuugaaauaaaauagccugucuuucagaucucaaaggcucuuuucagagccaccaaaaaaaaaaaaaaaaaaaaaaaaaaaaaaaaaaaaaaaaaaaaaaaaaaaaaaaaaaaaaaaaaaaaaaaaaaaaaaaaaaaaaaaaaaaaaaaaaaaaa

SEQ ID NO: 20050 - RNA, 6113 nt, Artificial Sequence
  SARS-CoV-2__MT509657.1__non-structural protein 3 (NSP3) mRNA gc
aggagagucccgcagucggcguccagcggcucugcuuguucgugugugugucguugcaggccuuauucaagcuuaccauggcccccaccaaggugaccuucggcgacgacacggucaucgaggugcagggguacaagagcgugaacaucaccuucgagcuggacgagcgcaucgacaagguccucaacgagaagugcuccgccuacaccguggagcugggcaccgaggugaacgaguucgcgugcgucguggccgacgccgugaucaagacgcugcagccggucagcgagcuccugaccccccuggggaucgaccucgacgagugguccauggccaccuacuaccuguucgacgagagcggcgaguucaagcuggccucccacauguacugcagcuucuacccccccgacgaggacgaggaggagggggacugcgaggaggaggaguucgagccguccacccaguacgaguacggcacggaggacgacuaccagggcaagccccucgaguucggggcgaccagcgccgcccugcagcccgaggaggagcaggaggaggacuggcuggacgacgacucccagcagaccgugggccagcaggacgggagcgaggacaaccagaccacgaccauccagaccaucguggagguccagccccagcucgagauggagcugaccccgguggugcagacgaucgaggucaacuccuucagcggcuaccugaagcucaccgacaacguguacaucaagaacgccgacaucguggaggaggcgaagaaggucaagcccaccgugguggucaacgccgccaacguguaccugaagcacgggggcggcguggccggggcccugaacaaggcgaccaacaacgccaugcaggucgaguccgacgacuacaucgccacgaacggcccccucaagguggggggcagcugcguccuguccggccacaaccuggccaagcacugccuccacgugguggggcccaacgucaacaagggcgaggacauccagcugcugaagagcgccuacgagaacuucaaccagcacgaggugcuccuggcgccgcugcucuccgccgggaucuucggcgccgaccccauccacagccugcgggugugcgucgacaccgugcgcaccaacguguaccuggccgucuucgacaagaaccucuacgacaagcugguguccagcuuccuggagaugaagagcgagaagcagguggagcagaagaucgccgagauccccaaggaggaggucaagcccuucaucaccgaguccaagccgagcguggagcagcggaagcaggacgacaagaagaucaaggcgugcguggaggaggucacgaccacccucgaggagaccaaguuccugacggagaaccugcuccuguacaucgacaucaacgggaaccugcaccccgacuccgccacccucgugagcgacaucgacaucaccuuccugaagaaggacgcccccuacaucgugggcgacgucgugcaggagggcgugcugaccgccgucgugauccccacgaagaaggccgggggcaccaccgagaugcucgcgaaggcccugcgcaaggugccgaccgacaacuacaucacgaccuaccccgggcagggccugaacggguacaccgucgaggaggccaagaccgugcucaagaagugcaaguccgccuucuacauccugcccagcaucaucuccaacgagaagcaggagauccugggcaccgugagcuggaaccuccgggagaugcuggcgcacgccgaggagacgcgcaagcugaugcccgucugcguggagaccaaggccaucguguccaccauccagcggaaguacaagggcaucaagauccaggagggggucguggacuacggcgcccgcuucuacuucuacaccagcaagacgaccguggccucccugaucaacacccucaacgaccugaacgagacccuggucacgaugccgcucggguacgugacccacggccugaaccuggaggaggcggcccgguacaugcgcagccucaaggugcccgccaccgucuccgugagcucccccgacgccgugaccgccuacaacggguaccugacgagcuccagcaagacccccgaggagcacuucaucgagaccaucucccuggcgggcagcuacaaggacuggagcuacuccggccagagcacccagcucgggaucgaguuccugaagcggggcgacaaguccgucuacuacacgagcaacccgaccaccuuccaccuggacggggaggugaucaccuucgacaaccucaagacgcugcugucccuccgcgaggugcggaccaucaaggucuucaccaccguggacaacaucaaccugcacacgcagguggucgacaugagcaugaccuacggccagcaguucggccccaccuaccuggacggggccgacgugaccaagaucaagccccacaacucccacgagggcaagacguucuacgugcucccgaacgacgacacccugcgcgucgaggccuucgaguacuaccacaccaccgaccccagcuuccuggggcgguacauguccgcccucaaccacacgaagaaguggaaguacccccaggugaacggccugaccagcaucaagugggccgacaacaacugcuaccuggcgaccgcccuccugacccugcagcagaucgagcucaaguucaaccccccggcccugcaggacgccuacuaccgcgcgcgggccggggaggccgccaacuucugcgcccugauccucgcguacugcaacaagacggugggcgagcugggcgacguccgcgagaccauguccuaccuguuccagcacgccaaccucgacagcugcaagcgggugcugaacgucgugugcaagaccugcgggcagcagcagaccacccugaagggcguggaggccgucauguacauggggacgcucuccuacgagcaguucaagaagggcgugcagauccccugcaccugcgggaagcaggccaccaaguaccuggugcagcaggagagccccuucgucaugauguccgcccccccggcgcaguacgagcugaagcacggcaccuucacgugcgccagcgaguacaccggcaacuaccagugcgggcacuacaagcacaucaccuccaaggagacccucuacugcaucgacggcgcccugcugacgaagagcagcgaguacaaggggcccaucaccgacguguucuacaaggagaacuccuacaccaccacgaucaagcccgugaccuacaagcucgacggcgucgugugcaccgagaucgaccccaagcuggacaacuacuacaagaaggacaacagcuacuucaccgagcagccgaucgaccuggugcccaaccagcccuaccccaacgccuccuucgacaacuucaaguucgucugcgacaacaucaaguucgccgacgaccucaaccagcugacgggguacaagaagccggcgagccgcgagcugaaggugaccuucuuccccgaccucaacggcgacguggucgccaucgacuacaagcacuacacccccuccuucaagaagggcgccaagcugcugcacaagcccaucguguggcacgugaacaacgccaccaacaaggcgacguacaagccgaacaccuggugcauccggugccucuggcgcaagaagcccgucgagaccagcaacuccuucgacgugcugaagagcgaggacgcccaggggauggacaaccuggccugcgaggaccucaagcccguguccgaggaggucguggagaaccccaccauccagaaggacgugcuggagugcaacgucaagacgaccgagguggugggcgacaucauccugaagccggccaacaacagccucaagaucaccgaggaggucgggcacaccgaccugauggccgcguacguggacaacuccagccugacgaucaagaagcccaacgagcucucccgcgugcugggccugaagacccucgccacccacgggcuggccgccgucaacagcgugcccugggacaccaucgccaacuacgcgaagccguuccugaacaagguggucuccacgaccaccaacaucgugacccggugccucaaccgcgugugcacgaacuacaugcccuacuucuucacccugcugcuccagcugugcaccuucacccggagcaccaacucccgcaucaaggccagcaugcccacgaccaucgccaagaacaccgucaaguccgugggcaaguucugccuggaggccagcuucaacuaccucaagagccccaacuucuccaagcugaucaacaucaucaucugguuccugcuccugagcgugugccugggcucccucaucuacagcaccgccgcgcuggggguccugauguccaaccucggcaugccgagcuacugcacgggguaccgggagggcuaccugaacuccaccaacgugaccaucgccaccuacugcacgggcagcauccccugcuccgugugccugagcgggcucgacucccuggacaccuaccccagccuggagaccauccagaucaccaucuccagcuucaagugggaccucacggccuucggccuggucgccgagugguuccuggccuacauccucuucacccgcuucuucuacgugcuggggcuggcggccaucaugcagcucuucuucuccuacuucgccgugcacuucaucagcaacuccuggcugauguggcugaucaucaaccugguccagauggcccccaucagcgcgauggugcggauguacaucuucuucgccuccuucuacuacguguggaagagcuacguccacgugguggacggcugcaacagcuccaccugcaugaugugcuacaagcgcaaccgggccacccgcgucgagugcacgaccaucgugaacgggguccggcgcagcuucuacguguacgccaacggcggcaagggguucugcaagcuccacaacuggaacugcgugaacugcgacaccuucugcgccggcuccaccuucaucagcgacgaggucgcgcgggaccugucccugcaguucaagcgcccgaucaaccccacggaccagagcuccuacaucguggacagcgugaccgucaagaacggguccauccaccucuacuucgacaaggccggccagaagaccuacgagcggcacagccugucccacuucgugaaccuggacaaccuccgcgccaacaacaccaaggggagccugcccaucaacgugaucgucuucgacggcaaguccaagugcgaggagagcuccgccaagagcgccuccguguacuacagccagcugaugugccagcccauccuccugcuggaccaggcgcucguguccgacgucggcgacagcgccgagguggccgugaagauguucgacgccuacgucaacacguucagcuccaccuucaacgugccgauggagaagcugaagacccugguggccaccgcggaggccgagcucgccaagaacgucagccuggacaacgugcuguccacguucaucagcgccgcgcggcagggguucguggacuccgacgucgagaccaaggacgugguggagugccucaagcugagccaccaguccgacaucgaggucaccggcgacagcugcaacaacuacaugcugaccuacaacaagguggagaacaugacgccccgcgaccucggggccugcaucgacugcuccgcccggcacaucaacgcccagguggccaagagccacaacaucgcgcugaucuggaacgucaaggacuucaugucccugagcgagcagcuccgcaagcagauccgcuccgccgccaagaagaacaaccugcccuucaagcugaccugcgccaccacccggcagguggugaacgucgugacgaccaagaucgcccucaagggcgggugaggacuagucccuguucccagagcccacuuuuuuuucuuuuuuugaaauaaaauagccugucuuucagaucucaaaggcucuuuucagagccaccaaaaaaaaaaaaaaaaaaaaaaaaaaaaaaaaaaaaaaaaaaaaaaaaaaaaaaaaaaaaaaaaaaaaaaaaaaaaaaaaaaaaaaaaaaaaaaaaaaaaa

SEQ ID NO: 20051 - RNA, 6113 nt, Artificial Sequence
  SARS-CoV-2__MT509497.1__non-structural protein 3 (NSP3) mRNA gc
aggagagucccgcagucggcguccagcggcucugcuuguucgugugugugucguugcaggccuuauucaagcuuaccauggcccccaccaaggugaccuucggcgacgacacggucaucgaggugcagggguacaagagcgugaacaucaccuucgagcuggacgagcgcaucgacaagguccucaacgagaagugcuccgccuacaccguggagcugggcaccgaggugaacgaguucgcgugcgucguggccgacgccgugaucaagacgcugcagccggucagcgagcuccugaccccccuggggaucgaccucgacgagugguccauggccaccuacuaccuguucgacgagagcggcgaguucaagcuggccucccacauguacugcagcuucuacccccccgacgaggacgaggaggagggggacugcgaggaggaggaguucgagccguccacccaguacgaguacggcacggaggacgacuaccagggcaagccccucgaguucggggcgaccagcgccgcccugcagcccgaggaggagcaggaggaggacuggcuggacgacgacucccagcagaccgugggccagcaggacgggagcgaggacaaccagaccacgaccauccagaccaucguggagguccagccccagcucgagauggagcugaccccgguggugcagacgaucgaggucaacuccuucagcggcuaccugaagcucaccgacaacguguacaucaagaacgccgacaucguggaggaggcgaagaaggucaagcccaccgugguggucaacgccgccaacguguaccugaagcacgggggcggcguggccggggcccugaacaaggcgaccaacaacgccaugcaggucgaguccgacgacuacaucgccacgaacggcccccucaagguggggggcagcugcguccuguccggccacaaccuggccaagcacugccuccacgugguggggcccaacgucaacaagggcgaggacauccagcugcugaagagcgccuacgagaacuucaaccagcacgaggugcuccuggcgccgcugcucuccgccgggaucuucggcgccgaccccauccacagccugcgggugugcgucgacaccgugcgcaccaacguguaccuggccgucuucgacaagaaccucuacgacaagcugguguccagcuuccuggagaugaagagcgagaagcagguggagcagaagaucgccgagauccccaaggaggaggucaagcccuucaucaccgaguccaagccgagcguggagcagcggaagcaggacgacaagaagaucaaggcgugcguggaggaggucacgaccacccucgaggagaccaaguuccugacggagaaccugcuccuguacaucgacaucaacgggaaccugcaccccgacuccgccacccucgugagcgacaucgacaucaccuuccugaagaaggacgcccccuacaucgugggcgacgucgugcaggagggcgugcugaccgccgucgugauccccacgaagaaggccgggggcaccaccgagaugcucgcgaaggcccugcgcaaggugccgaccgacaacuacaucacgaccuaccccgggcagggccugaacggguacaccgucgaggaggccaagaccgugcucaagaagugcaaguccgccuucuacauccugcccagcaucaucuccaacgagaagcaggagauccugggcaccgugagcuggaaccuccgggagaugcuggcgcacgccgaggagacgcgcaagcugaugcccgucugcguggagaccaaggccaucguguccaccauccagcggaaguacaagggcaucaagauccaggagggggucguggacuacggcgcccgcuucuacuucuacaccagcaagacgaccguggccucccugaucaacacccucaacgaccugaacgagacccuggucacgaugccgcucggguacgugacccacggccugaaccuggaggaggcggcccgguacaugcgcagccucaaggugcccgccaccgucuccgugagcucccccgacgccgugaccgccuacaacggguaccugacgagcuccagcaagacccccgaggagcacuucaucgagaccaucucccuggcgggcagcuacaaggacuggagcuacuccggccagagcacccagcucgggaucgaguuccugaagcggggcgacaaguccgucuacuacacgagcaacccgaccaccuuccaccuggacggggaggugaucaccuucgacaaccucaagacgcugcugucccuccgcgaggugcggaccaucaaggucuucaccaccguggacaacaucaaccugcacacgcagguggucgacaugagcaugaccuacggccagcaguucggccccaccuaccuggacggggccgacgugaccaagaucaagccccacaacucccacgagggcaagacguucuacgugcucccgaacgacgacacccugcgcgucgaggccuucgaguacuaccacaccaccgaccccagcuuccuggggcgguacauguccgcccucaaccacacgaagaaguggaaguacccccaggugaacggccugaccagcaucaagugggccgacaacaacugcuaccuggcgaccgcccuccugacccugcagcagaucgagcucaaguucaaccccccggcccugcaggacgccuacuaccgcgcgcgggccggggaggccgccaacuucugcgcccugauccucgcguacugcaacaagacggugggcgagcugggcgacguccgcgagaccauguccuaccuguuccagcacgccaaccucgacagcugcaagcgggugcugaacgucgugugcaagaccugcgggcagcagcagaccacccugaagggcguggaggccgucauguacauggggacgcucuccuacgagcaguucaagaagggcgugcagauccccugcaccugcgggaagcaggccaccaaguaccuggugcagcaggagagccccuucgucaugauguccgcccccccggcgcaguacgagcugaagcacggcaccuucacgugcgccagcgaguacaccggcaacuaccagugcgggcacuacaagcacaucaccuccaaggagacccucuacugcaucgacggcgcccugcugacgaagagcagcgaguacaaggggcccaucaccgacguguucuacaaggagaacuccuacaccaccacgaucaagcccgugaccuacaagcucgacggcgucgugugcaccgagaucgaccccaagcuggacaacuacuacaagaaggacaacagcuacuucaccgagcagccgaucgaccuggugcccaaccagcccuaccccaacgccuccuucgacaacuucaaguucgucugcgacaacaucaaguucgccgacgaccucaaccagcugacgggguacaagaagccggcgagccgcgagcugaaggugaccuucuuccccgaccucaacggcgacguggucgccaucgacuacaagcacuacacccccuccuucaagaagggcgccaagcugcugcacaagcccaucguguggcacgugaacaacgccaccaacaaggcgacguacaagccgaacaccuggugcauccggugccucuggcgcaagaagcccgucgagaccagcaacuccuucgacgugcugaagagcgaggacgcccaggggauggacaaccuggccugcgaggaccucaagcccguguccgaggaggucguggagaaccccaccauccagaaggacgugcuggagugcaacgucaagacgaccgagguggugggcgacaucauccugaagccggccaacaacagccucaagaucaccgaggaggucgggcacaccgaccugauggccgcguacguggacaacuccagccugacgaucaagaagcccaacgagcucucccgcgugcugggccugaagacccucgccacccacgggcuggccgccgucaacagcgugcccugggacaccaucgccaacuacgcgaagccguuccugaacaagguggucuccacgaccaccaacaucgugacccggugccucaaccgcgugugcacgaacuacaugcccuacuucuucacccugcugcuccagcugugcaccuucacccggagcaccaacucccgcaucaaggccagcaugcccacgaccaucgccaagaacaccgucaaguccgugggcaaguucugccuggaggccagcuucaacuaccucaagagccccaacuucuccaagcugaucaacaucaucaucugguuccugcuccugagcgugugccugggcucccucaucuacagcaccgccgcgcuggggguccugauguccaaccucggcaugccgagcuacugcacgggguaccgggagggcuaccugaacuccaccaacgugaccaucgccaccuacugcacgggcagcauccccugcuccgugugccugagcgggcucgacucccuggacaccuaccccagccuggagaccauccagaucaccaucuccagcuucaagugggaccucacggccuucggccuggucgccgagugguuccuggccuacauccucuucacccgcuucuucuacgugcuggggcuggcggccaucaugcagcucuucuucuccuacuucgccgugcacuucaucagcaacuccuggcugauguggcugaucaucaaccugguccagauggcccccaucagcgcgauggugcggauguacaucuucuucgccuccuucuacuacguguggaagagcuacguccacgugguggacggcugcaacagcuccaccugcaugaugugcuacaagcgcaaccgggccacccgcgucgagugcacgaccaucgugaacgggguccggcgcagcuucuacguguacgccaacggcggcaagggguucugcaagcuccacaacuggaacugcgugaacugcgacaccuucugcgccggcuccaccuucaucagcgacgaggucgcgcgggaccugucccugcaguucaagcgcccgaucaaccccacggaccagagcuccuacaucguggacagcgugaccgucaagaacggguccauccaccucuacuucgacaaggccggccagaagaccuacgagcggcacagccugucccacuucgugaaccuggacaaccuccgcgccaacaacaccaaggggagccugcccaucaacgugaucgucuucgacggcaaguccaagugcgaggagagcuccgccaagagcgccuccguguacuacagccagcugaugugccagcccauccuccugcuggaccaggcgcucguguccgacgucggcgacagcgccgagguggccgugaagauguucgacgccuacgucaacacguucagcuccaccuucaacgugccgauggagaagcugaagacccugguggccaccgcggaggccgagcucgccaagaacgucagccuggacaacgugcuguccacguucaucagcgccgcgcggcagggguucguggacuccgacgucgagaccaaggacgugguggagugccucaagcugagccaccaguccgacaucgaggucaccggcgacagcugcaacaacuacaugcugaccuacaacaagguggagaacaugacgccccgcgaccucggggccugcaucgacugcuccgcccggcacaucaacgcccagguggccaagagccacaacaucgcgcugaucuggaacgucaaggacuucaugucccugagcgagcagcuccgcaagcagauccgcuccgccgccaagaagaacaaccugcuguucaagcucaccugcgccaccacccggcagguggugaacgucgugacgaccaagaucgcccugaagggcgggugaggacuagucccuguucccagagcccacuuuuuuuucuuuuuuugaaauaaaauagccugucuuucagaucucaaaggcucuuuucagagccaccaaaaaaaaaaaaaaaaaaaaaaaaaaaaaaaaaaaaaaaaaaaaaaaaaaaaaaaaaaaaaaaaaaaaaaaaaaaaaaaaaaaaaaaaaaaaaaaaaaaaa

SEQ ID NO: 20052 - RNA, 6113 nt, Artificial Sequence
  SARS-CoV-2__MT509504.1__non-structural protein 3 (NSP3) mRNA gc
aggagagucccgcagucggcguccagcggcucugcuuguucgugugugugucguugcaggccuuauucaagcuuaccauggcccccaccaaggugaccuucggcgacgacacggucaucgaggugcagggguacaagagcgugaacaucaccuucgagcuggacgagcgcaucgacaagguccucaacgagaagugcuccgccuacaccguggagcugggcaccgaggugaacgaguucgcgugcgucguggccgacgccgugaucaagacgcugcagccggucagcgagcuccugaccccccuggggaucgaccucgacgagugguccauggccaccuacuaccuguucgacgagagcggcgaguucaagcuggccucccacauguacugcagcuucuacccccccgacgaggacgaggaggagggggacugcgaggaggaggaguucgagccguccacccaguacgaguacggcacggaggacgacuaccagggcaagccccucgaguucggggcgaccagcgccgcccugcagcccgaggaggagcaggaggaggacuggcuggacgacgacucccagcagaccgugggccagcaggacgggagcgaggacaaccagaccacgaccauccagaccaucguggagguccagccccagcucgagauggagcugaccccgguggugcagacgaucgaggucaacuccuucagcggcuaccugaagcucaccgacaacguguacaucaagaacgccgacaucguggaggaggcgaagaaggucaagcccaccgugguggucaacgccgccaacguguaccugaagcacgggggcggcguggccggggcccugaacaaggcgaccaacaacgccaugcaggucgaguccgacgacuacaucgccacgaacggcccccucaagguggggggcagcugcguccuguccggccacaaccuggccaagcacugccuccacgugguggggcccaacgucaacaagggcgaggacauccagcugcugaagagcgccuacgagaacuucaaccagcacgaggugcuccuggcgccgcugcucuccgccgggaucuucggcgccgaccccauccacagccugcgggugugcgucgacaccgugcgcaccaacguguaccuggccgucuucgacaagaaccucuacgacaagcugguguccagcuuccuggagaugaagagcgagaagcagguggagcagaagaucgccgagauccccaaggaggaggucaagcccuucaucaccgaguccaagccgagcguggagcagcggaagcaggacgacaagaagaucaaggcgugcguggaggaggucacgaccacccucgaggagaccaaguuccugacggagaaccugcuccuguacaucgacaucaacgggaaccugcaccccgacuccgccacccucgugagcgacaucgacaucaccuuccugaagaaggacgcccccuacaucgugggcgacgucgugcaggagggcgugcugaccgccgucgugauccccacgaagaaggccgggggcaccaccgagaugcucgcgaaggcccugcgcaaggugccgaccgacaacuacaucacgaccuaccccgggcagggccugaacggguacaccgucgaggaggccaagaccgugcucaagaagugcaaguccgccuucuacauccugcccagcaucaucuccaacgagaagcaggagauccugggcaccgugagcuggaaccuccgggagaugcuggcgcacgccgaggagacgcgcaagcugaugcccgucugcguggagaccaaggccaucguguccaccauccagcggaaguacaagggcaucaagauccaggagggggucguggacuacggcgcccgcuucuacuucuacaccagcaagacgaccguggccucccugaucaacacccucaacgaccugaacgagacccuggucacgaugccgcucggguacgugacccacggccugaaccuggaggaggcggcccgguacaugcgcagccucaaggugcccgccaccgucuccgugagcucccccgacgccgugaccgccuacaacggguaccugacgagcuccagcaagacccccgaggagcacuucaucgagaccaucucccuggcgggcagcuacaaggacuggagcuacuccggccagagcacccagcucgggaucgaguuccugaagcggggcgacaagaucgucuacuacacguccaacccgaccaccuuccaccuggacggggaggugaucaccuucgacaaccucaagacgcugcugagccuccgcgaggugcggaccaucaaggucuucaccaccguggacaacaucaaccugcacacgcagguggucgacauguccaugaccuacggccagcaguucggccccaccuaccuggacggggccgacgugaccaagaucaagccccacaacagccacgagggcaagacguucuacgugcucccgaacgacgacacccugcgcgucgaggccuucgaguacuaccacaccaccgaccccuccuuccuggggcgguacaugagcgcccucaaccacacgaagaaguggaaguacccccaggugaacggccugaccuccaucaagugggccgacaacaacugcuaccuggcgaccgcccuccugacccugcagcagaucgagcucaaguucaaccccccggcccugcaggacgccuacuaccgcgcgcgggccggggaggccgccaacuucugcgcccugauccucgcguacugcaacaagacggugggcgagcugggcgacguccgcgagaccaugagcuaccuguuccagcacgccaaccucgacuccugcaagcgggugcugaacgucgugugcaagaccugcgggcagcagcagaccacccugaagggcguggaggccgucauguacauggggacgcucagcuacgagcaguucaagaagggcgugcagauccccugcaccugcgggaagcaggccaccaaguaccuggugcagcaggagucccccuucgucaugaugagcgcccccccggcgcaguacgagcugaagcacggcaccuucacgugcgccuccgaguacaccggcaacuaccagugcgggcacuacaagcacaucaccagcaaggagacccucuacugcaucgacggcgcccugcugacgaaguccagcgaguacaaggggcccaucaccgacguguucuacaaggagaacagcuacaccaccacgaucaagcccgugaccuacaagcucgacggcgucgugugcaccgagaucgaccccaagcuggacaacuacuacaagaaggacaacuccuacuucaccgagcagccgaucgaccuggugcccaaccagcccuaccccaacgccagcuucgacaacuucaaguucgucugcgacaacaucaaguucgccgacgaccucaaccagcugacgggguacaagaagccggcgucccgcgagcugaaggugaccuucuuccccgaccucaacggcgacguggucgccaucgacuacaagcacuacacccccagcuucaagaagggcgccaagcugcugcacaagcccaucguguggcacgugaacaacgccaccaacaaggcgacguacaagccgaacaccuggugcauccggugccucugguccaccaagcccgucgagaccagcaacuccuucgacgugcugaagagcgaggacgcccaggggauggacaaccuggccugcgaggaccucaagcccguguccgaggaggucguggagaaccccacgauccagaaggacgugcuggagugcaacgucaagaccaccgagguggugggcgacaucauccugaagccggccaacaacagccucaagaucaccgaggaggucgggcacacggaccugauggccgcguacguggacaacuccagccugaccaucaagaagcccaacgagcucucccgcgugcugggccugaagacccucgccacccacgggcuggccgccgucaacagcgugcccugggacacgaucgccaacuacgcgaagccguuccugaacaagguggucuccaccaccaccaacaucgugacgcgcugccucaaccgggugugcaccaacuacaugcccuacuucuucacccugcugcuccagcugugcaccuucacccgcagcacgaacucccggaucaaggccagcaugcccaccaccaucgccaagaacaccgucaaguccgugggcaaguucugccuggaggccagcuucaacuaccucaagagccccaacuucuccaagcugaucaacaucaucaucugguuccugcuccugagcgugugccugggcucccucaucuacagcacggccgcgcuggggguccugauguccaaccucggcaugccgagcuacugcaccggguaccgcgagggcuaccugaacuccaccaacgugaccaucgccacguacugcaccggcagcauccccugcuccgugugccugagcgggcucgacucccuggacaccuaccccagccuggagaccauccagaucacgaucuccagcuucaagugggaccucaccgccuucggccuggucgccgagugguuccuggccuacauccucuucacccgguucuucuacgugcuggggcuggcggccaucaugcagcucuucuucuccuacuucgccgugcacuucaucagcaacuccuggcugauguggcugaucaucaaccugguccagauggcccccaucagcgcgauggugcgcauguacaucuucuucgccuccuucuacuacguguggaagagcuacguccacgugguggacggcugcaacagcuccaccugcaugaugugcuacaagcggaaccgcgccacgcgggucgagugcaccaccaucgugaacgggguccgccggagcuucuacguguacgccaacggcggcaagggguucugcaagcuccacaacuggaacugcgugaacugcgacaccuucugcgccggcuccacguucaucagcgacgaggucgcgcgcgaccugucccugcaguucaagcggccgaucaaccccaccgaccagagcuccuacaucguggacagcgugaccgucaagaacggguccauccaccucuacuucgacaaggccggccagaagaccuacgagcgccacagccugucccacuucgugaaccuggacaaccuccgggccaacaacacgaaggggagccugcccaucaacgugaucgucuucgacggcaaguccaagugcgaggagagcuccgccaagagcgccuccguguacuacagccagcugaugugccagcccauccuccugcuggaccaggcgcucguguccgacgucggcgacagcgccgagguggccgugaagauguucgacgccuacgucaacaccuucagcuccaccuucaacgugccgauggagaagcugaagacccugguggccacggcggaggccgagcucgccaagaacgucagccuggacaacgugcuguccaccuucaucagcgccgcgcgccagggguucguggacuccgacgucgagaccaaggacgugguggagugccucaagcugagccaccaguccgacaucgaggucaccggcgacagcugcaacaacuacaugcugacguacaacaagguggagaacaugaccccccgggaccucggggccugcaucgacugcuccgcccgccacaucaacgcccagguggccaagagccacaacaucgcgcugaucuggaacgucaaggacuucaugucccugagcgagcagcuccggaagcagauccgcuccgccgccaagaagaacaaccugcccuucaagcugaccugcgccaccacgcgccagguggugaacgucgugaccaccaagaucgcccucaagggcgggugaggacuagucccuguucccagagcccacuuuuuuuucuuuuuuugaaauaaaauagccugucuuucagaucucaaaggcucuuuucagagccaccaaaaaaaaaaaaaaaaaaaaaaaaaaaaaaaaaaaaaaaaaaaaaaaaaaaaaaaaaaaaaaaaaaaaaaaaaaaaaaaaaaaaaaaaaaaaaaaaaaaaa

SEQ ID NO: 20053 - RNA, 6113 nt, Artificial Sequence
  SARS-CoV-2__MT509503.1__non-structural protein 3 (NSP3) mRNA gc
aggagagucccgcagucggcguccagcggcucugcuuguucgugugugugucguugcaggccuuauucaagcuuaccauggcccccaccaaggugaccuucggcgacgacacggucaucgaggugcagggguacaagagcgugaacaucaccuucgagcuggacgagcgcaucgacaagguccucaacgagaagugcuccgccuacaccguggagcugggcaccgaggugaacgaguucgcgugcgucguggccgacgccgugaucaagacgcugcagccggucagcgagcuccugaccccccuggggaucgaccucgacgagugguccauggccaccuacuaccuguucgacgagagcggcgaguucaagcuggccucccacauguacugcagcuucuacccccccgacgaggacgaggaggagggggacugcgaggaggaggaguucgagccguccacccaguacgaguacggcacggaggacgacuaccagggcaagccccucgaguucggggcgaccagcgccgcccugcagcccgaggaggagcaggaggaggacuggcuggacgacgacucccagcagaccgugggccagcaggacgggagcgaggacaaccagaccacgaccauccagaccaucguggagguccagccccagcucgagauggagcugaccccgguggugcagacgaucgaggucaacuccuucagcggcuaccugaagcucaccgacaacguguacaucaagaacgccgacaucguggaggaggcgaagaaggucaagcccaccgugguggucaacgccgccaacguguaccugaagcacgggggcggcguggccggggcccugaacaaggcgaccaacaacgccaugcaggucgaguccgacgacuacaucgccacgaacggcccccucaagguggggggcagcugcguccuguccggccacaaccuggccaagcacugccuccacgugguggggcccaacgucaacaagggcgaggacauccagcugcugaagagcgccuacgagaacuucaaccagcacgaggugcuccuggcgccgcugcucuccgccgggaucuucggcgccgaccccauccacagccugcgggugugcgucgacaccgugcgcaccaacguguaccuggccgucuucgacaagaaccucuacgacaagcugguguccagcuuccuggagaugaagagcgagaagcagguggagcagaagaucgccgagauccccaaggaggaggucaagcccuucaucaccgaguccaagccgagcguggagcagcggaagcaggacgacaagaagaucaaggcgugcguggaggaggucacgaccacccucgaggagaccaaguuccugacggagaaccugcuccuguacaucgacaucaacgggaaccugcaccccgacuccgccacccucgugagcgacaucgacaucaccuuccugaagaaggacgcccccuacaucgugggcgacgucgugcaggagggcgugcugaccgccgucgugauccccacgaagaaggccgggggcaccaccgagaugcucgcgaaggcccugcgcaaggugccgaccgacaacuacaucacgaccuaccccgggcagggccugaacggguacaccgucgaggaggccaagaccgugcucaagaagugcaaguccgccuucuacauccugcccagcaucaucuccaacgagaagcaggagauccugggcaccgugagcuggaaccuccgggagaugcuggcgcacgccgaggagacgcgcaagcugaugcccgucugcguggagaccaaggccaucguguccaccauccagcggaaguacaagggcaucaagauccaggagggggucguggacuacggcgcccgcuucuacuucuacaccagcaagacgaccguggccucccugaucaacacccucaacgaccugaacgagacccuggucacgaugccgcucggguacgugacccacggccugaaccuggaggaggcggcccgguacaugcgcagccucaaggugcccgccaccgucuccgugagcucccccgacgccgugaccgccuacaacggguaccugacgagcuccagcaagacccccgaggagcacuucaucgagaccaucucccuggcgggcagcuacaaggacuggagcuacuccggccagagcacccagcucgggaucgaguuccugaagcggggcgacaaguccgucuacuacacgagcaacccgaccaccuuccaccuggacggggaggugaucaccuucgacaaccucaagacgcugcugucccuccgcgaggugcggaccaucaaggucuucaccaccguggacaacaucaaccugcacacgcagguggucgacaugagcaugaccuacggccagcaguucggccccaccuaccuggacggggccgacgugaccaagaucaagccccacaacucccacgagggcaagacguucuacgugcucccgaacgacgacacccugcgcgucgaggccuucgaguacuaccacaccaccgaccccagcuuccuggggcgguacauguccgcccucaaccacacgaagaaguggaaguacccccaggugaacggccugaccagcaucaagugggccgacaacaacugcuaccuggcgaccgcccuccugacccugcagcagaucgagcucaaguucaaccccccggcccugcaggacgccuacuaccgcgcgcgggccggggaggccgccaacuucugcgcccugauccucgcguacugcaacaagacggugggcgagcugggcgacguccgcgagaccauguccuaccuguuccagcacgccaaccucgacagcugcaagcgggugcugaacgucgugugcaagaccugcgggcagcagcagaccacccugaagggcguggaggccgucauguacauggggacgcucuccuacgagcaguucaagaagggcgugcagauccccugcaccugcgggaagcaggccaccaaguaccuggugcagcaggagagccccuucgucaugauguccgcccccccggcgcaguacgagcugaagcacggcaccuucacgugcgccagcgaguacaccggcaacuaccagugcgggcacuacaagcacaucaccuccaaggagacccucuacugcaucgacggcgcccugcugacgaagagcagcgaguacaaggggcccaucaccgacguguucuacaaggagaacuccuacaccaccacgaucaagcccgugaccuacaagcucgacggcgucgugugcaccgagaucgaccccaagcuggacaacuacuacaagaaggacaacagcuacuucaccgagcagccgaucgaccuggugcccaaccagcccuaccccaacgccuccuucgacaacuucaaguucgucugcgacaacaucaaguucgccgacgaccucaaccagcugacgggguacaagaagccggcgagccgcgagcugaaggugaccuucuuccccgaccucaacggcgacguggucgccaucgacuacaagcacuacacccccuccuucaagaagggcgccaagcugcugcacaagcccaucguguggcacgugaacaacgccaccaacaaggcgacguacaagccgaacaccuggugcauccggugccucuggagcaccaagcccgucgagaccuccaacagcuucgacgugcuggaguccgaggacgcccaggggauggacaaccuggccugcgaggaccucaagcccgugagcgaggaggucguggagaaccccacgauccagaaggacgugcuggagugcaacgucaagaccaccgagguggugggcgacaucauccugaagccggccaacaacucccucaagaucaccgaggaggucgggcacacggaccugauggccgcguacguggacaacagcucccugaccaucaagaagcccaacgagcucagccgcgugcugggccugaagacccucgccacccacgggcuggccgccgucaacuccgugcccugggacacgaucgccaacuacgcgaagccguuccugaacaagguggucagcaccaccaccaacaucgugacgcgcugccucaaccgggugugcaccaacuacaugcccuacuucuucacccugcugcuccagcugugcaccuucacccgcuccacgaacagccggaucaaggccuccaugcccaccaccaucgccaagaacaccgucaagagcgugggcaaguucugccuggaggccagcuucaacuaccucaagucccccaacuucagcaagcugaucaacaucaucaucugguuccugcuccuguccgugugccugggcagccucaucuacuccacggccgcgcuggggguccugaugagcaaccucggcaugccguccuacugcaccggguaccgcgagggcuaccugaacagcaccaacgugaccaucgccacguacugcaccggcuccauccccugcagcgugugccuguccgggcucgacagccuggacaccuaccccucccuggagaccauccagaucacgaucagcuccuucaagugggaccucaccgccuucggccuggucgccgagugguuccuggccuacauccucuucacccgguucuucuacgugcuggggcuggcggccaucaugcagcucuucuucagcuacuucgccgugcacuucaucuccaacagcuggcugauguggcugaucaucaaccugguccagauggcccccaucuccgcgauggugcgcauguacaucuucuucgccagcuucuacuacguguggaagagcuacguccacgugguggacggcugcaacuccagcaccugcaugaugugcuacaagcggaaccgcgccacgcgggucgagugcaccaccaucgugaacgggguccgccgguccuucuacguguacgccaacggcggcaagggguucugcaagcuccacaacuggaacugcgugaacugcgacaccuucugcgccggcagcacguucaucuccgacgaggucgcgcgcgaccugagccugcaguucaagcggccgaucaaccccaccgaccaguccagcuacaucguggacuccgugaccgucaagaacgggagcauccaccucuacuucgacaaggccggccagaagaccuacgagcgccacucccugagccacuucgugaaccuggacaaccuccgggccaacaacacgaaggggucccugcccaucaacgugaucgucuucgacggcaagagcaagugcgaggaguccagcgccaaguccgccagcguguacuacucccagcugaugugccagcccauccuccugcuggaccaggcgcucgugagcgacgucggcgacagcgccgagguggccgugaagauguucgacgccuacgucaacaccuucuccagcaccuucaacgugccgauggagaagcugaagacccugguggccacggcggaggccgagcucgccaagaacgucucccuggacaacgugcugagcaccuucaucuccgccgcgcgccagggguucguggacagcgacgucgagaccaaggacgugguggagugccucaagcugucccaccagagcgacaucgaggucaccggcgacuccugcaacaacuacaugcugacguacaacaagguggagaacaugaccccccgggaccucggggccugcaucgacugcagcgcccgccacaucaacgcccagguggccaagucccacaacaucgcgcugaucuggaacgucaaggacuucaugagccuguccgagcagcuccggaagcagauccgcagcgccgccaagaagaacaaccugcccuucaagcugaccugcgccaccacgcgccagguggugaacgucgugaccaccaagaucgcccucaagggcgggugaggacuagucccuguucccagagcccacuuuuuuuucuuuuuuugaaauaaaauagccugucuuucagaucucaaaggcucuuuucagagccaccaaaaaaaaaaaaaaaaaaaaaaaaaaaaaaaaaaaaaaaaaaaaaaaaaaaaaaaaaaaaaaaaaaaaaaaaaaaaaaaaaaaaaaaaaaaaaaaaaaaaa

SEQ ID NO: 20054 - RNA, 6113 nt, Artificial Sequence
  SARS-CoV-2__MT506571.1__non-structural protein 3 (NSP3) mRNA gc
aggagagucccgcagucggcguccagcggcucugcuuguucgugugugugucguugcaggccuuauucaagcuuaccauggcccccaccaaggugaccuucggcgacgacacggucaucgaggugcagggguacaagagcgugaacaucaccuucgagcuggacgagcgcaucgacaagguccucaacgagaagugcuccgccuacaccguggagcugggcaccgaggugaacgaguucgcgugcgucguggccgacgccgugaucaagacgcugcagccggucagcgagcuccugaccccccuggggaucgaccucgacgagugguccauggccaccuacuaccuguucgacgagagcggcgaguucaagcuggccucccacauguacugcagcuucuacccccccgacgaggacgaggaggagggggacugcgaggaggaggaguucgagccguccacccaguacgaguacggcacggaggacgacuaccagggcaagccccucgaguucggggcgaccagcgccgcccugcagcccgaggaggagcaggaggaggacuggcuggacgacgacucccagcagaccgugggccagcaggacgggagcgaggacaaccagaccacgaccauccagaccaucguggagguccagccccagcucgagauggagcugaccccgguggugcagacgaucgaggucaacuccuucagcggcuaccugaagcucaccgacaacguguacaucaagaacgccgacaucguggaggaggcgaagaaggucaagcccaccgugguggucaacgccgccaacguguaccugaagcacgggggcggcguggccggggcccugaacaaggcgaccaacaacgccaugcaggucgaguccgacgacuacaucgccacgaacggcccccucaagguggggggcagcugcguccuguccggccacaaccuggccaagcacugccuccacgugguggggcccaacgucaacaagggcgaggacauccagcugcugaagagcgccuacgagaacuucaaccagcacgaggugcuccuggcgccgcugcucuccgccgggaucuucggcgccgaccccauccacagccugcgggugugcgucgacaccgugcgcaccaacguguaccuggccgucuucgacaagaaccucuacgacaagcugguguccagcuuccuggagaugaagagcgagaagcagguggagcagaagaucgccgagauccccaaggaggaggucaagcccuucaucaccgaguccaagccgagcguggagcagcggaagcaggacgacaagaagaucaaggcgugcguggaggaggucacgaccacccucgaggagaccaaguuccugacggagaaccugcuccuguacaucgacaucaacgggaaccugcaccccgacuccgccacccucgugagcgacaucgacaucaccuuccugaagaaggacgcccccuacaucgugggcgacgucgugcaggagggcgugcugaccgccgucgugauccccacgaagaaggccgggggcaccaccgagaugcucgcgaaggcccugcgcaaggugccgaccgacaacuacaucacgaccuaccccgggcagggccugaacggguacaccgucgaggaggccaagaccgugcucaagaagugcaaguccgccuucuacauccugcccagcaucaucuccaacgagaagcaggagauccugggcaccgugagcuggaaccuccgggagaugcuggcgcacgccgaggagacgcgcaagcugaugcccgucugcguggagaccaaggccaucguguccaccauccagcggaaguacaagggcaucaagauccaggagggggucguggacuacggcgcccgcuucuacuucuacaccagcaagacgaccguggccucccugaucaacacccucaacgaccugaacgagacccuggucacgaugccgcucggguacgugacccacggccugaaccuggaggaggcggcccgguacaugcgcagccucaaggugcccgccaccgucuccgugagcucccccgacgccgugaccgccuacaacggguaccugacgagcuccagcaagacccccgaggagcacuucaucgagaccaucucccuggcgggcagcuacaaggacuggagcuacuccggccagagcacccagcucgggaucgaguuccugaagcggggcgacaaguccgucuacuacacgagcaacccgaccaccuuccaccuggacggggaggugaucaccuucgacaaccucaagacgcugcugucccuccgcgaggugcggaccaucaaggucuucaccaccguggacaacaucaaccugcacacgcagguggucgacaugagcaugaccuacggccagcaguucggccccaccuaccuggacggggccgacgugaccaagaucaagccccacaacucccacgagggcaagacguucuacgugcucccgaacgacgacacccugcgcgucgaggccuucgaguacuaccacaccaccgaccccagcuuccuggggcgguacauguccgcccucaaccacacgaagaaguggaaguacccccaggugaacggccugaccagcaucaagugggccgacaacaacugcuaccuggcgaccgcccuccugacccugcagcagaucgagcucaaguucaaccccccggcccugcaggacgccuacuaccgcgcgcgggccggggaggccgccaacuucugcgcccugauccucgcguacugcaacaagacggugggcgagcugggcgacguccgcgagaccauguccuaccuguuccagcacgccaaccucgacagcugcaagcgggugcugaacgucgugugcaagaccugcgggcagcagcagaccacccugaagggcguggaggccgucauguacauggggacgcucuccuacgagcaguucaagaagggcgugcagauccccugcaccugcgggaagcaggccaccaaguaccuggugcagcaggagagccccuucgucaugauguccgcccccccggcgcaguacgagcugaagcacggcaccuucacgugcgccagcgaguacaccggcaacuaccagugcgggcacuacaagcacaucaccuccaaggagacccucuacugcaucgacggcgcccugcugacgaagagcagcgaguacaaggggcccaucaccgacguguucuacaaggagaacuccuacaccaccacgaucaagcccgugaccuacaagcucgacggcgucgugugcaccgagaucgaccccaagcuggacaacuacuacaagaaggacaacagcuacuucaccgagcagccgaucgaccuggugcccaaccagcccuaccccaacgccuccuucgacaacuucaaguucgucugcgacaacaucaaguucgccgacgaccucaaccagcugacgggguacaagaagccggcgagccgcgagcugaaggugaccuucuuccccgaccucaacggcgacguggucgccaucgacuacaagcacuacacccccuccuucaagaagggcgccaagcugcugcacaagcccaucguguggcacgugaacaacgccaccaacaaggcgacguacaagccgaacaccuggugcauccggugccucuggagcaccaagcccgucgagaccuccaacagcuucgacgugcugaaguccgaggacgcccaggggauggacaaccuggccugcgaggaccucaagcccgugagcgaggaggucguggagaaccccacgauccagaaggacgugcuggagugcaacgucaagaccaccgagguggugggcgacaucauccugaagccggccaacaacucccucaagaucaccgaggaggucgggcacacggaccugauggccgcguacguggacaacagcucccugaccaucaagaagcccaacgagcucagccgcgugcugggccugaagacccucgccacccacgggcuggccgccgucaacuccgugcccugggacacgaucgccaacuacgcgaagccguuccugaacaagguggucagcaccaccaccaacaucgugacgcgcugccucaaccgggugugcaccaacuacaugcccuacuucuucacccugcugcuccagcugugcaccuucacccgcuccacgaacagccggaucaaggccuccaugcccaccaccaucgccaagaacaccgucaagagcgugggcaaguucugccuggaggccagcuucaacuaccucaagucccccaacuucagcaagcugaucaacaucaucaucugguuccugcuccuguccgugugccugggcagccucaucuacuccacggccgcgcuggggguccugaugagcaaccucggcaugccguccuacugcaccggguaccgcgagggcuaccugaacagcaccaacgugaccaucgccacguacugcaccggcuccauccccugcagcgugugccuguccgggcucgacagccuggacaccuaccccucccuggagaccauccagaucacgaucagcuccuucaagugggaccucaccgccuucggccuggucgccgagugguuccuggccuacauccucuucacccgguucuucuacgugcuggggcuggcggccaucaugcagcucuucuucagcuacuucgccgugcacuucaucuccaacagcuggcugauguggcugaucaucaaccugguccagauggcccccaucuccgcgauggugcgcauguacaucuucuucgccagcuucuacuacguguggaagagcuacguccacgugguggacggcugcaacuccagcaccugcaugaugugcuacaagcggaaccgcgccacgcgggucgagugcaccaccaucgugaacgggguccgccgguccuucuacguguacgccaacggcggcaagggguucugcaagcuccacaacuggaacugcgugaacugcgacaccuucugcgccggcagcacguucaucuccgacgaggucgcgcgcgaccugagccugcaguucaagcggccgaucaaccccaccgaccaguccagcuacaucguggacuccgugaccgucaagaacgggagcauccaccucuacuucgacaaggccggccagaagaccuacgagcgccacucccugagccacuucgugaaccuggacaaccuccgggccaacaacacgaaggggucccugcccaucaacgugaucgucuucgacggcaagagcaagugcgaggaguccagcgccaaguccgccagcguguacuacucccagcugaugugccagcccauccuccugcuggaccaggcgcucgugagcgacgucggcgacagcgccgagguggccgugaagauguucgacgccuacgucaacaccuucuccagcaccuucaacgugccgauggagaagcugaagacccugguggccacggcggaggccgagcucgccaagaacgucucccuggacaacgugcugagcaccuucaucuccgccgcgcgccagggguucguggacagcgacgucgagaccaaggacgugguggagugccucaagcugucccaccagagcgacaucgaggucaccggcgacuccugcaacaacuacaugcugacguacaacaagguggagaacaugaccccccgggaccucggggccugcaucgacugcagcgcccgccacaucaacgugcaggucgccaagucccacaacaucgcccugaucuggaacgugaaggacuucaugagccuguccgagcagcuccggaagcagauccgcagcgcggccaagaagaacaaccugcccuucaagcugaccugcgccaccacgcgccagguggucaacguggugaccaccaagaucgcccucaagggcgggugaggacuagucccuguucccagagcccacuuuuuuuucuuuuuuugaaauaaaauagccugucuuucagaucucaaaggcucuuuucagagccaccaaaaaaaaaaaaaaaaaaaaaaaaaaaaaaaaaaaaaaaaaaaaaaaaaaaaaaaaaaaaaaaaaaaaaaaaaaaaaaaaaaaaaaaaaaaaaaaaaaaaa

SEQ ID NO: 20055 - RNA, 6113 nt, Artificial Sequence
  SARS-CoV-2__MT507793.1__non-structural protein 3 (NSP3) mRNA gc
aggagagucccgcagucggcguccagcggcucugcuuguucgugugugugucguugcaggccuuauucaagcuuaccauggcccccaccaaggugaccuucggcgacgacacggucaucgaggugcagggguacaagagcgugaacaucaccuucgagcuggacgagcgcaucgacaagguccucaacgagaagugcuccgccuacaccguggagcugggcaccgaggugaacgaguucgcgugcgucguggccgacgccgugaucaagacgcugcagccggucagcgagcuccugaccccccuggggaucgaccucgacgagugguccauggccaccuacuaccuguucgacgagagcggcgaguucaagcuggccucccacauguacugcagcuucuacccccccgacgaggacgaggaggagggggacugcgaggaggaggaguucgagccguccacccaguacgaguacggcacggaggacgacuaccagggcaagccccucgaguucggggcgaccagcgccgcccugcagcccgaggaggagcaggaggaggacuggcuggacgacgacucccagcagaccgugggccagcaggacgggagcgaggacaaccagaccacgaccauccagaccaucguggagguccagccccagcucgagauggagcugaccccgguggugcagacgaucgaggucaacuccuucagcggcuaccugaagcucaccgacaacguguacaucaagaacgccgacaucguggaggaggcgaagaaggucaagcccaccgugguggucaacgccgccaacguguaccugaagcacgggggcggcguggccggggcccugaacaaggcgaccaacaacgccaugcaggucgaguccgacgacuacaucgccacgaacggcccccucaagguggggggcagcugcguccuguccggccacaaccuggccaagcacugccuccacgugguggggcccaacgucaacaagggcgaggacauccagcugcugaagagcgccuacgagaacuucaaccagcacgaggugcuccuggcgccgcugcucuccgccgggaucuucggcgccgaccccauccacagccugcgggugugcgucgacaccgugcgcaccaacguguaccuggccgucuucgacaagaaccucuacgacaagcugguguccagcuuccuggagaugaagagcgagaagcagguggagcagaagaucgccgagauccccaaggaggaggucaagcccuucaucaccgaguccaagccgagcguggagcagcggaagcaggacgacaagaagaucaaggcgugcguggaggaggucacgaccacccucgaggagaccaaguuccugacggagaaccugcuccuguacaucgacaucaacgggaaccugcaccccgacuccgccacccucgugagcgacaucgacaucaccuuccugaagaaggacgcccccuacaucgugggcgacgucgugcaggagggcgugcugaccgccgucgugauccccacgaagaaggccgggggcaccaccgagaugcucgcgaaggcccugcgcaaggugccgaccgacaacuacaucacgaccuaccccgggcagggccugaacggguacaccgucgaggaggccaagaccgugcucaagaagugcaaguccgccuucuacauccugcccagcaucaucuccaacgagaagcaggagauccugggcaccgugagcuggaaccuccgggagaugcuggcgcacgccgaggagacgcgcaagcugaugcccgucugcguggagaccaaggccaucguguccaccauccagcggaaguacaagggcaucaagauccaggagggggucguggacuacggcgcccgcuucuacuucuacaccagcaagacgaccguggccucccugaucaacacccucaacgaccugaacgagacccuggucacgaugccgcucggguacgugacccacggccugaaccuggaggaggcggcccgguacaugcgcagccucaaggugcccgccaccgucuccgugagcucccccgacgccgugaccgccuacaacggguaccugacgagcuccagcaagacccccgaggagcacuucaucgagaccaucucccuggcgggcagcuacaaggacuggagcuacuccggccagagcacccagcucgggaucgaguuccugaagcggggcgacaaguccgucuacuacacgagcaacccgaccaccuuccaccuggacggggaggugaucaccuucgacaaccucaagacgcugcugucccuccgcgaggugcggaccaucaaggucuucaccaccguggacaacaucaaccugcacacgcagguggucgacaugagcaugaccuacggccagcaguucggccccaccuaccuggacggggccgacgugaccaagaucaagccccacaacucccacgagggcaagacguucuacgugcucccgaacgacgacacccugcgcgucgaggccuucgaguacuaccacaccaccgaccccagcuuccuggggcgguacauguccgcccucaaccacacgaagaaguggaaguacccccaggugaacggccugaccagcaucaagugggccgacaacaacugcuaccuggcgaccgcccuccugacccugcagcagaucgagcucaaguucaaccccccggcccugcaggacgccuacuaccgcgcgcgggccggggaggccgccaacuucugcgcccugauccucgcguacugcaacaagacggugggcgagcugggcgacguccgcgagaccauguccuaccuguuccagcacgccaaccucgacagcugcaagcgggugcugaacgucgugugcaagaccugcgggcagcagcagaccacccugaagggcguggaggccgucauguacauggggacgcucuccuacgagcaguucaagaagggcgugcagauccccugcaccugcgggaagcaggccaccaaguaccuggugcagcaggagagccccuucgucaugauguccgcccccccggcgcaguacgagcugaagcacggcaccuucacgugcgccagcgaguacaccggcaacuaccagugcgggcacuacaagcacaucaccuccaaggagacccucuacugcaucgacggcgcccugcugacgaagagcagcgaguacaaggggcccaucaccgacguguucuacaaggagaacuccuacaccaccacgaucaagcccgugaccuacaagcucgacggcgucgugugcaccgagaucgaccccaagcuggacaacuacuacaagaaggacaacagcuacuucaccgagcagccgaucgaccuggugcccaaccagcccuaccccaacgccuccuucgacaacuucaaguucgucugcgacaacaucaaguucgccgacgaccucaaccagcugacgggguacaagaagccggcgagccgcgagcugaaggugaccuucuuccccgaccucaacggcgacguggucgccaucgacuacaagcacuacacccccuccuucaagaagggcgccaagcugcugcacaagcccaucguguggcacgugaacaacgccaccaacaaggcgacguacaagccgaacaccuggugcauccggugccucuggagcaccaagcccgucgagaccuccaacagcuucgacgugcugaaguccgaggacgcccaggggauggacaaccuggccugcgaggaccucaagcccgugagcgaggaggucguggagaaccccacgauccagaaggacgugcuggagugcaacgucaagaccaccgagguggugggcgacaucauccugaagccggccaacaacucccucaagaucaccgaggaggucgggcacacggaccugauggccgcguacguggacaacagcucccugaccaucaacaagcccaacgagcucagccgcgugcugggccugaagacccucgccacccacgggcuggccgccgucaacuccgugcccugggacacgaucgccaacuacgcgaagccguuccugaacaagguggucagcaccaccaccaacaucgugacgcgcugccucaaccgggugugcaccaacuacaugcccuacuucuucacccugcugcuccagcugugcaccuucacccgcuccacgaacagccggaucaaggccuccaugcccaccaccaucgccaagaacaccgucaagagcgugggcaaguucugccuggaggccagcuucaacuaccucaagucccccaacuucagcaagcugaucaacaucaucaucugguuccugcuccuguccgugugccugggcagccucaucuacuccacggccgcgcuggggguccugaugagcaaccucggcaugccguccuacugcaccggguaccgcgagggcuaccugaacagcaccaacgugaccaucgccacguacugcaccggcuccauccccugcagcgugugccuguccgggcucgacagccuggacaccuaccccucccuggagaccauccagaucacgaucagcuccuucaagugggaccucaccgccuucggccuggucgccgagugguuccuggccuacauccucuucacccgguucuucuacgugcuggggcuggcggccaucaugcagcucuucuucagcuacuucgccgugcacuucaucuccaacagcuggcugauguggcugaucaucaaccugguccagauggcccccaucuccgcgauggugcgcauguacaucuucuucgccagcuucuacuacguguggaagagcuacguccacgugguggacggcugcaacuccagcaccugcaugaugugcuacaagcggaaccgcgccacgcgggucgagugcaccaccaucgugaacgggguccgccgguccuucuacguguacgccaacggcggcaagggguucugcaagcuccacaacuggaacugcgugaacugcgacaccuucugcgccggcagcacguucaucuccgacgaggucgcgcgcgaccugagccugcaguucaagcggccgaucaaccccaccgaccaguccagcuacaucguggacuccgugaccgucaagaacgggagcauccaccucuacuucgacaaggccggccagaagaccuacgagcgccacucccugagccacuucgugaaccuggacaaccuccgggccaacaacacgaaggggucccugcccaucaacgugaucgucuucgacggcaagagcaagugcgaggaguccagcgccaaguccgccagcguguacuacucccagcugaugugccagcccauccuccugcuggaccaggcgcucgugagcgacgucggcgacagcgccgagguggccgugaagauguucgacgccuacgucaacaccuucuccagcaccuucaacgugccgauggagaagcugaagacccugguggccacggcggaggccgagcucgccaagaacgucucccuggacaacgugcugagcaccuucaucuccgccgcgcgccagggguucguggacagcgacgucgagaccaaggacgugguggagugccucaagcugucccaccagagcgacaucgaggucaccggcgacuccugcaacaacuacaugcugacguacaacaagguggagaacaugaccccccgggaccucggggccugcaucgacugcagcgcccgccacaucaacgcccagguggccaagucccacaacaucgcgcugaucuggaacgucaaggacuucaugagccuguccgagcagcuccggaagcagauccgcagcgccgccaagaagaacaaccugcccuucaagcugaccugcgccaccacgcgccagguggugaacgucgugaccaccaagaucgcccucaagggcgggugaggacuagucccuguucccagagcccacuuuuuuuucuuuuuuugaaauaaaauagccugucuuucagaucucaaaggcucuuuucagagccaccaaaaaaaaaaaaaaaaaaaaaaaaaaaaaaaaaaaaaaaaaaaaaaaaaaaaaaaaaaaaaaaaaaaaaaaaaaaaaaaaaaaaaaaaaaaaaaaaaaaaa

SEQ ID NO: 20056 - RNA, 6113 nt, Artificial Sequence
  SARS-CoV-2__MT499208.1__non-structural protein 3 (NSP3) mRNA gc
aggagagucccgcagucggcguccagcggcucugcuuguucgugugugugucguugcaggccuuauucaagcuuaccauggcccccaccaaggugaccuucggcgacgacacggucaucgaggugcagggguacaagagcgugaacaucaccuucgagcuggacgagcgcaucgacaagguccucaacgagaagugcuccgccuacaccguggagcugggcaccgaggugaacgaguucgcgugcgucguggccgacgccgugaucaagacgcugcagccggucagcgagcuccugaccccccuggggaucgaccucgacgagugguccauggccaccuacuaccuguucgacgagagcggcgaguucaagcuggccucccacauguacugcagcuucuacccccccgacgaggacgaggaggagggggacugcgaggaggaggaguucgagccguccacccaguacgaguacggcacggaggacgacuaccagggcaagccccucgaguucggggcgaccagcgccgcccugcagcccgaggaggagcaggaggaggacuggcuggacgacgacucccagcagaccgugggccagcaggacgggagcgaggacaaccagaccacgaccauccagaccaucguggagguccagccccagcucgagauggagcugaccccgguggugcagacgaucgaggucaacuccuucagcggcuaccugaagcucaccgacaacguguacaucaagaacgccgacaucguggaggaggcgaagaaggucaagcccaccgugguggucaacgccgccaacguguaccugaagcacgggggcggcguggccggggcccugaacaaggcgaccaacaacgccaugcaggucgaguccgacgacuacaucgccacgaacggcccccucaagguggggggcagcugcguccuguccggccacaaccuggccaagcacugccuccacgugguggggcccaacgucaacaagggcgaggacauccaguuccugaagagcgccuacgagaacuucaaccagcacgaggugcugcucgcgccgcugcuguccgccgggaucuucggcgccgaccccauccacagccuccgggugugcgucgacaccgugcgcaccaacguguaccuggccgucuucgacaagaaccuguacgacaagcucguguccagcuuccuggagaugaagagcgagaagcagguggagcagaagaucgccgagauccccaaggaggaggucaagcccuucaucaccgaguccaagccgagcguggagcagcggaagcaggacgacaagaagaucaaggcgugcguggaggaggucacgaccacccuggaggagaccaaguuccucacggagaaccugcugcucuacaucgacaucaacgggaaccugcaccccgacuccgccacccuggugagcgacaucgacaucaccuuccucaagaaggacgcccccuacaucgugggcgacgucgugcaggagggcgugcugaccgccgucgugauccccacgaagaaggccgggggcaccaccgagaugcuggcgaaggcccuccgcaaggugccgaccgacaacuacaucacgaccuaccccgggcagggccugaacggguacaccgucgaggaggccaagaccgugcugaagaagugcaaguccgccuucuacauccuccccagcaucaucuccaacgagaagcaggagauccugggcaccgugagcuggaaccugcgggagaugcucgcgcacgccgaggagacgcgcaagcugaugcccgucugcguggagaccaaggccaucguguccaccauccagcggaaguacaagggcaucaagauccaggagggggucguggacuacggcgcccgcuucuacuucuacaccagcaagacgaccguggccucccugaucaacacccugaacgaccucaacgagacccuggucacgaugccgcugggguacgugacccacggccucaaccuggaggaggcggcccgguacaugcgcagccugaaggugcccgccaccgucuccgugagcucccccgacgccgugaccgccuacaacggguaccucacgagcuccagcaagacccccgaggagcacuucaucgagaccaucucccuggcgggcagcuacaaggacuggagcuacuccggccagagcacccagcuggggaucgaguuccucaagcggggcgacaaguccgucuacuacacgagcaacccgaccaccuuccaccuggacggggaggugaucaccuucgacaaccugaagacgcuccugucccugcgcgaggugcggaccaucaaggucuucaccaccguggacaacaucaaccuccacacgcagguggucgacaugagcaugaccuacggccagcaguucggccccaccuaccuggacggggccgacgugaccaagaucaagccccacaacucccacgagggcaagacguucuacgugcugccgaacgacgacacccuccgcgucgaggccuucgaguacuaccacaccaccgaccccagcuuccuggggcgguacauguccgcccugaaccacacgaagaaguggaaguacccccaggugaacggccucaccagcaucaagugggccgacaacaacugcuaccuggcgaccgcccugcucacccugcagcagaucgagcugaaguucaaccccccggcccuccaggacgccuacuaccgcgcgcgggccggggaggccgccaacuucugcgcccugauccuggcguacugcaacaagacggugggcgagcucggcgacguccgcgagaccauguccuaccuguuccagcacgccaaccuggacagcugcaagcgggugcucaacgucgugugcaagaccugcgggcagcagcagaccacccugaagggcguggaggccgucaucuacauggggacgcuguccuacgagcaguucaagaagggcgugcagauccccugcaccugcgggaagcaggccaccaaguaccucgugcagcaggagagccccuucgucaugauguccgcccccccggcgcaguacgagcugaagcacggcaccuucacgugcgccagcgaguacaccggcaacuaccagugcgggcacuacaagcacaucaccuccaaggagacccuguacugcaucgacggcgcccuccugacgaagagcagcgaguacaaggggcccaucaccgacguguucuacaaggagaacuccuacaccaccacgaucaagcccgugaccuacaagcuggacggcgucgugugcaccgagaucgaccccaagcucgacaacuacuacaagaaggacaacagcuacuucaccgagcagccgaucgaccuggugcccaaccagcccuaccccaacgccuccuucgacaacuucaaguucgucugcgacaacaucaaguucgccgacgaccugaaccagcucacgggguacaagaagccggcgagccgcgagcugaaggugaccuucuuccccgaccugaacggcgacguggucgccaucgacuacaagcacuacacccccuccuucaagaagggcgccaagcuccugcacaagcccaucguguggcacgugaacaacgccaccaacaaggcgacguacaagccgaacaccuggugcauccggugccuguggagcaccaagcccgucgagaccuccaacagcuucgacgugcucaaguccgaggacgcccaggggauggacaaccuggccugcgaggaccugaagcccgugagcgaggaggucguggagaaccccacgauccagaaggacgugcucgagugcaacgucaagaccaccgagguggugggcgacaucauccugaagccggccaacaacucccugaagaucaccgaggaggucgggcacacggaccucauggccgcguacguggacaacagcucccugaccaucaagaagcccaacgagcugagccgcgugcucggccugaagacccuggccacccacgggcucgccgccgucaacuccgugcccugggacacgaucgccaacuacgcgaagccguuccugaacaagguggucagcaccaccaccaacaucgugacgcgcugccugaaccgggugugcaccaacuacaugcccuacuucuucacccuccugcugcagcucugcaccuucacccgcuccacgaacagccggaucaaggccuccaugcccaccaccaucgccaagaacaccgucaagagcgugggcaaguucugccuggaggccagcuucaacuaccugaagucccccaacuucagcaagcucaucaacaucaucaucugguuccugcugcucuccgugugccugggcagccugaucuacuccacggccgcgcucgggguccugaugagcaaccugggcaugccguccuacugcaccggguaccgcgagggcuaccucaacagcaccaacgugaccaucgccacguacugcaccggcuccauccccugcagcgugugccuguccgggcuggacagccucgacaccuaccccucccuggagaccauccagaucacgaucagcuccuucaagugggaccugaccgccuucggccucgucgccgagugguuccuggccuacauccuguucacccgguucuucuacgugcucgggcuggcggccaucaugcagcuguucuucagcuacuucgccgugcacuucaucuccaacagcuggcucauguggcugaucaucaaccugguccagauggcccccaucuccgcgauggugcgcauguacaucuucuucgccagcuucuacuacguguggaagagcuacguccacgugguggacggcugcaacuccagcaccugcaugaugugcuacaagcggaaccgcgccacgcgggucgagugcaccaccaucgugaacgggguccgccgguccuucuacguguacgccaacggcggcaagggguucugcaagcugcacaacuggaacugcgugaacugcgacaccuucugcgccggcagcacguucaucuccgacgaggucgcgcgcgaccucagccugcaguucaagcggccgaucaaccccaccgaccaguccagcuacaucguggacuccgugaccgucaagaacgggagcauccaccuguacuucgacaaggccggccagaagaccuacgagcgccacucccucagccacuucgugaaccuggacaaccugcgggccaacaacacgaaggggucccuccccaucaacgugaucgucuucgacggcaagagcaagugcgaggaguccagcgccaaguccgccagcguguacuacucccagcugaugugccagcccauccugcuccuggaccaggcgcuggugagcgacgucggcgacagcgccgagguggccgugaagauguucgacgccuacgucaacaccuucuccagcaccuucaacgugccgauggagaagcucaagacccugguggccacggcggaggccgagcuggccaagaacgucucccucgacaacgugcugagcaccuucaucuccgccgcgcgccagggguucguggacagcgacgucgagaccaaggacgugguggagugccugaagcucucccaccagagcgacaucgaggucaccggcgacuccugcaacaacuacaugcugacguacaacaagguggagaacaugaccccccgggaccugggggccugcaucgacugcagcgcccgccacaucaacgcccagguggccaagucccacaacaucgcgcucaucuggaacgucaaggacuucaugagccuguccgagcagcugcggaagcagauccgcagcgccgccaagaagaacaaccuccccuucaagcugaccugcgccaccacgcgccagguggugaacgucgugaccaccaagaucgcccugaagggcgggugaggacuagucccuguucccagagcccacuuuuuuuucuuuuuuugaaauaaaauagccugucuuucagaucucaaaggcucuuuucagagccaccaaaaaaaaaaaaaaaaaaaaaaaaaaaaaaaaaaaaaaaaaaaaaaaaaaaaaaaaaaaaaaaaaaaaaaaaaaaaaaaaaaaaaaaaaaaaaaaaaaaaa

SEQ ID NO: 20057 - RNA, 6113 nt, Artificial Sequence
  SARS-CoV-2__MT270104.1__non-structural protein 3 (NSP3) mRNA gc
aggagagucccgcagucggcguccagcggcucugcuuguucgugugugugucguugcaggccuuauucaagcuuaccauggcccccaccaaggugaccuucggcgacgacacggucaucgaggugcagggguacaagagcgugaacaucaccuucgagcuggacgagcgcaucgacaagguccucaacgagaagugcuccgccuacaccguggagcugggcaccgaggugaacgaguucgcgugcgucguggccgacgccgugaucaagacgcugcagccggucagcgagcuccugaccccccuggggaucgaccucgacgagugguccauggccaccuacuaccuguucgacgagagcggcgaguucaagcuggccucccacauguacugcagcuucuacccccccgacgaggacgaggaggagggggacugcgaggaggaggaguucgagccguccacccaguacgaguacggcacggaggacgacuaccagggcaagccccucgaguucggggcgaccagcgccgcccugcagcccgaggaggagcaggaggaggacuggcuggacgacgacucccagcagaccgugggccagcaggacgggagcgaggacaaccagaccacgaccauccagaccaucguggagguccagccccagcucgagauggagcugaccccgguggugcagacgaucgaggucaacuccuucagcggcuaccugaagcucaccgacaacguguacaucaagaacgccgacaucguggaggaggcgaagaaggucaagcccaccgugguggucaacgccgccaacguguaccugaagcacgggggcggcguggccggggcccugaacaaggcgaccaacaacgccaugcaggucgaguccgacgacuacaucgccacgaacggcccccucaagguggggggcagcugcguccuguccggccacaaccuggccaagcacugccuccacgugguggggcccaacgucaacaagggcgaggacauccagcugcugaagagcgccuacgagaacuucaaccagcacgaggugcuccuggcgccgcugcucuccgccgggaucuucggcgccgaccccauccacagccugcgggugugcgucgacaccgugcgcaccaacguguaccuggccgucuucgacaagaaccucuacgacaagcugguguccagcuuccuggagaugaagagcgagaagcagguggagcagaagaucgccgagauccccaaggaggaggucaagcccuucaucaccgaguccaagccgagcguggagcagcggaagcaggacgacaagaagaucaaggcgugcguggaggaggucacgaccacccucgaggagaccaaguuccugacggagaaccugcuccuguacaucgacaucaacgggaaccugcaccccgacuccgccacccucgugagcgacaucgacaucaccuuccugaagaaggacgcccccuacaucgugggcgacgucgugcaggagggcgugcugaccgccgucgugauccccacgaagaaggccgggggcaccaccgagaugcucgcgaaggcccugcgcaaggugccgaccgacaacuacaucacgaccuaccccgggcagggccugaacggguacaccgucgaggaggccaagaccgugcucaagaagugcaaguccgccuucuacauccugcccagcaucaucuccaacgagaagcaggagauccugggcaccgugagcuggaaccuccgggagaugcuggcgcacgccgaggagacgcgcaagcugaugcccgucugcguggagaccaaggccaucguguccaccauccagcggaaguacaagggcaucaagauccaggagggggucguggacuacggcgcccgcuucuacuucuacaccagcaagacgaccguggccucccugaucaacacccucaacgaccugaacgagacccuggucacgaugccgcucggguacgugacccacggccugaaccuggaggaggcggcccgguacaugcgcagccucaaggugcccgccaccgucuccgugagcucccccgacgccgugaccgccuacaacggguaccugacgagcuccagcaagacccccgaggagcacuucaucgagaccaucucccuggcgggcagcuacaaggacuggagcuacuccggccagagcacccagcucgggaucgaguuccugaagcggggcgacaaguccgucuacuacacgagcaacccgaccaccuuccaccuggacggggaggugaucaccuucgacaaccucaagacgcugcugucccuccgcgaggugcggaccaucaaggucuucaccaccguggacaacaucaaccugcacacgcagguggucgacaugagcaugaccuacggccagcaguucggccccaccuaccuggacggggccgacgugaccaagaucaagccccacaacucccacgagggcaagacguucuacgugcucccgaacgacgacacccugcgcgucgaggccuucgaguacuaccacaccaccgaccccagcuuccuggggcgguacauguccgcccucaaccacacgaagaaguggaaguacccccaggugaacggccugaccagcaucaagugggccgacaacaacugcuaccuggcgaccgcccuccugacccugcagcagaucgagcucaaguucaaccccccggcccugcaggacgccuacuaccgcgcgcgggccggggaggccgccaacuucugcgcccugauccucgcguacugcaacaagacggugggcgagcugggcgacguccgcgagaccauguccuaccuguuccagcacgccaaccucgacagcugcaagcgggugcugaacgucgugugcaagaccugcgggcagcagcagaccacccugaagggcguggaggccgucauguacauggggacgcucuccuacgagcaguucaagaagggcgugcagauccccugcaccugcgggaagcaggccaccaaguaccuggugcagcaggagagccccuucgucaugauguccgcccccccggcgcaguacgagcugaagcacggcaccuucacgugcgccagcgaguacaccggcaacuaccagugcgggcacuacaagcacaucaccuccaaggagacccucuacugcaucgacggcgcccugcugacgaagagcagcgaguacaaggggcccaucaccgacguguucuacaaggagaacuccuacaccaccacgaucaagcccgugaccuacaagcucgacggcgucgugugcaccgagaucgaccccaagcuggacaacuacuacaagaaggacaacagcuacuucaccgagcagccgaucgaccuggugcccaaccagcccuaccccaacgccuccuucgacaacuucaaguucgucugcgacaacaucaaguucgccgacgaccucaaccagcugacgggguacaagaagccggcgagccgcgagcugaaggugaccuucuuccccgaccucaacggcgacguggucgccaucgacuacaagcacuacacccccuccuucaagaagggcgccaagcugcugcacaagcccaucguguggcacgugaacaacgccaccaacaaggcgacguacaagccgaacaccuggugcauccggugccucuggagcaccaagcccgucgagaccuccaacagcuucgacgugcugaaguccgaggacgcccaggggauggacaaccuggccugcgaggaccucaagcccgugagcgaggaggucguggagaaccccacgauccagaaggacauccuggagugcaacgugaagaccaccgaggucgugggcgacaucauccugaagccggccaacaacucccucaagaucaccgaggagguggggcacacggaccugauggccgcguacgucgacaacagcucccugaccaucaagaagcccaacgagcucagccgcgugcugggccugaagacccucgccacccacgggcuggccgccgugaacuccguccccugggacacgaucgccaacuacgcgaagccguuccugaacaagguggugagcaccaccaccaacaucgucacgcgcugccucaaccgggugugcaccaacuacaugcccuacuucuucacccugcugcuccagcugugcaccuucacccgcuccacgaacagccggaucaaggccuccaugcccaccaccaucgccaagaacaccgugaagagcgucggcaaguucugccuggaggccagcuucaacuaccucaagucccccaacuucagcaagcugaucaacaucaucaucugguuccugcuccuguccgugugccugggcagccucaucuacuccacggccgcgcugggggugcugaugagcaaccucggcaugccguccuacugcaccggguaccgcgagggcuaccugaacagcaccaacgucaccaucgccacguacugcaccggcuccauccccugcagcgugugccuguccgggcucgacagccuggacaccuaccccucccuggagaccauccagaucacgaucagcuccuucaagugggaccucaccgccuucggccugguggccgagugguuccuggccuacauccucuucacccgguucuucuacguccuggggcuggcggccaucaugcagcucuucuucagcuacuucgccgugcacuucaucuccaacagcuggcugauguggcugaucaucaaccuggugcagauggcccccaucuccgcgaugguccgcauguacaucuucuucgccagcuucuacuacguguggaagagcuacgugcacgucguggacggcugcaacuccagcaccugcaugaugugcuacaagcggaaccgcgccacgcggguggagugcaccaccaucgucaacggggugcgccgguccuucuacgucuacgccaacggcggcaagggguucugcaagcuccacaacuggaacugcgugaacugcgacaccuucugcgccggcagcacguucaucuccgacgagguggcgcgcgaccugagccugcaguucaagcggccgaucaaccccaccgaccaguccagcuacaucgucgacuccgugaccgugaagaacgggagcauccaccucuacuucgacaaggccggccagaagaccuacgagcgccacucccugagccacuucgucaaccuggacaaccuccgggccaacaacacgaaggggucccugcccaucaacgugaucguguucgacggcaagagcaagugcgaggaguccagcgccaaguccgccagcgucuacuacucccagcugaugugccagcccauccuccugcuggaccaggcgcucgugagcgacgugggcgacagcgccgaggucgccgugaagauguucgacgccuacgugaacaccuucuccagcaccuucaacgucccgauggagaagcugaagacccugguggccacggcggaggccgagcucgccaagaacgugucccuggacaacguccugagcaccuucaucuccgccgcgcgccagggguucguggacagcgacguggagaccaaggacgucguggagugccucaagcugucccaccagagcgacaucgaggugaccggcgacuccugcaacaacuacaugcugacguacaacaaggucgagaacaugaccccccgggaccucggggccugcaucgacugcagcgcccgccacaucaacgcccagguggccaagucccacaacaucgcgcugaucuggaacgugaaggacuucaugagccuguccgagcagcuccggaagcagauccgcagcgccgccaagaagaacaaccugcccuucaagcugaccugcgccaccacgcgccaggucgugaacguggucaccaccaagaucgcccucaagggcgggugaggacuagucccuguucccagagcccacuuuuuuuucuuuuuuugaaauaaaauagccugucuuucagaucucaaaggcucuuuucagagccaccaaaaaaaaaaaaaaaaaaaaaaaaaaaaaaaaaaaaaaaaaaaaaaaaaaaaaaaaaaaaaaaaaaaaaaaaaaaaaaaaaaaaaaaaaaaaaaaaaaaaa

SEQ ID NO: 20058 - RNA, 6113 nt, Artificial Sequence
  SARS-CoV-2__MT477835.1__non-structural protein 3 (NSP3) mRNA gc
aggagagucccgcagucggcguccagcggcucugcuuguucgugugugugucguugcaggccuuauucaagcuuaccauggcccccaccaaggugaccuucggcgacgacacggucaucgaggugcagggguacaagagcgugaacaucaccuucgagcuggacgagcgcaucgacaagguccucaacgagaagugcuccgccuacaccguggagcugggcaccgaggugaacgaguucgcgugcgucguggccgacgccgugaucaagacgcugcagccggucagcgagcuccugaccccccuggggaucgaccucgacgagugguccauggccaccuacuaccuguucgacgagagcggcgaguucaagcuggccucccacauguacugcagcuucuacccccccgacgaggacgaggaggagggggacugcgaggaggaggaguucgagccguccacccaguacgaguacggcacggaggacgacuaccagggcaagccccucgaguucggggcgaccagcgccgcccugcagcccgaggaggagcaggaggaggacuggcuggacgacgacucccagcagaccgugggccagcaggacgggagcgaggacaaccagaccacgaccauccagaccaucguggagguccagccccagcucgagauggagcugaccccgguggugcagacgaucgaggucaacuccuucagcggcuaccugaagcucaccgacaacguguacaucaagaacgccgacaucguggaggaggcgaagaaggucaagcccaccgugguggucaacgccgccaacguguaccugaagcacgggggcggcguggccggggcccugaacaaggcgaccaacaacgccaugcaggucgaguccgacgacuacaucgccacgaacggcccccucaagguggggggcagcugcguccuguccggccacaaccuggccaagcacugccuccacgugguggggcccaacgucaacaagggcgaggacauccagcugcugaagagcgccuacgagaacuucaaccagcacgaggugcuccuggcgccgcugcucuccgccgggaucuucggcgccgaccccauccacagccugcgggugugcgucgacaccgugcgcaccaacguguaccuggccgucuucgacaagaaccucuacgacaagcugguguccagcuuccuggagaugaagagcgagaagcagguggagcagaagaucgccgagauccccaaggaggaggucaagcccuucaucaccgaguccaagccgagcguggagcagcggaagcaggacgacaagaagaucaaggcgugcguggaggaggucacgaccacccucgaggagaccaaguuccugacggagaaccugcuccuguacaucgacaucaacgggaaccugcaccccgacuccgccacccucgugagcgacaucgacaucaccuuccugaagaaggacgcccccuacaucgugggcgacgucgugcaggagggcgugcugaccgccgucgugauccccacgaagaaggccgggggcaccaccgagaugcucgcgaaggcccugcgcaaggugccgaccgacaacuacaucacgaccuaccccgggcagggccugaacggguacaccgucgaggaggccaagaccgugcucaagaagugcaaguccgccuucuacauccugcccagcaucaucuccaacgagaagcaggagauccugggcaccgugagcuggaaccuccgggagaugcuggcgcacgccgaggagacgcgcaagcugaugcccgucugcguggagaccaaggccaucguguccaccauccagcggaaguacaagggcaucaagauccaggagggggucguggacuacggcgcccgcuucuacuucuacaccagcaagacgaccguggccucccugaucaacacccucaacgaccugaacgagacccuggucacgaugccgcucggguacgugacccacggccugaaccuggaggaggcggcccgguacaugcgcagccucaaggugcccgccaccgucuccgugagcucccccgacgccgugaccgccuacaacggguaccugacgagcuccagcaagacccccgaggagcacuucaucgagaccaucucccuggcgggcagcuacaaggacuggagcuacuccggccagagcacccagcucgggaucgaguuccugaagcggggcgacaaguccgucuacuacacgagcaacccgaccaccuuccaccuggacggggaggugaucaccuucgacaaccucaagacgcugcugucccuccgcgaggugcggaccaucaaggucuucaccaccguggacaacaucaaccugcacacgcagguggucgacaugagcaugaccuacggccagcaguucggccccaccuaccuggacggggccgacgugaccaagaucaagccccacaacucccacgagggcaagacguucuacgugcucccgaacgacgacacccugcgcgucgaggccuucgaguacuaccacaccaccgaccccagcuuccuggggcgguacauguccgcccucaaccacacgaagaaguggaaguacccccaggugaacggccugaccagcaucaagugggccgacaacaacugcuaccuggcgaccgcccuccugacccugcagcagaucgagcucaaguucaaccccccggcccugcaggacgccuacuaccgcgcgcgggccggggaggccgccaacuucugcgcccugauccucgcguacugcaacaagacggugggcgagcugggcgacguccgcgagaccauguccuaccuguuccagcacgccaaccucgacagcugcaagcgggugcugaacgucgugugcaagaccugcgggcagcagcagaccacccugaagggcguggaggccgucauguacauggggacgcucuccuacgagcaguucaagaagggcgugcagauccccugcaccugcgggaagcaggccaccaaguaccuggugcagcaggagagccccuucgucaugauguccgcccccccggcgcaguacgagcugaagcacggcaccuucacgugcgccagcgaguacaccggcaacuaccagugcgggcacuacaagcacaucaccuccaaggagacccucuacugcaucgacggcgcccugcugacgaagagcagcgaguacaaggggcccaucaccgacguguucuacaaggagaacuccuacaccaccacgaucaagcccgugaccuacaagcucgacggcgucgugugcaccgagaucgaccccaagcuggacaacuacuacaagaaggacaacagcuacuucaccgagcagccgaucgaccuggugcccaaccagcccuaccccaacgccuccuucgacaacuucaaguucgucugcgacaacaucaaguucgccgacgaccucaaccagcugacgggguacaagaagccggcgagccgcgagcugaaggugaccuucuuccccgaccucaacggcgacguggucgccaucgacuacaagcacuacacccccuccuucaagaagggcgccaagcugcugcacaagcccaucguguggcacgugaacaacgccaccaacaaggcgacguacaagccgaacaccuggugcauccggugccucuggagcaccaagcccgucgagaccuccaacagcuucgacgugcugaaguccgaggacgcccaggggauggacaaccuggccugcgaggaccucaagcccgugagcgaggaggucguggagaaccccacgauccagaaggacgugcuggagugcaacgucaagaccaccgagguggugggcgacaucauccugaagccggucaacaacucccucaagaucaccgaggagguggggcacacggaccugauggccgccuacguggacaacagcucccugaccaucaagaagcccaacgagcucagccgcguccugggccugaagacccucgcgacccacgggcuggccgccgugaacuccgugcccugggacacgaucgccaacuacgccaagccguuccugaacaaggucgugagcaccaccaccaacaucgugacgcgcugccucaaccgggucugcaccaacuacaugcccuacuucuucacccugcugcuccagcugugcaccuucacccgcuccacgaacagccggaucaaggcguccaugcccaccaccaucgccaagaacaccgugaagagcgugggcaaguucugccuggaggccagcuucaacuaccucaagucccccaacuucagcaagcugaucaacaucaucaucugguuccugcuccuguccgucugccugggcagccucaucuacuccacggccgcccugggggugcugaugagcaaccucggcaugccguccuacugcaccggguaccgcgagggcuaccugaacagcaccaacgugaccaucgcgacguacugcaccggcuccauccccugcagcgucugccuguccgggcucgacagccuggacaccuaccccucccuggagaccauccagaucacgaucagcuccuucaagugggaccucaccgccuucggccugguggccgagugguuccuggccuacauccucuucacccgguucuucuacgugcuggggcuggccgcgaucaugcagcucuucuucagcuacuucgccguccacuucaucuccaacagcuggcugauguggcugaucaucaaccuggugcagauggcccccaucuccgccauggugcgcauguacaucuucuucgcgagcuucuacuacgucuggaagagcuacgugcacguggucgacggcugcaacuccagcaccugcaugaugugcuacaagcggaaccgcgccacgcggguggagugcaccaccaucgucaacggggugcgccgguccuucuacguguacgccaacggcggcaagggguucugcaagcuccacaacuggaacugcgucaacugcgacaccuucugcgccggcagcacguucaucuccgacgagguggcccgcgaccugagccugcaguucaagcggccgaucaaccccaccgaccaguccagcuacaucguggacuccgucaccgugaagaacgggagcauccaccucuacuucgacaaggcgggccagaagaccuacgagcgccacucccugagccacuucgugaaccuggacaaccuccgggccaacaacacgaaggggucccugcccaucaacgucaucguguucgacggcaagagcaagugcgaggaguccagcgccaaguccgccagcguguacuacucccagcugaugugccagcccauccuccugcuggaccaggcccucgucagcgacgugggcgacagcgcggagguggccgucaagauguucgacgccuacgugaacaccuucuccagcaccuucaacgugccgauggagaagcugaagacccuggucgccacggccgaggcggagcucgccaagaacgugucccuggacaacgugcugagcaccuucaucuccgccgcccgccagggguucgucgacagcgacguggagaccaaggacguggucgagugccucaagcugucccaccagagcgacaucgaggugaccggcgacuccugcaacaacuacaugcugacguacaacaagguggagaacaugaccccccgggaccucggggcgugcaucgacugcagcgcccgccacaucaacgcccaggucgccaagucccacaacaucgcccugaucuggaacgugaaggacuucaugagccuguccgagcagcuccggaagcagauccgcagcgcggccaagaagaacaaccugcccuucaagcugaccugcgccaccacgcgccagguggucaacguggugaccaccaagaucgcccucaagggcgggugaggacuagucccuguucccagagcccacuuuuuuuucuuuuuuugaaauaaaauagccugucuuucagaucucaaaggcucuuuucagagccaccaaaaaaaaaaaaaaaaaaaaaaaaaaaaaaaaaaaaaaaaaaaaaaaaaaaaaaaaaaaaaaaaaaaaaaaaaaaaaaaaaaaaaaaaaaaaaaaaaaaaa

SEQ ID NO: 20059 - RNA, 6113 nt, Artificial Sequence
  SARS-CoV-2__MT477844.1__non-structural protein 3 (NSP3) mRNA gc
aggagagucccgcagucggcguccagcggcucugcuuguucgugugugugucguugcaggccuuauucaagcuuaccauggcccccaccaaggugaccuucggcgacgacacggucaucgaggugcagggguacaagagcgugaacaucaccuucgagcuggacgagcgcaucgacaagguccucaacgagaagugcuccgccuacaccguggagcugggcaccgaggugaacgaguucgcgugcgucguggccgacgccgugaucaagacgcugcagccggucagcgagcuccugaccccccuggggaucgaccucgacgagugguccauggccaccuacuaccuguucgacgagagcggcgaguucaagcuggccucccacauguacugcagcuucuacccccccgacgaggacgaggaggagggggacugcgaggaggaggaguucgagccguccacccaguacgaguacggcacggaggacgacuaccagggcaagccccucgaguucggggcgaccagcgccgcccugcagcccgaggaggagcaggaggaggacuggcuggacgacgacucccagcagaccgugggccagcaggacgggagcgaggacaaccagaccacgaccauccagaccaucguggagguccagucccagcucgagauggagcugacccccguggugcagacgaucgaggucaacagcuucuccggcuaccugaagcucaccgacaacguguacaucaagaacgccgacaucguggaggaggcgaagaaggucaagccgaccgugguggucaacgccgccaacguguaccugaagcacgggggcggcguggccggggcccugaacaaggcgaccaacaacgccaugcaggucgagagcgacgacuacaucgccacgaacggcccccucaagguggggggcuccugcguccugagcggccacaaccuggccaagcacugccuccacgugguggggcccaacgucaacaagggcgaggacauccagcugcugaaguccgccuacgagaacuucaaccagcacgaggugcuccuggcgccccugcucagcgccgggaucuucggcgccgacccgauccacucccugcgggugugcgucgacaccgugcgcaccaacguguaccuggccgucuucgacaagaaccucuacgacaagcuggugagcagcuuccuggagaugaaguccgagaagcagguggagcagaagaucgccgagauccccaaggaggaggucaagcccuucaucaccgagagcaagcccuccguggagcagcggaagcaggacgacaagaagaucaaggcgugcguggaggaggucacgaccacccucgaggagaccaaguuccugacggagaaccugcuccuguacaucgacaucaacgggaaccugcacccggacagcgccacccucguguccgacaucgacaucaccuuccugaagaaggacgcccccuacaucgugggcgacgucgugcaggagggcgugcugaccgccgucgugauccccacgaagaaggccgggggcaccaccgagaugcucgcgaaggcccugcgcaaggugcccaccgacaacuacaucacgaccuacccggggcagggccugaacggguacaccgucgaggaggccaagaccgugcucaagaagugcaagagcgccuucuacauccugcccuccaucaucagcaacgagaagcaggagauccugggcaccguguccuggaaccuccgggagaugcuggcgcacgccgaggagacgcgcaagcugaugcccgucugcguggagaccaaggccaucgugagcaccauccagcggaaguacaagggcaucaagauccaggagggggucguggacuacggcgcccgcuucuacuucuacaccuccaagacgaccguggccagccugaucaacacccucaacgaccugaacgagacccuggucacgaugccccucggguacgugacccacggccugaaccuggaggaggcggcccgguacaugcgcucccucaaggugccggccaccgucagcguguccagccccgacgccgugaccgccuacaacggguaccugacguccagcuccaagacccccgaggagcacuucaucgagaccaucagccuggcgggcagcuacaaggacugguccuacagcggccaguccacccagcucgggaucgaguuccugaagcggggcgacaagagcgucuacuacacguccaaccccaccaccuuccaccuggacggggaggugaucaccuucgacaaccucaagacgcugcugagccuccgcgaggugcggaccaucaaggucuucaccaccguggacaacaucaaccugcacacgcagguggucgacauguccaugaccuacggccagcaguucggcccgaccuaccuggacggggccgacgugaccaagaucaagccccacaacagccacgagggcaagacguucuacgugcuccccaacgacgacacccugcgcgucgaggccuucgaguacuaccacaccaccgacccguccuuccuggggcgguacaugagcgcccucaaccacacgaagaaguggaaguacccccaggugaacggccugaccuccaucaagugggccgacaacaacugcuaccuggcgaccgcccuccugacccugcagcagaucgagcucaaguucaacccccccgcccugcaggacgccuacuaccgcgcgcgggccggggaggccgccaacuucugcgcccugauccucgcguacugcaacaagacggugggcgagcugggcgacguccgcgagaccaugagcuaccuguuccagcacgccaaccucgacuccugcaagcgggugcugaacgucgugugcaagaccugcgggcagcagcagaccacccugaagggcguggaggccgucauguacauggggacgcucagcuacgagcaguucaagaagggcgugcagaucccgugcaccugcgggaagcaggccaccaaguaccuggugcagcaggagucccccuucgucaugaugagcgccccccccgcgcaguacgagcugaagcacggcaccuucacgugcgccuccgaguacaccggcaacuaccagugcgggcacuacaagcacaucaccagcaaggagacccucuacugcaucgacggcgcccugcugacgaagagcuccgaguacaaggggccgaucaccgacguguucuacaaggagaacagcuacaccaccacgaucaagcccgugaccuacaagcucgacggcgucgugugcaccgagaucgaccccaagcuggacaacuacuacaagaaggacaacuccuacuucaccgagcagcccaucgaccuggugccgaaccagcccuaccccaacgccagcuucgacaacuucaaguucgucugcgacaacaucaaguucgccgacgaccucaaccagcugacgggguacaagaagcccgcgucccgcgagcugaaggugaccuucuucccggaccucaacggcgacguggucgccaucgacuacaagcacuacacccccagcuucaagaagggcgccaagcugcugcacaagcccaucguguggcacgugaacaacgccaccaacaaggcgacguacaagcccaacaccuggugcauccggugccucugguccaccaagccggucgagaccagcaacuccuucgacgugcugaagagcgaggacgcccaggggauggacaaccuggccugcgaggaccucaagcccguguccgaggaggucguggagaaccccacgauccagaaggacgugcuggagugcaacgucaagaccaccgagguggugggcgacaucauccugaagcccgccaacaacagccucaagaucaccgaggaggucgggcacacggaccugauggccgcguacguggacaacuccagccugaccaucaagaagccgaacgagcucucccgcgugcugggccugaagacccucgccacccacgggcuggccgccgucaacagcgugcccugggacacgaucgccaacuacgcgaagcccuuccugaacaagguggucuccaccaccaccaacaucgugacgcgcugccucaaccgggugugcaccaacuacaugccguacuucuucacccugcugcuccagcugugcaccuucacccgcagcacgaacucccggaucaaggccagcaugcccaccaccaucgccaagaacaccgucaagagcgugggcaaguucugccuggaggccuccuucaacuaccucaagagccccaacuucuccaagcugaucaacaucaucaucugguuccugcuccugagcgugugccugggcucccucaucuacagcacggccgcgcuggggguccugauguccaaccucggcaugcccagcuacugcaccggguaccgcgagggcuaccugaacuccaccaacgugaccaucgccacguacugcaccggcagcaucccgugcuccgugugccugagcgggcucgacucccuggacaccuaccccagccuggagaccauccagaucacgaucuccagcuucaagugggaccucaccgccuucggccuggucgccgagugguuccuggccuacauccucuucacccgguucuucuacgugcuggggcuggcggccaucaugcagcucuucuucuccuacuucgccgugcacuucaucagcaacuccuggcugauguggcugaucaucaaccugguccagauggcccccaucagcgcgauggugcgcauguacaucuucuucgccagcuucuacuacguguggaaguccuacguccacgugguggacggcugcaacagcuccaccugcaugaugugcuacaagcggaaccgcgccacgcgggucgagugcaccaccaucgugaacgggguccgccggagcuucuacguguacgccaacggcggcaagggguucugcaagcuccacaacuggaacugcgugaacugcgacaccuucugcgccggcuccacguucaucagcgacgaggucgcgcgcgaccugucccugcaguucaagcggcccaucaacccgaccgaccagagcuccuacaucguggacagcgugaccgucaagaacggguccauccaccucuacuucgacaaggccggccagaagaccuacgagcgccacagccugucccacuucgugaaccuggacaaccuccgggccaacaacacgaaggggagccugcccaucaacgugaucgucuucgacggcaaguccaagugcgaggagagcuccgccaagagcgccuccguguacuacagccagcugaugugccagcccauccuccugcuggaccaggcgcucgugagcgacgucggcgacuccgccgagguggccgugaagauguucgacgccuacgucaacaccuucagcuccaccuucaacgugcccauggagaagcugaagacccugguggccacggcggaggccgagcucgccaagaacgucagccuggacaacgugcuguccaccuucaucagcgccgcgcgccagggguucguggacuccgacgucgagaccaaggacgugguggagugccucaagcugagccaccaguccgacaucgaggucaccggcgacagcugcaacaacuacaugcugacguacaacaagguggagaacaugaccccgcgggaccucggggccugcaucgacugcuccgcccgccacaucaacgcccagguggccaagagccacaacaucgcgcugaucuggaacgucaaggacuucaugucccugagcgagcagcuccggaagcagauccgcuccgccgccaagaagaacaaccugcccuucaagcugaccugcgccaccacgcgccagguggugaacgucgugaccaccaagaucgcccucaagggcgggugaggacuagucccuguucccagagcccacuuuuuuuucuuuuuuugaaauaaaauagccugucuuucagaucucaaaggcucuuuucagagccaccaaaaaaaaaaaaaaaaaaaaaaaaaaaaaaaaaaaaaaaaaaaaaaaaaaaaaaaaaaaaaaaaaaaaaaaaaaaaaaaaaaaaaaaaaaaaaaaaaaaaa

SEQ ID NO: 20060 - RNA, 6113 nt, Artificial Sequence
  SARS-CoV-2__MT482113.1__non-structural protein 3 (NSP3) mRNA gc
aggagagucccgcagucggcguccagcggcucugcuuguucgugugugugucguugcaggccuuauucaagcuuaccauggcccccaccaaggugaccuucggcgacgacacggucaucgaggugcagggguacaagagcgugaacaucaccuucgagcuggacgagcgcaucgacaagguccucaacgagaagugcuccgccuacaccguggagcugggcaccgaggugaacgaguucgcgugcgucguggccgacgccgugaucaagacgcugcagccggucagcgagcuccugaccccccuggggaucgaccucgacgagugguccauggccaccuacuaccuguucgacgagagcggcgaguucaagcuggccucccacauguacugcagcuucuacccccccgacgaggacgaggaggagggggacugcgaggaggaggaguucgagccguccacccaguacgaguacggcacggaggacgacuaccagggcaagccccucgaguucggggcgaccagcgccgcccugcagcccgaggaggagcaggaggaggacuggcuggacgacgacucccagcagaccgugggccagcaggacgggagcgaggacaaccagaccacgaccauccagaccaucguggagguccagccccagcucgagauggagcugaccccgguggugcagacgaucgaggucaacuccuucagcggcuaccugaagcucaccgacaacguguacaucaagaacgccgacaucguggaggaggcgaagaaggucaagcccaccgugguggucaacgccgccaacguguaccugaagcacgggggcggcguggccggggcccugaacaaggcgaccaacaacgccaugcaggucgaguccgacgacuacaucgccacgaacggcccccucaagguggggggcagcugcguccuguccggccacaaccuggccaagcacugccuccacgugguggggcccaacgucaacaagggcgaggacauccagcugcugaagagcgccuacgagaacuucaaccagcacgaggugcuccuggcgccgcugcucuccgccgggaucuucggcgccgaccccauccacagccugcgggugugcgucgacaccgugcgcaccaacguguaccuggccgucuucgacaagaaccucuacgacaagcugguguccagcuuccuggagaugaagagcgagaagcagguggagcagaagaucgccgagauccccaaggaggaggucaagcccuucaucaccgaguccaagccgagcguggagcagcggaagcaggacgacaagaagaucaaggcgugcguggaggaggucacgaccacccucgaggagaccaaguuccugacggagaaccugcuccuguacaucgacaucaacgggaaccugcaccccgacuccgccacccucgugagcgacaucgacaucaccuuccugaagaaggacgcccccuacaucgugggcgacgucgugcaggagggcgugcugaccgccgucgugauccccacgaagaaggccgggggcaccaccgagaugcucgcgaaggcccugcgcaaggugccgaccgacaacuacaucacgaccuaccccgggcagggccugaacggguacaccgucgaggaggccaagaccgugcucaagaagugcaaguccgccuucuacauccugcccagcaucaucuccaacgagaagcaggagauccugggcaccgugagcuggaaccuccgggagaugcuggcgcacgccgaggagacgcgcaagcugaugcccgucugcguggagaccaaggccaucguguccaccauccagcggaaguacaagggcaucaagauccaggagggggucguggacuacggcgcccgcuucuacuucuacaccagcaagacgaccguggccucccugaucaacacccucaacgaccugaacgagacccuggucacgaugccgcucggguacgugacccacggccugaaccuggaggaggcggcccgguacaugcgcagccucaaggugcccgccaccgucuccgugagcucccccgacgccgugaccgccuacaacggguaccugacgagcuccagcaagacccccgaggagcacuucaucgagaccaucucccuggcgggcagcuacaaggacuggagcuacuccggccagagcacccagcucgggaucgaguuccugaagcggggcgacaaguccgucuacuacacgagcaacccgaccaccuuccaccuggacggggaggugaucaccuucgacaaccucaagacgcugcugucccuccgcgaggugcggaccaucaaggucuucaccaccguggacaacaucaaccugcacacgcagguggucgacaugagcaugaccuacggccagcaguucggccccaccuaccuggacggggccgacgugaccaagaucaagccccacaacucccacgagggcaagacguucuacgugcucccgaacgacgacacccugcgcgucgaggccuucgaguacuaccacaccaccgaccccagcuuccuggggcgguacauguccgcccucaaccacacgaagaaguggaaguacccccaggugaacggccugaccagcaucaagugggccgacaacaacugcuaccuggcgaccgcccuccugacccugcagcagaucgagcucaaguucucccccccggcccugcaggacgccuacuaccgcgcgcgggccggggaggccgccaacuucugcgcccugauccucgcguacugcaacaagacggugggcgagcugggcgacguccgcgagaccaugagcuaccuguuccagcacgccaaccucgacuccugcaagcgggugcugaacgucgugugcaagaccugcgggcagcagcagaccacccugaagggcguggaggccgucauguacauggggacgcucagcuacgagcaguucaagaagggcgugcagauccccugcaccugcgggaagcaggccaccaaguaccuggugcagcaggagucccccuucgucaugaugagcgcccccccggcgcaguacgagcugaagcacggcaccuucacgugcgccuccgaguacaccggcaacuaccagugcgggcacuacaagcacaucaccagcaaggagacccucuacugcaucgacggcgcccugcugacgaagagcuccgaguacaaggggcccaucaccgacguguucuacaaggagaacagcuacaccaccacgaucaagcccgugaccuacaagcucgacggcgucgugugcaccgagaucgaccccaagcuggacaacuacuacaagaaggacaacuccuacuucaccgagcagccgaucgaccuggugcccaaccagcccuaccccaacgccagcuucgacaacuucaaguucgucugcgacaacaucaaguucgccgacgaccucaaccagcugacgggguacaagaagccggcgucccgcgagcugaaggugaccuucuuccccgaccucaacggcgacguggucgccaucgacuacaagcacuacacccccagcuucaagaagggcgccaagcugcugcacaagcccaucguguggcacgugaacaacgccaccaacaaggcgacguacaagccgaacaccuggugcauccggugccucugguccaccaagcccgucgagaccagcaacuccuucgacgugcugaagagcgaggacgcccaggggauggacaaccuggccugcgaggaccucaagcccguguccgaggaggucguggagaaccccacgauccagaaggacgugcuggagugcaacgucaagaccaccgagguggugggcgacaucauccugaagccggccaacaacagccucaagaucaccgaggaggucgggcacacggaccugauggccgcguacguggacaacuccagccugaccaucaagaagcccaacgagcucucccgcgugcugggccugaagacccucgccacccacgggcuggccgccgucaacagcgugcccugggacacgaucgccaacuacgcgaagccguuccugaacaagguggucuccaccaccaccaacaucgugacgcgcugccucaaccgggugugcaccaacuacaugcccuacuucuucacccugcugcuccagcugugcaccuucacccgcagcacgaacucccggaucaaggccagcaugcccaccaccaucgccaagaacaccgucaagagcgugggcaaguucugccuggaggccuccuucaacuaccucaagagccccaacuucuccaagcugaucaacaucaucaucugguuccugcuccugagcgugugccugggcucccucaucuacagcacggccgcgcuggggguccugauguccaaccucggcaugccgagcuacugcaccggguaccgcgagggcuaccugaacuccaccaacgugaccaucgccacguacugcaccggcagcauccccugcuccgugugccugagcgggcucgacucccuggacaccuaccccagccuggagaccauccagaucacgaucuccagcuucaagugggaccucaccgccuucggccuggucgccgagugguuccuggccuacauccucuucacccgguucuucuacgugcuggggcuggcggccaucaugcagcucuucuucuccuacuucgccgugcacuucaucagcaacuccuggcugauguggcugaucaucaaccugguccagauggcccccaucagcgcgauggugcgcauguacaucuucuucgccagcuucuacuacguguggaaguccuacguccacgugguggacggcugcaacagcuccaccugcaugaugugcuacaagcggaaccgcgccacgcgggucgagugcaccaccaucgugaacgggguccgccggagcuucuacguguacgccaacggcggcaagggguucugcaagcuccacaacuggaacugcgugaacugcgacaccuucugcgccggcuccacguucaucagcgacgaggucgcgcgcgaccugucccugcaguucaagcggccgaucaaccccaccgaccagagcuccuacaucguggacagcgugaccgucaagaacggguccauccaccucuacuucgacaaggccggccagaagaccuacgagcgccacagccugucccacuucgugaaccuggacaaccuccgggccaacaacacgaaggggagccugcccaucaacgugaucgucuucgacggcaaguccaagugcgaggagagcuccgccaagagcgccuccguguacuacagccagcugaugugccagcccauccuccugcuggaccaggcgcucgugagcgacgucggcgacuccgccgagguggccgugaagauguucgacgccuacgucaacaccuucagcuccaccuucaacgugccgauggagaagcugaagacccugguggccacggcggaggccgagcucgccaagaacgucagccuggacaacgugcuguccaccuucaucagcgccgcgcgccagggguucguggacuccgacgucgagaccaaggacgugguggagugccucaagcugagccaccaguccgacaucgaggucaccggcgacagcugcaacaacuacaugcugacguacaacaagguggagaacaugaccccccgggaccucggggccugcaucgacugcuccgcccgccacaucaacgcccagguggccaagagccacaacaucgcgcugaucuggaacgucaaggacuucaugucccugagcgagcagcuccggaagcagauccgcuccgccgccaagaagaacaaccugcccuucaagcugaccugcgccaccacgcgccagguggugaacgucgugaccaccaagaucgcccucaagggcgggugaggacuagucccuguucccagagcccacuuuuuuuucuuuuuuugaaauaaaauagccugucuuucagaucucaaaggcucuuuucagagccaccaaaaaaaaaaaaaaaaaaaaaaaaaaaaaaaaaaaaaaaaaaaaaaaaaaaaaaaaaaaaaaaaaaaaaaaaaaaaaaaaaaaaaaaaaaaaaaaaaaaaa

SEQ ID NO: 20061 - RNA, 6113 nt, Artificial Sequence
  SARS-CoV-2__MT482134.1__non-structural protein 3 (NSP3) mRNA gc
aggagagucccgcagucggcguccagcggcucugcuuguucgugugugugucguugcaggccuuauucaagcuuaccauggcccccaccaaggugaccuucggcgacgacacggucaucgaggugcagggguacaagagcgugaacaucaccuucgagcuggacgagcgcaucgacaagguccucaacgagaagugcuccgccuacaccguggagcugggcaccgaggugaacgaguucgcgugcgucguggccgacgccgugaucaagacgcugcagccggucagcgagcuccugaccccccuggggaucgaccucgacgagugguccauggccaccuacuaccuguucgacgagagcggcgaguucaagcuggccucccacauguacugcagcuucuacccccccgacgaggacgaggaggagggggacugcgaggaggaggaguucgagccguccacccaguacgaguacggcacggaggacgacuaccagggcaagccccucgaguucggggcgaccagcgccgcccugcagcccgaggaggagcaggaggaggacuggcuggacgacgacucccagcagaccgugggccagcaggacgggagcgaggacaaccagaccacgaccauccagaccaucguggagguccagccccagcucgagauggagcugaccccgguggugcagacguccuucagcggcuaccugaagcucaccgacaacgucuacaucaagaacgccgacaucguggaggaggcgaagaaggugaagcccaccgucguggugaacgccgccaacgucuaccugaagcacgggggcggcguggccggggcccugaacaaggcgaccaacaacgccaugcagguggaguccgacgacuacaucgccacgaacggcccccucaaggucgggggcagcugcgugcuguccggccacaaccuggccaagcacugccuccacgucguggggcccaacgugaacaagggcgaggacauccagcugcugaagagcgccuacgagaacuucaaccagcacgagguccuccuggcgccgcugcucuccgccgggaucuucggcgccgaccccauccacagccugcgggugugcguggacaccguccgcaccaacguguaccuggccguguucgacaagaaccucuacgacaagcuggucuccagcuuccuggagaugaagagcgagaagcagguggagcagaagaucgccgagauccccaaggaggaggugaagcccuucaucaccgaguccaagccgagcgucgagcagcggaagcaggacgacaagaagaucaaggcgugcguggaggaggugacgaccacccucgaggagaccaaguuccugacggagaaccugcuccuguacaucgacaucaacgggaaccugcaccccgacuccgccacccucgucagcgacaucgacaucaccuuccugaagaaggacgcccccuacaucgugggcgacgugguccaggagggcgugcugaccgccguggucauccccacgaagaaggccgggggcaccaccgagaugcucgcgaaggcccugcgcaaggugccgaccgacaacuacaucacgaccuaccccgggcagggccugaacggguacaccguggaggaggccaagaccguccucaagaagugcaaguccgccuucuacauccugcccagcaucaucuccaacgagaagcaggagauccugggcaccgugagcuggaaccuccgggagaugcuggcgcacgccgaggagacgcgcaagcugaugcccgugugcgucgagaccaaggccaucguguccaccauccagcggaaguacaagggcaucaagauccaggaggggguggucgacuacggcgcccgcuucuacuucuacaccagcaagacgaccguggccucccugaucaacacccucaacgaccugaacgagacccuggugacgaugccgcucggguacgucacccacggccugaaccuggaggaggcggcccgguacaugcgcagccucaaggugcccgccaccguguccgucagcucccccgacgccgugaccgccuacaacggguaccugacgagcuccagcaagacccccgaggagcacuucaucgagaccaucucccuggcgggcagcuacaaggacuggagcuacuccggccagagcacccagcucgggaucgaguuccugaagcggggcgacaaguccguguacuacacgagcaacccgaccaccuuccaccuggacggggaggucaucaccuucgacaaccucaagacgcugcugucccuccgcgaggugcggaccaucaagguguucaccaccgucgacaacaucaaccugcacacgcaggugguggacaugagcaugaccuacggccagcaguucggccccaccuaccuggacggggccgacgucaccaagaucaagccccacaacucccacgagggcaagacguucuacgugcucccgaacgacgacacccugcgcguggaggccuucgaguacuaccacaccaccgaccccagcuuccuggggcgguacauguccgcccucaaccacacgaagaaguggaaguacccccaggucaacggccugaccagcaucaagugggccgacaacaacugcuaccuggcgaccgcccuccugacccugcagcagaucgagcucaaguucaaccccccggcccugcaggacgccuacuaccgcgcgcgggccggggaggccgccaacuucugcgcccugauccucgcguacugcaacaagacggugggcgagcugggcgacgugcgcgagaccauguccuaccuguuccagcacgccaaccucgacagcugcaagcggguccugaacguggucugcaagaccugcgggcagcagcagaccacccugaagggcguggaggccgugauguacauggggacgcucuccuacgagcaguucaagaagggcguccagauccccugcaccugcgggaagcaggccaccaaguaccuggugcagcaggagagccccuucgugaugauguccgcccccccggcgcaguacgagcugaagcacggcaccuucacgugcgccagcgaguacaccggcaacuaccagugcgggcacuacaagcacaucaccuccaaggagacccucuacugcaucgacggcgcccugcugacgaagagcagcgaguacaaggggcccaucaccgacgucuucuacaaggagaacuccuacaccaccacgaucaagcccgugaccuacaagcucgacggcguggucugcaccgagaucgaccccaagcuggacaacuacuacaagaaggacaacagcuacuucaccgagcagccgaucgaccuggugcccaaccagcccuaccccaacgccuccuucgacaacuucaaguucgugugcgacaacaucaaguucgccgacgaccucaaccagcugacgggguacaagaagccggcgagccgcgagcugaaggucaccuucuuccccgaccucaacggcgacgugguggccaucgacuacaagcacuacacccccuccuucaagaagggcgccaagcugcugcacaagcccaucgucuggcacgugaacaacgccaccaacaaggcgacguacaagccgaacaccuggugcauccggugccucuggagcaccaagcccguggagaccuccaacagcuucgacguccugaaguccgaggacgcccaggggauggacaaccuggccugcgaggaccucaagcccgugagcgaggagguggucgagaaccccacgauccagaaggacgugcuggagugcaacgugaagaccaccgaggucgugggcgacaucauccugaagccggccaacaacucccucaagaucaccgaggagguggggcacacggaccugauggccgcguacgucgacaacagcucccugaccaucaagaagcccaacgagcucagccgcgugcugggccugaagacccucgccacccacgggcuggccgccgugaacuccguccccugggacacgaucgccaacuacgcgaagccguuccugaacaagguggugagcaccaccaccaacaucgucacgcgcugccucaaccgggugugcaccaacuacaugcccuacuucuucacccugcugcuccagcugugcaccuucacccgcuccacgaacagccggaucaaggccuccaugcccaccaccaucgccaagaacaccgugaagagcgucggcaaguucugccuggaggccagcuucaacuaccucaagucccccaacuucagcaagcugaucaacaucaucaucugguuccugcuccuguccgugugccugggcagccucaucuacuccacggccgcgcugggggugcugaugagcaaccucggcaugccguccuacugcaccggguaccgcgagggcuaccugaacagcaccaacgucaccaucgccacguacugcaccggcuccauccccugcagcgugugccuguccgggcucgacagccuggacaccuaccccucccuggagaccauccagaucacgaucagcuccuucaagugggaccucaccgccuucggccugguggccgagugguuccuggccuacauccucuucacccgguucuucuacguccuggggcuggcggccaucaugcagcucuucuucagcuacuucgccgugcacuucaucuccaacagcuggcugauguggcugaucaucaaccuggugcagauggcccccaucuccgcgaugguccgcauguacaucuucuucgccagcuucuacuacguguggaagagcuacgugcacgucguggacggcugcaacuccagcaccugcaugaugugcuacaagcggaaccgcgccacgcggguggagugcaccaccaucgucaacggggugcgccgguccuucuacgucuacgccaacggcggcaagggguucugcaagcuccacaacuggaacugcgugaacugcgacaccuucugcgccggcagcacguucaucuccgacgagguggcgcgcgaccugagccugcaguucaagcggccgaucaaccccaccgaccaguccagcuacaucgucgacuccgugaccgugaagaacgggagcauccaccucuacuucgacaaggccggccagaagaccuacgagcgccacucccugagccacuucgucaaccuggacaaccuccgggccaacaacacgaaggggucccugcccaucaacgugaucguguucgacggcaagagcaagugcgaggaguccagcgccaaguccgccagcgucuacuacucccagcugaugugccagcccauccuccugcuggaccaggcgcucgugagcgacgugggcgacagcgccgaggucgccgugaagauguucgacgccuacgugaacaccuucuccagcaccuucaacgucccgauggagaagcugaagacccugguggccacggcggaggccgagcucgccaagaacgugucccuggacaacguccugagcaccuucaucuccgccgcgcgccagggguucguggacagcgacguggagaccaaggacgucguggagugccucaagcugucccaccagagcgacaucgaggugaccggcgacuccugcaacaacuacaugcugacguacaacaaggucgagaacaugaccccccgggaccucggggccugcaucgacugcagcgcccgccacaucaacgcccagguggccaagucccacaacaucgcgcugaucuggaacgugaaggacuucaugagccuguccgagcagcuccggaagcagauccgcagcgccgccaagaagaacaaccugcccuucaagcugaccugcgccaccacgcgccaggucgugaacguggucaccaccaagaucgcccucaagggcgggaagaucgugaacugaggacuagucccuguucccagagcccacuuuuuuuucuuuuuuugaaauaaaauagccugucuuucagaucucaaaggcucuuuucagagccaccaaaaaaaaaaaaaaaaaaaaaaaaaaaaaaaaaaaaaaaaaaaaaaaaaaaaaaaaaaaaaaaaaaaaaaaaaaaaaaaaaaaaaaaaaaaaaaaaaaaaa

SEQ ID NO: 20062 - RNA, 6113 nt, Artificial Sequence
  SARS-CoV-2__MT482141.1__non-structural protein 3 (NSP3) mRNA gc
aggagagucccgcagucggcguccagcggcucugcuuguucgugugugugucguugcaggccuuauucaagcuuaccauggcccccaccaaggugaccuucggcgacgacacggucaucgaggugcagggguacaagagcgugaacaucaccuucgagcuggacgagcgcaucgacaagguccucaacgagaagugcuccgccuacaccguggagcugggcaccgaggugaacgaguucgcgugcgucguggccgacgccgugaucaagacgcugcagccggucagcgagcuccugaccccccuggggaucgaccucgacgagugguccauggccaccuacuaccuguucgacgagagcggcgaguucaagcuggccucccacauguacugcagcuucuacccccccgacgaggacgaggaggagggggacugcgaggaggaggaguucgagccguccacccaguacgaguacggcacggaggacgacuaccagggcaagccccucgaguucggggcgaccagcgccgcccugcagcccgaggaggagcaggaggaggacuggcuggacgacgacucccagcagaccgugggccagcaggacgggagcgaggacaaccagaccacgaccauccagaccaucguggagguccagccccagcucgagauggagcugaccccgguggugcagacgaucgaggucaacuccuucagcggcuaccugaagcucaccgacaacguguacaucaagaacgccgacaucguggaggaggcgaagaaggucaagcccaccgugguggucaacgccgccaacguguaccugaagcacgggggcggcguggccggggcccugaacaaggcgaccaacaacgccaugcaggucgaguccgacgacuacaucgccacgaacggcccccucaagguggggggcagcugcguccuguccggccacaaccuggccaagcacugccuccacgugguggggcccaacgucaacaagggcgaggacauccagcugcugaagagcgccuacgagaacuucaaccagcacgaggugcuccuggcgccgcugcucuccgccgggaucuucggcgccgaccccauccacagccugcgggugugcgucgacaccgugcgcaccaacguguaccuggccgucuucgacaagaaccucuacgacaagcugguguccagcuuccuggagaugaagagcgagaagcagguggagcagaagaucgccgagauccccaaggaggaggucaagcccuucaucaccgaguccaagccgagcguggagcagcggaagcaggacgacaagaagaucaaggcgugcguggaggaggucacgaccacccucgaggagaccaaguuccugacggagaaccugcuccuguacaucgacaucaacgggaaccugcaccccgacuccgccacccucgugagcgacaucgacaucaccuuccugaagaaggacgcccccuacaucgugggcgacgucgugcaggagggcgugcugaccgccgucgugauccccacgaagaaggccgggggcaccaccgagaugcucgcgaaggcccugcgcaaggugccgaccgacaacuacaucacgaccuaccccgggcagggccugaacggguacaccgucgaggaggccaagaccgugcucaagaagugcaaguccgccuucuacauccugcccagcaucaucuccaacgagaagcaggagauccugggcaccgugagcuggaaccuccgggagaugcuggcgcacgccgaggagacgcgcaagcugaugcccgucugcguggagaccaaggccaucguguccaccauccagcggaaguacaagggcaucaagauccaggagggggucguggacuacggcgcccgcuucuacuucuacaccagcaagacgaccguggccucccugaucaacaccuucaacgaccucaacgagacccuggucacgaugccgcugggguacgugacccacggccucaaccuggaggaggcggcccgguacaugcgcagccugaaggugcccgccaccgucuccgugagcucccccgacgccgugaccgccuacaacggguaccucacgagcuccagcaagacccccgaggagcacuucaucgagaccaucucccuggcgggcagcuacaaggacuggagcuacuccggccagagcacccagcuggggaucgaguuccucaagcggggcgacaaguccgucuacuacacgagcaacccgaccaccuuccaccuggacggggaggugaucaccuucgacaaccugaagacgcuccugucccugcgcgaggugcggaccaucaaggucuucaccaccguggacaacaucaaccuccacacgcagguggucgacaugagcaugaccuacggccagcaguucggccccaccuaccuggacggggccgacgugaccaagaucaagccccacaacucccacgagggcaagacguucuacgugcugccgaacgacgacacccuccgcgucgaggccuucgaguacuaccacaccaccgaccccagcuuccuggggcgguacauguccgcccugaaccacacgaagaaguggaaguacccccaggugaacggccucaccagcaucaagugggccgacaacaacugcuaccuggcgaccgcccugcucacccugcagcagaucgagcugaaguucaaccccccggcccuccaggacgccuacuaccgcgcgcgggccggggaggccgccaacuucugcgcccugauccuggcguacugcaacaagacggugggcgagcucggcgacguccgcgagaccauguccuaccuguuccagcacgccaaccuggacagcugcaagcgggugcucaacgucgugugcaagaccugcgggcagcagcagaccacccugaagggcguggaggccgucauguacauggggacgcuguccuacgagcaguucaagaagggcgugcagauccccugcaccugcgggaagcaggccaccaaguaccucgugcagcaggagagccccuucgucaugauguccgcccccccggcgcaguacgagcugaagcacggcaccuucacgugcgccagcgaguacaccggcaacuaccagugcgggcacuacaagcacaucaccuccaaggagacccuguacugcaucgacggcgcccuccugacgaagagcagcgaguacaaggggcccaucaccgacguguucuacaaggagaacuccuacaccaccacgaucaagcccgugaccuacaagcuggacggcgucgugugcaccgagaucgaccccaagcucgacaacuacuacaagaaggacaacagcuacuucaccgagcagccgaucgaccuggugcccaaccagcccuaccccaacgccuccuucgacaacuucaaguucgucugcgacaacaucaaguucgccgacgaccugaaccagcucacgggguacaagaagccggcgagccgcgagcugaaggugaccuucuuccccgaccugaacggcgacguggucgccaucgacuacaagcacuacacccccuccuucaagaagggcgccaagcuccugcacaagcccaucguguggcacgugaacaacgccaccaacaaggcgacguacaagccgaacaccuggugcauccggugccuguggagcaccaagcccgucgagaccuccaacagcuucgacgugcucaaguccgaggacgcccaggggauggacaaccuggccugcgaggaccugaagcccgugagcgaggaggucguggagaaccccacgauccagaaggacgugcucgagugcaacgucaagaccaccgagguggugggcgacaucauccugaagccggccaacaacucccugaagaucaccgaggaggucgggcacacggaccucauggccgcguacguggacaacagcucccugaccaucaagaagcccaacgagcugagccgcgugcucggccugaagacccuggccacccacgggcucgccgccgucaacuccgugcccugggacacgaucgccaacuacgcgaagccguuccugaacaagguggucagcaccaccaccaacaucgugacgcgcugccugaaccgggugugcaccaacuacaugcccuacuucuucacccuccugcugcagcucugcaccuucacccgcuccacgaacagccggaucaaggccuccaugcccaccaccaucgccaagaacaccgucaagagcgugggcaaguucugccuggaggccagcuucaacuaccugaagucccccaacuucagcaagcucaucaacaucaucaucugguuccugcugcucuccgugugccugggcagccugaucuacuccacggccgcgcucgggguccugaugagcaaccugggcaugccguccuacugcaccggguaccgcgagggcuaccucaacagcaccaacgugaccaucgccacguacugcaccggcuccauccccugcagcgugugccuguccgggcuggacagccucgacaccuaccccucccuggagaccauccagaucacgaucagcuccuucaagugggaccugaccgccuucggccucgucgccgagugguuccuggccuacauccuguucacccgguucuucuacgugcucgggcuggcggccaucaugcagcuguucuucagcuacuucgccgugcacuucaucuccaacagcuggcucauguggcugaucaucaaccugguccagauggcccccaucuccgcgauggugcgcauguacaucuucuucgccagcuucuacuacguguggaagagcuacguccacgugguggacggcugcaacuccagcaccugcaugaugugcuacaagcggaaccgcgccacgcgggucgagugcaccaccaucgugaacgggguccgccgguccuucuacguguacgccaacggcggcaagggguucugcaagcugcacaacuggaacugcgugaacugcgacaccuucugcgccggcagcacguucaucuccgacgaggucgcgcgcgaccucagccugcaguucaagcggccgaucaaccccaccgaccaguccagcuacaucguggacuccgugaccgucaagaacgggagcauccaccuguacuucgacaaggccggccagaagaccuacgagcgccacucccucagccacuucgugaaccuggacaaccugcgggccaacaacacgaaggggucccuccccaucaacgugaucgucuucgacggcaagagcaagugcgaggaguccagcgccaaguccgccagcguguacuacucccagcugaugugccagcccauccugcuccuggaccaggcgcuggugagcgacgucggcgacagcgccgagguggccgugaagauguucgacgccuacgucaacaccuucuccagcaccuucaacgugccgauggagaagcucaagacccugguggccacggcggaggccgagcuggccaagaacgucucccucgacaacgugcugagcaccuucaucuccgccgcgcgccagggguucguggacagcgacgucgagaccaaggacgugguggagugccugaagcucucccaccagagcgacaucgaggucaccggcgacuccugcaacaacuacaugcugacguacaacaagguggagaacaugaccccccgggaccugggggccugcaucgacugcagcgcccgccacaucaacgcccagguggccaagucccacaacaucgcgcucaucuggaacgucaaggacuucaugagccuguccgagcagcugcggaagcagauccgcagcgccgccaagaagaacaaccuccccuucaagcugaccugcgccaccacgcgccagguggugaacgucgugaccaccaagaucgcccugaagggcgggugaggacuagucccuguucccagagcccacuuuuuuuucuuuuuuugaaauaaaauagccugucuuucagaucucaaaggcucuuuucagagccaccaaaaaaaaaaaaaaaaaaaaaaaaaaaaaaaaaaaaaaaaaaaaaaaaaaaaaaaaaaaaaaaaaaaaaaaaaaaaaaaaaaaaaaaaaaaaaaaaaaaaa

SEQ ID NO: 20063 - RNA, 6113 nt, Artificial Sequence
  SARS-CoV-2__MT482144.1__non-structural protein 3 (NSP3) mRNA gc
aggagagucccgcagucggcguccagcggcucugcuuguucgugugugugucguugcaggccuuauucaagcuuaccauggcccccaccaaggugaccuucggcgacgacacggucaucgaggugcagggguacaagagcgugaacaucaccuucgagcuggacgagcgcaucgacaagguccucaacgagaagugcuccgccuacaccguggagcugggcaccgaggugaacgaguucgcgugcgucguggccgacgccgugaucaagacgcugcagccggucagcgagcuccugaccccccuggggaucgaccucgacgagugguccauggccaccuacuaccuguucgacgagagcggcgaguucaagcuggccucccacauguacugcagcuucuacccccccgacgaggacgaggaggagggggacugcgaggaggaggaguucgagccguccacccaguacgaguacggcacggaggacgacuaccagggcaagccccucgaguucggggcgaccagcgccgcccugcagcccgaggaggagcaggaggaggacuggcuggacgacgacucccagcagaccgugggccagcaggacgggagcgaggacaaccagaccacgaccauccagaccaucguggagguccagccccagcucgagauggagcugaccccgguggugcagacgaucgaggucaacuccuucagcggcuaccugaagcucaccgacaacguguacaucaagaacgccgacaucguggaggaggcgaagaaggucaagcccaccgugguggucaacgccgccaacguguaccugaagcacgggggcggcguggccggggcccugaacaaggcgaccaacaacgccaugcaggucgaguccgacgacuacaucgccacgaacggcccccucaagguggggggcagcugcguccuguccggccacaaccuggccaagcacugccuccacgugguggggcccaacgucaacaagggcgaggacauccagcugcugaagagcgccuacgagaacuucaaccagcacgaggugcuccuggcgccgcugcucuccgccgggaucuucggcgccgaccccauccacagccugcgggugugcgucgacaccgugcgcaccaacguguaccuggccgucuucgacaagaaccucuacgacaagcugguguccagcuuccuggagaugaagagcgagaagcagguggagcagaagaucgccgagauccccaaggaggaggucaagcccuucaucaccgaguccaagccgagcguggagcagcggaagcaggacgacaagaagaucaaggcgugcguggaggaggucacgaccacccucgaggagaccaaguuccugacggagaaccugcuccuguacaucgacaucaacgggaaccugcaccccgacuccgccacccucgugagcgacaucgacaucaccuuccugaagaaggacgcccccuacaucgugggcgacgucgugcaggagggcgugcugaccgccgucgugauccccacgaagaaggccgggggcaccaccgagaugcucgcgaaggcccugcgcaaggugccgaccgacaacuacaucacgaccuaccccgggcagggccugaacggguacaccgucgaggaggccaagaccgugcucaagaagugcaaguccgccuucuacauccugcccagcaucaucuccaacgagaagcaggagauccugggcaccgugagcuggaaccuccgggagaugcuggcgcacgccgaggagacgcgcaagcugaugcccgucugcguggagaccaaggccaucguguccaccauccagcggaaguacaagggcaucaagauccaggagggggucguggacuacggcgcccgcuucuacuucuacaccagcaagacgaccguggccucccugaucaacacccucaacgaccugaacgagacccuggucacgaugccgcucggguacgugacccacggccugaaccuggaggaggcggcccgguacaugcgcagccucaaggugcccgccaccgucuccgugagcucccccgacgccgugaccgccuacaacggguaccugacgagcuccagcaagacccccgaggagcacuucaucgagaccaucucccuggcgggcagcuacaaggacuggagcuacuccggccagagcacccagcucgggaucgaguuccugaagcggggcgacaaguccgucuacuacacgagcaacccgaccaccuuccaccuggacggggaggugaucaccuucgacaaccucaagacgcugcugucccuccgcgaggugcggaccaucaaggucuucaccaccguggacaacaucaaccugcacacgcagguggucgacaugagcaugaccuacggccagcaguucggccccaccuaccuggacggggccgacgugaccaagaucaagccccacaacucccacgagggcaagacguucuacgugcucccgaacgacgacacccugcgcgucgaggccuucgaguacuaccacaccaccgaccccagcuuccuggggcgguacauguccgcccucaaccacacgaagaaguggaaguacccccaggugaacggccugaccagcaucaagugggccgacaacaacugcuaccuggcgaccgcccuccugacccugcagcagaucgagcucaaguucaaccccccggcccugcaggacgccuacuaccgcgcgcgggccggggaggccgccaacuucugcgcccugauccucgcguacugcaacaagacggugggcgagcugggcgacguccgcgagaccauguccuaccuguuccagcacgccaaccucgacagcugcaagcgggugcugaacgucgugugcaagaccugcgggcagcagcagaccacccugaagggcguggaggccgucauguacauggggacgcucuccuacgagcaguucaagaagggcgugcagauccccugcaccugcgggaagcaggccaccaaguaccuggugcagcaggagagccccuucgucaugauguccgcccccccggcgcaguacgagcugaagcacggcaccuucacgugcgccagcgaguacaccggcaacuaccagugcgggcacuacaagcacaucaccuccaaggagacccucuacugcaucgacggcgcccugcugacgaagagcagcgaguacaaggggcccaucaccgacguguucuacaaggagaacuccuacaccaccacgaucaagcccgugaccuacaagcucgacggcgucgugugcaccgagaucgaccccaagcuggacaacuacuacaagaaggacaacagcuacuucaccgagcagccgaucgaccuggugcccaaccagcccuaccucaacgccuccuucgacaacuucaaguucgucugcgacaacaucaaguucgccgacgaccugaaccagcugacgggguacaagaagcccgcgagccgcgagcucaaggugaccuucuucccggaccugaacggcgacguggucgccaucgacuacaagcacuacacccccuccuucaagaagggcgccaagcugcuccacaagcccaucguguggcacgugaacaacgccaccaacaaggcgacguacaagcccaacaccuggugcauccggugccuguggagcaccaagccggucgagaccuccaacagcuucgacgugcugaaguccgaggacgcccaggggauggacaaccucgccugcgaggaccugaagcccgugagcgaggaggucguggagaaccccacgauccagaaggacgugcuggagugcaacgucaagaccaccgagguggugggcgacaucauccucaagcccgccaacaacucccugaagaucaccgaggaggucgggcacacggaccugauggccgcguacguggacaacagcucccucaccaucaagaagccgaacgagcugagccgcgugcugggccucaagacccuggccacccacgggcuggccgccgucaacuccgugcccugggacacgaucgccaacuacgcgaagcccuuccucaacaagguggucagcaccaccaccaacaucgugacgcgcugccugaaccgggugugcaccaacuacaugccguacuucuucacccugcuccugcagcugugcaccuucacccgcuccacgaacagccggaucaaggccuccaugcccaccaccaucgccaagaacaccgucaagagcgugggcaaguucugccucgaggccagcuucaacuaccugaagucccccaacuucagcaagcugaucaacaucaucaucugguuccuccugcuguccgugugccucggcagccugaucuacuccacggccgcgcuggggguccucaugagcaaccugggcaugcccuccuacugcaccggguaccgcgagggcuaccugaacagcaccaacgugaccaucgccacguacugcaccggcuccaucccgugcagcgugugccucuccgggcuggacagccuggacaccuaccccucccucgagaccauccagaucacgaucagcuccuucaagugggaccugaccgccuucggccuggucgccgagugguuccucgccuacauccuguucacccgguucuucuacgugcuggggcucgcggccaucaugcagcuguucuucagcuacuucgccgugcacuucaucuccaacagcuggcugauguggcugaucaucaaccucguccagauggcccccaucuccgcgauggugcgcauguacaucuucuucgccagcuucuacuacguguggaagagcuacguccacgugguggacggcugcaacuccagcaccugcaugaugugcuacaagcggaaccgcgccacgcgggucgagugcaccaccaucgugaacgggguccgccgguccuucuacguguacgccaacggcggcaagggguucugcaagcugcacaacuggaacugcgugaacugcgacaccuucugcgccggcagcacguucaucuccgacgaggucgcgcgcgaccugagccuccaguucaagcggcccaucaacccgaccgaccaguccagcuacaucguggacuccgugaucgucaagaacgggagcauccaccuguacuucgacaaggccggccagaagaccuacgagcgccacucccugagccacuucgugaaccucgacaaccugcgggccaacaacaccaaggggucccugcccaucaacgugaucgucuucgacggcaagagcaagugcgaggaguccagcgccaaguccgccagcguguacuacucccagcucaugugccagcccauccugcugcucgaccaggcgcuggugagcgacgucggcgacagcgccgagguggccgugaagauguucgacgccuacgucaacacguucuccagcaccuucaacgugcccauggagaagcugaagacccucguggccaccgcggaggccgagcuggccaagaacgucucccuggacaacgugcucagcacguucaucuccgccgcgcgccagggguucguggacagcgacgucgagaccaaggacgugguggagugccugaagcugucccaccagagcgacaucgaggucaccggcgacuccugcaacaacuacaugcucaccuacaacaagguggagaacaugacgccgcgggaccugggggccugcaucgacugcagcgcccgccacaucaacgcccagguggccaagucccacaacaucgcgcugaucuggaacgucaaggacuucaugagccucuccgagcagcugcggaagcagauccgcagcgccgccaagaagaacaaccugcccuucaagcucaccugcgccaccacccgccagguggugaacgucgugacgaccaagaucgcccugaagggcgggugaggacuagucccuguucccagagcccacuuuuuuuucuuuuuuugaaauaaaauagccugucuuucagaucucaaaggcucuuuucagagccaccaaaaaaaaaaaaaaaaaaaaaaaaaaaaaaaaaaaaaaaaaaaaaaaaaaaaaaaaaaaaaaaaaaaaaaaaaaaaaaaaaaaaaaaaaaaaaaaaaaaaa

SEQ ID NO: 20064 - RNA, 6113 nt, Artificial Sequence
  SARS-CoV-2__MT358638.1__non-structural protein 3 (NSP3) mRNA gc
aggagagucccgcagucggcguccagcggcucugcuuguucgugugugugucguugcaggccuuauucaagcuuaccauggcccccaccaaggugaccuucggcgacgacacggucaucgaggugcagggguacaagagcgugaacaucaccuucgagcuggacgagcgcaucgacaagguccucaacgagaagugcuccgccuacaccguggagcugggcaccgaggugaacgaguucgcgugcgucguggccgacgccgugaucaagacgcugcagccggucagcgagcuccugaccccccuggggaucgaccucgacgagugguccauggccaccuacuaccuguucgacgagagcggcgaguucaagcuggccucccacauguacugcagcuucuacccccccgacgaggacgaggaggagggggacugcgaggaggaggaguucgagccguccacccaguacgaguacggcacggaggacgacuaccagggcaagccccucgaguucggggcgaccagcgccgcccugcagcccgaggaggagcaggaggaggacuggcuggacgacgacucccagcagaccgugggccagcaggacgggagcgaggacaaccagaccacgaccauccagaccaucguggagguccagccccagcucgagauggagcugaccccgguggugcagacgaucgaggucaacuccuucagcggcuaccugaagcucaccgacaacguguacaucaagaacgccgacaucguggaggaggcgaagaaggucaagcccaccgugguggucaacgccgccaacguguaccugaagcacgggggcggcguggccggggcccugaacaaggcgaccaacaacgccaugcaguucgaguccgacgacuacaucgccacgaacggcccccucaaggucgggggcagcugcgugcuguccggccacaaccuggccaagcacugccuccacgucguggggcccaacgugaacaagggcgaggacauccagcugcugaagagcgccuacgagaacuucaaccagcacgagguccuccuggcgccgcugcucuccgccgggaucuucggcgccgaccccauccacagccugcgggugugcguggacaccguccgcaccaacguguaccuggccguguucgacaagaaccucuacgacaagcuggucuccagcuuccuggagaugaagagcgagaagcagguggagcagaagaucgccgagauccccaaggaggaggugaagcccuucaucaccgaguccaagccgagcgucgagcagcggaagcaggacgacaagaagaucaaggcgugcguggaggaggugacgaccacccucgaggagaccaaguuccugacggagaaccugcuccuguacaucgacaucaacgggaaccugcaccccgacuccgccacccucgucagcgacaucgacaucaccuuccugaagaaggacgcccccuacaucgugggcgacgugguccaggagggcgugcugaccgccguggucauccccacgaagaaggccgggggcaccaccgagaugcucgcgaaggcccugcgcaaggugccgaccgacaacuacaucacgaccuaccccgggcagggccugaacggguacaccguggaggaggccaagaccguccucaagaagugcaaguccgccuucuacauccugcccagcaucaucuccaacgagaagcaggagauccugggcaccgugagcuggaaccuccgggagaugcuggcgcacgccgaggagacgcgcaagcugaugcccgugugcgucgagaccaaggccaucguguccaccauccagcggaaguacaagggcaucaagauccaggaggggguggucgacuacggcgcccgcuucuacuucuacaccagcaagacgaccguggccucccugaucaacacccucaacgaccugaacgagacccuggugacgaugccgcucggguacgucacccacggccugaaccuggaggaggcggcccgguacaugcgcagccucaaggugcccgccaccguguccgucagcucccccgacgccgugaccgccuacaacggguaccugacgagcuccagcaagacccccgaggagcacuucaucgagaccaucucccuggcgggcagcuacaaggacuggagcuacuccggccagagcacccagcucgggaucgaguuccugaagcggggcgacaaguccguguacuacacgagcaacccgaccaccuuccaccuggacggggaggucaucaccuucgacaaccucaagacgcugcugucccuccgcgaggugcggaccaucaagguguucaccaccgucgacaacaucaaccugcacacgcaggugguggacaugagcaugaccuacggccagcaguucggccccaccuaccuggacggggccgacgucaccaagaucaagccccacaacucccacgagggcaagacguucuacgugcucccgaacgacgacacccugcgcguggaggccuucgaguacuaccacaccaccgaccccagcuuccuggggcgguacauguccgcccucaaccacacgaagaaguggaaguacccccaggucaacggccugaccagcaucaagugggccgacaacaacugcuaccuggcgaccgcccuccugacccugcagcagaucgagcucaaguucaaccccccggcccugcaggacgccuacuaccgcgcgcgggccggggaggccgccaacuucugcgcccugauccucgcguacugcaacaagacggugggcgagcugggcgacgugcgcgagaccauguccuaccuguuccagcacgccaaccucgacagcugcaagcggguccugaacguggucugcaagaccugcgggcagcagcagaccacccugaagggcguggaggccgugauguacauggggacgcucuccuacgagcaguucaagaagggcguccagauccccugcaccugcgggaagcaggccaccaaguaccuggugcagcaggagagccccuucgugaugauguccgcccccccggcgcaguacgagcugaagcacggcaccuucacgugcgccagcgaguacaccggcaacuaccagugcgggcacuacaagcacaucaccuccaaggagacccucuacugcaucgacggcgcccugcugacgaagagcagcgaguacaaggggcccaucaccgacgucuucuacaaggagaacuccuacaccaccacgaucaagcccgugaccuacaagcucgacggcguggucugcaccgagaucgaccccaagcuggacaacuacuacaagaaggacaacagcuacuucaccgagcagccgaucgaccuggugcccaaccagcccuaccccaacgccuccuucgacaacuucaaguucgugugcgacaacaucaaguucgccgacgaccucaaccagcugacgggguacaagaagccggcgagccgcgagcugaaggucaccuucuuccccgaccucaacggcgacgugguggccaucgacuacaagcacuacacccccuccuucaagaagggcgccaagcugcugcacaagcccaucgucuggcacgugaacaacgccaccaacaaggcgacguacaagccgaacaccuggugcauccggugccucuggagcaccaagcccguggagaccuccaacagcuucgacguccugaaguccgaggacgcccaggggauggacaaccuggccugcgaggaccucaagcccgugagcgaggagguggucgagaaccccacgauccagaaggacgugcuggagugcaacgugaagaccaccgaggucgugggcgacaucauccugaagccggccaacaacucccucaagaucaccgaggagguggggcacacggaccugauggccgcguacgucgacaacagcucccugaccaucaagaagcccaacgagcucagccgcgugcugggccugaagacccucgccacccacgggcuggccgccgugaacuccguccccugggacacgaucgccaacuacgcgaagccguuccugaacaagguggugagcaccaccaccaacaucgucacgcgcugccucaaccgggugugcaccaacuacaugcccuacuucuucacccugcugcuccagcugugcaccuucacccgcuccacgaacagccggaucaaggccuccaugcccaccaccaucgccaagaacaccgugaagagcgucggcaaguucugccuggaggccagcuucaacuaccucaagucccccaacuucagcaagcugaucaacaucaucaucugguuccugcuccuguccgugugccugggcagccucaucuacuccacggccgcgcugggggugcugaugagcaaccucggcaugccguccuacugcaccggguaccgcgagggcuaccugaacagcaccaacgucaccaucgccacguacugcaccggcuccauccccugcagcgugugccuguccgggcucgacagccuggacaccuaccccucccuggagaccauccagaucacgaucagcuccuucaagugggaccucaccgccuucggccugguggccgagugguuccuggccuacauccucuucacccgguucuucuacguccuggggcuggcggccaucaugcagcucuucuucagcuacuucgccgugcacuucaucuccaacagcuggcugauguggcugaucaucaaccuggugcagauggcccccaucuccgcgaugguccgcauguacaucuucuucgccagcuucuacuacguguggaagagcuacgugcacgucguggacggcugcaacuccagcaccugcaugaugugcuacaagcggaaccgcgccacgcggguggagugcaccaccaucgucaacggggugcgccgguccuucuacgucuacgccaacggcggcaagggguucugcaagcuccacaacuggaacugcgugaacugcgacaccuucugcgccggcagcacguucaucuccgacgagguggcgcgcgaccugagccugcaguucaagcggccgaucaaccccaccgaccaguccagcuacaucgucgacuccgugaccgugaagaacgggagcauccaccucuacuucgacaaggccggccagaagaccuacgagcgccacucccugagccacuucgucaaccuggacaaccuccgggccaacaacacgaaggggucccugcccaucaacgugaucguguucgacggcaagagcaagugcgaggaguccagcgccaaguccgccagcgucuacuacucccagcugaugugccagcccauccuccugcuggaccaggcgcucgugagcgacgugggcgacagcgccgaggucgccgugaagauguucgacgccuacgugaacaccuucuccagcaccuucaacgucccgauggagaagcugaagacccugguggccacggcggaggccgagcucgccaagaacgugucccuggacaacguccugagcaccuucaucuccgccgcgcgccagggguucguggacagcgacguggagaccaaggacgucguggagugccucaagcugucccaccagagcgacaucgaggugaccggcgacuccugcaacaacuacaugcugacguacaacaaggucgagaacaugaccccccgggaccucggggccugcaucgacugcagcgcccgccacaucaacgcccagguggccaagucccacaacaucgcgcugaucuggaacgugaaggacuucaugagccuguccgagcagcuccggaagcagauccgcagcgccgccaagaagaacaaccugcccuucaagcugaccugcgccaccacgcgccaggucgugaacguggucaccaccaagaucgcccucaagggcgggugaggacuagucccuguucccagagcccacuuuuuuuucuuuuuuugaaauaaaauagccugucuuucagaucucaaaggcucuuuucagagccaccaaaaaaaaaaaaaaaaaaaaaaaaaaaaaaaaaaaaaaaaaaaaaaaaaaaaaaaaaaaaaaaaaaaaaaaaaaaaaaaaaaaaaaaaaaaaaaaaaaaaa

SEQ ID NO: 20065 - RNA, 6113 nt, Artificial Sequence
  SARS-CoV-2__MT358640.1__non-structural protein 3 (NSP3) mRNA gc
aggagagucccgcagucggcguccagcggcucugcuuguucgugugugugucguugcaggccuuauucaagcuuaccauggcccccaccaaggugaccuucggcgacgacacggucaucgaggugcagggguacaagagcgugaacaucaccuucgagcuggacgagcgcaucgacaagguccucaacgagaagugcuccgccuacaccguggagcugggcaccgaggugaacgaguucgcgugcgucguggccgacgccgugaucaagacgcugcagccggucagcgagcuccugaccccccuggggaucgaccucgacgagugguccauggccaccuacuaccuguucgacgagagcggcgaguucaagcuggccucccacauguacugcagcuucuacccccccgacgaggacgaggaggagggggacugcgaggaggaggaguucgagccguccacccaguacgaguacggcacggaggacgacuaccagggcaagccccucgaguucggggcgaccagcgccgcccugcagcccgaggaggagcaggaggaggacuggcuggacgacgacucccagcagaccgugggccagcaggacgggagcgaggacaaccagaccacgaccauccagaccaucguggagguccagccccagcucgagauggagcugaccccgguggugcagacgaucgaggucaacuccuucagcggcuaccugaagcucaccgacaacguguacaucaagaacgccgacaucguggaggaggcgaagaaggucaagcccaccgugguggucaacgccgccaacguguaccugaagcacgggggcggcguggccggggcccugaacaaggcgaccaacaacgccaugcaggucgaguccgacgacuacaucgccacgaacggcccccucaagguggggggcagcugcguccuguccggccacaaccuggccaagcacugccuccacgugguggggcccaacgucaacaagggcgaggacauccagcugcugaagagcgccuacgagaacuucaaccagcacgaggugcuccuggcgccgcugcucuccgccgggaucuucggcgccgaccccauccacagccugcgggugugcgucgacaccgugcgcaccaacguguaccuggccgucuucgacaagaaccucuacgacaagcugguguccagcuuccuggagaugaagagcgagaagcagguggagcagaagaucgccgagauccccaaggaggaggucaagcccuucaucaccgaguccaagccgagcguggagcagcggaagcaggacgacaagaagaucaaggcgugcguggaggaggucacgaccacccucgaggagaccaaguuccugacggagaaccugcuccuguacaucgacaucaacgggaaccugcaccccgacuccgccacccucgugagcgacaucgacaucaccuuccugaagaaggacgcccccuacaucgugggcgacgucgugcaggagggcgugcugaccgccgucgugauccccacgaagaaggccgggggcaccaccgagaugcucgcgaaggcccugcgcaaggugccgaccgacaacuacaucacgaccuaccccgggcagggccugaacggguacaccgucgaggaggccaagaccgugcucaagaagugcaaguccgccuucuacauccugcccagcaucaucuccaacgagaagcaggagauccugggcaccgugagcuggaaccuccgggagaugcuggcgcacgccgaggagacgcgcaagcugaugcccgucugcguggagaccaaggccaucguguccaccauccagcggaaguacaagggcaucaagauccaggagggggucguggacuacggcgcccgcuucuacuucuacaccagcaagacgaccguggccucccugaucaacacccucaacgaccugaacgagacccuggucacgaugccgcucggguacgugacccacggccugaaccuggaggaggcggcccgguacaugcgcagccucaaggugcccgccaccgucuccgugagcucccccgacgccgugaccgccuacaacggguaccugacgagcuccagcaagacccccgaggagcacuucaucgagaccaucucccuggcgggcagcuacaaggacuggagcuacuccggccagagcacccagcucgggaucgaguuccugaagcggggcgacaaguccgucuacuacacgagcaacccgaccaccuuccaccuggacggggaggugaucaccuucgacaaccucaagacgcugcugucccuccgcgaggugcggaccaucaaggucuucaccaccguggacaacaucaaccugcacacgcagguggucgacaugagcaugaccuacggccagcaguucggccccaccuaccuggacggggccgacgugaccaagaucaagccccacaacucccacgagggcaagacguucuacgugcucccgaacgacgacacccugcgcgucgaggccuucgaguacuaccacaccaccgaccccagcuuccuggggcgguacauguccgcccucaaccacacgaagaaguggaaguacccccaggugaacggccugaccagcaucaagugggccgacaacaacugcuaccuggcgaccgcccuccugacccugcagcagaucgagcucaaguucaaccccccggcccugcaggacgccuacuaccgcgcgcgggccggggaggccgccaacuucugcgcccugauccucgcguacugcaacaagacggugggcgagcugggcgacguccgcgagaccauguccuaccuguuccagcacgccaaccucgacagcugcaagcgggugcugaacgucgugugcaagaccugcgggcagcagcagaccacccugaagggcguggaggccgucauguacauggggacgcucuccuacgagcaguucaagaagggcgugcagauccccugcaccugcgggaagcaggccaccaaguaccuggugcagcaggagagccccuucgucaugauguccgcccccccggcgcaguacgagcugaagcacggcaccuucacgugcgccagcgaguacaccggcaacuaccagugcgggcacuacaagcacaucaccuccaaggagacccucuacugcaucgacggcgcccugcugacgaagagcagcgaguacaaggggcccaucaccgacguguucuacaaggagaacuccuacaccaccacgaucaagcccgugaccuacaagcucgacggcgucgugugcaccgagaucgaccccaagcuggacaacuacuacaagaaggacaacagcuacuucaccgagcagccgaucgaccuggugcccaaccagcccuaccccaacgccuccuucgacaacuucaaguucgucugcgacaacaucaaguucgccgacgaccucaaccagcugacgggguacaagaagccggcgagccgcgagcugaaggugaccuucuuccccgaccucaacggcgacguggucgccaucgacuacaagcacuacacccccuccuucaagaagggcgccaagcugcugcaccggcccaucguguggcacgugaacaacgccaccaacaaggcgacguacaagccgaacaccuggugcauccgcugccucuggagcaccaagcccgucgagaccuccaacagcuucgacgugcugaaguccgaggacgcccaggggauggacaaccuggccugcgaggaccucaagcccgugagcgaggaggucguggagaaccccacgauccagaaggacgugcuggagugcaacgucaagaccaccgagguggugggcgacaucauccugaagccggccaacaacucccucaagaucaccgaggaggucgggcacacggaccugauggccgcguacguggacaacagcucccugaccaucaagaagcccaacgagcucagccgcgugcugggccugaagacccucgccacccacgggcuggccgccgucaacuccgugcccugggacacgaucgccaacuacgcgaagccguuccugaacaagguggucagcaccaccaccaacaucgugacgcggugccucaaccgcgugugcaccaacuacaugcccuacuucuucacccugcugcuccagcugugcaccuucacccgguccacgaacagccgcaucaaggccuccaugcccaccaccaucgccaagaacaccgucaagagcgugggcaaguucugccuggaggccagcuucaacuaccucaagucccccaacuucagcaagcugaucaacaucaucaucugguuccugcuccuguccgugugccugggcagccucaucuacuccacggccgcgcuggggguccugaugagcaaccucggcaugccguccuacugcaccggguaccgggagggcuaccugaacagcaccaacgugaccaucgccacguacugcaccggcuccauccccugcagcgugugccuguccgggcucgacagccuggacaccuaccccucccuggagaccauccagaucacgaucagcuccuucaagugggaccucaccgccuucggccuggucgccgagugguuccuggccuacauccucuucacccgcuucuucuacgugcuggggcuggcggccaucaugcagcucuucuucagcuacuucgccgugcacuucaucuccaacagcuggcugauguggcugaucaucaaccugguccagauggcccccaucuccgcgauggugcggauguacaucuucuucgccagcuucuacuacguguggaagagcuacguccacgugguggacggcugcaacuccagcaccugcaugaugugcuacaagcgcaaccgggccacgcgcgucgagugcaccaccaucgugaacgggguccggcgcuccuucuacguguacgccaacggcggcaagggguucugcaagcuccacaacuggaacugcgugaacugcgacaccuucugcgccggcagcacguucaucuccgacgaggucgcgcgggaccugagccugcaguucaagcgcccgaucaaccccaccgaccaguccagcuacaucguggacuccgugaccgucaagaacgggagcauccaccucuacuucgacaaggccggccagaagaccuacgagcggcacucccugagccacuucgugaaccuggacaaccuccgcgccaacaacacgaaggggucccugcccaucaacgugaucgucuucgacggcaagagcaagugcgaggaguccagcgccaaguccgccagcguguacuacucccagcugaugugccagcccauccuccugcuggaccaggcgcucgugagcgacgucggcgacagcgccgagguggccgugaagauguucgacgccuacgucaacaccuucuccagcaccuucaacgugccgauggagaagcugaagacccugguggccacggcggaggccgagcucgccaagaacgucucccuggacaacgugcugagcaccuucaucuccgccgcgcggcagggguucguggacagcgacgucgagaccaaggacgugguggagugccucaagcugucccaccagagcgacaucgaggucaccggcgacuccugcaacaacuacaugcugacguacaacaagguggagaacaugaccccccgcgaccucggggccugcaucgacugcagcgcccggcacaucaacgcccagguggccaagucccacaacaucgcgcugaucuggaacgucaaggacuucaugagccuguccgagcagcuccgcaagcagauccgcagcgccgccaagaagaacaaccugcccuucaagcugaccugcgccaccacgcggcagguggugaacgucgugaccaccaagaucgcccucaagggcgggugaggacuagucccuguucccagagcccacuuuuuuuucuuuuuuugaaauaaaauagccugucuuucagaucucaaaggcucuuuucagagccaccaaaaaaaaaaaaaaaaaaaaaaaaaaaaaaaaaaaaaaaaaaaaaaaaaaaaaaaaaaaaaaaaaaaaaaaaaaaaaaaaaaaaaaaaaaaaaaaaaaaaa

SEQ ID NO: 20066 - RNA, 6113 nt, Artificial Sequence
  SARS-CoV-2__MT467247.1__non-structural protein 3 (NSP3) mRNA gc
aggagagucccgcagucggcguccagcggcucugcuuguucgugugugugucguugcaggccuuauucaagcuuaccauggcccccaccaaggugaccuucggcgacgacacggucaucgaggugcagggguacaagagcgugaacaucaccuucgagcuggacgagcgcaucgacaagguccucaacgagaagugcuccgccuacaccguggagcugggcaccgaggugaacgaguucgcgugcgucguggccgacgccgugaucaagacgcugcagccggucagcgagcuccugaccccccuggggaucgaccucgacgagugguccauggccaccuacuaccuguucgacgagagcggcgaguucaagcuggccucccacauguacugcagcuucuacccccccgacgaggacgaggaggagggggacugcgaggaggaggaguucgagccguccacccaguacgaguacggcacggaggacgacuaccagggcaagccccucgaguucggggcgaccagcgccgcccugcagcccgaggaggagcaggaggaggacuggcuggacgacgacucccagcagaccgugggccagcaggacgggagcgaggacaaccagaccacgaccauccagaccaucguggagguccagccccagcucgagauggagcugaccccgguggugcagacgaucgaggucaacuccuucagcggcuaccugaagcucaccgacaacguguacaucaagaacgccgacaucguggaggaggcgaagaaggucaagcccaccgugguggucaacgccgccaacguguaccugaagcacgggggcggcguggccggggcccugaacaaggcgaccaacaacgccaugcaggucgaguccgacgacuacaucgccacgaacggcccccucaagguggggggcagcugcguccuguccggccacaaccuggccaagcacugccuccacgugguggggcccaacgucaacaagggcgaggacauccagcugcugaagagcgccuacgagaacuucaaccagcacgaggugcuccuggcgccgcugcucuccgccgggaucuucggcgccgacagcauccacucccugcgggugugcgucgacaccgugcgcaccaacguguaccuggccgucuucgacaagaaccucuacgacaagcuggugagcagcuuccuggagaugaaguccgagaagcagguggagcagaagaucgccgagauccccaaggaggaggucaagcccuucaucaccgagagcaagcccuccguggagcagcggaagcaggacgacaagaagaucaaggcgugcguggaggaggucacgaccacccucgaggagaccaaguuccugacggagaaccugcuccuguacaucgacaucaacgggaaccugcacccggacagcgccacccucguguccgacaucgacaucaccuuccugaagaaggacgcccccuacaucgugggcgacgucgugcaggagggcgugcugaccgccgucgugauccccacgaagaaggccgggggcaccaccgagaugcucgcgaaggcccugcgcaaggugcccaccgacaacuacaucacgaccuacccggggcagggccugaacggguacaccgucgaggaggccaagaccgugcucaagaagugcaagagcgccuucuacauccugcccuccaucaucagcaacgagaagcaggagauccugggcaccguguccuggaaccuccgggagaugcuggcgcacgccgaggagacgcgcaagcugaugcccgucugcguggagaccaaggccaucgugagcaccauccagcggaaguacaagggcaucaagauccaggagggggucguggacuacggcgcccgcuucuacuucuacaccuccaagacgaccguggccagccugaucaacacccucaacgaccugaacgagacccuggucacgaugccccucggguacgugacccacggccugaaccuggaggaggcggcccgguacaugcgcucccucaaggugccggccaccgucagcguguccagccccgacgccgugaccgccuacaacggguaccugacguccagcuccaagacccccgaggagcacuucaucgagaccaucagccuggcgggcagcuacaaggacugguccuacagcggccaguccacccagcucgggaucgaguuccugaagcggggcgacaagaucgucuacuacacgagcaaccccaccaccuuccaccuggacggggaggugaucaccuucgacaaccucaagacgcugcugucccuccgcgaggugcggaccaucaaggucuucaccaccguggacaacaucaaccugcacacgcagguggucgacaugagcaugaccuacggccagcaguucggcccgaccuaccuggacggggccgacgugaccaagaucaagccccacaacucccacgagggcaagacguucuacgugcuccccaacgacgacacccugcgcgucgaggccuucgaguacuaccacaccaccgacccgagcuuccuggggcgguacauguccgcccucaaccacacgaagaaguggaaguacccccaggugaacggccugaccagcaucaagugggccgacaacaacugcuaccuggcgaccgcccuccugacccugcagcagaucgagcucaaguucaacccccccgcccugcaggacgccuacuaccgcgcgcgggccggggaggccgccaacuucugcgcccugauccucgcguacugcaacaagacggugggcgagcugggcgacguccgcgagaccauguccuaccuguuccagcacgccaaccucgacagcugcaagcgggugcugaacgucgugugcaagaccugcgggcagcagcagaccacccugaagggcguggaggccgucauguacauggggacgcucuccuacgagcaguucaagaagggcgugcagaucccgugcaccugcgggaagcaggccaccaaguaccuggugcagcaggagagccccuucgucaugauguccgccccccccgcgcaguacgagcugaagcacggcaccuucacgugcgccagcgaguacaccggcaacuaccagugcgggcacuacaagcacaucaccuccaaggagacccucuacugcaucgacggcgcccugcugacgaagagcagcgaguacaaggggccgaucaccgacguguucuacaaggagaacuccuacaccaccacgaucaagcccgugaccuacaagcucgacggcgucgugugcaccgagaucgaccccaagcuggacaacuacuacaagaaggacaacagcuacuucaccgagcagcccaucgaccuggugccgaaccagcccuaccccaacgccuccuucgacaacuucaaguucgucugcgacaacaucaaguucgccgacgaccucaaccagcugacgggguacaagaagcccgcgagccgcgagcugaaggugaccuucuucccggaccucaacggcgacguggucgccaucgacuacaagcacuacacccccuccuucaagaagggcgccaagcugcugcacaagcccaucguguggcacgugaacaacgccaccaacaaggcgacguacaagcccaacaccuggugcauccggugccucuggagcaccaagccggucgagaccuccaacagcuucgacgugcugaaguccgaggacgcccaggggauggacaaccuggccugcgaggaccucaagcccgugagcgaggaggucguggagaaccccacgauccagaaggacgugcuggagugcaacgucaagaccaccgagguggugggcgacaucauccugaagcccgccaacaacucccucaagaucaccgaggaggucgggcacacggaccugauggccgcguacguggacaacagcucccugaccaucaagaagccgaacgagcucagccgcgugcugggccugaagacccucgccacccacgggcuggccgccgucaacuccgugcccugggacacgaucgccaacuacgcgaagcccuuccugaacaagguggucagcaccaccaccaacaucgugacgcgcugccucaaccgggugugcaccaacuacaugccguacuucuucacccugcugcuccagcugugcaccuucacccgcuccacgaacagccggaucaaggccuccaugcccaccaccaucgccaagaacaccgucaagagcgugggcaaguucugccuggaggccagcuucaacuaccucaagucccccaacuucagcaagcugaucaacaucaucaucugguuccugcuccuguccgugugccugggcagccucaucuacuccacggccgcgcuggggguccugaugagcaaccucggcaugcccuccuacugcaccggguaccgcgagggcuaccugaacagcaccaacgugaccaucgccacguacugcaccggcuccaucccgugcagcgugugccuguccgggcucgacagccuggacaccuaccccucccuggagaccauccagaucacgaucagcuccuucaagugggaccucaccgccuucggccuggucgccgagugguuccuggccuacauccucuucacccgguucuucuacgugcuggggcuggcggccaucaugcagcucuucuucagcuacuucgccgugcacuucaucuccaacagcuggcugauguggcugaucaucaaccugguccagauggcccccaucuccgcgauggugcgcauguacaucuucuucgccagcuucuacuacguguggaagagcuacguccacgugguggacggcugcaacuccagcaccugcaugaugugcuacaagcggaaccgcgccacgcgggucgagugcaccaccaucgugaacgggguccgccgguccuucuacguguacgccaacggcggcaagggguucugcaagcuccacaacuggaacugcgugaacugcgacaccuucugcgccggcagcacguucaucuccgacgaggucgcgcgcgaccugagccugcaguucaagcggcccaucaacccgaccgaccaguccagcuacaucguggacuccgugaccgucaagaacgggagcauccaccucuacuucgacaaggccggccagaagaccuacgagcgccacucccugagccacuucgugaaccuggacaaccuccgggccaacaacacgaaggggucccugcccaucaacgugaucgucuucgacggcaagagcaagugcgaggaguccagcgccaaguccgccagcguguacuacucccagcugaugugccagcccauccuccugcuggaccaggcgcucgugagcgacgucggcgacagcgccgagguggccgugaagauguucgacgccuacgucaacaccuucuccagcaccuucaacgugcccauggagaagcugaagacccugguggccacggcggaggccgagcucgccaagaacgucucccuggacaacgugcugagcaccuucaucuccgccgcgcgccagggguucguggacagcgacgucgagaccaaggacgugguggagugccucaagcugucccaccagagcgacaucgaggucaccggcgacuccugcaacaacuacaugcugacguacaacaagguggagaacaugaccccgcgggaccucggggccugcaucgacugcagcgcccgccacaucaacgcccagguggccaagucccacaacaucgcgcugaucuggaacgucaaggacuucaugagccuguccgagcagcuccggaagcagauccgcagcgccgccaagaagaacaaccugcccuucaagcugaccugcgccaccacgcgccagguggugaacgucgugaccaccaagaucgcccucaagggcgggugaggacuagucccuguucccagagcccacuuuuuuuucuuuuuuugaaauaaaauagccugucuuucagaucucaaaggcucuuuucagagccaccaaaaaaaaaaaaaaaaaaaaaaaaaaaaaaaaaaaaaaaaaaaaaaaaaaaaaaaaaaaaaaaaaaaaaaaaaaaaaaaaaaaaaaaaaaaaaaaaaaaaa

SEQ ID NO: 20067 - RNA, 6113 nt, Artificial Sequence
  SARS-CoV-2__MT470104.1__non-structural protein 3 (NSP3) mRNA gc
aggagagucccgcagucggcguccagcggcucugcuuguucgugugugugucguugcaggccuuauucaagcuuaccauggcccccaccaaggugaccuucggcgacgacacggucaucgaggugcagggguacaagagcgugaacaucaccuucgagcuggacgagcgcaucgacaagguccucaacgagaagugcuccgccuacaccguggagcugggcaccgaggugaacgaguucgcgugcgucguggccgacgccgugaucaagacgcugcagccggucagcgagcuccugaccccccuggggaucgaccucgacgagugguccauggccaccuacuaccuguucgacgagagcggcgaguucaagcuggccucccacauguacugcagcuucuacccccccgacgaggacgaggaggagggggacugcgaggaggaggaguucgagccguccacccaguacgaguacggcacggaggacgacuaccagggcaagccccucgaguucggggcgaccagcgccgcccugcagcccgaggaggagcaggaggaggacuggcuggacgacgacucccagcagaccgugggccagcaggacgggagcgaggacaaccagaccacgaccauccagaccaucguggagguccagccccagcucgagauggagcugaccccgguggugcagacgaucgaggucaacuccuucagcggcuaccugaagcucaccgacaacguguacaucaagaacgccgacaucguggaggaggcgaagaaggucaagcccaccgugguggucaacgccgccaacguguaccugaagcacgggggcggcguggccggggcccugaacaaggcgaccaacaacgccaugcaggucgaguccgacgacuacaucgccacgaacggcccccucaagguggggggcagcugcguccuguccggccacaaccuggccaagcacugccuccacgugguggggcccaacgucaacaagggcgaggacauccagcugcugaagagcgccuacgagaacuucaaccagcacgaggugcuccuggcgccgcugcucuccgccgggaucuucggcgccgaccccauccacagccugcgggugugcgucgacaccgugcgcaccaacguguaccuggccgucuucgacaagaaccucuacgacaagcugguguccagcuuccuggagaugaagagcgagaagcagguggagcagaagaucgccgagauccccaaggaggaggucaagcccuucaucaccgaguccaagccgagcguggagcagcggaagcaggacgacaagaagaucaaggcgugcguggaggaggucacgaccacccucgaggagaccaaguuccugacggagaaccugcuccuguacaucgacaucaacgggaaccugcaccccgacuccgccacccucgugagcgacaucgacaucaccuuccugaagaaggacgcccccuacaucgugggcgacgucgugcaggagggcgugcugaccgccgucgugauccccacgaagaaggccgggggcaccaccgagaugcucgcgaaggcccugcgcaaggugccgaccgacaacuacaucacgaccuaccccgggcagggccugaacggguacaccgucgaggaggccaagaccgugcucaagaagugcaaguccgccuucuacauccugcccagcaucaucuccaacgagaagcaggagauccugggcaccgugagcuggaaccuccgggagaugcuggcgcacgccgaggagacgcgcaagcugaugcccgucugcguggagaccaaggccaucguguccaccauccagcggaaguacaagggcaucaagauccaggagggggucguggacuacggcgcccgcuucuacuucuacaccagcaagacgaccguggccucccugaucaacacccucaacgaccugaacgagacccuggucacgaugccgcucggguacgugacccacggccugaaccuggaggaggcggcccgguacaugcgcagccucaaggugcccgccaccgucuccgugagcucccccgacgccgugaccgccuacaacggguaccugacgagcuccagcaagacccccgaggagcacuucaucgagaccaucucccuggcgggcagcuacaaggacuggagcuacuccggccagagcacccagcucgggaucgaguuccugaagcggggcgacaaguccgucuacuacacgagcaacccgaccaccuuccaccuggacggggaggugaucaccuucgacaaccucaagacgcugcugucccuccgcgaggugcggaccaucaaggucuucaccaccguggacaacaucaaccugcacacgcagguggucgacaugagcaugaccuacggccagcaguucggccccaccuaccuggacggggccgacgugaccaagaucaagccccacaacucccacgagggcaagacguucuacgugcucccgaacgacgacacccugcgcgucgaggccuucgaguacuaccacaccaccgaccccagcuuccuggggcgguacauguccgcccucaaccacacgaagaaguggaaguacccccaggugaacggccugaccagcaucaagugggccgacaacaacugcuaccuggcgaccgcccuccugacccugcagcagaucgagcucaaguucaaccccccggcccugcaggacgccuacuaccgcgcgcgggccggggaggccgccaacuucugcgcccugauccucgcguacugcaacaagacggugggcgagcugggcgacguccgcgagaccauguccuaccuguuccagcacgccaaccucgacagcugcaagcgggugcugaacgucgugugcaagaccugcgggcagcagcagaccacccugaagggcguggaggccgucauguacauggggacgcucuccuacgagcaguucaagaagggcgugcagauccccugcaccugcgggaagcaggccaccaaguaccuggugcagcaggagagccccuucgucaugauguccgcccccccggcgcaguacgagcugaagcacggcaccuucacgugcgccagcgaguacaccggcaacuaccagugcgggcacuacaagcacaucaccuccaaggagacccucuacugcaucgacggcgcccugcugacgaagagcagcgaguacaaggggcccaucaccgacguguucuacaaggagaacuccuacaccaccacgaucaagcccgugaccuacaagcucgacggcgucgugugcaccgagaucgaccccaagcuggacaacuacuacaagaaggacaacagcuacuucaccgagcagccgaucgaccuggugcccaaccagcccuaccccaacgccuccuucgacaacuucaaguucgucugcgacaacaucaaguucgccgacgaccucaaccagcugacgggguacaagaagccggcgagccgcgagcugaaggugaccuucuuccccgaccucaacggcgacguggucgccaucgacuacaagcacuacacccccuccuucaagaagggcgccaagcugcugcacaagcccaucguguggcacgugaacaacgccaccaacaaggcgacguacaagccgaacaccuggugcauccggugccucuggagcaccaagcccgucgagaccuccaacagcuucgacgugcugaaguccgaggacgcccaggggauggacaaccuggccugcgaggaccucaagcccgugagcgaggaggucguggagaaccccacgauccagaaggacgugcuggagugcaacgucaagaccaccgagguggugggcgacaucauccugaagccggccaacaacucccucaagaucaccgaggaggucgggcacacggaccugauggccgcguacguggacaacagcucccugaccaucaagaagcccaacgagcucagccgcgugcugggccugaagacccucgccacccacgggcuggccgccgucaacuccgugcccugggacacgaucgccaacuacgcgaagccguuccugaacaagguggucagcaccaccaccaacaucgugacgcgcugccucaaccgggugugcaccaacuacaugcccuacuucuucacccugcugcuccagcugugcaccuucacccgcuccacgaacagccggaucaaggccuccaugcccaccaccaucgccaagaacaccgucaagagcgugggcaaguucugccuggaggccagcuucaacuaccucaagucccccaacuucagcaagcugaucaacaucaucaucugguuccugcuccuguccgugugccugggcagccucaucuacuccacggccgcgcuggggguccugaugagcaaccucggcaugccguccuacugcaccggguaccgcgagggcuaccugaacagcaccaacgugaccaucgccacguacugcaccggcuccauccccugcagcgugugccuguccgggcucgacagccuggacaccuaccccucccuggagaccauccagaucacgaucagcuccuucaagugggaccucaccgccuucggccuggucgccgagugguuccuggccuacauccucuucacccgguucuucuacgugcuggggcuggcggccaucaugcagcucuucuucagcuacuucgccguguacuucaucuccaacagcuggcugauguggcugaucaucaaccugguccagauggcccccaucuccgcgauggugcgcauguacaucuucuucgccagcuucuacuacguguggaagagcuacguccacgugguggacggcugcuccagcuccaccugcaugaugugcuacaagcggaaccgcgccacgcgggucgagugcaccaccaucgugaacgggguccgccggagcuucuacguguacgccaacggcggcaagggguucugcaagcuccacaacuggaacugcgugaacugcgacaccuucugcgccggcuccacguucaucagcgacgaggucgcgcgcgaccugucccugcaguucaagcggccgaucaaccccaccgaccagagcuccuacaucguggacagcgugaccgucaagaacggguccauccaccucuacuucgacaaggccggccagaagaccuacgagcgccacagccugucccacuucgugaaccuggacaaccuccgggccaacaacacgaaggggagccugcccaucaacgugaucgucuucgacggcaaguccaagugcgaggagagcuccgccaagagcgccuccguguacuacagccagcugaugugccagcccauccuccugcuggaccaggcgcucgugagcgacgucggcgacuccgccgagguggccgugaagauguucgacgccuacgucaacaccuucagcuccaccuucaacgugccgauggagaagcugaagacccugguggccacggcggaggccgagcucgccaagaacgucagccuggacaacgugcuguccaccuucaucagcgccgcgcgccagggguucguggacuccgacgucgagaccaaggacgugguggagugccucaagcugagccaccaguccgacaucgaggucaccggcgacagcugcaacaacuacaugcugacguacaacaagguggagaacaugaccccccgggaccucggggccugcaucgacugcuccgcccgccacaucaacgcccagguggccaagagccacaacaucgcgcugaucuggaacgucaaggacuucaugucccugagcgagcagcuccggaagcagauccgcuccgccgccaagaagaacaaccugcccuucaagcugaccugcgccaccacgcgccagguggugaacgucgugaccaccaagaucgcccucaagggcgggugaggacuagucccuguucccagagcccacuuuuuuuucuuuuuuugaaauaaaauagccugucuuucagaucucaaaggcucuuuucagagccaccaaaaaaaaaaaaaaaaaaaaaaaaaaaaaaaaaaaaaaaaaaaaaaaaaaaaaaaaaaaaaaaaaaaaaaaaaaaaaaaaaaaaaaaaaaaaaaaaaaaaa

SEQ ID NO: 20068 - RNA, 6113 nt, Artificial Sequence
  SARS-CoV-2__MT470114.1__non-structural protein 3 (NSP3) mRNA gc
aggagagucccgcagucggcguccagcggcucugcuuguucgugugugugucguugcaggccuuauucaagcuuaccauggcccccaccaaggugaccuucggcgacgacacggucaucgaggugcagggguacaagagcgugaacaucaccuucgagcuggacgagcgcaucgacaagguccucaacgagaagugcuccgccuacaccguggagcugggcaccgaggugaacgaguucgcgugcgucguggccgacgccgugaucaagacgcugcagccggucagcgagcuccugaccccccuggggaucgaccucgacgagugguccauggccaccuacuaccuguucgacgagagcggcgaguucaagcuggccucccacauguacugcagcuucuacccccccgacgaggacgaggaggagggggacugcgaggaggaggaguucgagccguccacccaguacgaguacggcacggaggacgacuaccagggcaagccccucgaguucggggcgaccagcgccgcccugcagcccgaggaggagcaggaggaggacuggcuggacgacgacucccagcagaccgugggccagcaggacgggagcgaggacaaccagaccacgaccauccagaccaucguggagguccagccccagcucgagauggagcugaccccgguggugcagacgaucgaggucaacuccuucagcggcuaccugaagcucaccgacaacguguacaucaagaacgccgacaucguggaggaggcgaagaaggucaagccccccgugguggucaacgccgccaacguguaccugaagcacgggggcggcguggccggggcccugaacaaggcgaccaacaacgccaugcaggucgaguccgacgacuacaucgccaccaacggcccccucaagguggggggcagcugcguccuguccggccacaaccuggccaagcacugccuccacgugguggggccgaacgucaacaagggcgaggacauccagcugcugaagagcgccuacgagaacuucaaccagcacgaggugcuccuggcgccccugcucuccgccgggaucuucggcgccgaccccauccacagccugcgggugugcgucgacacggugcgcaccaacguguaccuggccgucuucgacaagaaccucuacgacaagcugguguccagcuuccuggagaugaagagcgagaagcagguggagcagaagaucgccgagauccccaaggaggaggucaagccguucaucaccgaguccaagcccagcguggagcagcggaagcaggacgacaagaagaucaaggcgugcguggaggaggucaccacgacccucgaggagaccaaguuccugaccgagaaccugcuccuguacaucgacaucaacgggaaccugcaccccgacuccgccacgcucgugagcgacaucgacaucaccuuccugaagaaggacgcccccuacaucgugggcgacgucgugcaggagggcgugcugaccgccgucgugaucccgaccaagaaggccgggggcacgaccgagaugcucgcgaaggcccugcgcaaggugcccaccgacaacuacaucaccacguaccccgggcagggccugaacggguacaccgucgaggaggccaagaccgugcucaagaagugcaaguccgccuucuacauccugcccagcaucaucuccaacgagaagcaggagauccugggcaccgugagcuggaaccuccgggagaugcuggcgcacgccgaggagacccgcaagcugaugccggucugcguggagacgaaggccaucguguccaccauccagcggaaguacaagggcaucaagauccaggagggggucguggacuacggcgcccgcuucuacuucuacaccagcaagaccacgguggccucccugaucaacacccucaacgaccugaacgagacccuggucaccaugccccucggguacgugacgcacggccugaaccuggaggaggcggcccgguacaugcgcagccucaaggugcccgccaccgucuccgugagcucccccgacgccgugaccgccuacaacggguaccugaccagcuccagcaagacgccggaggagcacuucaucgagaccaucucccuggcgggcagcuacaaggacuggagcuacuccggccagagcacccagcucgggaucgaguuccugaagcggggcgacaaguccgucuacuacaccagcaaccccacgaccuuccaccuggacggggaggugaucaccuucgacaaccucaagacccugcugucccuccgcgaggugcggacgaucaaggucuucaccaccguggacaacaucaaccugcacacccagguggucgacaugagcaugacguacggccagcaguucggccccaccuaccuggacggggccgacgugaccaagaucaagccgcacaacucccacgagggcaagaccuucuacgugcuccccaacgacgacacgcugcgcgucgaggccuucgaguacuaccacaccaccgaccccagcuuccuggggcgguacauguccgcccucaaccacaccaagaaguggaaguacccccaggugaacggccugacgagcaucaagugggccgacaacaacugcuaccuggcgaccgcccuccugacccugcagcagaucgagcucaaguucaacccgcccgcccugcaggacgccuacuaccgcgcgcgggccggggaggccgccaacuucugcgcccugauccucgcguacugcaacaagaccgugggcgagcugggcgacguccgcgagacgauguccuaccuguuccagcacgccaaccucgacagcugcaagcgggugcugaacgucgugugcaagaccugcgggcagcagcagaccacccugaagggcguggaggccgucauguacauggggacccucuccuacgagcaguucaagaagggcgugcagauccccugcacgugcgggaagcaggccaccaaguaccuggugcagcaggagagccccuucgucaugauguccgccccgcccgcgcaguacgagcugaagcacggcaccuucaccugcgccagcgaguacacgggcaacuaccagugcgggcacuacaagcacaucaccuccaaggagacccucuacugcaucgacggcgcccugcugaccaagagcagcgaguacaaggggcccaucacggacguguucuacaaggagaacuccuacaccaccaccaucaagcccgugacguacaagcucgacggcgucgugugcaccgagaucgacccgaagcuggacaacuacuacaagaaggacaacagcuacuucaccgagcagcccaucgaccuggugcccaaccagcccuacccgaacgccuccuucgacaacuucaaguucgucugcgacaacaucaaguucgccgacgaccucaaccagcugaccggguacaagaagcccgcgagccgcgagcugaaggugacguucuuccccgaccucaacggcgacguggucgccaucgacuacaagcacuacacccccuccuucaagaagggcgccaagcugcugcacaagccgaucguguggcacgugaacaacgccaccaacaaggcgaccuacaagcccaacacguggugcauccggugccucuggagcaccaagcccgucgagaccuccaacagcuucgacgugcugaaguccgaggacgcccaggggauggacaaccuggccugcgaggaccucaagcccgugagcgaggaggucguggagaacccgaccauccagaaggacgugcuggagugcaacgucaagacgaccgagguggugggcgacaucauccugaagcccgccaacaacucccucaagaucaccgaggaggucgggcacaccgaccugauggccgcguacguggacaacagcucccugacgaucaagaagcccaacgagcucagccgcgugcugggccugaagacccucgccacccacgggcuggccgccgucaacuccgugccgugggacaccaucgccaacuacgcgaagcccuuccugaacaagguggucagcacgaccaccaacaucgugacccgcugccucaaccgggugugcacgaacuacaugcccuacuucuucacccugcugcuccagcugugcaccuucacccgcuccaccaacagccggaucaaggccuccaugcccacgaccaucgccaagaacaccgucaagagcgugggcaaguucugccuggaggccagcuucaacuaccucaaguccccgaacuucagcaagcugaucaacaucaucaucugguuccugcuccuguccgugugccugggcagccucaucuacuccaccgccgcgcuggggguccugaugagcaaccucggcaugcccuccuacugcacgggguaccgcgagggcuaccugaacagcaccaacgugaccaucgccaccuacugcacgggcuccauccccugcagcgugugccuguccgggcucgacagccuggacaccuaccccucccuggagaccauccagaucaccaucagcuccuucaagugggaccucacggccuucggccuggucgccgagugguuccuggccuacauccucuucacccgguucuucuacgugcuggggcuggcggccaucaugcagcucuucuucagcuacuucgccgugcacuucaucuccaacagcuggcugauguggcugaucaucaaccugguccagauggccccgaucuccgcgauggugcgcauguacaucuucuucgccagcuucuacuacguguggaagagcuacguccacgugguggacggcugcaacuccagcaccugcaugaugugcuacaagcggaaccgcgccacccgggucgagugcacgaccaucgugaacgggguccgccgguccuucuacguguacgccaacggcggcaagggguucugcaagcuccacaacuggaacugcgugaacugcgacaccuucugcgccggcagcaccuucaucuccgacgaggucgcgcgcgaccugagccugcaguucaagcggcccaucaaccccacggaccaguccagcuacaucguggacuccgugaccgucaagaacgggagcauccaccucuacuucgacaaggccggccagaagaccuacgagcgccacucccugagccacuucgugaaccuggacaaccuccgggccaacaacaccaaggggucccugcccaucaacgugaucgucuucgacggcaagagcaagugcgaggaguccagcgccaaguccgccagcguguacuacucccagcugaugugccagccgauccuccugcuggaccaggcgcucgugagcgacgucggcgacagcgccgagguggccgugaagauguucgacgccuacgucaacacguucuccagcaccuucaacgugcccauggagaagcugaagacccugguggccaccgcggaggccgagcucgccaagaacgucucccuggacaacgugcugagcacguucaucuccgccgcgcgccagggguucguggacagcgacgucgagaccaaggacgugguggagugccucaagcugucccaccagagcgacaucgaggucaccggcgacuccugcaacaacuacaugcugaccuacaacaagguggagaacaugacgccccgggaccucggggccugcaucgacugcagcgcccgccacaucaacgcccagguggccaagucccacaacaucgcgcugaucuggaacgucaaggacuucaugagccuguccgagcagcuccggaagcagauccgcagcgccgccaagaagaacaaccugcccuucaagcugaccugcgccaccacccgccagguggugaacgucgugacgaccaagaucgcccucaagggcgggugaggacuagucccuguucccagagcccacuuuuuuuucuuuuuuugaaauaaaauagccugucuuucagaucucaaaggcucuuuucagagccaccaaaaaaaaaaaaaaaaaaaaaaaaaaaaaaaaaaaaaaaaaaaaaaaaaaaaaaaaaaaaaaaaaaaaaaaaaaaaaaaaaaaaaaaaaaaaaaaaaaaaa

SEQ ID NO: 20069 - RNA, 6113 nt, Artificial Sequence
  SARS-CoV-2__MT470125.1__non-structural protein 3 (NSP3) mRNA gc
aggagagucccgcagucggcguccagcggcucugcuuguucgugugugugucguugcaggccuuauucaagcuuaccauggcccccaccaaggugaccuucggcgacgacacggucaucgaggugcagggguacaagagcgugaacaucaccuucgagcuggacgagcgcaucgacaagguccucaacgagaagugcuccgccuacaccguggagcugggcaccgaggugaacgaguucgcgugcgucguggccgacgccgugaucaagacgcugcagccggucagcgagcuccugaccccccuggggaucgaccucgacgagugguccauggccaccuacuaccuguucgacgagagcggcgaguucaagcuggccucccacauguacugcagcuucuacccccccgacgaggacgaggaggagggggacugcgaggaggaggaguucgagccguccacccaguacgaguacggcacggaggacgacuaccagggcaagccccucgaguucggggcgaccagcgccgcccugcagcccgaggaggagcaggaggaggacuggcuggacgacgacucccagcagaccgugggccagcaggacgggagcgaggacaaccagaccacgaccauccagaccaucguggagguccagccccagcucgagauggagcugaccccgguggugcagacgaucgaggucaacuccuucagcggcuaccugaagcucaccgacaacguguacaucaagaacgccgacaucguggaggaggcgaagaaggucaagcccaccgugguggucaacgccgccaacguguaccugaagcacgggggcggcguggccggggcccugaacaaggcgaccaacaacgccaugcaggucgaguccgacgacuacaucgccacgaacggcccccucaagguggggggcagcugcguccuguccggccacaaccuggccaagcacugccuccacgugguggggcccaacgucaacaagggcgaggacauccagcugcugaagagcgccuacgagaacuucaaccagcacgaggugcuccuggcgccgcugcucuccgccgggaucuucggcgccgaccccauccacagccugcgggugugcgucgacaccgugcgcaccaacguguaccuggccgucuucgacaagaaccucuacgacaagcugguguccagcuuccuggagaugaagagcgagaagcagguggagcagaagaucgccgagauccccaaggaggaggucaagcccuucaucaccgaguccaagccgagcguggagcagcggaagcaggacgacaagaagaucaaggcgugcguggaggaggucacgaccacccucgaggagaccaaguuccugacggagaaccugcuccuguacaucgacaucaacgggaaccugcaccccgacuccgccacccucgugagcgacaucgacaucaccuuccugaagaaggacgcccccuacaucgugggcgacgucgugcaggagggcgugcugaccgccgucgugauccccacgaagaaggccgggggcaccaccgagaugcucgcgaaggcccugcgcaaggugccgaccgacaacuacaucacgaccuaccccgggcagggccugaacggguacaccgucgaggaggccaagaccgugcucaagaagugcaaguccgccuucuacauccugcccagcaucaucuccaacgagaagcaggagauccugggcaccgugagcuggaaccuccgggagaugcuggcgcacgccgaggagacgcgcaagcugaugcccgucugcguggagaccaaggccaucguguccaccauccagcggaaguacaagggcaucaagauccaggagggggucguggacuacggcgcccgcuucuacuucuacaccagcaagacgaccguggccucccugaucaacacccucaacgaccugaacgagacccuggucacgaugccgcucggguacgugacccacggccugaaccuggaggaggcggcccgguacaugcgcagccucaaggugcccgccaccgucuccgugagcucccccgacgccgugaccgccuacaacggguaccugacgagcuccagcaagacccccgaggagcacuucaucgagaccaucucccuggcgggcagcuacaaggacuggagcuacuccggccagagcacccagcucgggaucgaguuccugaagcggggcgacaaguccgucuacuacacgagcaacccgaccaccuuccaccuggacggggaggugaucaccuucgacaaccucaagacgcugcugucccuccgcgaggugcggaccaucaaggucuucaccaccguggacaacaucaaccugcacacgcagguggucgacaugagcaugaccuacggccagcaguucggccccaccuaccuggacggggccgacgugaccaagaucaagccccacaacucccacgagggcaagacguucuacgugcucccgaacgacgacacccugcgcgucgaggccuucgaguacuaccacaccaccgaccccagcuuccuggggcgguacauguccgcccucaaccacacgaagaaguggaaguacccccaggugaacggccugaccagcaucaagugggccgacaacaacugcuaccuggcgaccgcccuccugacccugcagcagaucgagcucaaguucaaccccccggcccugcaggacgccuacuaccgcgcgcgggccggggaggccgccaacuucugcgcccugauccucgcguacugcaacaagacggugggcgagcugggcgacguccgcgagaccauguccuaccuguuccagcacgccaaccucgacagcugcaagcgggugcugaacgucgugugcaagaccugcgggcagcagcagaccacccugaagggcguggaggccgucauguacauggggacgcucuccuacgagcaguucaagaagggcgugcagauccccugcaccugcgggaagcaggccaccaaguaccuggugcagcaggagagccccuucgucaugauguccgcccccccggcgcaguacgagcugaagcacggcaccuucacgugcgccagcgaguacaccggcaacuaccagugcgggcacuacaagcacaucaccuccaaggagacccucuacugcaucgacggcgcccugcugacgaagagcagcgaguacaaggggcccaucaccgacguguucuacaaggagaacuccuacaccaccacgaucaagcccgugaccuacaagcucgacggcgucgugugcaccgagaucgaccccaagcuggacaacuacuacaagaaggacaacagcuacuucaccgagcagccgaucgaccuggugcccaaccagcccuaccccaacgccuccuucgacaacuucaaguucgucugcgacaacaucaaguucgccgacgaccucaaccagcugacgggguacaagaagccggcgagccgcgagcugaaggugaccuucuuccccgaccucaacggcgacguggucgccaucgacuacaagcacuacacccccuccuucaagaagggcgccaagcugcugcacaagcccaucguguggcacgugaacaacgccaccaacaaggcgacguacaagccgaacaccuggugcauccggugccucuggagcaccaagcccgucgagaccuccaacagcuucgacgugcugaaguccgaggacgcccaggggauggacaaccuggccugcgaggaccucaagcccgugagcgaggaggucguggagaaccccacgauccagaaggacgugcuggagugcaacgucaagaccaccgagguggugggcgacaucauccugaagccggccaacaacucccucaagaucaccgaggaggucgggcacacggaccugauggccgcguacguggacaacagcucccugaccaucaagaagcccaacgagcucagccgcgugcugggccugaagacccucgccacccacgggcuggccgccgucaacuccgugcccugggacacgaucgccaacuacgcgaagccguuccugaacaagguggucagcaccaccaccaacaucgugacgcgcugccucaaccgggugugcaccaacuacaugcccuacuucuucacccugcugcuccagcugugcaccuucacccgcuccacgaacagccggaucaaggccuccaugcccaccaccaucgccaagaacaccgucaagagcgugggcaaguucugccuggaggccagcuucaacuaccucaagucccccaacuucagcaagcugaucaacaucaucaucugguuccugcuccuguccgugugccugggcagccucaucuacuccacggccgcgcuggggguccugaugagcaaccucggcaugccguccuacugcaccggguaccgcgagggcuaccugaacagcaccaacgugaccaucgccacguacugcaccggcuccauccccugcagcgugugccuguccgggcucgacagccuggacaccuaccccucccuggagaccauccagaucacgaucagcuccuucaagugggaccucaccgccuucggccuggucgccgagugguuccuggccuacauccucuucacccgguucuucuacgugcuggggcuggcggccaucaugcagcucuucuucagcuacuucgccgugcacuucaucuccaacagcuggcugauguggcugaucaucaaccugguccagauggcccccaucuccgcgauggugcgcauguacaucuucuucgccagcuucuacuacguguggaagagcuacguccacgugguggacggcugcaacuccagcaccugcaugaugugcuacaagcggaaccgcgccacgcgggucgagugcaccaccaucgugaacgggguccgccgguccuucuacguguacgccaacggcggcaagggguucugcaagcuccacaacuggaacugcgugaacugcgacaccuucugcgccggcagcacguucaucuccgacgaggucgcgcgcgaccugagccugcaguucaagcggccgaucaaccccaccgaccaguccagcuacaucguggacuccgugaccgucaagaacgggagcauccaccucuacuucgacaaggccggccagaagaccuacgagcgccacucccugagccacuucgugaaccuggacaaccuccgggccaacaacacgaaggggucccugcccaucaacgugaucgucuucgacggcaagagcaagugcgaggaguccagcgccaaguccgccagcguguacuacucccagcugaugugccagcccauccuccugcuggaccaggcgcucgugagcgacgccggcgacagcgccgaggucgccgugaagauguucgacgccuacgugaacaccuucuccagcaccuucaacgucccgauggagaagcugaagacccugguggcgacggccgaggccgagcucgccaagaacgugucccuggacaacguccugagcaccuucaucuccgcggcccgccagggguucguggacagcgacguggagaccaaggacgucguggagugccucaagcugucccaccagagcgacaucgaggugaccggcgacuccugcaacaacuacaugcugacguacaacaaggucgagaacaugaccccccgggaccucggggccugcaucgacugcagcgcccgccacaucaacgcccagguggcgaagucccacaacaucgcccugaucuggaacgugaaggacuucaugagccuguccgagcagcuccggaagcagauccgcagcgccgccaagaagaacaaccugcccuucaagcugaccugcgccaccacgcgccaggucgugaacguggucaccaccaagaucgcgcucaagggcgggugaggacuagucccuguucccagagcccacuuuuuuuucuuuuuuugaaauaaaauagccugucuuucagaucucaaaggcucuuuucagagccaccaaaaaaaaaaaaaaaaaaaaaaaaaaaaaaaaaaaaaaaaaaaaaaaaaaaaaaaaaaaaaaaaaaaaaaaaaaaaaaaaaaaaaaaaaaaaaaaaaaaaa

SEQ ID NO: 20070 - RNA, 6113 nt, Artificial Sequence
  SARS-CoV-2__MT470127.1__non-structural protein 3 (NSP3) mRNA gc
aggagagucccgcagucggcguccagcggcucugcuuguucgugugugugucguugcaggccuuauucaagcuuaccauggcccccaccaaggugaccuucggcgacgacacggucaucgaggugcagggguacaagagcgugaacaucaccuucgagcuggacgagcgcaucgacaagguccucaacgagaagugcuccgccuacaccguggagcugggcaccgaggugaacgaguucgcgugcgucguggccgacgccgugaucaagacgcugcagccggucagcgagcuccugaccccccuggggaucgaccucgacgagugguccauggccaccuacuaccuguucgacgagagcggcgaguucaagcuggccucccacauguacugcagcuucuacccccccgacgaggacgaggaggagggggacugcgaggaggaggaguucgagccguccacccaguacgaguacggcacggaggacgacuaccagggcaagccccucgaguucggggcgaccagcgccgcccugcagcccgaggaggagcaggaggaggacuggcuggacgacgacucccagcagaccgugggccagcaggacgggagcgaggacaaccagaccacgaccauccagaccaucguggagguccagccccagcucgagauggagcugaccccgguggugcagacgaucgaggucaacuccuucagcggcuaccugaagcucaccgacaacguguacaucaagaacgccgacaucguggaggaggcgaagaaggucaagcccaccgugguggucaacgccgccaacguguaccugaagcacgggggcggcguggccggggcccugaacaaggcgaccaacaacgccaugcaggucgaguccgacgacuacaucgccacgaacggcccccucaagguggggggcagcugcguccuguccggccacaaccuggccaagcacugccuccacgugguggggcccaacgucaacaagggcgaggacauccagcugcugaagagcgccuacgagaacuucaaccagcacgaggugcuccuggcgccgcugcucuccgccgggaucuucggcgccgaccccauccacagccugcgggugugcgucgacaccgugcgcaccaacguguaccuggccgucuucgacaagaaccucuacgacaagcugguguccagcuuccuggagaugaagagcgagaagcagguggagcagaagaucgccgagauccccaaggaggaggucaagcccuucaucaccgaguccaagccgagcguggagcagcggaagcaggacgacaagaagaucaaggcgugcguggaggaggucacgaccacccucgaggagaccaaguuccugacggagaaccugcuccuguacaucgacaucaacgggaaccugcaccccgacuccgccacccucgugagcgacaucgacaucaccuuccugaagaaggacgcccccuacaucgugggcgacgucgugcaggagggcgugcugaccgccgucgugauccccacgaagaaggccgggggcaccaccgagaugcucgcgaaggcccugcgcaaggugccgaccgacaacuacaucacgaccuaccccgggcagggccugaacggguacaccgucgaggaggccaagaccgugcucaagaagugcaaguccgccuucuacauccugcccagcaucaucuccaacgagaagcaggagauccugggcaccgugagcuggaaccuccgggagaugcuggcgcacgccgaggagacgcgcaagcugaugcccgucugcguggagaccaaggccaucguguccaccauccagcggaaguacaagggcaucaagauccaggagggggucguggacuacggcgcccgcuucuacuucuacaccagcaagacgaccguggccucccugaucaacacccucaacgaccugaacgagacccuggucacgaugccgcucggguacgugacccacggccugaaccuggaggaggcggcccgguacaugcgcagccucaaggugcccgccaccgucuccgugagcucccccgacgccgugaccgccuacaacggguaccugacgagcuccagcaagacccccgaggagcacuucaucgagaccaucucccuggcgggcagcuacaaggacuggagcuacuccggccagagcacccagcucgggaucgaguuccugaagcggggcgacaaguccgucuacuacacgagcaacccgaccaccuuccaccuggacggggaggugaucaccuucgacaaccucaagacgcugcugucccuccgcgaggugcggaccaucaaggucuucaccaccguggacaacaucaaccugcacacgcagguggucgacaugagcaugaccuacggccagcaguucggccccaccuaccuggacggggccgacgugaccaagaucaagccccacaacucccacgagggcaagacguucuacgugcucccgaacgacgacacccugcgcgucgaggccuucgaguacuaccacaccaccgaccccagcuuccuggggcgguacauguccgcccucaaccacacgaagaaguggaaguacccccaggugaacggccugaccagcaucaagugggccgacaacaacugcuaccuggcgaccgcccuccugacccugcagcagaucgagcucaaguucaaccccccggcccugcaggacgccuacuaccgcgcgcgggccggggaggccgccaacuucugcgcccugauccucgcguacugcaacaagacggugggcgagcugggcgacguccgcgagaccauguccuaccuguuccagcacgccaaccucgacagcugcaagcgggugcugaacgucgugugcaagaccugcgggcagcagcagaccacccugaagggcguggaggccgucauguacauggggacgcucuccuacgagcaguucaagaagggcgugcagauccccugcaccugcgggaagcaggccaccaaguaccuggugcagcaggagagccccuucgucaugauguccgcccccccggcgcaguacgagcugaagcacggcaccuucacgugcgccagcgaguacaccggcaacuaccagugcgggcacuacaagcacaucaccuccaaggagacccucuacugcaucgacggcgcccugcugacgaagagcagcgaguacaaggggcccaucaccgacguguucuacaaggagaacuccuacaccaccacgaucaagcccgugaccuacaagcucgacggcgucgugugcaccgagaucgaccccaagcuggacaacuacuacaagaaggacaacagcuacuucaccgagcagccgaucgaccuggugcccaagcagcccuaccccaacgccuccuucgacaacuucaaguucgucugcgacaacaucaaguucgccgacgaccucaaccagcugacgggguacaagaagccggcgagccgcgagcugaaggugaccuucuuccccgaccucaacggcgacguggucgccaucgacuacaagcacuacacccccuccuucaagaagggcgccaagcugcugcacaagcccaucguguggcacgugaacaacgccaccaacaaggcgacguacaagccgaacaccuggugcauccggugccucuggagcaccaagcccgucgagaccuccaacagcuucgacgugcugaaguccgaggacgcccaggggauggacaaccuggccugcgaggaccucaagcccgugagcgaggaggucguggagaaccccacgauccagaaggacgugcuggagugcaacgucaagaccaccgagguggugggcgacaucauccugaagccggccaacaacucccucaagaucaccgaggaggucgggcacacggaccugauggccgcguacguggacaacagcucccugaccaucaagaagcccaacgagcucagccgcgugcugggccugaagacccucgccacccacgggcuggccgccgucaacuccgugcccugggacacgaucgccaacuacgcgaagccguuccugaacaagguggucagcaccaccaccaacaucgugacgcgcugccucaaccgggugugcaccaacuacaugcccuacuucuucacccugcugcuccagcugugcaccuucacccgcuccacgaacagccggaucaaggccuccaugcccaccaccaucgccaagaacaccgucaagagcgugggcaaguucugccuggaggccagcuucaacuaccucaagucccccaacuucagcaagcugaucaacaucaucaucugguuccugcuccuguccgugugccugggcagccucaucuacuccacggccgcgcuggggguccugaugagcaaccucggcaugccguccuacugcaccggguaccgcgagggcuaccugaacagcaccaacgugaccaucgccacguacugcaccggcuccauccccugcagcgugugccuguccgggcucgacagccuggacaccuaccccucccuggagaccauccagaucacgaucagcuccuucaagugggaccucaccgccuucggccuggucgccgagugguuccuggccuacauccucuucacccgguucuucuacgugcuggggcuggcggccaucaugcagcucuucuucagcuacuucgccgugcacuucaucuccaacagcuggcugauguggcugaucaucaaccugguccagauggcccccaucuccgcgauggugcgcauguacaucuucuucgccagcuucuacuacguguggaagagcuacguccacgugguggacggcugcaacuccagcaccugcaugaugugcuacaagcggaaccgcgccacgcgggucgagugcaccaccaucgugaacgggguccgccgguccuucuacguguacgccaacggcggcaagggguucugcaagcuccacaacuggaacugcgugaacugcgacaccuucugcgccggcagcacguucaucuccgacgaggucgcgcgcgaccugagccugcaguucaagcggccgaucaaccccaccgaccaguccagcuacaucguggacuccgugaccgucaagaacgggagcauccaccucuacuucgacaaggccggccagaagaccuacgagcgccacucccugagccacuucgugaaccuggacaaccuccgggccaacaacacgaaggggucccugcccaucaacgugaucgucuucgacggcaagagcaagugcgaggaguccagcgccaaguccgccagcguguacuacucccagcugaugugccagcccauccuccugcuggaccaggcgcucgugagcgacgucggcgacagcgccgagguggccgugaagauguucgacgccuacgucaacaccuucuccagcaccuucaacgugccgauggagaagcugaagacccugguggccacggcggaggccgagcucgccaagaacgucucccuggacaacgugcugagcaccuucaucuccgccgcgcgccagggguucguggacagcgacgucgagaccaaggacgugguggagugccucaagcugucccaccagagcgacaucgaggucaccggcgacuccugcaacaacuacaugcugacguacaacaagguggagaacaugaccccccgggaccucggggccugcaucgacugcagcgcccgccacaucaacgcccagguggccaagucccacaacaucgcgcugaucuggaacgucaaggacuucaugagccuguccgagcagcuccggaagcagauccgcagcgccgccaagaagaacaaccugcccuucaagcugaccugcgccaccacgcgccagguggugaacgucgugaccaccaagaucgcccucaagggcgggugaggacuagucccuguucccagagcccacuuuuuuuucuuuuuuugaaauaaaauagccugucuuucagaucucaaaggcucuuuucagagccaccaaaaaaaaaaaaaaaaaaaaaaaaaaaaaaaaaaaaaaaaaaaaaaaaaaaaaaaaaaaaaaaaaaaaaaaaaaaaaaaaaaaaaaaaaaaaaaaaaaaaa

SEQ ID NO: 20071 - RNA, 6113 nt, Artificial Sequence
  SARS-CoV-2__MT470134.1__non-structural protein 3 (NSP3) mRNA gc
aggagagucccgcagucggcguccagcggcucugcuuguucgugugugugucguugcaggccuuauucaagcuuaccauggcccccaccaaggugaccuucggcgacgacacggucaucgaggugcagggguacaagagcgugaacaucaccuucgagcuggacgagcgcaucgacaagguccucaacgagaagugcuccgccuacaccguggagcugggcaccgaggugaacgaguucgcgugcgucguggccgacgccgugaucaagacgcugcagccggucagcgagcuccugaccccccuggggaucgaccucgacgagugguccauggccaccuacuaccuguucgacgagagcggcgaguucaagcuggccucccacauguacugcagcuucuacccccccgacgaggacgaggaggagggggacugcgaggaggaggaguucgagccguccacccaguacgaguacggcacggaggacgacuaccagggcaagccccucgaguucggggcgaccagcgccgcccugcagcccgaggaggagcaggaggaggacuggcuggacgacgacucccagcagaccgugggccagcaggacgggagcgaggacaaccagaccacgaccauccagaccaucguggagguccagccccagcucgagauggagcugaccccgguggugcagacgaucgaggucaacuccuucagcggcuaccugaagcucaccgacaacguguacaucaagaacgccgacaucguggaggaggcgaagaaggucaagcccaccgugguggucaacgccgccaacguguaccugaagcacgggggcggcguggccggggcccugaacaaggcgaccaacaacgccaugcaggucgaguccgacgacuacaucgccacgaacggcccccucaagguggggggcagcugcguccuguccggccacaaccuggccaagcacugccuccacgugguggggcccaacgucaacaagggcgaggacauccagcugcugaagagcgccuacgagaacuucaaccagcacgaggugcuccuggcgccgcugcucuccgccgggaucuucggcgccgaccccauccacagccugcgggugugcgucgacaccgugcgcaccaacguguaccuggccgucuucgacaagaaccucuacgacaagcugguguccagcuuccuggagaugaagagcgagaagcagguggagcagaagaucgccgagauccccaaggaggaggucaagcccuucaucaccgaguccaagccgagcguggagcagcggaagcaggacgacaagaagaucaaggcgugcguggaggaggucacgaccacccucgaggagaccaaguuccugacggagaaccugcuccuguacaucgacaucaacgggaaccugcaccccgacuccgccacccucgugagcgacaucgacaucaccuuccugaagaaggacgcccccuacaucgugggcgacgucgugcaggagggcgugcugaccgccgucgugauccccacgaagaaggccgggggcaccaccgagaugcucgcgaaggcccugcgcaaggugccgaccgacaacuacaucacgaccuaccccgggcagggccugaacggguacaccgucgaggaggccaagaccgugcucaagaagugcaaguccgccuucuacauccugcccagcaucaucuccaacgagaagcaggagauccugggcaccgugagcuggaaccuccgggagaugcuggcgcacgccgaggagacgcgcaagcugaugcccgucugcguggagaccaaggccaucguguccaccauccagcggaaguacaagggcaucaagauccaggagggggucguggacuacggcgcccgcuucuacuucuacaccagcaagacgaccguggccucccugaucaacacccucaacgaccugaacgagacccuggucacgaugccgcucggguacgugacccacggccugaaccuggaggaggcggcccgguacaugcgcagccucaaggugcccgccaccgucuccgugagcucccccgacgccgugaccgccuacaacggguaccugacgagcuccagcaagacccccgaggagcacuucaucgagaccaucucccuggcgggcagcuacaaggacuggagcuacuccggccagagcacccagcucgggaucgaguuccugaagcggggcgacaaguccgucuacuacacgagcaacccgaccaccuuccaccuggacggggaggugaucaccuucgacaaccucaagacgcugcugucccuccgcgaggugcggaccaucaaggucuucaccaccguggacaacaucaaccugcacacgcagguggucgacaugagcaugaccuacggccagcaguucggccccaccuaccuggacggggccgacgugaccaagaucaagccccacaacucccacgagggcaagacguucuacgugcucccgaacgacgacacccugcgcgucgaggccuucgaguacuaccacaccaccgaccccagcuuccuggggcgguacauguccgcccucaaccacacgaagaaguggaaguacccccaggugaacggccugaccagcaucaagugggccgacaacaacugcuaccuggcgaccgcccuccugacccugcagcagaucgagcucaaguucaaccccccggcccugcaggacgccuacuaccgcgcgcgggccggggaggccgccaacuucugcgcccugauccucgcguacugcaacaagacggugggcgagcugggcgacguccgcgagaccauguccuaccuguuccagcacgccaaccucgacagcugcaagcgggugcugaacgucgugugcaagaccugcgggcagcagcagaccacccugaagggcguggaggccgucauguacauggggacgcucuccuacgagcaguucaagaagggcgugcagauccccugcaccugcgggaagcaggccaccaaguaccuggugcagcaggagagccccuucgucaugauguccgcccccccggcgcaguacgagcugaagcacggcaccuucacgugcgccagcgaguacaccggcaacuaccagugcgggcacuacaagcacaucaccuccaaggagacccucuacugcaucgacggcgcccugcugacgaagagcagcgaguacaaggggcccaucaccgacguguucuacaaggagaacuccuacaccaccacgaucaagcccgugaccuacaagcucgacggcgucgugugcaccgagaucgaccccaagcuggacaacuacuacaagaaggacaacagcuacuucaccgagcagccgaucgaccuggugcccaaccagcccuaccccaacgccuccuucgacaacuucaaguucgucugcgacaacaucaaguucgccgacgaccucaaccagcugacgggguacaagaagccggcgagccgcgagcugaaggugaccuucuuccccgaccucaacggcgacguggucgccaucgacuacaagcacuacacccccuccuucaagaagggcgccaagcugcugcacaagcccaucguguggcacgugaacaacgccaccaacaaggcgacguacaagccgaacaccuggugcauccggugccucuggagcaccaagcccgucgagaccuccaacagcuucgacgugcugaaguccgaggacgcccaggggauggacaaccuggccugcgaggaccucaagcccgugagcgaggaggucguggagaaccccacgauccagaaggacgugcuggagugcaacgucaagaccaccgagguggugggcgacaucauccugaagccggccaacaacucccucaagaucaccgaggaggucgggcacacggaccugauggccgcguacguggacaacagcucccugaccaucaagaagcccaacgagcucagccgcgugcugggccugaagacccucgccacccacgggcuggccgccgucaacuccgugcccugggacacgaucgccaacuacgcgaagccguuccugaacaagguggucagcaccaccaccaacaucgugacgcgcugccucaaccgggugugcaccaacuacaugcccuacuucuucacccugcugcuccagcugugcaccuucacccgcuccacgaacagccggaucaaggccuccaugcccaccaccaucgccaagaacaccgucaagagcgugggcaaguucugccuggaggccagcuucaacuaccucaagucccccaacuucagcaagcugaucaacaucaucaucugguuccugcuccugaucgugugccugggcucccucaucuacagcacggccgcgcuggggguccugauguccaaccucggcaugccgagcuacugcaccggguaccgcgagggcuaccugaacuccaccaacgugaccaucgccacguacugcaccggcagcauccccugcuccgugugccugagcgggcucgacucccuggacaccuaccccagccuggagaccauccagaucacgaucuccagcuucaagugggaccucaccgccuucggccuggucgccgagugguuccuggccuacauccucuucacccgguucuucuacgugcuggggcuggcggccaucaugcagcucuucuucuccuacuucgccgugcacuucaucagcaacuccuggcugauguggcugaucaucaaccugguccagauggcccccaucagcgcgauggugcgcauguacaucuucuucgccuccuucuacuacguguggaagagcuacguccacgugguggacggcugcaacagcuccaccugcaugaugugcuacaagcggaaccgcgccacgcgggucgagugcaccaccaucgugaacgggguccgccggagcuucuacguguacgccaacggcggcaagggguucugcaagcuccacaacuggaacugcgugaacugcgacaccuucugcgccggcuccacguucaucagcgacgaggucgcgcgcgaccugucccugcaguucaagcggccgaucaaccccaccgaccagagcuccuacaucguggacagcgugaccgucaagaacggguccauccaccucuacuucgacaaggccggccagaagaccuacgagcgccacagccugucccacuucgugaaccuggacaaccuccgggccaacaacacgaaggggagccugcccaucaacgugaucgucuucgacggcaaguccaagugcgaggagagcuccgccaagagcgccuccguguacuacagccagcugaugugccagcccauccuccugcuggaccaggcgcucguguccgacgucggcgacagcgccgagguggccgugaagauguucgacgccuacgucaacaccuucagcuccaccuucaacgugccgauggagaagcugaagacccugguggccacggcggaggccgagcucgccaagaacgucagccuggacaacgugcuguccaccuucaucagcgccgcgcgccagggguucguggacuccgacgucgagaccaaggacgugguggagugccucaagcugagccaccaguccgacaucgaggucaccggcgacagcugcaacaacuacaugcugacguacaacaagguggagaacaugaccccccgggaccucggggccugcaucgacugcuccgcccgccacaucaacgcccagguggccaagagccacaacaucgcgcugaucuggaacgucaaggacuucaugucccugagcgagcagcuccggaagcagauccgcuccgccgccaagaagaacaaccugcccuucaagcugaccugcgccaccacgcgccagguggugaacgucgugaccaccaagaucgcccucaagggcgggugaggacuagucccuguucccagagcccacuuuuuuuucuuuuuuugaaauaaaauagccugucuuucagaucucaaaggcucuuuucagagccaccaaaaaaaaaaaaaaaaaaaaaaaaaaaaaaaaaaaaaaaaaaaaaaaaaaaaaaaaaaaaaaaaaaaaaaaaaaaaaaaaaaaaaaaaaaaaaaaaaaaaa

SEQ ID NO: 20072 - RNA, 6113 nt, Artificial Sequence
  SARS-CoV-2__MT459840.1__non-structural protein 3 (NSP3) mRNA gc
aggagagucccgcagucggcguccagcggcucugcuuguucgugugugugucguugcaggccuuauucaagcuuaccauggcccccaccaaggugaccuucggcgacgacacggucaucgaggugcagggguacaagagcgugaacaucaccuucgagcuggacgagcgcaucgacaagguccucaacgagaagugcuccgccuacaccguggagcugggcaccgaggugaacgaguucgcgugcgucguggccgacgccgugaucaagacgcugcagccggucagcgagcuccugaccccccuggggaucgaccucgacgagugguccauggccaccuacuaccuguucgacgagagcggcgaguucaagcuggccucccacauguacugcagcuucuacccccccgacgaggacgaggaggagggggacugcgaggaggaggaguucgagccguccacccaguacgaguacggcacggaggacgacuaccagggcaagccccucgaguucggggcgaccagcgccgcccugcagcccgaggaggagcaggaggaggacuggcuggacgacgacucccagcagaccgugggccagcaggacgggagcgaggacaaccagaccacgaccauccagaccaucguggagguccagccccagcucgagauggagcugaccccgguggugcagacgaucgaggucaacuccuucagcggcuaccugaagcucaccgacaacguguacaucaagaacgccgacaucguggaggaggcgaagaaggucaagcccaccgugguggucaacgccgccaacguguaccugaagcacgggggcggcguggccggggcccugaacaaggcgaccaacaacgccaugcaggucgaguccgacgacuacaucgccacgaacggcccccucaagguggggggcagcugcguccuguccggccacaaccuggccaagcacugccuccacgugguggggcccaacgucaacaagggcgaggacauccagcugcugaagagcgccuacgagaacuucaaccagcacgaggugcuccuggcgccgcugcucuccgccgggaucuucggcgccgaccccauccacagccugcgggugugcgucgacaccgugcgcaccaacguguaccuggccgucuucgacaagaaccucuacgacaagcugguguccagcuuccuggagaugaagagcgagaagcagguggagcagaagaucgccgagauccccaaggaggaggucaagcccuucaucaccgaguccaagccgagcguggagcagcggaagcaggacgacaagaagaucaaggcgugcguggaggaggucacgaccacccucgaggagaccaaguuccugacggagaaccugcuccuguacaucgacaucaacgggaaccugcaccccgacuccgccacccucgugagcgacaucgacaucaccuuccugaagaaggacgcccccuacaucgugggcgacgucgugcaggagggcgugcugaccgccgucgugauccccacgaagaaggccgggggcaccaccgagaugcucgcgaaggcccugcgcaaggugccgaccgacaacuacaucacgaccuaccccgggcagggccugaacggguacaccgucgaggaggccaagaccgugcucaagaagugcaaguccgccuucuacauccugcccagcaucaucuccaacgagaagcaggagauccugggcaccgugagcuggaaccuccgggagaugcuggcgcacgccgaggagacgcgcaagcugaugcccgucugcguggagaccaaggccaucguguccaccauccagcggaaguacaagggcaucaagauccaggagggggucguggacuacggcgcccgcuucuacuucuacaccagcaagacgaccguggccucccugaucaacacccucaacgaccugaacgagacccuggucacgaugccgcucggguacgugacccacggccugaaccuggaggaggcggcccgguacaugcgcagccucaaggugcccgccaccgucuccgugagcucccccgacgccgugaccgccuacaacggguaccugacgagcuccagcaagacccccgaggagcacuucaucgagaccaucucccuggcgggcagcuacaaggacuggagcuacuccggccagagcacccagcucgggaucgaguuccugaagcggggcgacaaguccgucuacuacacgagcaacccgaccaccuuccaccuggacggggaggugaucaccuucgacaaccucaagacgcugcugucccuccgcgaggugcggaccaucaaggucuucaccaccguggacaacaucaaccugcacacgcagguggucgacaugagcaugaccuacggccagcaguucggccccaccuaccuggacggggccgacgugaccaagaucaagccccacaacucccacgagggcaagacguucuacgugcucccgaacgacgacacccugcgcgucgaggccuucgaguacuaccacaccaccgaccccagcuuccuggggcgguacauguccgcccucaaccacacgaagaacuggaaguacccccaggugaacggccugaccagcaucaagugggccgacaacaacugcuaccuggcgaccgcccuccugacccugcagcagaucgagcucaaguucaaccccccggcccugcaggacgccuacuaccgcgcgcgggccggggaggccgccaacuucugcgcccugauccucgcguacugcaacaagacggugggcgagcugggcgacguccgcgagaccauguccuaccuguuccagcacgccaaccucgacagcugcaagcgggugcugaacgucgugugcaagaccugcgggcagcagcagaccacccugaagggcguggaggccgucauguacauggggacgcucuccuacgagcaguucaagaagggcgugcagauccccugcaccugcgggaagcaggccaccaaguaccuggugcagcaggagagccccuucgucaugauguccgcccccccggcgcaguacgagcugaagcacggcaccuucacgugcgccagcgaguacaccggcaacuaccagugcgggcacuacaagcacaucaccuccaaggagacccucuacugcaucgacggcgcccugcugacgaagagcagcgaguacaaggggcccaucaccgacguguucuacaaggagaacuccuacaccaccacgaucaagcccgugaccuacaagcucgacggcgucgugugcaccgagaucgaccccaagcuggacaacuacuacaagaaggacaacagcuacuucaccgagcagccgaucgaccuggugcccaaccagcccuaccccaacgccuccuucgacaacuucaaguucgucugcgacaacaucaaguucgccgacgaccucaaccagcugacgggguacaagaagccggcgagccgcgagcugaaggugaccuucuuccccgaccucaacggcgacguggucgccaucgacuacaagcacuacacccccuccuucaagaagggcgccaagcugcugcacaagcccaucguguggcacgugaacaacgccaccaacaaggcgacguacaagccgaacaccuggugcauccggugccucuggagcaccaagcccgucgagaccuccaacagcuucgacgugcugaaguccgaggacgcccaggggauggacaaccuggccugcgaggaccucaagcccgugagcgaggaggucguggagaaccccacgauccagaaggacgugcuggagugcaacgucaagaccaccgagguggugggcgacaucauccugaagccggccaacaacucccucaagaucaccgaggaggucgggcacacggaccugauggccgcguacguggacaacagcucccugaccaucaagaagcccaacgagcucagccgcgugcugggccugaagacccucgccacccacgggcuggccgccgucaacuccgugcccugggacacgaucgccaacuacgcgaagccguuccugaacaagguggucagcaccaccaccaacaucgugacgcgcugccucaaccgggugugcaccaacuacaugcccuacuucuucacccugcugcuccagcugugcaccuucacccgcuccacgaacagccggaucaaggccuccaugcccaccaccaucgccaagaacaccgucaagagcgugggcaaguucugccuggaggccagcuucaacuaccucaagucccccaacuucagcaagcugaucaacaucaucaucugguuccugcuccuguccgugugccugggcagccucaucuacuccacggccgcgcuggggguccugaugagcaaccucggcaugccguccuacugcaccggguaccgcgagggcuaccugaacagcaccaacgugaccaucgccacguacugcaccggcuccauccccugcagcgugugccuguccgggcucgacagccuggacaccuaccccucccuggagaccauccagaucacgaucagcuccuucaagugggaccucaccgccuucggccuggucgccgagugguuccuggccuacauccucuucacccgguucuucuacgugcuggggcuggcggccaucaugcagcucuucuucagcuacuucgccgugcacuucaucuccaacagcuggcugauguggcugaucaucaaccugguccagauggcccccaucuccgcgauggugcgcauguacaucuucuucgccagcuucuacuacguguggaagagcuacguccacgugguggacggcugcaacuccagcaccugcaugaugugcuacaagcggaaccgcgccacgcgggucgagugcaccaccaucgugaacgggguccgccgguccuucuacguguacgccaacggcggcaagggguucugcaagcuccacaacuggaacugcgugaacugcgacaccuucugcgccggcagcacguucaucuccgacgaggucgcgcgcgaccugagccugcaguucaagcggccgaucaaccccaccgaccaguccagcuacaucguggacuccgugaccgucaagaacgggagcauccaccucuacuucgacaaggccggccagaagaccuacgagcgccacucccugagccacuucgugaaccuggacaaccuccgggccaacaacacgaaggggucccugcccaucaacgugaucgucuucgacggcaagagcaagugcgaggaguccagcgccaaguccgccagcguguacuacucccagcugaugugccagcccauccuccugcuggaccaggcgcucgugagcgacgucggcgacagcgccgagguggccgugaagauguucgacgccuacgucaacaccuucuccagcaccuucaacgugccgauggagaagcugaagacccugguggccacggcggaggccgagcucgccaagaacgucucccuggacaacgugcugagcaccuucaucuccgccgcgcgccagggguucguggacagcgacgucgagaccaaggacgugguggagugccucaagcugucccaccagagcgacaucgaggucaccggcgacuccugcaacaacuacaugcugacguacaacaagguggagaacaugaccccccgggaccucggggccugcaucgacugcagcgcccgccacaucaacgcccagguggccaagucccacaacaucgcgcugaucuggaacgucaaggacuucaugagccuguccgagcagcuccggaagcagauccgcagcgccgccaagaagaacaaccugcccuucaagcugaccugcgccaccacgcgccagguggugaacgucgugaccaccaagaucgcccucaagggcgggugaggacuagucccuguucccagagcccacuuuuuuuucuuuuuuugaaauaaaauagccugucuuucagaucucaaaggcucuuuucagagccaccaaaaaaaaaaaaaaaaaaaaaaaaaaaaaaaaaaaaaaaaaaaaaaaaaaaaaaaaaaaaaaaaaaaaaaaaaaaaaaaaaaaaaaaaaaaaaaaaaaaaa

SEQ ID NO: 20073 - RNA, 6113 nt, Artificial Sequence
  SARS-CoV-2__MT459849.1__non-structural protein 3 (NSP3) mRNA gc
aggagagucccgcagucggcguccagcggcucugcuuguucgugugugugucguugcaggccuuauucaagcuuaccauggcccccaccaaggugaccuucggcgacgacacggucaucgaggugcagggguacaagagcgugaacaucaccuucgagcuggacgagcgcaucgacaagguccucaacgagaagugcuccgccuacaccguggagcugggcaccgaggugaacgaguucgcgugcgucguggccgacgccgugaucaagacgcugcagccggucagcgagcuccugaccccccuggggaucgaccucgacgagugguccauggccaccuacuaccuguucgacgagagcggcgaguucaagcuggccucccacauguacugcagcuucuacccccccgacgaggacgaggaggagggggacugcgaggaggaggaguucgagccguccacccaguacgaguacggcacggaggacgacuaccagggcaagccccucgaguucggggcgaccagcgccgcccugcagcccgaggaggagcaggaggaggacuggcuggacgacgacucccagcagaccgugggccagcaggacgggagcgaggacaaccagaccacgaccauccagaccaucguggagguccagccccagcucgagauggagcugaccccgguggugcagacgaucgaggucaacuccuucagcggcuaccugaagcucaccgacaacguguacaucaagaacgccgacaucguggaggaggcgaagaaggucaagcccaccgugguggucaacgccgccaacguguaccugaagcacgggggcggcguggccggggcccugaacaaggcgaccaacaacgccaugcaggucgaguccgacgacuacaucgccacgaacggcccccucaagguggggggcagcugcguccuguccggccacaaccuggccaagcacugccuccacgugguggggcccaacgucaacaagggcgaggacauccagcugcugaagagcgccuacgagaacuucaaccagcacgaggugcuccuggcgccgcugcucuccgccgggaucuucggcgccgaccccauccacagccugcgggugugcgucgacaccgugcgcaccaacguguaccuggccgucuucgacaagaaccucuacgacaagcugguguccagcuuccuggagaugaagagcgagaagcagguggagcagaagaucgccgagauccccaaggaggaggucaagcccuucaucaccgaguccaagccgagcguggagcagcggaagcaggacgacaagaagaucaaggcgugcguggaggaggucacgaccacccucgaggagaccaaguuccugacggagaaccugcuccuguacaucgacaucaacgggaaccugcaccccgacuccgccacccucgugagcgacaucgacaucaccuuccugaagaaggacgcccccuacaucgugggcgacgucgugcaggagggcgugcugaccgccgucgugauccccacgaagaaggccgggggcaccaccgagaugcucgcgaaggcccugcgcaaggugccgaccgacaacuacaucacgaccuaccccgggcagggccugaacggguacaccgucgaggaggccaagaccgugcucaagaagugcaaguccgccuucuacauccugcccagcaucaucuccaacgagaagcaggagauccugggcaccgugagcuggaaccuccgggagaugcuggcgcacgccgaggagacgcgcaagcugaugcccgucugcguggagaccaaggccaucguguccaccauccagcggaaguacaagggcaucaagauccaggagggggucguggacuacggcgcccgcuucuacuucuacaccagcaagacgaccguggccucccugaucaacacccucaacgaccugaacgagacccuggucacgaugccgcucggguacgugacccacggccugaaccuggaggaggcggcccgguacaugcgcagccucaaggugcccgccaccgucuccgugagcucccccgacgccgugaccgccuacaacggguaccugacgagcuccagcaagacccccgaggagcacuucaucgagaccaucucccuggcgggcagcuacaaggacuggagcuacuccggccagagcacccagcucgggaucgaguuccugaagcggggcgacaaguccgucuacuacacgagcaacccgaccaccuuccaccuggacggggaggugaucaccuucgacaaccucaagacgcugcugucccuccgcgaggugcggaccaucaaggucuucaccaccguggacaacaucaaccugcacacgcagguggucgacaugagcaugaccuacggccagcaguucggccccaccuaccuggacggggccgacgugaccaagaucaagccccacaacucccacgagggcaagacguucuacgugcucccgaacgacgacacccugcgcgucgaggccuucgaguacuaccacaccaccgaccccagcuuccuggggcgguacauguccgcccucaaccacacgaagaaguggaaguacccccaggugaacggccugaccagcaucaagugggccgacaacaacugcuaccuggcgaccgcccuccugacccugcagcagaucgagcucaaguucaaccccccggcccugcaggacgccuacuaccgcgcgcgggccggggaggccgccaacuucugcgcccugauccucgcguacugcaacaagacggugggcgagcugggcgacguccgcgagaccauguccuaccuguuccagcacgccaaccucgacagcugcaagcgggugcugaacgucgugugcaagaccugcgggcagcagcagaccacccugaagggcguggaggccgucauguacauggggacgcucuccuacgagcaguucaagaagggcgugcagauccccugcaccugcgggaagcaggccaccaaguaccuggugcagcaggagagccccuucgucaugauguccgcccccccggcgcaguacgagcugaagcacggcaccuucacgugcgccagcgaguacaccggcaacuaccagugcgggcacuacaagcacaucaccuccaaggagacccucuacugcaucgacggcgcccugcugacgaagagcagcgaguacaaggggcccaucaccgacguguucuacaaggagaacuccuacaccaccacgaucaagcccgugaccuacaagcucgacggcgucgugugcaccgagaucgaccccaagcuggacaacuacuacaagaaggacaacagcuacuucaccgagcagccgaucgaccuggugcccaaccagcccuaccccaacgccuccuucgacaacuucaaguucgucugcgacaacaucaaguucgccgacgaccucaaccagcugacgggguacaagaagccggcgagccgcgagcugaaggugaccuucuuccccgaccucaacggcgacguggucgccaucgacuacaagcacuacacccccuccuucaagaagggcgccaagcugcugcacaagcccaucguguggcacgugaacaacgccaccaacaaggcgacguacaagccgaacaccuggugcauccggugccucuggagccgcaagcccgucgagaccuccaacagcuucgacgugcugaaguccgaggacgcccaggggauggacaaccuggccugcgaggaccucaagcccgugagcgaggaggucguggagaaccccaccauccagaaggacgugcuggagugcaacgucaagacgaccgagguggugggcgacaucauccugaagccggccaacaacucccucaagaucaccgaggaggucgggcacaccgaccugauggccgcguacguggacaacagcucccugacgaucaagaagcccaacgagcucagccgcgugcugggccugaagacccucgccacccacgggcuggccgccgucaacuccgugcccugggacaccaucgccaacuacgcgaagccguuccugaacaagguggucagcacgaccaccaacaucgugacccggugccucaaccgcgugugcacgaacuacaugcccuacuucuucacccugcugcuccagcugugcaccuucacccgguccaccaacagccgcaucaaggccuccaugcccacgaccaucgccaagaacaccgucaagagcgugggcaaguucugccuggaggccagcuucaacuaccucaagucccccaacuucagcaagcugaucaacaucaucaucugguuccugcuccuguccgugugccugggcagccucaucuacuccaccgccgcgcuggggguccugaugagcaaccucggcaugccguccuacugcacgggguaccgggagggcuaccugaacagcaccaacgugaccaucgccaccuacugcacgggcuccauccccugcagcgugugccuguccgggcucgacagccuggacaccuaccccucccuggagaccauccagaucaccaucagcuccuucaagugggaccucacggccuucggccuggucgccgagugguuccuggccuacauccucuucacccgcuucuucuacgugcuggggcuggcggccaucaugcagcucuucuucagcuacuucgccgugcacuucaucuccaacagcuggcugauguggcugaucaucaaccugguccagauggcccccaucuccgcgauggugcggauguacaucuucuucgccagcuucuacuacguguggaagagcuacguccacgugguggacggcugcaacuccagcaccugcaugaugugcuacaagcgcaaccgggccacccgcgucgagugcacgaccaucgugaacgggguccggcgcuccuucuacguguacgccaacggcggcaagggguucugcaagcuccacaacuggaacugcgugaacugcgacaccuucugcgccggcagcaccuucaucuccgacgaggucgcgcgggaccugagccugcaguucaagcgcccgaucaaccccacggaccaguccagcuacaucguggacuccgugaccgucaagaacgggagcauccaccucuacuucgacaaggccggccagaagaccuacgagcggcacucccugagccacuucgugaaccuggacaaccuccgcgccaacaacaccaaggggucccugcccaucaacgugaucgucuucgacggcaagagcaagugcgaggaguccagcgccaaguccgccagcguguacuacucccagcugaugugccagcccauccuccugcuggaccaggcgcucgugagcgacgucggcgacagcgccgagguggccgugaagauguucgacgccuacgucaacacguucuccagcaccuucaacgugccgauggagaagcugaagacccugguggccaccgcggaggccgagcucgccaagaacgucucccuggacaacgugcugagcacguucaucuccgccgcgcggcagggguucguggacagcgacgucgagaccaaggacgugguggagugccucaagcugucccaccagagcgacaucgaggucaccggcgacuccugcaacaacuacaugcugaccuacaacaagguggagaacaugacgccccgcgaccucggggccugcaucgacugcagcgcccggcacaucaacgcccagguggccaagucccacaacaucgcgcugaucuggaacgucaaggacuucaugagccuguccgagcagcuccgcaagcagauccgcagcgccgccaagaagaacaaccugcccuucaagcugaccugcgccaccacccggcagguggugaacgucgugacgaccaagaucgcccucaagggcgggugaggacuagucccuguucccagagcccacuuuuuuuucuuuuuuugaaauaaaauagccugucuuucagaucucaaaggcucuuuucagagccaccaaaaaaaaaaaaaaaaaaaaaaaaaaaaaaaaaaaaaaaaaaaaaaaaaaaaaaaaaaaaaaaaaaaaaaaaaaaaaaaaaaaaaaaaaaaaaaaaaaaaa

SEQ ID NO: 20074 - RNA, 6113 nt, Artificial Sequence
  SARS-CoV-2__MT459923.1__non-structural protein 3 (NSP3) mRNA gc
aggagagucccgcagucggcguccagcggcucugcuuguucgugugugugucguugcaggccuuauucaagcuuaccauggcccccaccaaggugaccuucggcgacgacacggucaucgaggugcagggguacaagagcgugaacaucaccuucgagcuggacgagcgcaucgacaagguccucaacgagaagugcuccgccuacaccguggagcugggcaccgaggugaacgaguucgcgugcgucguggccgacgccgugaucaagacgcugcagccggucagcgagcuccugaccccccuggggaucgaccucgacgagugguccauggccaccuacuaccuguucgacgagagcggcgaguucaagcuggccucccacauguacugcagcuucuacccccccgacgaggacgaggaggagggggacugcgaggaggaggaguucgagccguccacccaguacgaguacggcacggaggacgacuaccagggcaagccccucgaguucggggcgaccagcgccgcccugcagcccgaggaggagcaggaggaggacuggcuggacgacgacucccagcagaccgugggccagcaggacgggagcgaggacaaccagaccacgaccauccagaccaucguggagguccagccccagcucgagauggagcugaccccgguggugcagacgaucgaggucaacuccuucagcggcuaccugaagcucaccgacaacguguacaucaagaacgccgacaucguggaggaggcgaagaaggucaagcccaccgugguggucaacgccgccaacguguaccugaagcacgggggcggcguggccggggcccugaacaaggcgaccaacaacgccaugcaggucgaguccgacgacuacaucgccacgaacggcccccucaagguggggggcagcugcguccuguccggccacaaccuggccaagcacugccuccacgugguggggcccaacgucaacaagggcgaggacauccagcugcugaagagcgccuacgagaacuucaaccagcacgaggugcuccuggcgccgcugcucuccgccgggaucuucggcgccgaccccauccacagccugcgggugugcgucgacaccgugcgcaccaacguguaccuggccgucuucgacaagaaccucuacgacaagcugguguccagcuuccuggagaugaagagcgagaagcagguggagcagaagaucgccgagauccccaaggaggaggucaagcccuucaucaccgaguccaagccgagcguggagcagcggaagcaggacgacaagaagaucaaggcgugcguggaggaggucacgaccacccucgaggagaccaaguuccugacggagaaccugcuccuguacaucgacaucaacgggaaccugcaccccgacuccgccacccucgugagcgacaucgacaucaccuuccugaagaaggacgcccccuacaucgugggcgacgucgugcaggagggcgugcugaccgccgucgugauccccacgaagaaggccgggggcaccaccgagaugcucgcgaaggcccugcgcaaggugccgaccgacaacuacaucacgaccuaccccgggcagggccugaacggguacaccgucgaggaggccaagaccgugcucaagaagugcaaguccgccuucuacauccugcccagcaucaucuccaacgagaagcaggagauccugggcaccgugagcuggaaccuccgggagaugcuggcgcacgccgaggagacgcgcaagcugaugcccgucugcguggagaccaaggccaucguguccaccauccagcggaaguacaagggcaucaagauccaggagggggucguggacuacggcgcccgcuucuacuucuacaccagcaagacgaccguggccucccugaucaacacccucaacgaccugaacgagacccuggucacgaugccgcucggguacgugacccacggccugaaccuggaggaggcggcccgguacaugcgcagccucaaggugcccgccaccgucuccgugagcucccccgacgccgugaccgccuacaacggguaccugacgagcuccagcaagacccccgaggagcacuucaucgagaccaucucccuggcgggcagcuacaaggacuggagcuacuccggccagagcacccagcucgggaucgaguuccugaagcggggcgacaaguccgucuacuacacgagcaacccgaccaccuuccaccuggacggggaggugaucaccuucgacaaccucaagacgcugcugucccuccgcgaggugcggaccaucaaggucuucaccaccguggacaacaucaaccugcacacgcagguggucgacaugagcaugaccuacggccagcaguucggccccaccuaccuggacggggccgacgugaccaagaucaagccccacaacucccacgagggcaagacguucuacgugcucccgaacgacgacacccugcgcgucgaggccuucgaguacuaccacaccaccgaccccagcuuccuggggcgguacauguccgcccucaaccacacgaagaaguggaaguacccccaggugaacggccugaccagcaucaagugggccgacaacaacugcuaccuggcgaccgcccuccugacccugcagcagaucgagcucaaguucaaccccccggcccugcaggacgccuacuaccgcgcgcgggccggggaggccgccaacuucugcgcccugauccucgcguacugcaacaagacggugggcgagcugggcgacguccgcgagaccauguccuaccuguuccagcacgccaaccucgacagcugcaagcgggugcugaacgucgugugcaagaccugcgggcagcagcagaccacccugaagggcguggaggccgucauguacauggggacgcucuccuacgagcaguucaagaagggcgugcagauccccugcaccugcgggaagcaggccaccaaguaccuggugcagcaggagagccccuucgucaugauguccgcccccccggcgcaguacgagcugaagcacggcaccuucacgugcgccagcgaguacaccggcaacuaccagugcgggcacuacaagcacaucaccuccaaggagacccucuacugcaucgacggcgcccugcugacgaagagcagcggguacaagggccccaucaccgacguguucuacaaggagaacuccuacaccaccacgaucaagcccgugaccuacaagcucgacggggucgugugcaccgagaucgaccccaagcuggacaacuacuacaagaaggacaacagcuacuucaccgagcagccgaucgaccuggugcccaaccagcccuaccccaacgccuccuucgacaacuucaaguucgucugcgacaacaucaaguucgccgacgaccucaaccagcugacgggcuacaagaagccggcgagccgcgagcugaaggugaccuucuuccccgaccucaacggcgacguggucgccaucgacuacaagcacuacacccccuccuucaagaagggggccaagcugcugcacaagcccaucguguggcacgugaacaacgccaccaacaaggcgacguacaagccgaacaccuggugcauccggugccucuggagcaccaagcccgucgagaccuccaacagcuucgacgugcugaaguccgaggacgcccagggcauggacaaccuggccugcgaggaccucaagcccgugagcgaggaggucguggagaaccccacgauccagaaggacgugcuggagugcaacgucaagaccaccgagguggugggggacaucauccugaagccggccaacaacucccucaagaucaccgaggaggucggccacacggaccugauggccgcguacguggacaacagcucccugaccaucaagaagcccaacgagcucagccgcgugcuggggcugaagacccucgccacccacggccuggccgccgucaacuccgugcccugggacacgaucgccaacuacgcgaagccguuccugaacaagguggucagcaccaccaccaacaucgugacgcgcugccucaaccgggugugcaccaacuacaugcccuacuucuucacccugcugcuccagcugugcaccuucacccgcuccacgaacagccggaucaaggccuccaugcccaccaccaucgccaagaacaccgucaagagcgugggcaaguucugccuggaggccagcuucaacuaccucaagucccccaacuucagcaagcugaucaacaucaucaucugguuccugcuccuguccgugugccuggggagccucaucuacuccacggccgcgcugggcguccugaugagcaaccucgggaugccguccuacugcaccggcuaccgcgagggcuaccugaacagcaccaacgugaccaucgccacguacugcaccggguccauccccugcagcgugugccuguccggccucgacagccuggacaccuaccccucccuggagaccauccagaucacgaucagcuccuucaagugggaccucaccgccuucgggcuggucgccgagugguuccuggccuacauccucuucacccgguucuucuacgugcugggccuggcggccaucaugcagcucuucuucagcuacuucgccgugcacuucaucuccaacagcuggcugauguggcugaucaucaaccugguccagauggcccccaucuccgcgauggugcgcauguacaucuucuucgccagcuucuacuacguguggaagagcuacguccacgugguggacgggugcaacuccagcaccugcaugaugugcuacaagcggaaccgcgccacgcgggucgagugcaccaccaucgugaacggcguccgccgguccuucuacguguacgccaacggcgggaagggcuucugcaagcuccacaacuggaacugcgugaacugcgacaccuucugcgccgggagcacguucaucuccgacgaggucgcgcgcgaccugagccugcaguucaagcggccgaucaaccccaccgaccaguccagcuacaucguggacuccgugaccgucaagaacggcagcauccaccucuacuucgacaaggccgggcagaagaccuacgagcgccacucccugagccacuucgugaaccuggacaaccuccgggccaacaacacgaagggcucccugcccaucaacgugaucgucuucgacggcaagagcaagugcgaggaguccagcgccaaguccgccagcguguacuacucccagcugaugugccagcccauccuccugcuggaccaggcgcucgugagcgacgucggggacagcgccgagguggccgugaagauguucgacgccuacgucaacaccuucuccagcaccuucaacgugccgauggagaagcugaagacccugguggccacggcgggcgccgagcucgccaagaacgucucccuggacaacgugcugagcaccuucaucuccgccgcgcgccagggguucguggacagcgacgucgagaccaaggacgugguggagugccucaagcugucccaccagagcgacaucgaggucaccggcgacuccugcaacaacuacaugcugacguacaacaagguggagaacaugaccccccgggaccucggggccugcaucgacugcagcgcccgccacaucaacgcccagguggccaagucccacaacaucgcgcugaucuggaacgucaaggacuucaugagccuguccgagcagcuccggaagcagauccgcagcgccgccaagaagaacaaccugcccuucaagcugaccugcgccaccacgcgccagguggugaacgucgugaccaccaagaucgcccucaagggcggcugaggacuagucccuguucccagagcccacuuuuuuuucuuuuuuugaaauaaaauagccugucuuucagaucucaaaggcucuuuucagagccaccaaaaaaaaaaaaaaaaaaaaaaaaaaaaaaaaaaaaaaaaaaaaaaaaaaaaaaaaaaaaaaaaaaaaaaaaaaaaaaaaaaaaaaaaaaaaaaaaaaaaa

SEQ ID NO: 20075 - RNA, 6113 nt, Artificial Sequence
  SARS-CoV-2__MT461613.1__non-structural protein 3 (NSP3) mRNA gc
aggagagucccgcagucggcguccagcggcucugcuuguucgugugugugucguugcaggccuuauucaagcuuaccauggcccccaccaaggugaccuucggcgacgacacggucaucgaggugcagggguacaagagcgugaacaucaccuucgagcuggacgagcgcaucgacaagguccucaacgagaagugcuccgccuacaccguggagcugggcaccgaggugaacgaguucgcgugcgucguggccgacgccgugaucaagacgcugcagccggucagcgagcuccugaccccccuggggaucgaccucgacgagugguccauggccaccuacuaccuguucgacgagagcggcgaguucaagcuggccucccacauguacugcagcuucuacccccccgacgaggacgaggaggagggggacugcgaggaggaggaguucgagccguccacccaguacgaguacggcacggaggacgacuaccagggcaagccccucgaguucggggcgaccagcgccgcccugcagcccgaggaggagcaggaggaggacuggcuggacgacgacucccagcagaccgugggccagcaggacgggagcgaggacaaccagaccacgaccauccagaccaucguggagguccagccccagcucgagauggagcugaccccgguggugcagacgaucgaggucaacuccuucagcggcuaccugaagcucaccgacaacguguacaucaagaacgccgacaucguggaggaggcgaagaaggucaagcccaccgugguggucaacgccgccaacguguaccugaagcacgggggcggcguggccggggcccugaacaaggcgaccaacaacgccaugcaggucgaguccgacgacuacaucgccacgaacggcccccuccggguggggggcagcugcguccuguccggccacaaccuggccaagcacugccuccacgugguggggcccaacgucaacaagggcgaggacauccagcugcugaagagcgccuacgagaacuucaaccagcacgaggugcuccuggcgccgcugcucuccgccgggaucuucggcgccgaccccauccacagccugcgcgugugcgucgacaccgugcggaccaacguguaccuggccgucuucgacaagaaccucuacgacaagcugguguccagcuuccuggagaugaagagcgagaagcagguggagcagaagaucgccgagauccccaaggaggaggucaagcccuucaucaccgaguccaagccgagcguggagcagcgcaagcaggacgacaagaagaucaaggcgugcguggaggaggucacgaccacccucgaggagaccaaguuccugacggagaaccugcuccuguacaucgacaucaacgggaaccugcaccccgacuccgccacccucgugagcgacaucgacaucaccuuccugaagaaggacgcccccuacaucgugggcgacgucgugcaggagggcgugcugaccgccgucgugauccccacgaagaaggccgggggcaccaccgagaugcucgcgaaggcccugcggaaggugccgaccgacaacuacaucacgaccuaccccgggcagggccugaacggguacaccgucgaggaggccaagaccgugcucaagaagugcaaguccgccuucuacauccugcccagcaucaucuccaacgagaagcaggagauccugggcaccgugagcuggaaccuccgcgagaugcuggcgcacgccgaggagacgcggaagcugaugcccgucugcguggagaccaaggccaucguguccaccauccagcgcaaguacaagggcaucaagauccaggagggggucguggacuacggcgcccgguucuacuucuacaccagcaagacgaccguggccucccugaucaacacccucaacgaccugaacgagacccuggucacgaugccgcucggguacgugacccacggccugaaccuggaggaggcggcccgcuacaugcggagccucaaggugcccgccaccgucuccgugagcucccccgacgccgugaccgccuacaacggguaccugacgagcuccagcaagacccccgaggagcacuucaucgagaccaucucccuggcgggcagcuacaaggacuggagcuacuccggccagagcacccagcucgggaucgaguuccugaagcgcggcgacaaguccgucuacuacacgagcaacccgaccaccuuccaccuggacggggaggugaucaccuucgacaaccucaagacgcugcugucccuccgggaggugcgcaccaucaaggucuucaccaccguggacaacaucaaccugcacacgcagguggucgacaugagcaugaccuacggccagcaguucggccccaccuaccuggacggggccgacgugaccaagaucaagccccacaacucccacgagggcaagacguucuacgugcucccgaacgacgacacccugcgggucgaggccuucgaguacuaccacaccaccgaccccagcuuccuggggcgcuacauguccgcccucaaccacacgaagaaguggaaguacccccaggugaacggccugaccagcaucaagugggccgacaacaacugcuaccuggcgaccgcccuccugacccugcagcagaucgagcucaaguucaaccccccggcccugcaggacgccuacuaccgggcgcgcgccggggaggccgccaacuucugcgcccugauccucgcguacugcaacaagacggugggcgagcugggcgacguccgggagaccauguccuaccuguuccagcacgccaaccucgacagcugcaagcgcgugcugaacgucgugugcaagaccugcgggcagcagcagaccacccugaagggcguggaggccgucauguacauggggacgcucuccuacgagcaguucaagaagggcgugcagauccccugcaccugcgggaagcaggccaccaaguaccuggugcagcaggagagccccuucgucaugauguccgcccccccggcgcaguacgagcugaagcacggcaccuucacgugcgccagcgaguacaccggcaacuaccagugcgggcacuacaagcacaucaccuccaaggagacccucuacugcaucgacggcgcccugcugacgaagagcagcgaguacaaggggcccaucaccgacguguucuacaaggagaacuccuacaccaccacgaucaagcccgugaccuacaagcucgacggcgucgugugcaccgagaucgaccccaagcuggacaacuacuacaagaaggacaacagcuacuucaccgagcagccgaucgaccuggugcccaaccagcccuaccccaacgccuccuucgacaacuucaaguucgucugcgacaacaucaaguucgccgacgaccucaaccagcugacgggguacaagaagccggcgagccgggagcugaaggugaccuucuuccccgaccucaacggcgacguggucgccaucgacuacaagcacuacacccccuccuucaagaagggcgccaagcugcugcacaagcccaucguguggcacgugaacaacgccaccaacaaggcgacguacaagccgaacaccuggugcauccgcugccucuggagcaccaagcccgucgagaccuccaacagcuucgacgugcugaaguccgaggacgcccaggggauggacaaccuggccugcgaggaccucaagcccgugagcgaggaggucguggagaaccccacgauccagaaggacgugcuggagugcaacgucaagaccaccgagguggugggcgacaucauccugaagccggccaacaacucccucaagaucaccgaggaggucgggcacacggaccugauggccgcguacguggacaacagcucccugaccaucaagaagcccaacgagcucagccgcgugcugggccugaagacccucgccacccacgggcuggccgccgucaacuccgugcccugggacacgaucgccaacuacgcgcggccguuccugaacaagguggucagcaccaccaccaacaucgugacgcgcugccucaaccgggugugcaccaacuacaugcccuacuucuucacccugcugcuccagcugugcaccuucacccgcuccacgaacagccggaucaaggccuccaugcccaccaccaucgccaagaacaccgucaagagcgugggcaaguucugccuggaggccagcuucaacuaccucaagucccccaacuucagcaagcugaucaacaucaucaucugguuccugcuccuguccgugugccugggcagccucaucuacuccacggccgcgcuggggguccugaugagcaaccucggcaugccguccuacugcaccggguaccgcgagggcuaccugaacagcaccaacgugaccaucgccacguacugcaccggcuccauccccugcagcgugugccuguccgggcucgacagccuggacaccuaccccucccuggagaccauccagaucacgaucagcuccuucaagugggaccucaccgccuucggccuggucgccgagugguuccuggccuacauccucuucacccgguucuucuacgugcuggggcuggcggccaucaugcagcucuucuucagcuacuucgccgugcacuucaucuccaacagcuggcugauguggcugaucaucaaccugguccagauggcccccaucuccgcgauggugcgcauguacaucuucuucgccagcuucuacuacguguggaagagcuacguccacgugguggacggcugcaacuccagcaccugcaugaugugcuacaagcggaaccgcgccacgcgggucgagugcaccaccaucgugaacgggguccgccgguccuucuacguguacgccaacggcggcaagggguucugcaagcuccacaacuggaacugcgugaacugcgacaccuucugcgccggcagcacguucaucuccgacgaggucgcgcgcgaccugagccugcaguucaagcggccgaucaaccccaccgaccaguccagcuacaucguggacuccgugaccgucaagaacgggagcauccaccucuacuucgacaaggccggccagaagaccuacgagcgccacucccugagccacuucgugaaccuggacaaccuccgggccaacaacacgaaggggucccugcccaucaacgugaucgucuucgacggcaagagcaagugcgaggaguccagcgccaaguccgccagcguguacuacucccagcugaugugccagcccauccuccugcuggaccaggcgcucgugagcgacgucggcgacagcgccgagguggccgugaagauguucgacgccuacgucaacaccuucuccagcaccuucaacgugccgauggagaagcugaagacccugguggccacggcggaggccgagcucgccaagaacgucucccuggacaacgugcugagcaccuucaucuccgccgcgcgccagggguucguggacagcgacgucgagaccaaggacgugguggagugccucaagcugucccaccagagcgacaucgaggucaccggcgacuccugcaacaacuacaugcugacguacaacaagguggagaacaugaccccccgggaccucggggccugcaucgacugcagcgcccgccacaucaacgcccagguggccaagucccacaacaucgcgcugaucuggaacgucaaggacuucaugagccuguccgagcagcuccgcaagcagauccggagcgccgccaagaagaacaaccugcccuucaagcugaccugcgccaccacgcgccagguggugaacgucgugaccaccaagaucgcccucaagggcgggugaggacuagucccuguucccagagcccacuuuuuuuucuuuuuuugaaauaaaauagccugucuuucagaucucaaaggcucuuuucagagccaccaaaaaaaaaaaaaaaaaaaaaaaaaaaaaaaaaaaaaaaaaaaaaaaaaaaaaaaaaaaaaaaaaaaaaaaaaaaaaaaaaaaaaaaaaaaaaaaaaaaaa

SEQ ID NO: 20076 - RNA, 6113 nt, Artificial Sequence
  SARS-CoV-2__MT461614.1__non-structural protein 3 (NSP3) mRNA gc
aggagagucccgcagucggcguccagcggcucugcuuguucgugugugugucguugcaggccuuauucaagcuuaccauggcccccaccaaggugaccuucggcgacgacacggucaucgaggugcagggguacaagagcgugaacaucaccuucgagcuggacgagcgcaucgacaagguccucaacgagaagugcuccgccuacaccguggagcugggcaccgaggugaacgaguucgcgugcgucguggccgacgccgugaucaagacgcugcagccggucagcgagcuccugaccccccuggggaucgaccucgacgagugguccauggccaccuacuaccuguucgacgagagcggcgaguucaagcuggccucccacauguacugcagcuucuacccccccgacgaggacgaggaggagggggacugcgaggaggaggaguucgagccguccacccaguacgaguacggcacggaggacgacuaccagggcaagccccucgaguucggggcgaccagcgccgcccugcagcccgaggaggagcaggaggaggacuggcuggacgacgacucccagcagaccgugggccagcaggacgggagcgaggacaaccagaccacgaccauccagaccaucguggagguccagccccagcucgagauggagcugaccccgguggugcagacgaucgaggucaacuccuucagcggcuaccugaagcucaccgacaacguguacaucaagaacgccgacaucguggaggaggcgaagaaggucaagcccaccgugguggucaacgccgccaacguguaccugaagcacgggggcggcguggccggggcccugaacaaggcgaccaacaacgccaugcaggucgaguccgacgacuacaucgccacgaacggcccccucaagguggggggcagcugcguccuguccggccacaaccuggccaagcacugccuccacgugguggggcccaacgucaacaagggcgaggacauccagcugcugaagagcgccuacgagaacuucaaccagcacgaggugcuccuggcgccgcugcucuccgccgggaucuucggcgccgaccccauccacagccugcgggugugcgucgacaccgugcgcaccaacguguaccuggccgucuucgacaagaaccucuacgacaagcugguguccagcuuccuggagaugaagagcgagaagcagguggagcagaagaucgccgagauccccaaggaggaggucaagcccuucaucaccgaguccaagccgagcguggagcagcggaagcaggacgacaagaagaucaaggcgugcguggaggaggucacgaccacccucgaggagaccaaguuccugacggagaaccugcuccuguacaucgacaucaacgggaaccugcaccccgacuccgccacccucgugagcgacaucgacaucaccuuccugaagaaggacgcccccuacaucgugggcgacgucgugcaggagggcgugcugaccgccgucgugauccccacgaagaaggccgggggcaccaccgagaugcucgcgaaggcccugcgcaaggugccgaccgacaacuacaucacgaccuaccccgggcagggccugaacggguacaccgucgaggaggccaagaccgugcucaagaagugcaaguccgccuucuacauccugcccagcaucaucuccaacgagaagcaggagauccugggcaccgugagcuggaaccuccgggagaugcuggcgcacgccgaggagacgcgcaagcugaugcccgucugcguggagaccaaggccaucguguccaccauccagcggaaguacaagggcaucaagauccaggagggggucguggacuacggcgcccgcuucuacuucuacaccagcaagacgaccguggccucccugaucaacacccucaacgaccugaacgagacccuggucacgaugccgcucggguacgugacccacggccugaaccuggaggaggcggcccgguacaugcgcagccucaaggugcccgccaccgucuccgugagcucccccgacgccgugaccgccuacaacggguaccugacgagcuccagcaagacccccgaggagcacuucaucgagaccaucucccuggcgggcagcuacaaggacuggagcuacuccggccagagcacccagcucgggaucgaguuccugaagcggggcgacaaguccgucuacuacacgagcaacccgaccaccuuccaccuggacggggaggugaucaccuucgacaaccucaagacgcugcugucccuccgcgaggugcggaccaucaaggucuucaccaccguggacaacaucaaccugcacacgcagguggucgacaugagcaugaccuacggccagcaguucggccccaccuaccuggacggggccgacgugaccaagaucaagccccacaacucccacgagggcaagacguucuacgugcucccgaacgacgacacccugcgcgucgaggccuucgaguacuaccacaccaccgaccccagcuuccuggggcgguacauguccgcccucaaccacacgaagaaguggaaguacccccaggugaacggccugaccagcaucaagugggccgacaacaacugcuaccuggcgaccgcccuccugacccugcagcagaucgagcucaaguucaaccccccggcccugcaggacgccuacuaccgcgcgcgggccggggaggccgccaacuucugcgcccugauccucgcguacugcaacaagacggugggcgagcugggcgacguccgcgagaccauguccuaccuguuccagcacgccaaccucgacagcugcaagcgggugcugaacgucgugugcaagaccugcgggcagcagcagaccacccugaagggcguggaggccgucauguacauggggacgcucuccuacgagcaguucaagaagggcgugcagauccccugcaccugcgggaagcaggccaccaaguaccuggugcagcaggagagccccuucgucaugauguccgcccccccggcgcaguacgagcugaagcacggcaccuucacgugcgccagcgaguacaccggcaacuaccagugcgggcacuacaagcacaucaccuccaaggagacccucuacugcaucgacggcgcccugcugacgaagagcagcgaguacaaggggcccaucaccgacguguucuacaaggagaacuccuacaccaccacgaucaagcccgugaccuacaagcucgacggcgucgugugcaccgagaucgaccccaagcuggacaacuacuacaagaaggacaacagcuacuucaccgagcagccgaucgaccuggugcccaaccagcccuaccccaacgccuccuucgacaacuucaaguucgucugcgacaacaucaaguucgccgacgaccucaaccagcugacgggguacaagaagccggcgagccgcgagcugaaggugaccuucuuccccgaccucaacggcgacguggucgccaucgacuacaagcacuacacccccuccuucaagaagggcgccaagcugcugcacaagcccaucguguggcacgugaacaacgccaccaacaaggcgacguacaagccgaacaccuggugcauccggugccucuggagcaccaagcccgucgagaccuccaacagcuucgacgugcugaaguccgaggacgcccaggggauggacaaccuggccugcgaggaccucaagcccgugagcgaggaggucguggagaaccccacgauccagaaggacgugcuggagugcaacgucaagaccaccgagguggugggcgacaucauccugaagccggccaacaacucccucaagaucaccgaggaggucgggcacacggaccugauggccgcguacguggacaacagcucccugaccaucaagaagcccaacgagcucagccgcgugcugggccugaagacccucgccacccacgggcuggccgccgucaacuccgugcccugggacacgaucgccaacuacgcgaagccguuccugaacaagguggucagcaccaccaccaacaucgugacgcgcugccucaaccgggugugcaccaacuacaugcccuacuucuucacccugcugcuccagcugugcaccuucacccgcuccacgaacagccggaucaaggccuccaugcccaccaccaucgccaagaacaccgucaagagcgugggcaaguucugccuggaggccagcuucaacuaccucaagucccccaacuucagcaagcugaucaacaucaucaucugguuccugcuccuguccgugugccugggcagccucaucuacuccacggccgcgcuggggguccugaugagcaaccucggcaugccguccuacugcaccggguaccgcgagggcuaccugaacagcaccaacgugaccaucgccacguacugcaccggcuccauccccugcagcgugugccuguccgggcucgacagccuggacaccuaccccucccuggagaccauccagaucacgaucagcuccuucaagugggaccucaccgccuucggccuggucgccgagugguuccuggccuacauccucuucacccgguucuucuacgugcuggggcuggcggccaucaugcagcucuucuucagcuacuucgccgugcacuucaucuccaacagcuggcugauguggcugaucaucaaccugguccagauggcccccaucuccgcgauggugcgcauguacaucuucuucgccagcuucuacuacguguggaagagcuacguccacgugguggacggcugcaacuccagcaccugcaugaugugcuacaagcggaaccgcgccacgcgggucgagugcaccaccaucgugaacgggguccgccgguccuucuacguguacgccaacggcggcaagggguucugcaagcuccacaacuggaacugcgugaacugcgacaccuucugcgccggcagcacguucaucuccgacgaggucgcgcgcgaccugagccugcaguucaagcggccgaucaaccccaccgaccaguccuacuacaucguggacagcgugaccgucaagaacggguccauccaccucuacuucgacaaggccggccagaagaccuacgagcgccacagccugucccacuucgugaaccuggacaaccuccgggccaacaacacgaaggggagccugcccaucaacgugaucgucuucgacggcaaguccaagugcgaggagagcuccgccaagagcgccuccguguacuacagccagcugaugugccagcccauccuccugcuggaccaggcgcucguguccgacgucggcgacagcgccgagguggccgugaagauguucgacgccuacgucaacaccuucagcuccaccuucaacgugccgauggagaagcugaagacccugguggccacggcggaggccgagcucgccaagaacgucagccuggacaacgugcuguccaccuucaucagcgccgcgcgccagggguucguggacuccgacgucgagaccaaggacgugguggagugccucaagcugagccaccaguccgacaucgaggucaccggcgacagcugcaacaacuacaugcugacguacaacaagguggagaacaugaccccccgggaccucggggccugcaucgacugcuccgcccgccacaucaacgcccagguggccaagagccacaacaucgcgcugaucuggaacgucaaggacuucaugucccugagcgagcagcuccggaagcagauccgcuccgccgccaagaagaacaaccugcccuucaagcugaccugcgccaccacgcgccagguggugaacgucgugaccaccaagaucgcccucaagggcgggugaggacuagucccuguucccagagcccacuuuuuuuucuuuuuuugaaauaaaauagccugucuuucagaucucaaaggcucuuuucagagccaccaaaaaaaaaaaaaaaaaaaaaaaaaaaaaaaaaaaaaaaaaaaaaaaaaaaaaaaaaaaaaaaaaaaaaaaaaaaaaaaaaaaaaaaaaaaaaaaaaaaaa

SEQ ID NO: 20077 - RNA, 6113 nt, Artificial Sequence
  SARS-CoV-2__MT461625.1__non-structural protein 3 (NSP3) mRNA gc
aggagagucccgcagucggcguccagcggcucugcuuguucgugugugugucguugcaggccuuauucaagcuuaccauggcccccaccaaggugaccuucggcgacgacacggucaucgaggugcagggguacaagagcgugaacaucaccuucgagcuggacgagcgcaucgacaagguccucaacgagaagugcuccgccuacaccguggagcugggcaccgaggugaacgaguucgcgugcgucguggccgacgccgugaucaagacgcugcagccggucagcgagcuccugaccccccuggggaucgaccucgacgagugguccauggccaccuacuaccuguucgacgagagcggcgaguucaagcuggccucccacauguacugcagcuucuacccccccgacgaggacgaggaggagggggacugcgaggaggaggaguucgagccguccacccaguacgaguacggcacggaggacgacuaccagggcaagccccucgaguucggggcgaccagcgccgcccugcagcccgaggaggagcaggaggaggacuggcuggacgacgacucccagcagaccgugggccagcaggacgggagcgaggacaaccagaccacgaccauccagaccaucguggagguccagccccagcucgagauggagcugaccccgguggugcagacgaucgaggucaacuccuucagcggcuaccugaagcucaccgacaacguguacaucaagaacgccgacaucguggaggaggcgaagaaggucaagcccaccgugguggucaacgccgccaacguguaccugaagcacgggggcggcguggccggggcccugaacaaggcgaccaacaacgccaugcaggucgaguccgacgacuacaucgccacgaacggcccccucaagguggggggcagcugcguccuguccggccacaaccuggccaagcacugccuccacgugguggggcccaacgucaacaagggcgaggacauccagcugcugaagagcgccuacgagaacuucaaccagcacgaggugcuccuggcgccgcugcucuccgccgggaucuucggcgccgaccccauccacagccugcgggugugcgucgacaccgugcgcaccaacguguaccuggccgucuucgacaagaaccucuacgacaagcugguguccagcuuccuggagaugaagagcgagaagcagguggagcagaagaucgccgagauccccaaggaggaggucaagcccuucaucaccgaguccaagccgagcguggagcagcggaagcaggacgacaagaagaucaaggcgugcguggaggaggucacgaccacccucgaggagaccaaguuccugacggagaaccugcuccuguacaucgacaucaacgggaaccugcaccccgacuccgccacccucgugagcgacaucgacaucaccuuccugaagaaggacgcccccuacaucgugggcgacgucgugcaggagggcgugcugaccgccgucgugauccccacgaagaaggccgggggcaccaccgagaugcucgcgaaggcccugcgcaaggugccgaccgacaacuacaucacgaccuaccccgggcagggccugaacggguacaccgucgaggaggccaagaccgugcucaagaagugcaaguccgccuucuacauccugcccagcaucaucuccaacgagaagcaggagauccugggcaccgugagcuggaaccuccgggagaugcuggcgcacgccgaggagacgcgcaagcugaugcccgucugcguggagaccaaggccaucguguccaccauccagcggaaguacaagggcaucaagauccaggagggggucguggacuacggcgcccgcuucuacuucuacaccagcaagacgaccguggccucccugaucaacacccucaacgaccugaacgagacccuggucacgaugccgcucggguacgugacccacggccugaaccuggaggaggcggcccgguacaugcgcagccucaaggugcccgccaccgucuccgugagcucccccgacgccgugaccgccuacaacggguaccugacgagcuccagcaagacccccgaggagcacuucaucgagaccaucucccuggcgggcagcuacaaggacuggagcuacuccggccagagcacccagcucgggaucgaguuccugaagcggggcgacaaguccgucuacuacacgagcaacccgaccaccuuccaccuggacggggaggugaucaccuucgacaaccucaagacgcugcugucccuccgcgaggugcggaccaucaaggucuucaccaccguggacaacaucaaccugcacacgcagguggucgacaugagcaugaccuacggccagcaguucggccccaccuaccuggacggggccgacgugaccaagaucaagccccacaacucccacgagggcaagacguucuacgugcucccgaacgacgacacccugcgcgucgaggccuucgaguacuaccacaccaccgaccccagcuuccuggggcgguacauguccgcccucaaccacacgaagaaguggaaguacccccaggugaacggccugaccagcaucaagugggccgacaacaacugcuaccuggcgaccgcccuccugacccugcagcagaucgagcucaaguucaaccccccggcccugcaggacgccuacuaccgcgcgcgggccggggaggccgccaacuucugcgcccugauccucgcguacugcaacaagacggugggcgagcugggcgacguccgcgagaccauguccuaccuguuccagcacgccaaccucgacagcugcaagcgggugcugaacgucgugugcaagaccugcgggcagcagcagaccacccugaagggcguggaggccgucauguacauggggacgcucuccuacgagcaguucaagaagggcgugcagauccccugcaccugcgggaagcaggccaccaaguaccuggugcagcaggagagccccuucgucaugauguccgcccccccggcgcaguacgagcugaagcacggcaccuucacgugcgccagcgaguacaccggcaacuaccagugcgggcacuacaagcacaucaccuccaaggagacccucuacugcaucgacggcgcccugcugacgaagagcagcgaguacaaggggcccaucaccgacguguucuacaaggagaacuccuacaccaccacgaucaagcccgugaccuacaagcucgacggcgucgugugcaccgagaucgaccccaagcuggacaacuacuacaagaaggacaacagcuacuucaccgagcagccgaucgaccuggugcccaaccagcccuaccccaacgccuccuucgacaacuucaaguucgucugcgacaacaucaaguucgccgacgaccucaaccagcugacgggguacaagaagccggcgagccgcgagcugaaggugaccuucuuccccgaccucaacggcgacguggucgccaucgacuacaagcacuacacccuguccuucaagaagggcgccaagcugcuccacaagcccaucguguggcacgugaacaacgccaccaacaaggcgacguacaagcccaacaccuggugcauccggugccuguggagcaccaagccggucgagaccuccaacagcuucgacgugcugaaguccgaggacgcccaggggauggacaaccucgccugcgaggaccugaagcccgugagcgaggaggucguggagaaccccacgauccagaaggacgugcuggagugcaacgucaagaccaccgagguggugggcgacaucauccucaagcccgccaacaacucccugaagaucaccgaggaggucgggcacacggaccugauggccgcguacguggacaacagcucccucaccaucaagaagccgaacgagcugagccgcgugcugggccucaagacccuggccacccacgggcuggccgccgucaacuccgugcccugggacacgaucgccaacuacgcgaagcccuuccucaacaagguggucagcaccaccaccaacaucgugacgcgcugccugaaccgggugugcaccaacuacaugccguacuucuucacccugcuccugcagcugugcaccuucacccgcuccacgaacagccggaucaaggccuccaugcccaccaccaucgccaagaacaccgucaagagcgugggcaaguucugccucgaggccagcuucaacuaccugaagucccccaacuucagcaagcugaucaacaucaucaucugguuccuccugcuguccgugugccucggcagccugaucuacuccacggccgcgcuggggguccucaugagcaaccugggcaugcccuccuacugcaccggguaccgcgagggcuaccugaacagcaccaacgugaccaucgccacguacugcaccggcuccaucccgugcagcgugugccucuccgggcuggacagccuggacaccuaccccucccucgagaccauccagaucacgaucagcuccuucaagugggaccugaccgccuucggccuggucgccgagugguuccucgccuacauccuguucacccgguucuucuacgugcuggggcucgcggccaucaugcagcuguucuucagcuacuucgccgugcacuucaucuccaacagcuggcugauguggcugaucaucaaccucguccagauggcccccaucuccgcgauggugcgcauguacaucuucuucgccagcuucuacuacguguggaagagcuacguccacgugguggacggcugcaacuccagcaccugcaugaugugcuacaagcggaaccgcgccacgcgggucgagugcaccaccaucgugaacgggguccgccgguccuucuacguguacgccaacggcggcaagggguucugcaagcugcacaacuggaacugcgugaacugcgacaccuucugcgccggcagcacguucaucuccgacgaggucgcgcgcgaccugagccuccaguucaagcggcccaucaacccgaccgaccaguccagcuacaucguggacuccgugaccgucaagaacgggagcauccaccuguacuucgacaaggccggccagaagaccuacgagcgccacucccugagccacuucgugaaccucgacaaccugcgggccaacaacacgaaggggucccugcccaucaacgugaucgucuucgacggcaagagcaagugcgaggaguccagcgccaaguccgccagcguguacuacucccagcucaugugccagcccauccugcugcucgaccaggcgcuggugagcgacgucggcgacagcgccgagguggccgugaagauguucgacgccuacgucaacaccuucuccagcaccuucaacgugcccauggagaagcugaagacccucguggccacggcggaggccgagcuggccaagaacgucucccuggacaacgugcucagcaccuucaucuccgccgcgcgccagggguucguggacagcgacgucgagaccaaggacgugguggagugccugaagcugucccaccagagcgacaucgaggucaccggcgacuccugcaacaacuacaugcucacguacaacaagguggagaacaugaccccgcgggaccugggggccugcaucgacugcagcgcccgccacaucaacgcccagguggccaagucccacaacaucgcgcugaucuggaacgucaaggacuucaugagccucuccgagcagcugcggaagcagauccgcagcgccgccaagaagaacaaccugcccuucaagcucaccugcgccaccacgcgccagguggugaacgucgugaccaccaagaucgcccugaagggcgggugaggacuagucccuguucccagagcccacuuuuuuuucuuuuuuugaaauaaaauagccugucuuucagaucucaaaggcucuuuucagagccaccaaaaaaaaaaaaaaaaaaaaaaaaaaaaaaaaaaaaaaaaaaaaaaaaaaaaaaaaaaaaaaaaaaaaaaaaaaaaaaaaaaaaaaaaaaaaaaaaaaaaa

SEQ ID NO: 20078 - RNA, 6113 nt, Artificial Sequence
  SARS-CoV-2__MT461636.1__non-structural protein 3 (NSP3) mRNA gc
aggagagucccgcagucggcguccagcggcucugcuuguucgugugugugucguugcaggccuuauucaagcuuaccauggcccccaccaaggugaccuucggcgacgacacggucaucgaggugcagggguacaagagcgugaacaucaccuucgagcuggacgagcgcaucgacaagguccucaacgagaagugcuccgccuacaccguggagcugggcaccgaggugaacgaguucgcgugcgucguggccgacgccgugaucaagacgcugcagccggucagcgagcuccugaccccccuggggaucgaccucgacgagugguccauggccaccuacuaccuguucgacgagagcggcgaguucaagcuggccucccacauguacugcagcuucuacccccccgacgaggacgaggaggagggggacugcgaggaggaggaguucgagccguccacccaguacgaguacggcacggaggacgacuaccagggcaagccccucgaguucggggcgaccagcgccgcccugcagcccgaggaggagcaggaggaggacuggcuggacgacgacucccagcagaccgugggccagcaggacgggagcgaggacaaccagaccacgaccauccagaccaucguggagguccagccccagcucgagauggagcugaccccgguggugcagacgaucgaggucaacuccuucagcggcuaccugaagcucaccgacaacguguacaucaagaacgccgacaucguggaggaggcgaagaaggucaagcccaccgugguggucaacgccgccaacguguaccugaagcacgggggcggcguggccggggcccugaacaaggcgaccaacaacgccaugcaggucgaguccgacgacuacaucgccacgaacggcccccucaagguggggggcagcugcguccuguccggccacaaccuggccaagcacugccuccacgugguggggcccaacgucaacaagggcgaggacauccagcugcugaagagcgccuacgagaacuucaaccagcacgaggugcuccuggcgccgcugcucuccgccgggaucuucggcgccgaccccauccacagccugcgggugugcgucgacaccgugcgcaccaacguguaccuggccgucuucgacaagaaccucuacgacaagcugguguccagcuuccuggagaugaagagcgagaagcagguggagcagaagaucgccgagauccccaaggaggaggucaagcccuucaucaccgaguccaagccgagcguggagcagcggaagcaggacgacaagaagaucaaggcgugcguggaggaggucacgaccacccucgaggagaccaaguuccugacggagaaccugcuccuguacaucgacaucaacgggaaccugcaccccgacuccgccacccucgugagcgacaucgacaucaccuuccugaagaaggacgcccccuacaucgugggcgacgucgugcaggagggcgugcugaccgccgucgugauccccacgaagaaggccgggggcaccaccgagaugcucgcgaaggcccugcgcaaggugccgaccgacaacuacaucacgaccuaccccgggcagggccugaacggguacaccgucgaggaggccaagaccgugcucaagaagugcaaguccgccuucuacauccugcccagcaucaucuccaacgagaagcaggagauccugggcaccgugagcuggaaccuccgggagaugcuggcgcacgccgaggagacgcgcaagcugaugcccgucugcguggagaccaaggccaucguguccaccauccagcggaaguacaagggcaucaagauccaggagggggucguggacuacggcgcccgcuucuacuucuacaccagcaagacgaccguggccucccugaucaacacccucaacgaccugaacgagacccuggucacgaugccgcucggguacgugacccacggccugaaccuggaggaggcggcccgguacaugcgcagccucaaggugcccgccaccgucuccgugagcucccccgacgccgugaccgccuacaacggguaccugacgagcuccagcaagacccccgaggagcacuucaucgagaccaucucccuggcgggcagcuacaaggacuggagcuacuccggccagagcacccagcucgggaucgaguuccugaagcggggcgacaaguccgucuacuacacgagcaacccgaccaccuuccaccuggacggggaggugaucaccuucgacaaccucaagacgcugcugucccuccgcgaggugcggaccaucaaggucuucaccaccguggacaacaucaaccugcacacgcagguggucgacaugagcaugaccuacggccagcaguucggccccaccuaccuggacggggccgacgugaccaagaucaagccccacaacucccacgagggcaagacguucuacgugcucccgaacgacgacacccugcgcgucgaggccuucgaguacuaccacaccaccgaccccagcuuccuggggcgguacauguccgcccucaaccacacgaagaaguggaaguacccccaggugaacggccugaccagcaucaagugggccgacaacaacugcuaccuggcgaccgcccuccugacccugcagcagaucgagcucaaguucaaccccccggcccugcaggacgccuacuaccgcgcgcgggccggggaggccgccaacuucugcgcccugauccucgcguacugcaacaagacggugggcgagcugggcgacguccgcgagaccauguccuaccuguuccagcacgccaaccucgacagcugcaagcgggugcugaacgucgugugcaagaccugcgggcagcagcagaccacccugaagggcguggaggccgucauguacauggggacgcucuccuacgagcaguucaagaagggcgugcagauccccugcaccugcgggaagcaggccaccaaguaccuggugcagcaggagagccccuucgucaugauguccgcccccccggcgcaguacgagcugaagcacggcaccuucacgugcgccagcgaguacaccggcaacuaccagugcgggcacuacaagcacaucaccuccaaggagacccucuacugcaucgacggcgcccugcugacgaagagcagcgaguacaaggggcccaucaccgacguguucuacaaggagaacuccuacaccaccacgaucaagcccgugaccuacaagcucgacggcgucgugugcaccgagaucgaccccaagcuggacaacuacuacaagaaggacaacagcuacuucaccgagcagccgaucgaccuggugcccaaccagcccuaccccaacgccuccuucgacaacuucaaguucgucugcgacaacaucaaguucgccgacgaccucaaccagcugacgggguacaagaagccggcgagccgcgagcugaaggugaccuucuuccccgaccucaacggcgacguggucgccaucgacuacaagcacuacacccccuccuucaagaagggcgccaagcugcugcacaagcccaucguguggcacgugaacaacgccaccaacaaggcgacguacaagccgaacaccuggugcauccggugccucuggagcaccaagcccgucgagaccuccaacagcuucgacgugcugaaguccgaggacgcccaggggauggacaaccuggccugcgaggaccucaagcccgugagcgaggaggucguggagaaccccacgauccagaaggacgugcuggagugcaacgucaagaccaccgagguggugggcgacaucauccugaagccggccaacaacucccucaagaucaccgaggaggucgggcacacggaccugauggccgcguacguggacaacagcucccugaccaucaagaagcccaacgagcucagccgcgugcugggccugaagacccucgccacccacgggcuggccgccgucaacuccgugcccugggacacgaucgccaacuacgcgaagccguuccugaacaagguggucagcaccaccaccaacaucgugacgcgcugccucaaccgggugugcaccaacuacaugcccuacuucuucacccugcugcuccagcugugcaccuucacccgcuccacgaacagccggaucaaggccuccaugcccaccaccaucgccaagaacaccgucaagagcgugggcaaguucugccuggaggccagcuucaacuaccucaagucccccaacuucagcaagcugaucaacaucaucaucugguuccugcuccuguccgugugccugggcagccucaucuacuccacggccgcgcuggggguccugauguucaaccucggcaugccgagcuacugcaccggguaccgcgagggcuaccugaacuccaccaacgugaccaucgccacguacugcaccggcagcauccccugcuccgugugccugagcgggcucgacucccuggacaccuaccccagccuggagaccauccagaucacgaucuccagcuucaagugggaccucaccgccuucggccuggucgccgagugguuccuggccuacauccucuucacccgguucuucuacgugcuggggcuggcggccaucaugcagcucuucuucuccuacuucgccgugcacuucaucagcaacuccuggcugauguggcugaucaucaaccugguccagauggcccccaucagcgcgauggugcgcauguacaucuucuucgccuccuucuacuacguguggaagagcuacguccacgugguggacggcugcaacagcuccaccugcaugaugugcuacaagcggaaccgcgccacgcgggucgagugcaccaccaucgugaacgggguccgccggagcuucuacguguacgccaacggcggcaagggguucugcaagcuccacaacuggaacugcgugaacugcgacaccuucugcgccggcuccacguucaucagcgacgaggucgcgcgcgaccugucccugcaguucaagcggccgaucaaccccaccgaccagagcuccuacaucguggacagcgugaccgucaagaacggguccauccaccucuacuucgacaaggccggccagaagaccuacgagcgccacagccugucccacuucgugaaccuggacaaccuccgggccaacaacacgaaggggagccugcccaucaacgugaucgucuucgacggcaaguccaagugcgaggagagcuccgccaagagcgccuccguguacuacagccagcugaugugccagcccauccuccugcuggaccaggcgcucguguccgacgucggcgacagcgccgagguggccgugaagauguucgacgccuacgucaacaccuucagcuccaccuucaacgugccgauggagaagcugaagacccugguggccacggcggaggccgagcucgccaagaacgucagccuggacaacgugcuguccaccuucaucagcgccgcgcgccagggguucguggacuccgacgucgagaccaaggacgugguggagugccucaagcugagccaccaguccgacaucgaggucaccggcgacagcugcaacaacuacaugcugacguacaacaagguggagaacaugaccccccgggaccucggggccugcaucgacugcuccgcccgccacaucaacgcccagguggccaagagccacaacaucgcgcugaucuggaacgucaaggacuucaugucccugagcgagcagcuccggaagcagauccgcuccgccgccaagaagaacaaccugcccuucaagcugaccugcgccaccacgcgccagguggugaacgucgugaccaccaagaucgcccucaagggcgggugaggacuagucccuguucccagagcccacuuuuuuuucuuuuuuugaaauaaaauagccugucuuucagaucucaaaggcucuuuucagagccaccaaaaaaaaaaaaaaaaaaaaaaaaaaaaaaaaaaaaaaaaaaaaaaaaaaaaaaaaaaaaaaaaaaaaaaaaaaaaaaaaaaaaaaaaaaaaaaaaaaaaa

SEQ ID NO: 20079 - RNA, 6113 nt, Artificial Sequence
  SARS-CoV-2__MT461641.1__non-structural protein 3 (NSP3) mRNA gc
aggagagucccgcagucggcguccagcggcucugcuuguucgugugugugucguugcaggccuuauucaagcuuaccauggcccccaccaaggugaccuucggcgacgacacggucaucgaggugcagggguacaagagcgugaacaucaccuucgagcuggacgagcgcaucgacaagguccucaacgagaagugcuccgccuacaccguggagcugggcaccgaggugaacgaguucgcgugcgucguggccgacgccgugaucaagacgcugcagccggucagcgagcuccugaccccccuggggaucgaccucgacgagugguccauggccaccuacuaccuguucgacgagagcggcgaguucaagcuggccucccacauguacugcagcuucuacccccccgacgaggacgaggaggagggggacugcgaggaggaggaguucgagccguccacccaguacgaguacggcacggaggacgacuaccagggcaagccccucgaguucggggcgaccagcgccgcccugcagcccgaggaggagcaggaggaggacuggcuggacgacgacucccagcagaccgugggccagcaggacgggagcgaggacaaccagaccacgaccauccagaccaucguggagguccagccccagcucgagauggagcugaccccgguggugcagacgaucgaggucaacuccuucagcggcuaccugaagcucaccgacaacguguacaucaagaacgccgacaucguggaggaggcgaagaaggucaagcccaccgugguggucaacgccgccaacguguaccugaagcacgggggcggcguggccggggcccugaacaaggcgaccaacaacgccaugcaggucgaguccgacgacuacaucgccacgaacggcccccucaagguggggggcagcugcguccuguccggccacaaccuggccaagcacugccuccacgugguggggcccaacgucaacaagggcgaggacauccagcugcugaagagcgccuacgagaacuucaaccagcacgaggugcuccuggcgccgcugcucuccgccgggaucuucggcgccgaccccauccacagccugcgggugugcgucgacaccgugcgcaccaacguguaccuggccgucuucgacaagaaccucuacgacaagcugguguccagcuuccuggagaugaagagcgagaagcagguggagcagaagaucgccgagauccccaaggaggaggucaagcccuucaucaccgaguccaagccgagcguggagcagcggaagcaggacgacaagaagaucaaggcgugcguggaggaggucacgaccacccucgaggagaccaaguuccugacggagaaccugcuccuguacaucgacaucaacgggaaccugcaccccgacuccgccacccucgugagcgacaucgacaucaccuuccugaagaaggacgcccccuacaucgugggcgacgucgugcaggagggcgugcugaccgucguggugauccccacgaagaaggccgggggcaccaccgagaugcucgccaaggcgcugcgcaaggucccgaccgacaacuacaucacgaccuaccccgggcagggccugaacggguacaccguggaggaggccaagaccgugcucaagaagugcaaguccgccuucuacauccugcccagcaucaucuccaacgagaagcaggagauccugggcaccgucagcuggaaccuccgggagaugcuggcccacgcggaggagacgcgcaagcugaugcccgugugcguggagaccaaggccaucgucuccaccauccagcggaaguacaagggcaucaagauccaggagggggugguggacuacggcgcccgcuucuacuucuacaccagcaagacgaccgucgccucccugaucaacacccucaacgaccugaacgagacccuggugacgaugccgcucggguacgugacccacggccugaaccuggaggaggccgcgcgguacaugcgcagccucaagguccccgccaccguguccgugagcucccccgacgccgucaccgccuacaacggguaccugacgagcuccagcaagacccccgaggagcacuucaucgagaccaucucccuggccggcagcuacaaggacuggagcuacuccggccagagcacccagcucgggaucgaguuccugaagcggggcgacaaguccguguacuacacgagcaacccgaccaccuuccaccuggacggggaggugaucaccuucgacaaccucaagacgcugcugucccuccgcgagguccggaccaucaagguguucaccaccguggacaacaucaaccugcacacgcacgucguggacaugagcaugaccuacggccagcaguucggccccaccuaccuggacggggcggacgugaccaagaucaagccccacaacucccacgagggcaagacguucuacguccucccgaacgacgacacccugcgcguggaggccuucgaguacuaccacaccaccgaccccagcuuccuggggcgguacauguccgcccucaaccacacgaagaaguggaaguacccccaggugaacggccugaccagcaucaagugggccgacaacaacugcuaccuggccaccgcgcuccugacccugcagcagaucgagcucaaguucaaccccccggcccugcaggacgccuacuaccgcgcccgggcgggggaggccgccaacuucugcgcccugauccucgccuacugcaacaagacggucggcgagcugggcgacgugcgcgagaccauguccuaccuguuccagcacgcgaaccucgacagcugcaagcggguccugaacguggugugcaagaccugcgggcagcagcagaccacccugaagggcgucgaggccgugauguacauggggacgcucuccuacgagcaguucaagaagggcgugcagauccccugcaccugcgggaagcaggccaccaaguaccugguccagcaggagagccccuucgugaugauguccgcccccccggcccaguacgagcugaagcacggcaccuucacgugcgcgagcgaguacaccggcaacuaccagugcgggcacuacaagcacaucaccuccaaggagacccucuacugcaucgacggcgcccugcugacgaagagcagcgaguacaaggggcccaucaccgacguguucuacaaggagaacuccuacaccaccacgaucaagcccgucaccuacaagcucgacggcguggugugcaccgagaucgaccccaagcuggacaacuacuacaagaaggacaacagcuacuucaccgagcagccgaucgaccugguccccaaccagcccuaccccaacgccuccuucgacaacuucaaguucgugugcgacaacaucaaguucgccgacgaccucaaccagcugacgggguacaagaagccggccagccgcgagcugaaggugaccuucuuccccgaccucaacggcgacgucguggcgaucgacuacaagcacuacacccccuccuucaagaagggcgccaagcugcugcacaagcccaucguguggcacgucaacaacgccaccaacaaggccacguacaagccgaacaccuggugcauccggugccucuggagcaccaagcccguggagaccuccaacagcuucgacgugcugaaguccgaggacgcgcaggggauggacaaccuggccugcgaggaccucaagcccgucagcgaggaggugguggagaaccccacgauccagaaggacguccuggagugcaacgugaagaccaccgagguggucggcgacaucauccugaagccggccaacaacucccucaagaucaccgaggagguggggcacacggaccugauggccgccuacguggacaacagcucccugaccaucaagaagcccaacgagcucagccgcguccugggccugaagacccucgcgacccacgggcuggccgccgugaacuccgugcccugggacacgaucgccaacuacgccaagccguuccugaacaaggucgugagcaccaccaccaacaucgugacgcgcugccucaaccgggucugcaccaacuacaugcccuacuucuucacccugcugcuccagcugugcaccuucacccgcuccacgaacagccggaucaaggcguccaugcccaccaccaucgccaagaacaccgugaagagcgugggcaaguucugccuggaggccagcuucaacuaccucaagucccccaacuucagcaagcugaucaacaucaucaucugguuccugcuccuguccgucugccugggcagccucaucuacuccacggccgcccugggggugcugaugagcaaccucggcaugccguccuacugcaccggguaccgcgagggcuaccugaacagcaccaacgugaccaucgcgacguacugcaccggcuccauccccugcagcgucugccuguccgggcucgacagccuggacaccuaccccucccuggagaccauccagaucacgaucagcuccuucaagugggaccucaccgccuucggccugguggccgagugguuccuggccuacauccucuucacccgguucuucuacgugcuggggcuggccgcgaucaugcagcucuucuucagcuacuucgccguccacuucaucuccaacagcuggcugauguggcugaucaucaaccuggugcagauggcccccaucuccgccauggugcgcauguacaucuucuucgcgagcuucuacuacgucuggaagagcuacgugcacguggucgacggcugcaacuccagcaccugcaugaugugcuacaagcggaaccgcgccacgcggguggagugcaccaccaucgucaacggggugcgccgguccuucuacguguacgccaacggcggcaagggguucugcaagcuccacaacuggaacugcgucaacugcgacaccuucugcgccggcagcacguucaucuccgacgagguggcccgcgaccugagccugcaguucaagcggccgaucaaccccaccgaccaguccagcuacaucguggacuccgucaccgugaagaacgggagcauccaccucuacuucgacaaggcgggccagaagaccuacgagcgccacucccugagccacuucgugaaccuggacaaccuccgggccaacaacacgaaggggucccugcccaucaacgucaucguguucgacggcaagagcaagugcgaggaguccagcgccaaguccgccagcguguacuacucccagcugaugugccagcccauccuccugcuggaccaggcccucgucagcgacgugggcgacagcgcggagguggccgucaagauguucgacgccuacgugaacaccuucuccagcaccuucaacgugccgauggagaagcugaagacccuggucgccacggccgaggcggagcucgccaagaacgugucccuggacaacgugcugagcaccuucaucuccgccgcccgccagggguucgucgacagcgacguggagaccaaggacguggucgagugccucaagcugucccaccagagcgacaucgaggugaccggcgacuccugcaacaacuacaugcugacguacaacaagguggagaacaugaccccccgggaccucggggcgugcaucgacugcagcgcccgccacaucaacgcccaggucgccaagucccacaacaucgcccugaucuggaacgugaaggacuucaugagccuguccgagcagcuccggaagcagauccgcagcgcggccaagaagaacaaccugcccuucaagcugaccugcgccaccacgcgccagguggucaacguggugaccaccaagaucgcccucaagggcgggugaggacuagucccuguucccagagcccacuuuuuuuucuuuuuuugaaauaaaauagccugucuuucagaucucaaaggcucuuuucagagccaccaaaaaaaaaaaaaaaaaaaaaaaaaaaaaaaaaaaaaaaaaaaaaaaaaaaaaaaaaaaaaaaaaaaaaaaaaaaaaaaaaaaaaaaaaaaaaaaaaaaaa

SEQ ID NO: 20080 - RNA, 6113 nt, Artificial Sequence
  SARS-CoV-2__MT457391.1__non-structural protein 3 (NSP3) mRNA gc
aggagagucccgcagucggcguccagcggcucugcuuguucgugugugugucguugcaggccuuauucaagcuuaccauggcccccaccaaggugaccuucggcgacgacacggucaucgaggugcagggguacaagagcgugaacaucaccuucgagcuggacgagcgcaucgacaagguccucaacgagaagugcuccgccuacaccguggagcugggcaccgaggugaacgaguucgcgugcgucguggccgacgccgugaucaagacgcugcagccggucagcgagcuccugaccccccuggggaucgaccucgacgagugguccauggccaccuacuaccuguucgacgagagcggcgaguucaagcuggccucccacauguacugcagcuucuacccccccgacgaggacgaggaggagggggacugcgaggaggaggaguucgagccguccacccaguacgaguacggcacggaggacgacuaccagggcaagccccucgaguucggggcgaccagcgccgcccugcagcccgaggaggagcaggaggaggacuggcuggacgacgacucccagcagaccgugggccagcaggacgggagcgaggacaaccagaccacgaccauccagaccaucguggagguccagccccagcucgagauggagcugaccccgguggugcagacgaucgaggucaacuccuucagcggcuaccugaagcucaccgacaacguguacaucaagaacgccgacaucguggaggaggcgaagaaggucaagcccaccgugguggucaacgccgccaacguguaccugaagcacgggggcggcguggccggggcccugaacaaggcgaccaacaacgccaugcaggucgaguccgacgacuacaucgccacgaacggcccccucaagguggggggcagcugcguccuguccggccacaaccuggccaagcacugccuccacgugguggggcccaacgucaacaagggcgaggacauccagcugcugaagagcgccuacgagaacuucaaccagcacgaggugcuccuggcgccgcugcucuccgccgggaucuucggcgccgaccccauccacagccugcgggugugcgucgacaccgugcgcaccaacguguaccuggccgucuucgacaagaaccucuacgacaagcugguguccagcuuccuggagaugaagagcgagaagcagguggagcagaagaucgccgagauccccaaggaggaggucaagcccuucaucaccgaguccaagccgagcguggagcagcggaagcaggacgacaagaagaucaaggcgugcguggaggaggucacgaccacccucgaggagaccaaguuccugacggagaaccugcuccuguacaucgacaucaacgggaaccugcaccccgacuccgccacccucgugagcgacaucgacaucaccuuccugaagaaggacgcccccuacaucgugggcgacgucgugcaggagggcgugcugaccgccgucgugauccccacgaagaaggccgggggcaccaccgagaugcucgcgaaggcccugcgcaaggugccgaccgacaacuacaucacgaccuaccccgggcagggccugaacggguacaccgucgaggaggccaagaccgugcucaagaagugcaaguccgccuucuacauccugcccagcaucaucuccaacgagaagcaggagauccugggcaccgugagcuggaaccuccgggagaugcuggcgcacgccgaggagacgcgcaagcugaugcccgucugcguggagaccaaggccaucguguccaccauccagcggaaguacaagggcaucaagauccaggagggggucguggacuacggcgcccgcuucuacuucuacaccagcaagacgaccguggccucccugaucaacacccucaacgaccugaacgagacccuggucacgaugccgcucggguacgugacccacggccugaaccuggaggaggcggcccgguacaugcgcagccucaaggugcccgccaccgucuccgugagcucccccgacgccgugaccgccuacaacggguaccugacgagcuccagcaagacccccgaggagcacuucaucgagaccaucucccuggcgggcagcuacaaggacuggagcuacuccggccagagcacccagcucgggaucgaguuccugaagcggggcgacaaguccgucuacuacacgagcaacccgaccaccuuccaccuggacggggaggugaucaccuucgacaaccucaagacgcugcugucccuccgcgaggugcggaccaucaaggucuucaccaccguggacaacaucaaccugcacacgcagguggucgacaugagcaugaccuacggccagcaguucggccccaccuaccuggacggggccgacgugaccaagaucaagccccacaacucccacgagggcaagacguucuacgugcucccgaacgacgacacccugcgcgucgaggccuucgaguacuaccacaccaccgaccccagcuuccuggggcgguacauguccgcccucaaccacacgaagaaguggaaguacccccaggugaacggccugaccagcaucaagugggccgacaacaacugcuaccuggcgaccgcccuccugacccugcagcagaucgagcucaaguucaaccccccggcccugcaggacgccuacuaccgcgcgcgggccggggaggccgccaacuucugcgcccugauccucgcguacugcaacaagacggugggcgagcugggcgacguccgcgagaccauguccuaccuguuccagcacgccaaccucgacagcugcaagcgggugcugaacgucgugugcaagaccugcgggcagcagcagaccacccugaagggcguggaggccgucauguacauggggacgcucuccuacgagcaguucaagaagggcgugcagauccccugcaccugcgggaagcaggccaccaaguaccuggugcagcaggagagccccuucgucaugauguccgcccccccggcgcaguacgagcugaagcacggcaccuucacgugcgccagcgaguacaccggcaacuaccagugcgggcacuacaagcacaucaccuccaaggagacccucuacugcaucgacggcgcccugcugacgaagagcagcgaguacaaggggcccaucaccgacguguucuacaaggagaacuccuacaccaccacgaucaagcccgugaccuacaagcucgacggcgucgugugcaccgagaucgaccccaagcuggacaacuacuacaagaaggacaacagcuacuucaccgagcagccgaucgaccuggugcccaaccagcccuaccccaacgccuccuucgacaacuucaaguucgucugcgacaacaucaaguucgccgacgaccucaaccagcugacgggguacaagaagccggcgagccgcgagcugaagaucaccuucuuccccgaccucaacggcgacgugguggccaucgacuacaagcacuacacccccuccuucaagaagggcgccaagcugcugcacaagcccaucgucuggcacgugaacaacgccaccaacaaggcgacguacaagccgaacaccuggugcauccggugccucuggagcaccaagcccguggagaccuccaacagcuucgacguccugaaguccgaggacgcccaggggauggacaaccuggccugcgaggaccucaagcccgugagcgaggagguggucgagaaccccacgauccagaaggacgugcuggagugcaacgugaagaccaccgaggucgugggcgacaucauccugaagccggccaacaacucccucaagaucaccgaggagguggggcacacggaccugauggccgcguacgucgacaacagcucccugaccaucaagaagcccaacgagcucagccgcgugcugggccugaagacccucgccacccacgggcuggccgccgugaacuccguccccugggacacgaucgccaacuacgcgaagccguuccugaacaagguggugagcaccaccaccaacaucgucacgcgcugccucaaccgggugugcaccaacuacaugcccuacuucuucacccugcugcuccagcugugcaccuucacccgcuccacgaacagccggaucaaggccuccaugcccaccaccaucgccaagaacaccgugaagagcgucggcaaguucugccuggaggccagcuucaacuaccucaagucccccaacuucagcaagcugaucaacaucaucaucugguuccugcuccuguccgugugccugggcagccucaucuacuccacggccgcgcugggggugcugaugagcaaccucggcaugccguccuacugcaccggguaccgcgagggcuaccugaacagcaccaacgucaccaucgccacguacugcaccggcuccauccccugcagcgugugccuguccgggcucgacagccuggacaccuaccccucccuggagaccauccagaucacgaucagcuccuucaagugggaccucaccgccuucggccugguggccgagugguuccuggccuacauccucuucacccgguucuucuacguccuggggcuggcggccaucaugcagcucuucuucagcuacuucgccgugcacuucaucuccaacagcuggcugauguggcugaucaucaaccuggugcagauggcccccaucuccgcgaugguccgcauguacaucuucuucgccagcuucuacuacguguggaagagcuacgugcacgucguggacggcugcaacuccagcaccugcaugaugugcuacaagcggaaccgcgccacgcggguggagugcaccaccaucgucaacggggugcgccgguccuucuacgucuacgccaacggcggcaagggguucugcaagcuccacaacuggaacugcgugaacugcgacaccuucugcgccggcagcacguucaucuccgacgagguggcgcgcgaccugagccugcaguucaagcggccgaucaaccccaccgaccaguccagcuacaucgucgacuccgugaccgugaagaacgggagcauccaccucuacuucgacaaggccggccagaagaccuacgagcgccacucccugagccacuucgucaaccuggacaaccuccgggccaacaacacgaaggggucccugcccaucaacgugaucguguucgacggcaagagcaagugcgaggaguccagcgccaaguccgccagcgucuacuacucccagcugaugugccagcccauccuccugcuggaccaggcgcucgugagcgacgugggcgacagcgccgaggucgccgugaagauguucgacgccuacgugaacaccuucuccagcaccuucaacgucccgauggagaagcugaagacccugguggccacggcggaggccgagcucgccaagaacgugucccuggacaacguccugagcaccuucaucuccgccgcgcgccagggguucguggacagcgacguggagaccaaggacgucguggagugccucaagcugucccaccagagcgacaucgaggugaccggcgacuccugcaacaacuacaugcugacguacaacaaggucgagaacaugaccccccgggaccucggggccugcaucgacugcagcgcccgccacaucaacgcccagguggccaagucccacaacaucgcgcugaucuggaacgugaaggacuucaugagccuguccgagcagcuccggaagcagauccgcagcgccgccaagaagaacaaccugcccuucaagcugaccugcgccaccacgcgccaggucgugaacguggucaccaccaagaucgcccucaagggcgggugaggacuagucccuguucccagagcccacuuuuuuuucuuuuuuugaaauaaaauagccugucuuucagaucucaaaggcucuuuucagagccaccaaaaaaaaaaaaaaaaaaaaaaaaaaaaaaaaaaaaaaaaaaaaaaaaaaaaaaaaaaaaaaaaaaaaaaaaaaaaaaaaaaaaaaaaaaaaaaaaaaaaa

SEQ ID NO: 20081 - RNA, 6113 nt, Artificial Sequence
  SARS-CoV-2__MT457392.1__non-structural protein 3 (NSP3) mRNA gc
aggagagucccgcagucggcguccagcggcucugcuuguucgugugugugucguugcaggccuuauucaagcuuaccauggcccccaccaaggugaccuucggcgacgacacggucaucgaggugcagggguacaagagcgugaacaucaccuucgagcuggacgagcgcaucgacaagguccucaacgagaagugcuccgccuacaccguggagcugggcaccgaggugaacgaguucgcgugcgucguggccgacgccgugaucaagacgcugcagccggucagcgagcuccugaccccccuggggaucgaccucgacgagugguccauggccaccuacuaccuguucgacgagagcggcgaguucaagcuggccucccacauguacugcagcuucuacccccccgacgaggacgaggaggagggggacugcgaggaggaggaguucgagccguccacccaguacgaguacggcacggaggacgacuaccagggcaagccccucgaguucggggcgaccagcgccgcccugcagcccgaggaggagcaggaggaggacuggcuggacgacgacucccagcagaccgugggccagcaggacgggagcgaggacaaccagaccacgaccauccagaccaucguggagguccagccccagcucgagauggagcugaccccgguggugcagacgaucgaggucaacuccuucagcggcuaccugaagcucaccgacaacguguacaucaagaacgccgacaucguggaggaggcgaagaaggucaagcccaccgugguggucaacgccgccaacguguaccugaagcacgggggcggcguggccggggcccugaacaaggcgaccaacaacgccaugcaggucgaguccgacgacuacaucgccacgaacggcccccucaagguggggggcagcugcguccuguccggccacaaccuggccaagcacugccuccacgugguggggcccaacgucaacaagggcgaggacauccagcugcugaagagcgccuacgagaacuucaaccagcacgaggugcuccuggcgccgcugcucuccgccgggaucuucggcgccgaccccauccacagccugcgggugugcgucgacaccgugcgcaccaacguguaccuggccgucuucgacaagaaccucuacgacaagcugguguccagcuuccuggagaugaagagcgagaagcagguggagcagaagaucgccgagauccccaaggaggaggucaagcccuucaucaccgaguccaagccgagcguggagcagcggaagcaggacgacaagaagaucaaggcgugcguggaggaggucacgaccacccucgaggagaccaaguuccugacggagaaccugcuccuguacaucgacaucaacgggaaccugcaccccgacuccgccacccucgugagcgacaucgacaucaccuuccugaagaaggacgcccccuacaucgugggcgacgucgugcaggagggcgugcugaccgccgucgugauccccacgaagaaggccgggggcaccaccgagaugcucgcgaaggcccugcgcaaggugccgaccgacaacuacaucacgaccuaccccgggcagggccugaacggguacaccgucgaggaggccaagaccgugcucaagaagugcaaguccgccuucuacauccugcccagcaucaucuccaacgagaagcaggagauccugggcaccgugagcuggaaccuccgggagaugcuggcgcacgccgaggagacgcgcaagcugaugcccgucugcguggagaccaaggccaucguguccaccauccagcggaaguacaagggcaucaagauccaggagggggucguggacuacggcgcccgcuucuacuucuacaccagcaagacgaccguggccucccugaucaacacccucaacgaccugaacgagacccuggucacgaugccgcucggguacgugacccacggccugaaccuggaggaggcggcccgguacaugcgcagccucaaggugcccgccaccgucuccgugagcucccccgacgccgugaccgccuacaacggguaccugacgagcuccagcaagacccccgaggagcacuucaucgagaccaucucccuggcgggcagcuacaaggacuggagcuacuccggccagagcacccagcucgggaucgaguuccugaagcggggcgacaaguccgucuacuacacgagcaacccgaccaccuuccaccuggacggggaggugaucaccuucgacaaccucaagacgcugcugucccuccgcgaggugcggaccgucaagguguucaccaccguggacaacaucaaccugcacacgcaggucguggacaugagcaugaccuacggccagcaguucggccccaccuaccuggacggggccgacgugaccaagaucaagccccacaacucccacgagggcaagacguucuacguccucccgaacgacgacacccugcgcguggaggccuucgaguacuaccacaccaccgaccccagcuuccuggggcgguacauguccgcccucaaccacacgaagaaguggaaguacccccaggugaacggccugaccagcaucaagugggccgacaacaacugcuaccuggcgaccgcccuccugacccugcagcagaucgagcucaaguucaaccccccggcccugcaggacgccuacuaccgcgcgcgggccggggaggccgccaacuucugcgcccugauccucgcguacugcaacaagacggucggcgagcugggcgacgugcgcgagaccauguccuaccuguuccagcacgccaaccucgacagcugcaagcggguccugaacguggugugcaagaccugcgggcagcagcagaccacccugaagggcgucgaggccgugauguacauggggacgcucuccuacgagcaguucaagaagggcgugcagauccccugcaccugcgggaagcaggccaccaaguaccugguccagcaggagagccccuucgugaugauguccgcccccccggcgcaguacgagcugaagcacggcaccuucacgugcgccagcgaguacaccggcaacuaccagugcgggcacuacaagcacaucaccuccaaggagacccucuacugcaucgacggcgcccugcugacgaagagcagcgaguacaaggggcccaucaccgacguguucuacaaggagaacuccuacaccaccacgaucaagcccgucaccuacaagcucgacggcguggugugcaccgagaucgaccccaagcuggacaacuacuacaagaaggacaacagcuacuucaccgagcagccgaucgaccugguccccaaccagcccuaccccaacgccuccuucgacaacuucaaguucgugugcgacaacaucaaguucgccgacgaccucaaccagcugacgggguacaagaagccggcgagccgcgagcugaaggugaccuucuuccccgaccucaacggcgacgucguggccaucgacuacaagcacuacacccccuccuucaagaagggcgccaagcugcugcacaagcccaucguguggcacgucaacaacgccaccaacaaggcgacguacaagccgaacaccuggugcauccggugccucuggagcaccaagcccguggagaccuccaacagcuucgacgugcugaaguccgaggacgcccaggggauggacaaccuggccugcgaggaccucaagcccgucagcgaggaggugguggagaaccccacgauccagaaggacguccuggagugcaacgugaagaccaccgagguggucggcgacaucauccugaagccggccaacaacucccucaagaucaccgaggagguggggcacacggaccugauggccgcguacguggacaacagcucccugaccaucaagaagcccaacgagcucagccgcguccugggccugaagacccucgccacccacgggcuggccgccgugaacuccgugcccugggacacgaucgccaacuacgcgaagccguuccugaacaaggucgugagcaccaccaccaacaucgugacgcgcugccucaaccgggucugcaccaacuacaugcccuacuucuucacccugcugcuccagcugugcaccuucacccgcuccacgaacagccggaucaaggccuccaugcccaccaccaucgccaagaacaccgugaagagcgugggcaaguucugccuggaggccagcuucaacuaccucaagucccccaacuucagcaagcugaucaacaucaucaucugguuccugcuccuguccgucugccugggcagccucaucuacuccacggccgcgcugggggugcugaugagcaaccucggcaugccguccuacugcaccggguaccgcgagggcuaccugaacagcaccaacgugaccaucgccacguacugcaccggcuccauccccugcagcgucugccuguccgggcucgacagccuggacaccuaccccucccuggagaccauccagaucacgaucagcuccuucaagugggaccucaccgccuucggccugguggccgagugguuccuggccuacauccucuucacccgguucuucuacgugcuggggcuggcggccaucaugcagcucuucuucagcuacuucgccguccacuucaucuccaacagcuggcugauguggcugaucaucaaccuggugcagauggcccccaucuccgcgauggugcgcauguacaucuucuucgccagcuucuacuacgucuggaagagcuacgugcacguggucgacggcugcaacuccagcaccugcaugaugugcuacaagcggaaccgcgccacgcggguggagugcaccaccaucgucaacggggugcgccgguccuucuacguguacgccaacggcggcaagggguucugcaagcuccacaacuggaacugcgucaacugcgacaccuucugcgccggcagcacguucaucuccgacgagguggcgcgcgaccugagccugcaguucaagcggccgaucaaccccaccgaccaguccagcuacaucguggacuccgucaccgugaagaacgggagcauccaccucuacuucgacaaggccggccagaagaccuacgagcgccacucccugagccacuucgugaaccuggacaaccuccgggccaacaacacgaaggggucccugcccaucaacgucaucguguucgacggcaagagcaagugcgaggaguccagcgccaaguccgccagcguguacuacucccagcugaugugccagcccauccuccugcuggaccaggcgcucgucagcgacgugggcgacagcgccgagguggccgucaagauguucgacgccuacgugaacaccuucuccagcaccuucaacgugccgauggagaagcugaagacccuggucgccacggcggaggccgagcucgccaagaacgugucccuggacaacgugcugagcaccuucaucuccgccgcgcgccagggguucgucgacagcgacguggagaccaaggacguggucgagugccucaagcugucccaccagagcgacaucgaggugaccggcgacuccugcaacaacuacaugcugacguacaacaagguggagaacaugaccccccgggaccucggggccugcaucgacugcagcgcccgccacaucaacgcccaggucgccaagucccacaacaucgcgcugaucuggaacgugaaggacuucaugagccuguccgagcagcuccggaagcagauccgcagcgccgccaagaagaacaaccugcccuucaagcugaccugcgccaccacgcgccagguggucaacguggugaccaccaagaucgcccucaagggcgggugaggacuagucccuguucccagagcccacuuuuuuuucuuuuuuugaaauaaaauagccugucuuucagaucucaaaggcucuuuucagagccaccaaaaaaaaaaaaaaaaaaaaaaaaaaaaaaaaaaaaaaaaaaaaaaaaaaaaaaaaaaaaaaaaaaaaaaaaaaaaaaaaaaaaaaaaaaaaaaaaaaaaa

SEQ ID NO: 20082 - RNA, 6113 nt, Artificial Sequence
  SARS-CoV-2__MT457400.1__non-structural protein 3 (NSP3) mRNA gc
aggagagucccgcagucggcguccagcggcucugcuuguucgugugugugucguugcaggccuuauucaagcuuaccauggcccccaccaaggugaccuucggcgacgacacggucaucgaggugcagggguacaagagcgugaacaucaccuucgagcuggacgagcgcaucgacaagguccucaacgagaagugcuccgccuacaccguggagcugggcaccgaggugaacgaguucgcgugcgucguggccgacgccgugaucaagacgcugcagccggucagcgagcuccugaccccccuggggaucgaccucgacgagugguccauggccaccuacuaccuguucgacgagagcggcgaguucaagcuggccucccacauguacugcagcuucuacccccccgacgaggacgaggaggagggggacugcgaggaggaggaguucgagccguccacccaguacgaguacggcacggaggacgacuaccagggcaagccccucgaguucggggcgaccagcgccgcccugcagcccgaggaggagcaggaggaggacuggcuggacgacgacucccagcagaccgugggccagcaggacgggagcgaguacaaccagaccacgaccauccagaccaucguggagguccagccccagcucgagauggagcugaccccgguggugcagacgaucgaggucaacuccuucagcggcuaccugaagcucaccgacaacguguacaucaagaacgccgacaucguggaggaggcgaagaaggucaagcccaccgugguggucaacgccgccaacguguaccugaagcacgggggcggcguggccggggcccugaacaaggcgaccaacaacgccaugcaggucgaguccgacgacuacaucgccacgaacggcccccucaagguggggggcagcugcguccuguccggccacaaccuggccaagcacugccuccacgugguggggcccaacgucaacaagggcgaggacauccagcugcugaagagcgccuacgagaacuucaaccagcacgaggugcuccuggcgccgcugcucuccgccgggaucuucggcgccgaccccauccacagccugcgggugugcgucgacaccgugcgcaccaacguguaccuggccgucuucgacaagaaccucuacgacaagcugguguccagcuuccuggagaugaagagcgagaagcagguggagcagaagaucgccgagauccccaaggaggaggucaagcccuucaucaccgaguccaagccgagcguggagcagcggaagcaggacgacaagaagaucaaggcgugcguggaggaggucacgaccacccucgaggagaccaaguuccugacggagaaccugcuccuguacaucgacaucaacgggaaccugcaccccgacuccgccacccucgugagcgacaucgacaucaccuuccugaagaaggacgcccccuacaucgugggcgacgucgugcaggagggcgugcugaccgccgucgugauccccacgaagaaggccgggggcaccaccgagaugcucgcgaaggcccugcgcaaggugccgaccgacaacuacaucacgaccuaccccgggcagggccugaacggguacaccgucgaggaggccaagaccgugcucaagaagugcaaguccgccuucuacauccugcccagcaucaucuccaacgagaagcaggagauccugggcaccgugagcuggaaccuccgggagaugcuggcgcacgccgaggagacgcgcaagcugaugcccgucugcguggagaccaaggccaucguguccaccauccagcggaaguacaagggcaucaagauccaggagggggucguggacuacggcgcccgcuucuacuucuacaccagcaagacgaccguggccucccugaucaacacccucaacgaccugaacgagacccuggucacgaugccgcucggguacgugacccacggccugaaccuggaggaggcggcccgguacaugcgcagccucaaggugcccgccaccgucuccgugagcucccccgacgccgugaccgccuacaacggguaccugacgagcuccagcaagacccccgaggagcacuucaucgagaccaucucccuggcgggcagcuacaaggacuggagcuacuccggccagagcacccagcucgggaucgaguuccugaagcggggcgacaaguccgucuacuacacgagcaacccgaccaccuuccaccuggacggggaggugaucaccuucgacaaccucaagacgcugcugucccuccgcgaggugcggaccaucaaggucuucaccaccguggacaacaucaaccugcacacgcagguggucgacaugagcaugaccuacggccagcaguucggccccaccuaccuggacggggccgacgugaccaagaucaagccccacaacucccacgagggcaagacguucuacgugcucccgaacgacgacacccugcgcgucgaggccuucgaguacuaccacaccaccgaccccagcuuccuggggcgguacauguccgcccucaaccacacgaagaaguggaaguacccccaggugaacggccugaccagcaucaagugggccgacaacaacugcuaccuggcgaccgcccuccugacccugcagcagaucgagcucaaguucaaccccccggcccugcaggacgccuacuaccgcgcgcgggccggggaggccgccaacuucugcgcccugauccucgcguacugcaacaagacggugggcgagcugggcgacguccgcgagaccauguccuaccuguuccagcacgccaaccucgacagcugcaagcgggugcugaacgucgugugcaagaccugcgggcagcagcagaccacccugaagggcguggaggccgucauguacauggggacgcucuccuacgagcaguucaagaagggcgugcagauccccugcaccugcgggaagcaggccaccaaguaccuggugcagcaggagagccccuucgucaugauguccgcccccccggcgcaguacgagcugaagcacggcaccuucacgugcgccagcgaguacaccggcaacuaccagugcgggcacuacaagcacaucaccuccaaggagacccucuacugcaucgacggcgcccugcugacgaagagcagcgaguacaaggggcccaucaccgacguguucuacaaggagaacuccuacaccaccacgaucaagcccgugaccuacaagcucgacggcgucgugugcaccgagaucgaccccaagcuggacaacuacuacaagaaggacaacagcuacuucaccgagcagccgaucgaccuggugcccaaccagcccuaccccaacgccuccuucgacaacuucaaguucgucugcgacaacaucaaguucgccgacgaccucaaccagcugacgggguacaagaagccggcgagccgcgagcugaaggugaccuucuuccccgaccucaacggcgacguggucgccaucgacuacaagcacuacacccccuccuucaagaagggcgccaagcugcugcacaagcccaucguguggcacgugaacaacgccaccaacaaggcgacguacaagccgaacaccuggugcauccggugccucuggagcaccaagcccgucgagaccuccaacagcuucgacgugcugaaguccgaggacgcccaggggauggacaaccuggccugcgaggaccucaagcccgugagcgaggaggucguggagaaccccacgauccagaaggacgugcuggagugcaacgucaagaccaccgagguggugggcgacaucauccugaagccggccaacaacucccucaagaucaccgaggaggucgggcacacggaccugauggccgcguacguggacaacagcucccugaccaucaagaagcccaacgagcucagccgcgugcugggccugaagacccucgccacccacgggcuggccgccgucaacuccgugcccugggacacgaucgccaacuacgcgaagccguuccugaacaagguggucagcaccaccaccaacaucgugacgcgcugccucaaccgggugugcaccaacuacaugcccuacuucuucacccugcugcuccagcugugcaccuucacccgcuccacgaacagccggaucaaggccuccaugcccaccaccaucgccaagaacaccgucaagagcgugggcaaguucugccuggaggccagcuucaacuaccucaagucccccaacuucagcaagcugaucaacaucaucaucugguuccugcuccuguccgugugccugggcagccucaucuacuccacggccgcgcuggggguccugaugagcaaccucggcaugccguccuacugcaccggguaccgcgagggcuaccugaacagcaccaacgugaccaucgccacguacugcaccggcuccauccccugcagcgugugccuguccgggcucgacagccuggacaccuaccccucccuggagaccauccagaucacgaucagcuccuucaagugggaccucaccgccuucggccuggucgccgagugguuccuggccuacauccucuucacccgguucuucuacgugcuggggcuggcggccaucaugcagcucuucuucagcuacuucgccgugcacuucaucuccaacagcuggcugauguggcugaucaucaaccugguccagauggcccccaucuccgcgauggugcgcauguacaucuucuucgccagcuucuacuacguguggaagagcuacguccacgugguggacggcugcaacuccagcaccugcaugaugugcuacaagcggaaccgcgccacgcgggucgagugcaccaccaucgugaacgggguccgccgguccuucuacguguacgccaacggcggcaagggguucugcaagcuccacaacuggaacugcgugaacugcgacaccuucugcgccggcagcacguucaucuccgacgaggucgcgcgcgaccugagccugcaguucaagcggccgaucaaccccaccgaccaguccagcuacaucguggacuccgugaccgucaagaacgggagcauccaccucuacuucgacaaggccggccagaagaccuacgagcgccacucccugagccacuucgugaaccuggacaaccuccgggccaacaacacgaaggggucccugcccaucaacgugaucgucuucgacggcaagagcaagugcgaggaguccagcgccaaguccgccagcguguacuacucccagcugaugugccagcccauccuccugcuggaccaggcgcucgugagcgacgucggcgacagcgccgagguggccgugaagauguucgacgccuacgucaacaccuucuccagcaccuucaacgugccgauggagaagcugaagacccugguggccacggcggaggccgagcucgccaagaacgucucccuggacaacgugcugagcaccuucaucuccgccgcgcgccagggguucguggacagcgacgucgagaccaaggacgugguggagugccucaagcugucccaccagagcgacaucgaggucaccggcgacuccugcaacaacuacaugcugacguacaacaagguggagaacaugaccccccgggaccucggggccugcaucgacugcagcgcccgccacaucaacgcccagguggccaagucccacaacaucgcgcugaucuggaacgucaaggacuucaugagccuguccgagcagcuccggaagcagauccgcagcgccgccaagaagaacaaccugcccuucaagcugaccugcgccaccacgcgccagguggugaacgucgugaccaccaagaucgcccucaagggcgggugaggacuagucccuguucccagagcccacuuuuuuuucuuuuuuugaaauaaaauagccugucuuucagaucucaaaggcucuuuucagagccaccaaaaaaaaaaaaaaaaaaaaaaaaaaaaaaaaaaaaaaaaaaaaaaaaaaaaaaaaaaaaaaaaaaaaaaaaaaaaaaaaaaaaaaaaaaaaaaaaaaaaa

SEQ ID NO: 20083 - RNA, 6113 nt, Artificial Sequence
  SARS-CoV-2__MT457401.1__non-structural protein 3 (NSP3) mRNA gc
aggagagucccgcagucggcguccagcggcucugcuuguucgugugugugucguugcaggccuuauucaagcuuaccauggcccccaccaaggugaccuucggcgacgacacggucaucgaggugcagggguacaagagcgugaacaucaccuucgagcuggacgagcgcaucgacaagguccucaacgagaagugcuccgccuacaccguggagcugggcaccgaggugaacgaguucgcgugcgucguggccgacgccgugaucaagacgcugcagccggucagcgagcuccugaccccccuggggaucgaccucgacgagugguccauggccaccuacuaccuguucgacgagagcggcgaguucaagcuggccucccacauguacugcagcuucuacccccccgacgaggacgaggaggagggggacugcgaggaggaggaguucgagccguccacccaguacgaguacggcacggaggacgacuaccagggcaagccccucgaguucggggcgaccagcgccgcccugcagcccgaggaggagcaggaggaggacuggcuggacgacgacucccagcagaccgugggccagcaggacgggagcgaggacaaccagaccacgaccauccagaccaucguggagguccagccccagcucgagauggagcugaccccgguggugcagacgaucgaggucaacuccuucagcggcuaccugaagcucaccgacaacguguacaucaagaacgccgacaucguggaggaggcgaagaaggucaagcccaccgugguggucaacgccgccaacguguaccugaagcacgggggcggcguggccggggcccugaacaaggcgaccaacaacgccaugcaggucgaguccgacgacuacaucgccacgaacggccuccugaagguggggggcagcugcguccuguccggccacaaccucgccaagcacugccugcacgugguggggcccaacgucaacaagggcgaggacauccagcugcucaagagcgccuacgagaacuucaaccagcacgaggugcugcuggcgccccuccuguccgccgggaucuucggcgccgacccgauccacagccugcgggugugcgucgacaccgugcgcaccaacguguaccucgccgucuucgacaagaaccuguacgacaagcugguguccagcuuccucgagaugaagagcgagaagcagguggagcagaagaucgccgagauccccaaggaggaggucaagcccuucaucaccgaguccaagcccagcguggagcagcggaagcaggacgacaagaagaucaaggcgugcguggaggaggucacgaccacccuggaggagaccaaguuccugacggagaaccuccugcuguacaucgacaucaacgggaaccuccacccggacuccgccacccuggugagcgacaucgacaucaccuuccugaagaaggacgcccccuacaucgugggcgacgucgugcaggagggcgugcucaccgccgucgugauccccacgaagaaggccgggggcaccaccgagaugcuggcgaaggcccugcgcaaggugcccaccgacaacuacaucacgaccuacccggggcagggccucaacggguacaccgucgaggaggccaagaccgugcugaagaagugcaaguccgccuucuacauccugcccagcaucaucuccaacgagaagcaggagauccucggcaccgugagcuggaaccugcgggagaugcuggcgcacgccgaggagacgcgcaagcugaugcccgucugcguggagaccaaggccaucguguccaccauccagcggaaguacaagggcaucaagauccaggagggggucguggacuacggcgcccgcuucuacuucuacaccagcaagacgaccguggccucccucaucaacacccugaacgaccugaacgagacccucgucacgaugccccugggguacgugacccacggccugaaccucgaggaggcggcccgguacaugcgcagccugaaggugccggccaccgucuccgugagcucccccgacgccgugaccgccuacaacggguaccugacgagcuccagcaagacccccgaggagcacuucaucgagaccaucucccucgcgggcagcuacaaggacuggagcuacuccggccagagcacccagcuggggaucgaguuccugaagcggggcgacaaguccgucuacuacacgagcaaccccaccaccuuccaccucgacggggaggugaucaccuucgacaaccugaagacgcugcucucccugcgcgaggugcggaccaucaaggucuucaccaccguggacaacaucaaccugcacacgcagguggucgacaugagcaugaccuacggccagcaguucggcccgaccuaccucgacggggccgacgugaccaagaucaagccccacaacucccacgagggcaagacguucuacgugcugcccaacgacgacacccugcgcgucgaggccuucgaguacuaccacaccaccgacccgagcuuccucgggcgguacauguccgcccugaaccacacgaagaaguggaaguacccccaggugaacggccugaccagcaucaagugggccgacaacaacugcuaccucgcgaccgcccugcugacccuccagcagaucgagcugaaguucaacccccccgcccugcaggacgccuacuaccgcgcgcgggccggggaggccgccaacuucugcgcccucauccuggcguacugcaacaagacggugggcgagcugggcgacguccgcgagaccauguccuaccucuuccagcacgccaaccuggacagcugcaagcgggugcugaacgucgugugcaagaccugcgggcagcagcagaccacccucaagggcguggaggccgucauguacauggggacgcuguccuacgagcaguucaagaagggcgugcagaucccgugcaccugcgggaagcaggccaccaaguaccuggugcagcaggagagccccuucgucaugauguccgccccccccgcgcaguacgagcucaagcacggcaccuucacgugcgccagcgaguacaccggcaacuaccagugcgggcacuacaagcacaucaccuccaaggagacccuguacugcaucgacggcgcccugcucacgaagagcagcgaguacaaggggccgaucaccgacguguucuacaaggagaacuccuacaccaccacgaucaagcccgugaccuacaagcuggacggcgucgugugcaccgagaucgaccccaagcuggacaacuacuacaagaaggacaacagcuacuucaccgagcagcccaucgaccucgugccgaaccagcccuaccccaacgccuccuucgacaacuucaaguucgucugcgacaacaucaaguucgccgacgaccugaaccagcugacgggguacaagaagcccgcgagccgcgagcucaaggugaccuucuucccggaccugaacggcgacguggucgccaucgacuacaagcacuacacccccuccuucaagaagggcgccaagcugcuccacaagcccaucguguggcacgugaacaacgccaccaacaaggucacguacaagcccaacaccuggugcauccggugccuguggagcaccaagccgguggagaccuccaacagcuucgacgugcugaaguccgaggacgcgcaggggauggacaaccucgccugcgaggaccugaagcccgucagcgaggaggugguggagaaccccacgauccagaaggacguccuggagugcaacgugaagaccaccgagguggucggcgacaucauccucaagcccgccaacaacucccugaagaucaccgaggagguggggcacacggaccugauggccgccuacguggacaacagcucccucaccaucaagaagccgaacgagcugagccgcguccugggccucaagacccuggcgacccacgggcuggccgccgugaacuccgugcccugggacacgaucgccaacuacgccaagcccuuccucaacaaggucgugagcaccaccaccaacaucgugacgcgcugccugaaccgggucugcaccaacuacaugccguacuucuucacccugcuccugcagcugugcaccuucacccgcuccacgaacagccggaucaaggcguccaugcccaccaccaucgccaagaacaccgugaagagcgugggcaaguucugccucgaggccagcuucaacuaccugaagucccccaacuucagcaagcugaucaacaucaucaucugguuccuccugcuguccgucugccucggcagccugaucuacuccacggccgcccugggggugcucaugagcaaccugggcaugcccuccuacugcaccggguaccgcgagggcuaccugaacagcaccaacgugaccaucgcgacguacugcaccggcuccaucccgugcagcgucugccucuccgggcuggacagccuggacaccuaccccucccucgagaccauccagaucacgaucagcuccuucaagugggaccugaccgccuucggccugguggccgagugguuccucgccuacauccuguucacccgguucuucuacgugcuggggcucgccgcgaucaugcagcuguucuucagcuacuucgccguccacuucaucuccaacagcuggcugauguggcugaucaucaaccucgugcagauggcccccaucuccgccauggugcgcauguacaucuucuucgcgagcuucuacuacgucuggaagagcuacgugcacguggucgacggcugcaacuccagcaccugcaugaugugcuacaagcggaaccgcgccacgcggguggagugcaccaccaucgucaacggggugcgccgguccuucuacguguacgccaacggcggcaagggguucugcaagcugcacaacuggaacugcgucaacugcgacaccuucugcgccggcagcacguucaucuccgacgagguggcccgcgaccugagccuccaguucaagcggcccaucaacccgaccgaccaguccagcuacaucguggacuccgucaccgugaagaacgggagcauccaccuguacuucgacaaggcgggccagaagaccuacgagcgccacucccugagccacuucgugaaccucgacaaccugcgggccaacaacacgaaggggucccugcccaucaacgucaucguguucgacggcaagagcaagugcgaggaguccagcgccaaguccgccagcguguacuacucccagcucaugugccagcccauccugcugcucgaccaggcccuggucagcgacgugggcgacagcgcggagguggccgucaagauguucgacgccuacgugaacaccuucuccagcaccuucaacgugcccauggagaagcugaagacccucgucgccacggccgaggcggagcuggccaagaacgugucccuggacaacgugcucagcaccuucaucuccgccgcccgccagggguucgucgacagcgacguggagaccaaggacguggucgagugccugaagcugucccaccagagcgacaucgaggugaccggcgacuccugcaacaacuacaugcucacguacaacaagguggagaacaugaccccgcgggaccugggggcgugcaucgacugcagcgcccgccacaucaacgcccaggucgccaagucccacaacaucgcccugaucuggaacgugaaggacuucaugagccucuccgagcagcugcggaagcagauccgcagcgcggccaagaagaacaaccugcccuucaagcucaccugcgccaccacgcgccagguggucaacguggugaccaccaagaucgcccugaagggcgggugaggacuagucccuguucccagagcccacuuuuuuuucuuuuuuugaaauaaaauagccugucuuucagaucucaaaggcucuuuucagagccaccaaaaaaaaaaaaaaaaaaaaaaaaaaaaaaaaaaaaaaaaaaaaaaaaaaaaaaaaaaaaaaaaaaaaaaaaaaaaaaaaaaaaaaaaaaaaaaaaaaaaa

SEQ ID NO: 20084 - RNA, 6113 nt, Artificial Sequence
  SARS-CoV-2__MT451874.1__non-structural protein 3 (NSP3) mRNA gc
aggagagucccgcagucggcguccagcggcucugcuuguucgugugugugucguugcaggccuuauucaagcuuaccauggcccccaccaaggugaccuucggcgacgacacggucaucgaggugcagggguacaagagcgugaacaucaccuucgagcuggacgagcgcaucgacaagguccucaacgagaagugcuccgccuacaccguggagcugggcaccgaggugaacgaguucgcgugcgucguggccgacgccgugaucaagacgcugcagccggucagcgagcuccugaccccccuggggaucgaccucgacgagugguccauggccaccuacuaccuguucgacgagagcggcgaguucaagcuggccucccacauguacugcagcuucuacccccccgacgaggacgaggaggagggggacugcgaggaggaggaguucgagccguccacccaguacgaguacggcacggaggacgacuaccagggcaagccccucgaguucggggcgaccagcgccgcccugcagcccgaggaggagcaggaggaggacuggcuggacgacgacucccagcagaccgugggccagcaggacgggagcgaggacaaccagaccacgaccauccagaccaucguggagguccagccccagcucgagauggagcugaccccgguggugcagacgaucgaggucaacuccuucagcggcuaccugaagcucaccgacaacguguacaucaagaacgccgacaucguggaggaggcgaagaaggucaagcccaccgugguggucaacgccgccaacguguaccugaagcacgggggcggcguggccggggcccugaacaaggcgaccaacaacgccaugcaggucgaguccgacgacuacaucgccacgaacggcccccucaagguggggggcagcugcguccuguccggccacaaccuggccaagcacugccuccacgugguggggcccaacgucaacaagggcgaggacauccagcugcugaagagcgccuacgagaacuucaaccagcacgaggugcuccuggcgccgcugcucuccgccgggaucuucggcgccgaccccauccacagccugcgggugugcgucgacaccgugcgcaccaacguguaccuggccgucuucgacaagaaccucuacgacaagcugguguccagcuuccuggagaugaagagcgagaagcagguggagcagaagaucgccgagauccccaaggaggaggucaagcccuucaucaccgaguccaagccgagcguggagcagcggaagcaggacgacaagaagaucaaggcgugcguggaggaggucacgaccacccucgaggagaccaaguuccugacggagaaccugcuccuguacaucgacaucaacgggaaccugcaccccgacuccgccacccucgugagcgacaucgacaucaccuuccugaagaaggacgcccccuacaucgugggcgacgucgugcaggagggcgugcugaccgccgucgugauccccacgaagaaggccgggggcaccaccgagaugcucgcgaaggcccugcgcaaggugccgaccgacaacuacaucacgaccuaccccgggcagggccugaacggguacaccgucgaggaggccaagaccgugcucaagaagugcaaguccgccuucuacauccugcccagcaucaucuccaacgagaagcaggagauccugggcaccgugagcuggaaccuccgggagaugcuggcgcacgccgaggagacgcgcaagcugaugcccgucugcguggagaccaaggccaucguguccaccauccagcggaaguacaagggcaucaagauccaggagggggucguggacuacggcgcccgcuucuacuucuacaccagcaagacgaccguggccucccugaucaacacccucaacgaccugaacgagacccuggucacgaugccgcucggguacgugacccacggccugaaccuggaggaggcggcccgguacaugcgcagccucaaggugcccgccaccgucuccgugagcucccccgacgccgugaccgccuacaacggguaccugacgagcuccagcaagacccccgaggagcacuucaucgagaccaucucccuggcgggcagcuacaaggacuggagcuacuccggccagagcacccagcucgggaucgaguuccugaagcggggcgacaaguccgucuacuacacgagcaacccgaccaccuuccaccuggacggggaggugaucaccuucgacaaccucaagacgcugcugucccuccgcgaggugcggaccaucaaggucuucaccaccguggacaacaucaaccugcacacgcagguggucgacaugagcaugaccuacggccagcaguucggccccaccuaccuggacggggccgacgugaccaagaucaagccccacaacucccacgagggcaagacguucuacgugcucccgaacgacgacacccugcgcgucgaggccuucgaguacuaccacaccaccgaccccagcuuccuggggcgguacauguccgcccucaaccacacgaagaaguggaaguacccccaggugaacggccugaccagcaucaagugggccgacaacaacugcuaccuggcgaccgcccuccugacccugcagcagaucgagcucaaguucaaccccccggcccugcaggacgccuacuaccgcgcgcgggccggggaggccgccaacuucugcgcccugauccucgcguacugcaacaagacggugggcgagcugggcgacguccgcgagaccauguccuaccuguuccagcacgccaaccucgacagcugcaagcgggugcugaacgucgugugcaagaccugcgggcagcagcagaccacccugaagggcguggaggccgucauguacauggggacgcucuccuacgagcaguucaagaagggcgugcagauccccugcaccugcgggaagcaggccaccaaguaccuggugcagcaggagagccccuucgucaugauguccgcccccccggcgcaguacgagcugaagcacggcaccuucacgugcgccagcgaguacaccggcaacuaccagugcgggcacuacaagcacaucaccuccaaggagacccucuacugcaucgacggcgcccugcugacgaagagcagcgaguacaaggggcccaucaccgacguguucuacaaggagaacuccuacaccaccacgaucaagcccgugaccuacaagcucgacggcgucgugugcaccgagaucgaccccaagcuggacaacuacuacaagaaggacaacagcuacuucaccgagcagccgaucgaccuggugcccaaccagcccuaccccaacgccuccuucgacaacuucaaguucgucugcgacaacaucaaguucgccgacgaccucaaccagcugacgggguacaagaagccggcgagccgcgagcugaaggugaccuucuuccccgaccucaacggcgacguggucgccaucgacuacaagcacuacacccccuccuucaagaagggcgccaagcugcugcacaagcccaucguguggcacgugaacaacgccaccaacaaggcgacguacaagccgaacaccuggugcauccggugccucuggcgcaagaagcccgucgagaccagcaacuccuucgacgugcugaagagcgaggacgcccaggggauggacaaccuggccugcgaggaccucaagcccguguccgaggaggucguggagaaccccaccauccagaaggacgugcuggagugcaacgucaagacgaccgagguggugggcgacaucauccugaagccggccaacaacagccucaagaucaccgaggaggucgggcacaccgaccugauggccgcguacguggacaacuccagccugacgaucaagaagcccaacgagcucucccgcgugcugggccugaagacccucgccacccacgggcuggccgccgucaacagcgugcccugggacaccaucgccaacuacgcgaagccguuccccaacaagguggucuccacgaccaccaacaucgugacccggugccugaaccgcgugugcacgaacuacaugcccuacuucuucacccuccugcugcagcucugcaccuucacccggagcaccaacucccgcaucaaggccagcaugcccacgaccaucgccaagaacaccgucaaguccgugggcaaguucugccuggaggccagcuucaacuaccugaagagcccgaacuucuccaagcucaucaacaucaucaucugguuccugcugcucagcgugugccugggcucccugaucuacagcaccgccgcgcucgggguccugauguccaaccugggcaugcccagcuacugcacgggguaccgggagggcuaccucaacuccaccaacgugaccaucgccaccuacugcacgggcagcauccccugcuccgugugccugagcgggcuggacucccucgacaccuaccccagccuggagaccauccagaucaccaucuccagcuucaagugggaccugacggccuucggccucgucgccgagugguuccuggccuacauccuguucacccgcuucuucuacgugcucgggcuggcggccaucaugcagcuguucuucuccuacuucgccgugcacuucaucagcaacuccuggcucauguggcugaucaucaaccugguccagauggccccgaucagcgcgauggugcggauguacaucuucuucgccuccuucuacuacguguggaagagcuacguccacgugguggacggcugcaacagcuccaccugcaugaugugcuacaagcgcaaccgggccacccgcgucgagugcacgaccaucgugaacgggguccggcgcagcuucuacguguacgccaacggcggcaagggguucugcaagcugcacaacuggaacugcgugaacugcgacaccuucugcgccggcuccaccuucaucagcgacgaggucgcgcgggaccucucccugcaguucaagcgccccaucaaccccacggaccagagcuccuacaucguggacagcgugaccgucaagaacggguccauccaccuguacuucgacaaggccggccagaagaccuacgagcggcacagccucucccacuucgugaaccuggacaaccugcgcgccaacaacaccaaggggagccuccccaucaacgugaucgucuucgacggcaaguccaagugcgaggagagcuccgccaagagcgccuccguguacuacagccagcugaugugccagccgauccugcuccuggaccaggcgcugguguccgacgucggcgacagcgccgagguggccgugaagauguucgacgccuacgucaacacguucagcuccaccuucaacgugcccauggagaagcucaagacccugguggccaccgcggaggccgagcuggccaagaacgucagccucgacaacgugcuguccacguucaucagcgccgcgcggcagggguucguggacuccgacgucgagaccaaggacgugguggagugccugaagcucagccaccaguccgacaucgaggucaccggcgacagcugcaacaacuacaugcugaccuacaacaagguggagaacaugacgccccgcgaccugggggccugcaucgacugcuccgcccggcacaucaacgcccagguggccaagagccacaacaucgcgcucaucuggaacgucaaggacuucaugucccugagcgagcagcugcgcaagcagauccgcuccgccgccaagaagaacaaccuccccuucaagcugaccugcgccaccacccggcagguggugaacgucgugacgaccaagaucgcccugaagggcgggugaggacuagucccuguucccagagcccacuuuuuuuucuuuuuuugaaauaaaauagccugucuuucagaucucaaaggcucuuuucagagccaccaaaaaaaaaaaaaaaaaaaaaaaaaaaaaaaaaaaaaaaaaaaaaaaaaaaaaaaaaaaaaaaaaaaaaaaaaaaaaaaaaaaaaaaaaaaaaaaaaaaaa

SEQ ID NO: 20085 - RNA, 6113 nt, Artificial Sequence
  SARS-CoV-2__MT451888.1__non-structural protein 3 (NSP3) mRNA gc
aggagagucccgcagucggcguccagcggcucugcuuguucgugugugugucguugcaggccuuauucaagcuuaccauggcccccaccaaggugaccuucggcgacgacacggucaucgaggugcagggguacaagagcgugaacaucaccuucgagcuggacgagcgcaucgacaagguccucaacgagaagugcuccgccuacaccguggagcugggcaccgaggugaacgaguucgcgugcgucguggccgacgccgugaucaagacgcugcagccggucagcgagcuccugaccccccuggggaucgaccucgacgagugguccauggccaccuacuaccuguucgacgagagcggcgaguucaagcuggccucccacauguacugcagcuucuacccccccgacgaggacgaggaggagggggacugcgaggaggaggaguucgagccguccacccaguacgaguacggcacggaggacgacuaccagggcaagccccucgaguucggggcgaccagcgccgcccugcagcccgaggaggagcaggaggaggacuggcuggacgacgacucccagcagaccgugggccagcaggacgggagcgaggacaaccagaccacgaccauccagaccaucguggagguccagccccagcucgagauggagcugaccccgguggugcagacgaucgaggucaacuccuucagcggcuaccugaagcucaccgacaacguguacaucaagaacgccgacaucguggaggaggcgaagaaggucaagcccaccgugguggucaacgccgccaacguguaccugaagcacgggggcggcguggccggggcccugaacaaggcgaccaacaacgccaugcaggucgaguccgacgacuacaucgccacgaacggcccccucaagguggggggcagcugcguccuguccggccacaaccuggccaagcacugccuccacgugguggggcccaacgucaacaagggcgaggacauccagcugcugaagagcgccuacgagaacuucaaccagcacgaggugcuccuggcgccgcugcucuccgccgggaucuucggcgccgaccccauccacagccugcgggugugcgucgacaccgugcgcaccaacguguaccuggccgucuucgacaagaaccucuacgacaagcugguguccagcuuccuggagaugaagagcgagaagcagguggagcagaagaucgccgagauccccaaggaggaggucaagcccuucaucaccgaguccaagccgagcguggagcagcggaagcaggacgacaagaagaucaaggcgugcguggaggaggucacgaccacccucgaggagaccaaguuccugacggagaaccugcuccuguacaucgacaucaacgggaaccugcaccccgacuccgccacccucgugagcgacaucgacaucaccuuccugaagaaggacgcccccuacaucgugggcgacgucgugcaggagggcgugcugaccgccgucgugauccccacgaagaaggccgggggcaccaccgagaugcucgcgaaggcccugcgcaaggugccgaccgacaacuacaucacgaccuaccccgggcagggccugaacggguacaccgucgaggaggccaagaccgugcucaagaagugcaaguccgccuucuacauccugcccagcaucaucuccaacgagaagcaggagauccugggcaccgugagcuggaaccuccgggagaugcuggcgcacgccgaggagacgcgcaagcugaugcccgucugcguggagaccaaggccaucguguccaccauccagcggaaguacaagggcaucaagauccaggagggggucguggacuacggcgcccgcuucuacuucuacaccagcaagacgaccguggccucccugaucaacacccucaacgaccugaacgagacccuggucacgaugccgcucggguacgugacccacggccugaaccuggaggaggcggcccgguacaugcgcagccucaaggugcccgccaccgucuccgugagcucccccgacgccgugaccgccuacaacggguaccugacgagcuccagcaagacccccgaggagcacuucaucgagaccaucucccuggcgggcagcuacaaggacuggagcuacuccggccagagcacccagcucgggaucgaguuccugaagcggggcgacaaguccgucuacuacacgagcaacccgaccaccuuccaccuggacggggaggugaucaccuucgacaaccucaagacgcugcugucccuccgcgaggugcggaccaucaaggucuucaccaccguggacaacaucaaccugcacacgcagguggucgacaugagcaugaccuacggccagcaguucggccccaccuaccuggacggggccgacgugaccaagaucaagccccacaacucccacgagggcaagacguucuacgugcucccgaacgacgacacccugcgcgucgaggccuucgaguacuaccacaccaccgaccccagcuuccuggggcgguacauguccgcccucaaccacacgaagaaguggaaguacccccaggugaacggccugaccagcaucaagugggccgacaacaacugcuaccuggcgaccgcccuccugacccugcagcagaucgagcucaaguucaaccccccggcccugcaggacgccuacuaccgcgcgcgggccggggaggccgccaacuucugcgcccugauccucgcguacugcaacaagacggugggcgagcugggcgacguccgcgagaccauguccuaccuguuccagcacgccaaccucgacagcugcaagcgggugcugaacgucgugugcaagaccugcgggcagcagcagaccacccugaagggcguggaggccgucauguacauggggacgcucuccuacgagcaguucaagaagggcgugcagauccccugcaccugcgggaagcaggccaccaaguaccuggugcagcaggagagccccuucgucaugauguccgcccccccggcgcaguacgagcugaagcacggcaccuucacgugcgccagcgaguacaccggcaacuaccagugcgggcacuacaagcacaucaccuccaaggagacccucuacugcaucgacggcgcccugcuggccaagagcagcgaguacaaggggcccaucacggacguguucuacaaggagaacuccuacaccaccaccaucaagcccgugacguacaagcucgacggcgucgugugcaccgagaucgaccccaagcuggacaacuacuacaagaaggacaacagcuacuucaccgagcagccgaucgaccuggugcccaaccagcccuaccccaacgccuccuucgacaacuucaaguucgucugcgacaacaucaaguucgcggacgaccucaaccagcugaccggguacaagaagccggccagccgcgagcugaaggugacguucuuccccgaccucaacggcgacguggucgccaucgacuaccggcacuacacccccuccuucaagaagggcgccaagcugcugcacaagcccaucguguggcacgugaacaacgcgaccaacaaggccaccuacaagccgaacacguggugcauccgcugccucuggagcaccaagcccgucgagaccuccaacagcuucgacgugcugaaguccgaggacgcccaggggauggacaaccuggccugcgaggaccucaagcccgugagcgaggaggucguggagaaccccaccauccagaaggacgugcuggagugcaacgucaagacgaccgagguggugggcgacaucauccugaagccggccaacaacucccucaagaucaccgaggaggucgggcacaccgaccugauggcggccuacguggacaacagcucccugacgaucaagaagcccaacgagcucagccgcgugcugggccugaagacccucgccacccacgggcuggccgccgucaacuccgugcccugggacaccaucgcgaacuacgccaagccguuccugaacaagguggucagcacgaccaccaacaucgugacccggugccucaaccgcgugugcacgaacuacaugcccuacuucuucacccugcugcuccagcugugcaccuucacccgguccaccaacagccgcaucaaggccuccaugcccacgaccaucgccaagaacaccgucaagagcgugggcaaguucugccuggaggccagcuucaacuaccucaagucccccaacuucagcaagcugaucaacaucaucaucugguuccugcuccuguccgugugccugggcagccucaucuacuccaccgcggcccuggggguccugaugagcaaccucggcaugccguccuacugcacgggguaccgggagggcuaccugaacagcaccaacgugaccaucgccaccuacugcacgggcuccauccccugcagcgugugccuguccgggcucgacagccuggacaccuaccccucccuggagaccauccagaucaccaucagcuccuucaagugggaccucacggccuucggccuggucgccgagugguuccuggcguacauccucuucacccgcuucuucuacgugcuggggcuggccgccaucaugcagcucuucuucagcuacuucgccgugcacuucaucuccaacagcuggcugauguggcugaucaucaaccugguccagauggcgcccaucuccgccauggugcggauguacaucuucuucgccagcuucuacuacguguggaagagcuacguccacgugguggacggcugcaacuccagcaccugcaugaugugcuacaagcgcaaccgggccacccgcgucgagugcacgaccaucgugaacgggguccggcgcuccuucuacguguacgccaacggcggcaagggguucugcaagcuccacaacuggaacugcgugaacugcgacaccuucugcgcgggcagcaccuucaucuccgacgaggucgcccgggaccugagccugcaguucaagcgcccgaucaaccccacggaccaguccagcuacaucguggacuccgugaccgucaagaacgggagcauccaccucuacuucgacaaggccggccagaagaccuacgagcggcacucccugagccacuucgugaaccuggacaaccuccgcgccaacaacaccaaggggucccugcccaucaacgugaucgucuucgacggcaagagcaagugcgaggaguccagcgccaaguccgcgagcguguacuacucccagcugaugugccagcccauccuccugcuggaccaggcccucgugagcgacgucggcgacagcgccgagguggccgugaagauguucgacgccuacgucaacacguucuccagcaccuucaacgugccgauggagaagcugaagacccugguggcgaccgccgaggccgagcucgccaagaacgucucccuggacaacgugcugagcacguucaucuccgcggcccggcagggguucguggacagcgacgucgagaccaaggacgugguggagugccucaagcugucccaccagagcgacaucgaggucaccggcgacuccugcaacaacuacaugcugaccuacaacaagguggagaacaugacgccccgcgaccucggggccugcaucgacugcagcgcccggcacaucaacgcccagguggcgaagucccacaacaucgcccugaucuggaacgucaaggacuucaugagccuguccgagcagcuccgcaagcagauccgcagcgccgccaagaagaacaaccugcccuucaagcugaccugcgccaccacccggcagguggugaacgucgugacgaccaagaucgcgcucaagggcgggugaggacuagucccuguucccagagcccacuuuuuuuucuuuuuuugaaauaaaauagccugucuuucagaucucaaaggcucuuuucagagccaccaaaaaaaaaaaaaaaaaaaaaaaaaaaaaaaaaaaaaaaaaaaaaaaaaaaaaaaaaaaaaaaaaaaaaaaaaaaaaaaaaaaaaaaaaaaaaaaaaaaaa

SEQ ID NO: 20086 - RNA, 6113 nt, Artificial Sequence
  SARS-CoV-2__MT451889.1__non-structural protein 3 (NSP3) mRNA gc
aggagagucccgcagucggcguccagcggcucugcuuguucgugugugugucguugcaggccuuauucaagcuuaccauggcccccaccaaggugaccuucggcgacgacacggucaucgaggugcagggguacaagagcgugaacaucaccuucgagcuggacgagcgcaucgacaagguccucaacgagaagugcuccgccuacaccguggagcugggcaccgaggugaacgaguucgcgugcgucguggccgacgccgugaucaagacgcugcagccggucagcgagcuccugaccccccuggggaucgaccucgacgagugguccauggccaccuacuaccuguucgacgagagcggcgaguucaagcuggccucccacauguacugcagcuucuacccccccgacgaggacgaggaggagggggacugcgaggaggaggaguucgagccguccacccaguacgaguacggcacggaggacgacuaccagggcaagccccucgaguucggggcgaccagcgccgcccugcagcccgaggaggagcaggaggaggacuggcuggacgacgacucccagcagaccgugggccagcaggacgggagcgaggacaaccagaccacgaccauccagaccaucguggagguccagccccagcucgagauggagcugaccccgguggugcagacgaucgaggucaacuccuucagcggcuaccugaagcucaccgacaacguguacaucaagaacgccgacaucguggaggaggcgaagaaggucaagcccaccgugguggucaacgccgccaacguguaccugaagcacgggggcggcguggccggggcccugaacaaggcgaccaacaacgccaugcaggucgaguccgacgacuacaucgccacgaacggcccccucaagguggggggcagcugcguccuguccggccacaaccuggccaagcacugccuccacgugguggggcccaacgucaacaagggcgaggacauccagcugcugaagagcgccuacgagaacuucaaccagcacgaggugcuccuggcgccgcugcucuccgccgggaucuucggcgccgaccccauccacagccugcgggugugcgucgacaccgugcgcaccaacguguaccuggccgucuucgacaagaaccucuacgacaagcugguguccagcuuccuggagaugaagagcgagaagcagguggagcagaagaucgccgagauccccaaggaggaggucaagcccuucaucaccgaguccaagccgagcguggagcagcggaagcaggacgacaagaagaucaaggcgugcguggaggaggucacgaccacccucgaggagaccaaguuccugacggagaaccugcuccuguacaucgacaucaacgggaaccugcaccccgacuccgccacccucgugagcgacaucgacaucaccuuccugaagaaggacgcccccuacaucgugggcgacgucgugcaggagggcgugcugaccgccgucgugauccccacgaagaaggccgggggcaccaccgagaugcucgcgaaggcccugcgcaaggugccgaccgacaacuacaucacgaccuaccccgggcagggccugaacggguacaccgucgaggaggccaagaccgugcucaagaagugcaaguccgccuucuacauccugcccagcaucaucuccaacgagaagcaggagauccugggcaccgugagcuggaaccuccgggagaugcuggcgcacgccgaggagacgcgcaagcugaugcccgucugcguggagaccaaggccaucguguccaccauccagcggaaguacaagggcaucaagauccaggagggggucguggacuacggcgcccgcuucuacuucuacaccagcaagacgaccguggccucccugaucaacacccucaacgaccugaacgagacccuggucacgaugccgcucggguacgugacccacggccugaaccuggaggaggcggcccgguacaugcgcagccucaaggugcccgccaccgucuccgugagcucccccgacgccgugaccgccuacaacggguaccugacgagcuccagcaagacccccgaggagcacuucaucgagaccaucucccuggcgggcagcuacaaggacuggagcuacuccggccagagcacccagcucgggaucgaguuccugaagcggggcgacaaguccgucuacuacacgagcaacccgaccaccuuccaccuggacggggaggugaucaccuucgacaaccucaagacgcugcugucccuccgcgaggugcggaccaucaaggucuucaccaccguggacaacaucaaccugcacacgcagguggucgacaugagcaugaccuacggccagcaguucggccccaccuaccuggacggggccgacgugaccaagaucaagccccacaacucccacgagggcaagacguucuacgugcucccgaacgacgacacccugcgcgucgaggccuucgaguacuaccacaccaccgaccccagcuuccuggggcgguacauguccgcccucaaccacacgaagaaguggaaguacccccaggugaacggccugaccagcaucaagugggccgacaacaacugcuaccuggcgaccgcccuccugacccugcagcagaucgagcucaaguucaaccccccggcccugcaggacgccuacuaccgcgcgcgggccggggaggccgccaacuucugcgcccugauccucgcguacugcaacaagacggugggcgagcugggcgacguccgcgagaccauguccuaccuguuccagcacgccaaccucgacagcugcaagcgggugcugaacgucgugugcaagaccugcgggcagcagcagaccacccugaagggcguggaggccgucauguacauggggacgcucuccuacgagcaguucaagaagggcgugcagauccccugcaccugcgggaagcaggccaccaaguaccuggugcagcaggagagccccuucgucaugauguccgcccccccggcgcaguacgagcugaagcacggcaccuucacgugcgccagcgaguacaccggcaacuaccagugcgggcacuacaagcacaucaccuccaaggagacccucuacugcaucgacggcgcccugcugacgaagagcagcgaguacaaggggcccaucaccgacguguucuacaaggagaacuccuacaccaccacgaucaagcccgugaccuacaagcucgacggcgucgugugcaccgagaucgaccccaagcuggacaacuacuacaagaaggacaacagcuacuucaccgagcagccgaucgaccuggugcccaaccagcccuaccccaacgccuccuucgacaacuucaaguucgucugcgacaacaucaaguucgccggggaccucaaccagcugacgggcuacaagaagccggcgagccgcgagcugaaggugaccuucuuccccgaccucaacggcgacguggucgccaucgacuacaagcacuacacccccuccuucaagaagggggccaagcugcugcacaagcccaucguguggcacgugaacaacgccaccaacaaggcgacguacaagccgaacaccuggugcauccggugccucuggagcaagaagcccgucgagaccuccaacagcuucgacgugcugaaguccgaggacgcccagggcauggacaaccuggccugcgaggaccucaagcccgugagcgaggaggucguggagaaccccaccauccagaaggacgugcuggagugcaacgucaagacgaccgagguggugggggacaucauccugaagccggccaacaacucccucaagaucaccgaggaggucggccacaccgaccugauggccgcguacguggacaacagcucccugacgaucaagaagcccaacgagcucagccgcgugcuggggcugaagacccucgccacccacggccuggccgccgucaacuccgugcccugggacaccaucgccaacuacgcgaagccguuccugaacaagguggucagcacgaccaccaacaucgugacccgcugccucaaccgggugugcacgaacuacaugcccuacuucuucacccugcugcuccagcugugcaccuucacccgcuccaccaacagccggaucaaggccuccaugcccacgaccaucgccaagaacaccgucaagagcgugggcaaguucugccuggaggccagcuucaacuaccucaagucccccaacuucagcaagcugaucaacaucaucaucugguuccugcuccuguccgugugccuggggccgcucaucuacagcaccgccgcgcugggcguccugauguccaaccucgggaugcccagcuacugcacgggcuaccgcgagggcuaccugaacuccaccaacgugaccaucgccaccuacugcacggggagcauccccugcuccgugugccugagcggccucgacucccuggacaccuaccccagccuggagaccauccagaucaccaucuccagcuucaagugggaccucacggccuucgggcuggucgccgagugguuccuggccuacauccucuucacccgguucuucuacgugcugggccuggcggccaucaugcagcucuucuucuccuacuucgccgugcacuucaucagcaacuccuggcugauguggcugaucaucaaccugguccagauggccccgaucagcgcgauggugcgcauguacaucuucuucgccuccuucuacuacguguggaagagcuacguccacgugguggacgggugcaacagcuccaccugcaugaugugcuacaagcggaaccgcgccacccgggucgagugcacgaccaucgugaacggcguccgccggagcuucuacguguacgccaacggcgggaagggcuucugcaagcuccacaacuggaacugcgugaacugcgacaccuucugcgccggguccaccuucaucagcgacgaggucgcgcgcgaccugucccugcaguucaagcggcccaucaaccccacggaccagagcuccuacaucguggacagcgugaccgucaagaacggcuccauccaccucuacuucgacaaggccgggcagaagaccuacgagcgccacagccugucccacuucgugaaccuggacaaccuccgggccaacaacaccaagggcagccugcccaucaacgugaucgucuucgacggcaaguccaagugcgaggagagcuccgccaagagcgccuccguguacuacagccagcugaugugccagccgauccuccugcuggaccaggcgcucguguccgacgucggggacagcgccgagguggccgugaagauguucgacgccuacgucaacacguucagcuccaccuucaacgugcccauggagaagcugaagacccugguggccaccgcggaggccgagcucgccaagaacgucagccuggacaacgugcuguccacguucaucagcgccgcgcgccagggcuucguggacuccgacgucgagaccaaggacgugguggagugccucaagcugagccaccaguccgacaucgaggucaccggggacagcugcaacaacuacaugcugaccuacaacaagguggagaacaugacgccccgggaccucggcgccugcaucgacugcuccgcccgccacaucaacgcccagguggccaagagccacaacaucgcgcugaucuggaacgucaaggacuucaugucccugagcgagcagcuccggaagcagauccgcuccgccgccaagaagaacaaccugcccuucaagcugaccugcgccaccacccgccagguggugaacgucgugacgaccaagaucgcccucaaggggggcugaggacuagucccuguucccagagcccacuuuuuuuucuuuuuuugaaauaaaauagccugucuuucagaucucaaaggcucuuuucagagccaccaaaaaaaaaaaaaaaaaaaaaaaaaaaaaaaaaaaaaaaaaaaaaaaaaaaaaaaaaaaaaaaaaaaaaaaaaaaaaaaaaaaaaaaaaaaaaaaaaaaaa

SEQ ID NO: 20087 - RNA, 6113 nt, Artificial Sequence
  SARS-CoV-2__MT450936.1__non-structural protein 3 (NSP3) mRNA gc
aggagagucccgcagucggcguccagcggcucugcuuguucgugugugugucguugcaggccuuauucaagcuuaccauggcccccaccaaggugaccuucggcgacgacacggucaucgaggugcagggguacaagagcgugaacaucaccuucgagcuggacgagcgcaucgacaagguccucaacgagaagugcuccgccuacaccguggagcugggcaccgaggugaacgaguucgcgugcgucguggccgacgccgugaucaagacgcugcagccggucagcgagcuccugaccccccuggggaucgaccucgacgagugguccauggccaccuacuaccuguucgacgagagcggcgaguucaagcuggccucccacauguacugcagcuucuacccccccgacgaggacgaggaggagggggacugcgaggaggaggaguucgagccguccacccaguacgaguacggcacggaggacgacuaccagggcaagccccucgaguucggggcgaccagcgccgcccugcagcccgaggaggagcaggaggaggacuggcuggacgacgacucccagcagaccgugggccagcaggacgggagcgaggacaaccagaccacgaccauccagaccaucguggagguccagccccagcucgagauggagcugaccccgguggugcagacgaucgaggucaacuccuucagcggcuaccugaagcucaccgacaacguguacaucaagaacgccgacaucguggaggaggcgaagaaggucaagcccaccgugguggucaacgccgccaacguguaccugaagcacgggggcggcguggccggggcccugaacaaggcgaccaacaacgccaugcaggucgaguccgacgacuacaucgccacgaacggcccccucaagguggggggcagcugcguccuguccggccacaaccuggccaagcacugccuccacgugguggggcccaacgucaacaagggcgaggacauccagcugcugaagagcgccuacgagaacuucaaccagcacgaggugcuccuggcgccgcugcucuccgccgggaucuucggcgccgaccccauccacagccugcgggugugcgucgacaccgugcgcaccaacguguaccuggccgucuucgacaagaaccucuacgacaagcugguguccagcuuccuggagaugaagagcgagaagcagguggagcagaagaucgccgagauccccaaggaggaggucaagcccuucaucaccgaguccaagccgagcguggagcagcggaagcaggacgacaagaagaucaaggcgugcguggaggaggucacgaccacccucgaggagaccaaguuccugacggagaaccugcuccuguacaucgacaucaacgggaaccugcaccccgacuccgccacccucgugagcgacaucgacaucaccuuccugaagaaggacgcccccuacaucgugggcgacgucgugcaggagggcgugcugaccgccgucgugauccccacgaagaaggccgggggcaccaccgagaugcucgcgaaggcccugcgcaaggugccgaccgacaacuacaucacgaccuaccccgggcagggccugaacggguacaccgucgaggaggccaagaccgugcucaagaagugcaaguccgccuucuacauccugcccagcaucaucuccaacgagaagcaggagauccugggcaccgugagcuggaaccuccgggagaugcuggcgcacgccgaggagacgcgcaagcugaugcccgucugcguggagaccaaggccaucguguccaccauccagcggaaguacaagggcaucaagauccaggagggggucguggacuacggcgcccgcuucuacuucuacaccagcaagacgaccguggccucccugaucaacacccucaacgaccugaacgagacccuggucacgaugccgcucggguacgugacccacggccugaaccuggaggaggcggcccgguacaugcgcagccucaaggugcccgccaccgucuccgugagcucccccgacgccgugaccgccuacaacggguaccugacgagcuccagcaagacccccgaggagcacuucaucgagaccaucucccuggcgggcagcuacaaggacuggagcuacuccggccagagcacccagcucgggaucgaguuccugaagcggggcgacaaguccgucuacuacacgagcaacccgaccaccuuccaccuggacggggaggugaucaccuucgacaaccucaagacgcugcugucccuccgcgaggugcggaccaucaaggucuucaccaccguggacaacaucaaccugcacacgcagguggucgacaugagcaugaccuacggccagcaguucggccccaccuaccuggacggggccgacgugaccaagaucaagccccacaacucccacgagggcaagacguucuacgugcucccgaacgacgacacccugcgcgucgaggccuucgaguacuaccacaccaccgaccccagcuuccuggggcgguacauguccgcccucaaccacacgaagaaguggaaguacccccaggugaacggccugaccagcaucaagugggccgacaacaacugcuaccuggcgaccgcccuccugacccugcagcagaucgagcucaaguucaaccccccggcccugcaggacgccuacuaccgcgcgcgggccggggaggccgccaacuucugcgcccugauccucgcguacugcaacaagacggugggcgagcugggcgacguccgcgagaccauguccuaccuguuccagcacgccaaccucgacagcugcaagcgggugcugaacgucgugugcaagaccugcgggcagcagcagaccacccugaagggcguggaggccgucauguacauggggacgcucuccuacgagcaguucaagaagggcgugcagauccccugcaccugcgggaagcaggccaccaaguaccuggugcagcaggagagccccuucgucaugauguccgcccccccggcgcaguacgagcugaagcacggcaccuucacgugcgccagcgaguacaccggcaacuaccagugcgggcacuacaagcacaucaccuccaaggagacccucuacugcaucgacggcgcccugcugacgaagagcagcgaguacaaggggcccaucaccgacguguucuacaaggagaacuccuacaccaccacgaucaagcccgugaccuacaagcucgacggcgucgugugcaccgagaucgaccccaagcuggacaacuacuacaagaaggacaacagcuacuucaccgagcagccgaucgaccuggugcccaaccagcccuaccccaacgccuccuucgacaacuucaaguucgucugcgacaacaucaaguucgccgacgaccucaaccagcugacgggguacaagaagccggcgagccgcgagcugaaggugaccuucuuccccgaccucaacggcgacguggucgccaucgacuacaagcacuacacccccuccuucaagaagggcgccaagcugcugcacaagcccaucguguggcacgugaacaacgccaccaacaaggcgacguacaagccgaacaccuggugcauccggugccucuggagcaccaagcccgucgagaccuccaacagcuucgacgugcugaaguccgaggacgcccaggggauggacaaccuggccugcgaggaccucaagcccgugagcgaggaggucguggagaaccccacgauccagaaggacgugcuggagugcaacgucaagaccaccgagguggugggcgacaucauccugaagccggccaacaacucccucaagaucaccgaggaggucgggcacacggaccugauggccgcguacguggacaacagcucccugaccaucaagaagcccaacgagcucagccgcgugcugggccugaagacccucgccacccacgggcuggccgccgucaacuccgugcccugggacacgaucgccaacuacgcgaagccguuccugaacaagguggucagcaccaccaccaacaucgugacgcgcugccucaaccgggugugcaccaacuacaugcccuacuucuucacccugcugcuccagcugugcaccuucacccgcuccacgaacagccggaucaaggccuccaugcccaccaccaucgccaagaacaccgucaagagcgugggcaaguucugccuggaggccagcuucaacuaccucaagucccccaacuucagcaagcugaucaacaucaucaucugguuccugcuccugaucaucugccugggcucccucaucuacagcacggccgcgcugggggugcugauguccaaccucggcaugccgagcuacugcaccggguaccgcgagggcuaccugaacuccaccaacgucaccaucgccacguacugcaccggcagcauccccugcuccgugugccugagcgggcucgacucccuggacaccuaccccagccuggagaccauccagaucacgaucuccagcuucaagugggaccucaccgccuucggccugguggccgagugguuccuggccuacauccucuucacccgguucuucuacguccuggggcuggcggccaucaugcagcucuucuucuccuacuucgccgugcacuucaucagcaacuccuggcugauguggcugaucaucaaccuggugcagauggcccccaucagcgcgaugguccgcauguacaucuucuucgccuccuucuacuacguguggaagagcuacgugcacgucguggacggcugcaacagcuccaccugcaugaugugcuacaagcggaaccgcgccacgcggguggagugcaccaccaucgucaacggggugcgccggagcuucuacgucuacgccaacggcggcaagggguucugcaagcuccacaacuggaacugcgugaacugcgacaccuucugcgccggcuccacguucaucagcgacgagguggcgcgcgaccugucccugcaguucaagcggccgaucaaccccaccgaccagagcuccuacaucgucgacagcgugaccgugaagaacggguccauccaccucuacuucgacaaggccggccagaagaccuacgagcgccacagccugucccacuucgucaaccuggacaaccuccgggccaacaacacgaaggggagccugcccaucaacgugaucguguucgacggcaaguccaagugcgaggagagcuccgccaagagcgccuccgucuacuacagccagcugaugugccagcccauccuccugcuggaccaggcgcucguguccgacgugggcgacagcgccgaggucgccgugaagauguucgacgccuacgugaacaccuucagcuccaccuucaacgucccgauggagaagcugaagacccugguggccacggcggaggccgagcucgccaagaacgugagccuggacaacguccuguccaccuucaucagcgccgcgcgccagggguucguggacuccgacguggagaccaaggacgucguggagugccucaagcugagccaccaguccgacaucgaggugaccggcgacagcugcaacaacuacaugcugacguacaacaaggucgagaacaugaccccccgggaccucggggccugcaucgacugcuccgcccgccacaucaacgcccagguggccaagagccacaacaucgcgcugaucuggaacgugaaggacuucaugucccugagcgagcagcuccggaagcagauccgcuccgccgccaagaagaacaaccugcccuucaagcugaccugcgccaccacgcgccaggucgugaacguggucaccaccaagaucgcccucaagggcgggugaggacuagucccuguucccagagcccacuuuuuuuucuuuuuuugaaauaaaauagccugucuuucagaucucaaaggcucuuuucagagccaccaaaaaaaaaaaaaaaaaaaaaaaaaaaaaaaaaaaaaaaaaaaaaaaaaaaaaaaaaaaaaaaaaaaaaaaaaaaaaaaaaaaaaaaaaaaaaaaaaaaaa

SEQ ID NO: 20088 - RNA, 6113 nt, Artificial Sequence
  SARS-CoV-2__MT450951.1__non-structural protein 3 (NSP3) mRNA gc
aggagagucccgcagucggcguccagcggcucugcuuguucgugugugugucguugcaggccuuauucaagcuuaccauggcccccaccaaggugaccuucggcgacgacacggucaucgaggugcagggguacaagagcgugaacaucaccuucgagcuggacgagcgcaucgacaagguccucaacgagaagugcuccgccuacaccguggagcugggcaccgaggugaacgaguucgcgugcgucguggccgacgccgugaucaagacgcugcagccggucagcgagcuccugaccccccuggggaucgaccucgacgagugguccauggccaccuacuaccuguucgacgagagcggcgaguucaagcuggccucccacauguacugcagcuucuacccccccgacgaggacgaggaggagggggacugcgaggaggaggaguucgagccguccacccaguacgaguacggcacggaggacgacuaccagggcaagccccucgaguucggggcgaccagcgccgcccugcagcccgaggaggagcaggaggaggacuggcuggacgacgacucccagcagaccgugggccagcaggacgggagcgaggacaaccagaccacgaccauccagaccaucguggagguccagccccagcucgagauggagcugaccccgguggugcagacgaucgaggucaacuccuucagcggcuaccugaagcucaccgacaacguguacaucaagaacgccgacaucguggaggaggcgaagaaggucaagcccaccgugguggucaacgccgccaacguguaccugaagcacgggggcggcguggccggggcccugaacaaggcgaccaacaacgccaugcaggucgaguccgacgacuacaucgccacgaacggcccccucaagguggggggcagcugcguccuguccggccacaaccuggccaagcacugccuccacgugguggggcccaacgucaacaagggcgaggacauccagcugcugaagagcgccuacgagaacuucaaccagcacgaggugcuccuggcgccgcugcucuccgccgggaucuucggcgccgaccccauccacagccugcgggugugcgucgacaccgugcgcaccaacguguaccuggccgucuucgacaagaaccucuacgacaagcugguguccagcuuccuggagaugaagagcgagaagcagguggagcagaagaucgccgagauccccaaggaggaggucaagcccuucaucaccgaguccaagccgagcguggagcagcggaagcaggacgacaagaagaucaaggcgugcguggaggaggucacgaccacccucgaggagaccaaguuccugacggagaaccugcuccuguacaucgacaucaacgggaaccugcaccccgacuccgccacccucgugagcgacaucgacaucaccuuccugaagaaggacgcccccuacaucgugggcgacgucgugcaggagggcgugcugaccgccgucgugauccccacgaagaaggccgggggcaccaccgagaugcucgcgaaggcccugcgcaaggugccgaccgacaacuacaucacgaccuaccccgggcagggccugaacggguacaccgucgaggaggccaagaccgugcucaagaagugcaaguccgccuucuacauccugcccagcaucaucuccaacgagaagcaggagauccugggcaccgugagcuggaaccuccgggagaugcuggcgcacgccgaggagacgcgcaagcugaugcccgucugcguggagaccaaggccaucguguccaccauccagcggaaguacaagggcaucaagauccaggagggggucguggacuacggcgcccgcuucuacuucuacaccagcaagacgaccguggccucccugaucaacacccucaacgaccugaacgagacccuggucacgaugccgcucggguacgugacccacggccugaaccuggaggaggcggcccgguacaugcgcagccucaaggugcccgccaccgucuccgugagcucccccgacgccgugaccgccuacaacggguaccugacgagcuccagcaagacccccgaggagcacuucaucgagaccaucucccuggcgggcagcuacaaggacuggagcuacuccggccagagcacccagcucgggaucgaguuccugaagcggggcgacaaguccgucuacuacacgagcaacccgaccaccuuccaccuggacggggaggugaucaccuucgacaaccucaagacgcugcugucccuccgcgaggugcggaccaucaaggucuucaccaccguggacaacaucaaccugcacacgcagguggucgacaugagcaugaccuacggccagcaguucggccccaccuaccuggacggggccgacgugaccaagaucaagccccacaacucccacgagggcaagacguucuacgugcucccgaacgacgacacccugcgcgucgaggccuucgaguacuaccacaccaccgaccccagcuuccuggggcgguacauguccgcccucaaccacacgaagaaguggaaguacccccaggugaacggccugaccagcaucaagugggccgacaacaacugcuaccuggcgaccgcccuccugacccugcagcagaucgagcucaaguucaaccccccggcccugcaggacgccuacuaccgcgcgcgggccggggaggccgccaacuucugcgcccugauccucgcguacugcaacaagacggugggcgagcugggcgacguccgcgagaccauguccuaccuguuccagcacgccaaccucgacagcugcaagcgggugcugaacgucgugugcaagaccugcgggcagcagcagaccacccugaagggcguggaggccgucauguacauggggacgcucuccuacgagcaguucaagaagggcgugcagauccccugcaccugcgggaagcaggccaccaaguaccuggugcagcaggagagccccuucgucaugauguccgcccccccggcgcaguacgagcugaagcacggcaccuucacgugcgccagcgaguacaccggcaacuaccagugcgggcacuacaagcacaucaccuccaaggagacccucuacugcaucgacggcgcccugcugacgaagagcagcgaguacaaggggcccaucaccgacguguucuacaaggagaacuccuacaccaccacgaucaagcccgugaccuacaagcucgacggcgucgugugcaccgagaucgaccccaagcuggacaacuacuacaagaaggacaacagcuacuucaccgagcagccgaucgaccuggugcccaaccagcccuaccccaacgccuccuucgacaacuucaaguucgucugcgacaacaucaaguucgccgacgaccucaaccagcugacgggguacaagaagccggcgagccgcgagcugaaggugaccuucuuccccgaccucaacggcgacguggucgccaucgacuacaagcacuacacccccuccuucaagaagggcgccaagcugcugcacaagcccaucguguggcacgugaacaacgccaccaacaaggcgacguacaagccgaacaccuggugcauccggugccucuggagcaccaagcccgucgagaccuccaacagcuucgacgugcugaaguccgaggacgcccaggggauggacaaccuggccugcgaggaccucaagcccgugagcgaggaggucguggagaaccccacgauccagaaggacgugcuggagugcaacgucaagaccaccgagguggugggcgacaucauccugaagccggccaacaacucccucaagaucaccgaggaggucgggcacacggaccugauggccgcguacguggacaacagcucccugaccaucaagaagcccaacgagcucagccgcgugcugggccugaagacccucgccacccacgggcuggccgccgucaacuccgugcccugggacacgaucgccaacuacgcgaagccguuccugaacaagguggucagcaccaccaccaacaucgugacgcgcugccucaaccgggugugcaccaacuacaugcccuacuucuucacccugcugcuccagcugugcaccuucacccgcuccacgaacagccggaucaaggccuccaugcccaccaccaucgccaagaacaccgucaagagcgugggcaaguucugccuggaggccagcuucaacuaccucaagucccccaacuucagcaagcugaucaacaucaucaucugguuccugcuccuguccgugugccugggcagccucaucuacuccacggccgcgcuggggguccugaugagcaaccucggcaugccguccuacugcaccggguaccgcgagggcuaccugaacagcaccaacgugaccaucgccacguacugcaccggcuccauccccuacagcgugugccuguccgggcucgacagccuggacaccuaccccucccuggagaccauccagaucacgaucagcuccuucaagugggaccucaccgccuucggccuggucgccgagugguuccuggccuacauccucuucacccgguucuucuacgugcuggggcuggcggccaucaugcagcucuucuucagcuacuucgccgugcacuucaucuccaacagcuggcugauguggcugaucaucaaccugguccagauggcccccaucuccgcgauggugcgcauguacaucuucuucgccagcuucuacuacguguggaagagcuacguccacgugguggacggcugcaacuccagcaccugcaugaugugcuacaagcggaaccgcgccacgcgggucgagugcaccaccaucgugaacgggguccgccgguccuucuacguguacgccaacggcggcaagggguucugcaagcuccacaacuggaacugcgugaacugcgacaccuucugcgccggcagcacguucaucuccgacgaggucgcgcgcgaccugagccugcaguucaagcggccgaucaaccccaccgaccaguccagcuacaucguggacuccgugaccgucaagaacgggagcauccaccucuacuucgacaaggccggccagaagaccuacgagcgccacucccugagccacuucgugaaccuggacaaccuccgggccaacaacacgaaggggucccugcccaucaacgugaucgucuucgacggcaagagcaagugcgaggaguccagcgccaaguccgccagcguguacuacucccagcugaugugccagcccauccuccugcuggaccaggcgcucgugagcgacgucggcgacagcgccgagguggccgugaagauguucgacgccuacgucaacaccuucuccagcaccuucaacgugccgauggagaagcugaagacccugguggccacggcggaggccgagcucgccaagaacgucucccuggacaacgugcugagcaccuucaucuccgccgcgcgccagggguucguggacagcgacgucgagaccaaggacgugguggagugccucaagcugucccaccagagcgacaucgaggucaccggcgacuccugcaacaacuacaugcugacguacaacaagguggagaacaugaccccccgggaccucggggccugcaucgacugcagcgcccgccacaucaacgcccagguggccaagucccacaacaucgcgcugaucuggaacgucaaggacuucaugagccuguccgagcagcuccggaagcagauccgcagcgccgccaagaagaacaaccugcccuucaagcugaccugcgccaccacgcgccagguggugaacgucgugaccaccaagaucgcccucaagggcgggugaggacuagucccuguucccagagcccacuuuuuuuucuuuuuuugaaauaaaauagccugucuuucagaucucaaaggcucuuuucagagccaccaaaaaaaaaaaaaaaaaaaaaaaaaaaaaaaaaaaaaaaaaaaaaaaaaaaaaaaaaaaaaaaaaaaaaaaaaaaaaaaaaaaaaaaaaaaaaaaaaaaaa

SEQ ID NO: 20089 - RNA, 6113 nt, Artificial Sequence
  SARS-CoV-2__MT451017.1__non-structural protein 3 (NSP3) mRNA gc
aggagagucccgcagucggcguccagcggcucugcuuguucgugugugugucguugcaggccuuauucaagcuuaccauggcccccaccaaggugaccuucggcgacgacacggucaucgaggugcagggguacaagagcgugaacaucaccuucgagcuggacgagcgcaucgacaagguccucaacgagaagugcuccgccuacaccguggagcugggcaccgaggugaacgaguucgcgugcgucguggccgacgccgugaucaagacgcugcagccggucagcgagcuccugaccccccuggggaucgaccucgacgagugguccauggccaccuacuaccuguucgacgagagcggcgaguucaagcuggccucccacauguacugcagcuucuacccccccgacgaggacgaggaggagggggacugcgaggaggaggaguucgagccguccacccaguacgaguacggcacggaggacgacuaccagggcaagccccucgaguucggggcgaccagcgccgcccugcagcuggaggaggagcaggaggaggacuggcucgacgacgacucccagcagaccgugggccagcaggacgggagcgaggacaaccagaccacgaccauccagaccaucguggagguccagccccagcuggagauggagcugacccccguggugcagacgaucgaggucaacuccuucagcggcuaccucaagcugaccgacaacguguacaucaagaacgccgacaucguggaggaggcgaagaaggucaagccgaccgugguggucaacgccgccaacguguaccugaagcacgggggcggcguggccggggcccucaacaaggcgaccaacaacgccaugcaggucgaguccgacgacuacaucgccacgaacggcccccugaagguggggggcagcugcguccuguccggccacaaccucgccaagcacugccugcacgugguggggcccaacgucaacaagggcgaggacauccagcugcucaagagcgccuacgagaacuucaaccagcacgaggugcugcuggcgccccuccuguccgccgggaucuucggcgccgacccgauccacagccugcgggugugcgucgacaccgugcgcaccaacguguaccucgccgucuucgacaagaaccuguacgacaagcugguguccagcuuccucgagaugaagagcgagaagcagguggagcagaagaucgccgagauccccaaggaggaggucaagcccuucaucaccgaguccaagcccagcguggagcagcggaagcaggacgacaagaagaucaaggcgugcguggaggaggucacgaccacccuggaggagaccaaguuccugacggagaaccuccugcuguacaucgacaucaacgggaaccuccacccggacuccgccacccuggugagcgacaucgacaucaccuuccugaagaaggacgcccccuacaucgugggcgacgucgugcaggagggcgugcucaccgccgucgugauccccacgaagaaggccgggggcaccaccgagaugcuggcgaaggcccugcgcaaggugcccaccgacaacuacaucacgaccuacccggggcagggccucaacggguacaccgucgaggaggccaagaccgugcugaagaagugcaaguccgccuucuacauccugcccagcaucaucuccaacgagaagcaggagauccucggcaccgugagcuggaaccugcgggagauguucgcgcacgccgaggagacgcgcaagcugaugcccgucugcguggagaccaaggccaucguguccaccauccagcggaaguacaagggcaucaagauccaggagggggucguggacuacggcgcccgcuucuacuucuacaccagcaagacgaccguggccucccugaucaacacccucaacgaccugaacgagacccuggucacgaugccccucggguacgugacccacggccugaaccuggaggaggcggcccgguacaugcgcagccucaaggugccggccaccgucuccgugagcucccccgacgccgugaccgccuacaacggguaccugacgagcuccagcaagacccccgaggagcacuucaucgagaccaucucccuggcgggcagcuacaaggacuggagcuacuccggccagagcacccagcucgggaucgaguuccugaagcggggcgacaaguccgucuacuacacgagcaaccccaccaccuuccaccuggacggggaggugaucaccuucgacaaccucaagacgcugcugucccuccgcgaggugcggaccaucaaggucuucaccaccguggacaacaucaaccugcacacgcagguggucgacaugagcaugaccuacggccagcaguucggcccgaccuaccuggacggggccgacgugaccaagaucaagccccacaacucccacgagggcaagacguucuacgugcuccccaacgacgacacccugcgcgucgaggccuucgaguacuaccacaccaccgacccgagcuuccuggggcgguacauguccgcccucaaccacacgaagaaguggaaguacccccaggugaacggccugaccagcaucaagugggccgacaacaacugcuaccuggcgaccgcccuccugacccugcagcagaucgagcucaaguucaacccccccgcccugcaggacgccuacuaccgcgcgcgggccggggaggccgccaacuucugcgcccugauccucgcguacugcaacaagacggugggcgagcugggcgacguccgcgagaccauguccuaccuguuccagcacgccaaccucgacagcugcaagcgggugcugaacgucgugugcaagaccugcgggcagcagcagaccacccugaagggcguggaggccgucauguacauggggacgcucuccuacgagcaguucaagaagggcgugcagaucccgugcaccugcgggaagcaggccaccaaguaccuggugcagcaggagagccccuucgucaugauguccgccccccccgcgcaguacgagcugaagcacggcaccuucacgugcgccagcgaguacaccggcaacuaccagugcgggcacuacaagcacaucaccuccaaggagacccucuacugcaucgacggcgcccugcugacgaagagcagcgaguacaaggggccgaucaccgacguguucuacaaggagaacuccuacaccaccacgaucaagcccgugaccuacaagcucgacggcgucgugugcaccgagaucgaccccaagcuggacaacuacuacaagaaggacaacagcuacuucaccgagcagcccaucgaccuggugccgaaccagcccuaccccaacgccuccuucgacaacuucaaguucgucugcgacaacaucaaguucgccgacgaccucaaccagcugacgggguacaagaagcccgcgagccgcgagcugaaggugaccuucuucccggaccucaacggcgacguggucgccaucgacuacaagcacuacacccccuccuucaagaagggcgccaagcugcugcacaagcccaucguguggcacgugaacaacgccaccaacaaggcgacguacaagcccaacaccuggugcauccggugccucuggagcaccaagccggucgagaccuccaacagcuucgacgugcugaaguccgaggacgcccaggggauggacaaccuggccugcgaggaccucaagcccgugagcgaggaggucguggagaaccccacgauccagaaggacgugcuggagugcaacgucaagaccaccgagguggugggcgacaucauccugaagcccgccaacaacucccucaagaucaccgaggaggucgggcacacggaccugauggccgcguacguggacaacagcucccugaccaucaagaagccgaacgagcucagccgcgugcugggccugaagacccucgccacccacgggcuggccgccgucaacuccgugcccugggacacgaucgccaacuacgcgaagcccuuccugaacaagguggucagcaccaccaccaacaucgugacgcgcugccucaaccgggugugcaccaacuacaugccguacuucuucacccugcugcuccagcugugcaccuucacccgcuccacgaacagccggaucaaggccuccaugcccaccaccaucgccaagaacaccgucaagagcgugggcaaguucugccuggaggccagcuucaacuaccucaagucccccaacuucagcaagcugaucaacaucaucaucugguuccugcuccuguccgugugccugggcagccucaucuacuccacggccgcgcuggggguccugaugagcaaccucggcaugcccuccuacugcaccggguaccgcgagggcuaccugaacagcaccaacgugaccaucgccacguacugcaccggcuccaucccgugcagcgugugccuguccgggcucgacagccuggacaccuaccccucccuggagaccauccagaucacgaucagcuccuucaagugggaccucaccgccuucggccuggucgccgagugguuccuggccuacauccucuucacccgguucuucuacgugcuggggcuggcggccaucaugcagcucuucuucagcuacuucgccgugcacuucaucuccaacagcuggcugauguggcugaucaucaaccugguccagauggcccccaucuccgcgauggugcgcauguacaucuucuucgccagcuucuacuacguguggaagagcuacguccacgugguggacggcugcaacuccagcaccugcaugaugugcuacaagcggaaccgcgccacgcgggucgagugcaccaccaucgugaacgggguccgccgguccuucuacguguacgccaacggcggcaagggguucugcaagcuccacaacuggaacugcgugaacugcgacaccuucugcgccggcagcacguucaucuccgacgaggucgcgcgcgaccugagccugcaguucaagcggcccaucaacccgaccgaccaguccagcuacaucguggacuccgugaccgucaagaacgggagcauccaccucuacuucgacaaggccggccagaagaccuacgagcgccacucccugagccacuucgugaaccuggacaaccuccgggccaacaacacgaaggggucccugcccaucaacgugaucgucuucgacggcaagagcaagugcgaggaguccagcgccaaguccgccagcguguacuacucccagcugaugugccagcccauccuccugcuggaccaggcgcucgugagcgacgucggcgacagcgccgagguggccgugaagauguucgacgccuacgucaacaccuucuccagcaccuucaacgugcccauggagaagcugaagacccugguggccacggcggaggccgagcucgccaagaacgucucccuggacaacgugcugagcaccuucaucuccgccgcgcgccagggguucguggacagcgacgucgagaccaaggacgugguggagugccucaagcugucccaccagagcgacaucgaggucaccggcgacuccugcaacaacuacaugcugacguacaacaagguggagaacaugaccccgcgggaccucggggccugcaucgacugcagcgcccgccacaucaacgcccagguggccaagucccacaacaucgcgcugaucuggaacgucaaggacuucaugagccuguccgagcagcuccggaagcagauccgcagcgccgccaagaagaacaaccugcccuucaagcugaccugcgccaccacgcgccagguggugaacgucgugaccaccaagaucgcccucaagggcgggugaggacuagucccuguucccagagcccacuuuuuuuucuuuuuuugaaauaaaauagccugucuuucagaucucaaaggcucuuuucagagccaccaaaaaaaaaaaaaaaaaaaaaaaaaaaaaaaaaaaaaaaaaaaaaaaaaaaaaaaaaaaaaaaaaaaaaaaaaaaaaaaaaaaaaaaaaaaaaaaaaaaaa

SEQ ID NO: 20090 - RNA, 6113 nt, Artificial Sequence
  SARS-CoV-2__MT451142.1__non-structural protein 3 (NSP3) mRNA gc
aggagagucccgcagucggcguccagcggcucugcuuguucgugugugugucguugcaggccuuauucaagcuuaccauggcccccaccaaggugaccuucggcgacgacacggucaucgaggugcagggguacaagagcgugaacaucaccuucgagcuggacgagcgcaucgacaagguccucaacgagaagugcuccgccuacaccguggagcugggcaccgaggugaacgaguucgcgugcgucguggccgacgccgugaucaagacgcugcagccggucagcgagcuccugaccccccuggggaucgaccucgacgagugguccauggccaccuacuaccuguucgacgagagcggcgaguucaagcugaccucccacauguacugcagcuucuacccccccgacgaggacgaggaggagggggacugcgaggaggaggaguucgagccguccacgcaguacgaguacggcaccgaggacgacuaccagggcaagccccucgaguucggggccaccagcgcggcccugcagcccgaggaggagcaggaggaggacuggcuggacgacgacucccagcagaccgugggccagcaggacgggagcgaggacaaccagacgaccaccauccagaccaucguggagguccagccccagcucgagauggagcugacgccgguggugcagaccaucgaggucaacuccuucagcggcuaccugaagcucaccgacaacguguacaucaagaacgccgacaucguggaggaggccaagaaggucaagcccaccgugguggucaacgcggccaacguguaccugaagcacgggggcggcguggccggggcccugaacaaggccacgaacaacgcgaugcaggucgaguccgacgacuacaucgccaccaacggcccccucaagguggggggcagcugcguccuguccggccacaaccuggccaagcacugccuccacgugguggggcccaacgucaacaagggcgaggacauccagcugcugaagagcgccuacgagaacuucaaccagcacgaggugcuccuggccccgcugcucuccgcggggaucuucggcgccgaccccauccacagccugcgggugugcgucgacaccgugcgcaccaacguguaccuggccgucuucgacaagaaccucuacgacaagcugguguccagcuuccuggagaugaagagcgagaagcagguggagcagaagaucgccgagauccccaaggaggaggucaagcccuucaucacggaguccaagccgagcguggagcagcggaagcaggacgacaagaagaucaaggccugcguggaggaggucaccaccacccucgaggagacgaaguuccugaccgagaaccugcuccuguacaucgacaucaacgggaaccugcaccccgacuccgcgacccucgugagcgacaucgacaucaccuuccugaagaaggacgcccccuacaucgugggcgacgucgugcaggagggcgugcugacggccgucgugauccccaccaagaaggccgggggcaccaccgagaugcucgccaaggcgcugcgcaaggugccgacggacaacuacaucaccaccuaccccgggcagggccugaacggguacaccgucgaggaggccaagaccgugcucaagaagugcaaguccgccuucuacauccugcccagcaucaucuccaacgagaagcaggagauccugggcacggugagcuggaaccuccgggagaugcuggcccacgcggaggagacccgcaagcugaugcccgucugcguggagaccaaggccaucguguccaccauccagcggaaguacaagggcaucaagauccaggagggggucguggacuacggcgcccgcuucuacuucuacacgagcaagaccaccguggccucccugaucaacacccucaacgaccugaacgagacgcuggucaccaugccgcucggguacgugacccacggccugaaccuggaggaggccgcgcgguacaugcgcagccucaaggugcccgccaccgucuccgugagcucccccgacgccgugacggccuacaacggguaccugaccagcuccagcaagacccccgaggagcacuucaucgagaccaucucccuggccggcagcuacaaggacuggagcuacuccggccagagcacgcagcucgggaucgaguuccugaagcggggcgacaaguccgucuacuacaccagcaacccgaccaccuuccaccuggacggggaggugaucacguucgacaaccucaagacccugcugucccuccgcgaggugcggaccaucaaggucuucaccacgguggacaacaucaaccugcacacccagguggucgacaugagcaugaccuacggccagcaguucggccccaccuaccuggacggggcggacgugacgaagaucaagccccacaacucccacgagggcaagaccuucuacgugcucccgaacgacgacacccugcgcgucgaggccuucgaguacuaccacaccacggaccccagcuuccuggggcgguacauguccgcccucaaccacaccaagaaguggaaguacccccaggugaacggccugaccagcaucaagugggccgacaacaacugcuaccuggccaccgcgcuccugacgcugcagcagaucgagcucaaguucaaccccccggcccugcaggacgccuacuaccgcgcccgggcgggggaggccgccaacuucugcgcccugauccucgccuacugcaacaagaccgugggcgagcugggcgacguccgcgagaccauguccuaccuguuccagcacgcgaaccucgacagcugcaagcgggugcugaacgucgugugcaagaccugcgggcagcagcagaccacgcugaagggcguggaggccgucauguacauggggacccucuccuacgagcaguucaagaagggcgugcagauccccugcaccugcgggaagcaggccaccaaguaccuggugcagcaggagagccccuucgucaugauguccgcccccccggcccaguacgagcugaagcacggcacguucaccugcgcgagcgaguacaccggcaacuaccagugcgggcacuacaagcacaucaccuccaaggagacgcucuacugcaucgacggcgcccugcugaccaagagcagcgaguacaaggggcccaucaccgacguguucuacaaggagaacuccuacaccacgaccaucaagcccgugaccuacaagcucgacggcgucgugugcaccgagaucgaccccaagcuggacaacuacuacaagaaggacaacagcuacuucacggagcagccgaucgaccuggugcccaaccagcccuaccccaacgccuccuucgacaacuucaaguucgucugcgacaacaucaaguucgccgacgaccucaaccagcugaccggguacaagaagccggccagccgcgagcugaaggugaccuucuuccccgaccucaacggcgacguggucgcgaucgacuacaagcacuacacccccuccuucaagaagggcgccaagcugcugcacaagcccaucguguggcacgugaacaacgccacgaacaaggccaccuacaagccgaacaccuggugcauccggugccucuggagcaccaagcccgucgagacguccaacagcuucgacgugcugaaguccgaggacgcgcaggggauggacaaccuggccugcgaggaccucaagcccgugagcgaggaggucguggagaaccccaccauccagaaggacgugcuggagugcaacgucaagaccaccgagguggugggcgacaucauccugaagccggccaacaacucccucaagaucacggaggaggucgggcacaccgaccugauggccgccuacguggacaacagcucccugaccaucaagaagcccaacgagcucagccgcgugcugggccugaagacccucgcgacgcacgggcuggccgccgucaacuccgugcccugggacaccaucgccaacuacgccaagccguuccugaacaagguggucagcaccaccacgaacaucgugacccgcugccucaaccgggugugcaccaacuacaugcccuacuucuucacccugcugcuccagcugugcaccuucacgcgcuccaccaacagccggaucaaggcguccaugcccaccaccaucgccaagaacacggucaagagcgugggcaaguucugccuggaggccagcuucaacuaccucaagucccccaacuucagcaagcugaucaacaucaucaucugguuccugcuccuguccgugugccugggcagccucaucuacuccaccgccgcccuggggguccugaugagcaaccucggcaugccguccuacugcaccggguaccgcgagggcuaccugaacagcaccaacgugacgaucgcgaccuacugcaccggcuccauccccugcagcgugugccuguccgggcucgacagccuggacaccuaccccucccuggagacgauccagaucaccaucagcuccuucaagugggaccucaccgccuucggccuggucgccgagugguuccuggccuacauccucuucacccgguucuucuacgugcuggggcuggccgcgaucaugcagcucuucuucagcuacuucgccgugcacuucaucuccaacagcuggcugauguggcugaucaucaaccugguccagauggcccccaucuccgccauggugcgcauguacaucuucuucgcgagcuucuacuacguguggaagagcuacguccacgugguggacggcugcaacuccagcacgugcaugaugugcuacaagcggaaccgcgccacccgggucgagugcaccaccaucgugaacgggguccgccgguccuucuacguguacgccaacggcggcaagggguucugcaagcuccacaacuggaacugcgugaacugcgacacguucugcgccggcagcaccuucaucuccgacgaggucgcccgcgaccugagccugcaguucaagcggccgaucaaccccaccgaccaguccagcuacaucguggacuccgugaccgucaagaacgggagcauccaccucuacuucgacaaggcgggccagaagacguacgagcgccacucccugagccacuucgugaaccuggacaaccuccgggccaacaacaccaaggggucccugcccaucaacgugaucgucuucgacggcaagagcaagugcgaggaguccagcgccaaguccgccagcguguacuacucccagcugaugugccagcccauccuccugcuggaccaggcccucgugagcgacgucggcgacagcgcggagguggccgugaagauguucgacgccuacgucaacaccuucuccagcaccuucaacgugccgauggagaagcugaagacgcugguggccaccgccgaggcggagcucgccaagaacgucucccuggacaacgugcugagcaccuucaucuccgccgcccgccagggguucguggacagcgacgucgagaccaaggacgugguggagugccucaagcugucccaccagagcgacaucgaggucacgggcgacuccugcaacaacuacaugcugaccuacaacaagguggagaacaugaccccccgggaccucggggcgugcaucgacugcagcgcccgccacaucaacgcccagguggccaagucccacaacaucgcccugaucuggaacgucaaggacuucaugagccuguccgagcagcuccggaagcagauccgcagcgcggccaagaagaacaaccugcccuucaagcugaccugcgccacgacccgccagguggugaacgucgugaccaccaagaucgcccucaagggcgggugaggacuagucccuguucccagagcccacuuuuuuuucuuuuuuugaaauaaaauagccugucuuucagaucucaaaggcucuuuucagagccaccaaaaaaaaaaaaaaaaaaaaaaaaaaaaaaaaaaaaaaaaaaaaaaaaaaaaaaaaaaaaaaaaaaaaaaaaaaaaaaaaaaaaaaaaaaaaaaaaaaaaa

SEQ ID NO: 20091 - RNA, 6113 nt, Artificial Sequence
  SARS-CoV-2__MT451146.1__non-structural protein 3 (NSP3) mRNA gc
aggagagucccgcagucggcguccagcggcucugcuuguucgugugugugucguugcaggccuuauucaagcuuaccauggcccccaccaaggugaccuucggcgacgacacggucaucgaggugcagggguacaagagcgugaacaucaccuucgagcuggacgagcgcaucgacaagguccucaacgagaagugcuccgccuacaccguggagcugggcaccgaggugaacgaguucgcgugcgucguggccgacgccgugaucaagacgcugcagccggucagcgagcuccugaccccccuggggaucgaccucgacgagugguccauggccaccuacuaccuguucgacgagagcggcgaguucaagcuggccucccacauguacugcagcuucuacccccccgacgaggacgaggaggagggggacugcgaggaggaggaguucgagccguccacccaguacgaguacggcacggaggacgacuaccagggcaagccccucgaguucggggcgaccagcgccgcccugcagcccgaggaggagcaggaggaggacuggcuggacgacgacucccagcagaccgugggccagcaggacgggagcgaggacaaccagaccacgaccauccagaccaucguggagguccagccccagcucgagauggagcugaccccgguggugcagacgaucgaggucaacuccuucagcggcuaccugaagcucaccgacaacguguacaucaagaacgccgacaucguggaggaggcgaagaagaucaagcccaccgucguggugaacgccgccaacgucuaccugaagcacgggggcggcguggccggggcccugaacaaggcgaccaacaacgccaugcagguggaguccgacgacuacaucgccacgaacggcccccucaaggucgggggcagcugcgugcuguccggccacaaccuggccaagcacugccuccacgucguggggcccaacgugaacaagggcgaggacauccagcugcugaagagcgccuacgagaacuucaaccagcacgagguccuccuggcgccgcugcucuccgccgggaucuucggcgccgaccccauccacagccugcgggugugcguggacaccguccgcaccaacguguaccuggccguguucgacaagaaccucuacgacaagcuggucuccagcuuccuggagaugaagagcgagaagcagguggagcagaagaucgccgagauccccaaggaggaggugaagcccuucaucaccgaguccaagccgagcgucgagcagcggaagcaggacgacaagaagaucaaggcgugcguggaggaggugacgaccacccucgaggagaccaaguuccugacggagaaccugcuccuguacaucgacaucaacgggaaccugcaccccgacuccgccacccucgucagcgacaucgacaucaccuuccugaagaaggacgcccccuacaucgugggcgacgugguccaggagggcgugcugaccgccguggucauccccacgaagaaggccgggggcaccaccgagaugcucgcgaaggcccugcgcaaggugccgaccgacaacuacaucacgaccuaccccgggcagggccugaacggguacaccguggaggaggccaagaccguccucaagaagugcaaguccgccuucuacauccugcccagcaucaucuccaacgagaagcaggagauccugggcaccgugagcuggaaccuccgggagaugcuggcgcacgccgaggagacgcgcaagcugaugcccgugugcgucgagaccaaggccaucguguccaccauccagcggaaguacaagggcaucaagauccaggaggggguggucgacuacggcgcccgcuucuacuucuacaccagcaagacgaccguggccucccugaucaacacccucaacgaccugaacgagacccuggugacgaugccgcucggguacgucacccacggccugaaccuggaggaggcggcccgguacaugcgcagccucaaggugcccgccaccguguccgucagcucccccgacgccgugaccgccuacaacggguaccugacgagcuccagcaagacccccgaggagcacuucaucgagaccaucucccuggcgggcagcuacaaggacuggagcuacuccggccagagcacccagcucgggaucgaguuccugaagcggggcgacaaguccguguacuacacgagcaacccgaccaccuuccaccuggacggggaggucaucaccuucgacaaccucaagacgcugcugucccuccgcgaggugcggaccaucaagguguucaccaccgucgacaacaucaaccugcacacgcaggugguggacaugagcaugaccuacggccagcaguucggccccaccuaccuggacggggccgacgucaccaagaucaagccccacaacucccacgagggcaagacguucuacgugcucccgaacgacgacacccugcgcguggaggccuucgaguacuaccacaccaccgaccccagcuuccuggggcgguacauguccgcccucaaccacacgaagaaguggaaguacccccaggucaacggccugaccagcaucaagugggccgacaacaacugcuaccuggcgaccgcccuccugacccugcagcagaucgagcucaaguucaaccccccggcccugcaggacgccuacuaccgcgcgcgggccggggaggccgccaacuucugcgcccugauccucgcguacugcaacaagacggugggcgagcugggcgacgugcgcgagaccauguccuaccuguuccagcacgccaaccucgacagcugcaagcggguccugaacguggucugcaagaccugcgggcagcagcagaccacccugaagggcguggaggccgugauguacauggggacgcucuccuacgagcaguucaagaagggcguccagauccccugcaccugcgggaagcaggccaccaaguaccuggugcagcaggagagccccuucgugaugauguccgcccccccggcgcaguacgagcugaagcacggcaccuucacgugcgccagcgaguacaccggcaacuaccagugcgggcacuacaagcacaucaccuccaaggagacccucuacugcaucgacggcgcccugcugacgaagagcagcgaguacaaggggcccaucaccgacgucuucuacaaggagaacuccuacaccaccacgaucaagcccgugaccuacaagcucgacggcguggucugcaccgagaucgaccccaagcuggacaacuacuacaagaaggacaacagcuacuucaccgagcagccgaucgaccuggugcccaaccagcccuaccccaacgccuccuucgacaacuucaaguucgugugcgacaacaucaaguucgccgacgaccucaaccagcugacgggguacaagaagccggcgagccgcgagcugaaggucaccuucuuccccgaccucaacggcgacgugguggccaucgacuacaagcacuacacccccuccuucaagaagggcgccaagcugcugcacaagcccaucgucuggcacgugaacaacgccaccaacaaggcgacguacaagccgaacaccuggugcauccggugccucuggagcaccaagcccguggagaccuccaacagcuucgacguccugaaguccgaggacgcccaggggauggacaaccuggccugcgaggaccucaagcccgugagcgaggagguggucgagaaccccacgauccagaaggacgugcuggagugcaacgugaagaccaccgaggucgugggcgacaucauccugaagccggccaacaacucccucaagaucaccgaggagguggggcacacggaccugauggccgcguacgucgacaacagcucccugaccaucaagaagcccaacgagcucagccgcgugcugggccugaagacccucgccacccacgggcuggccgccgugaacuccguccccugggacacgaucgccaacuacgcgaagccguuccugaacaagguggugagcaccaccaccaacaucgucacgcgcugccucaaccgggugugcaccaacuacaugcccuacuucuucacccugcugcuccagcugugcaccuucacccgcuccacgaacagccggaucaaggccuccaugcccaccaccaucgccaagaacaccgugaagagcgucggcaaguucugccuggaggccagcuucaacuaccucaagucccccaacuucagcaagcugaucaacaucaucaucugguuccugcuccuguccgugugccugggcagccucaucuacuccacggccgcgcugggggugcugaugagcaaccucggcaugccguccuacugcaccggguaccgcgagggcuaccugaacagcaccaacgucaccaucgccacguacugcaccggcuccauccccugcagcgugugccuguccgggcucgacagccuggacaccuaccccucccuggagaccauccagaucacgaucagcuccuucaagugggaccucaccgccuucggccugguggccgagugguuccuggccuacauccucuucacccgguucuucuacguccuggggcuggcggccaucaugcagcucuucuucagcuacuucgccgugcacuucaucuccaacagcuggcugauguggcugaucaucaaccuggugcagauggcccccaucuccgcgaugguccgcauguacaucuucuucgccagcuucuacuacguguggaagagcuacgugcacgucguggacggcugcaacuccagcaccugcaugaugugcuacaagcggaaccgcgccacgcggguggagugcaccaccaucgucaacggggugcgccgguccuucuacgucuacgccaacggcggcaagggguucugcaagcuccacaacuggaacugcgugaacugcgacaccuucugcgccggcagcacguucaucuccgacgagguggcgcgcgaccugagccugcaguucaagcggccgaucaaccccaccgaccaguccagcuacaucgucgacuccgugaccgugaagaacgggagcauccaccucuacuucgacaaggccggccagaagaccuacgagcgccacucccugagccacuucgucaaccuggacaaccuccgggccaacaacacgaaggggucccugcccaucaacgugaucguguucgacggcaagagcaagugcgaggaguccagcgccaaguccgccagcgucuacuacucccagcugaugugccagcccauccuccugcuggaccaggcgcucgugagcgacgugggcgacagcgccgaggucgccgugaagauguucgacgccuacgugaacaccuucuccagcaccuucaacgucccgauggagaagcugaagacccugguggccacggcggaggccgagcucgccaagaacgugucccuggacaacguccugagcaccuucaucuccgccgcgcgccagggguucguggacagcgacguggagaccaaggacgucguggagugccucaagcugucccaccagagcgacaucgaggugaccggcgacuccugcaacaacuacaugcugacguacaacaaggucgagaacaugaccccccgggaccucggggccugcaucgacugcagcgcccgccacaucaacgcccagguggccaagucccacaacaucgcgcugaucuggaacgugaaggacuucaugagccuguccgagcagcuccggaagcagauccgcagcgccgccaagaagaacaaccugcccuucaagcugaccugcgccaccacgcgccaggucgugaacguggucaccaccaagaucgcccucaagggcgggugaggacuagucccuguucccagagcccacuuuuuuuucuuuuuuugaaauaaaauagccugucuuucagaucucaaaggcucuuuucagagccaccaaaaaaaaaaaaaaaaaaaaaaaaaaaaaaaaaaaaaaaaaaaaaaaaaaaaaaaaaaaaaaaaaaaaaaaaaaaaaaaaaaaaaaaaaaaaaaaaaaaaa

SEQ ID NO: 20092 - RNA, 6113 nt, Artificial Sequence
  SARS-CoV-2__MT451231.1__non-structural protein 3 (NSP3) mRNA gc
aggagagucccgcagucggcguccagcggcucugcuuguucgugugugugucguugcaggccuuauucaagcuuaccauggcccccaccaaggugaccuucggcgacgacacggucaucgaggugcagggguacaagagcgugaacaucaccuucgagcuggacgagcgcaucgacaagguccucaacgagaagugcuccgccuacaccguggagcugggcaccgaggugaacgaguucgcgugcgucguggccgacgccgugaucaagacgcugcagccggucagcgagcuccugaccccccuggggaucgaccucgacgagugguccauggccaccuacuaccuguucgacgagagcggcgaguucaagcuggccucccacauguacugcagcuucuacccccccgacgaggacgaggaggagggggacugcgaggaggaggaguucgagccguccacccaguacgaguacggcacggaggacgacuaccagggcaagccccucgaguucggggcgaccagcgccgcccugcagcccgaggaggagcaggaggaggacuggcuggacgacgacucccagcagaccgugggccagcaggacgggagcgaggacaaccagaccacgaccauccagaccaucguggagguccagccccagcucgagauggagcugaccccgguggugcagacgaucgaggucaacuccuucagcggcuaccugaagcucaccgacaacguguacaucaagaacgccgacaucguggaggaggcgaagaaggucaagcccaccgugguggucaacgccgccaacguguaccugaagcacgggggcggcguggccggggcccugaacaaggcgaccaacaacgccaugcaggucgaguccgacgacuacaucgccacgaacggcccccucaagguggggggcagcugcguccuguccggccacaaccuggccaagcacugccuccacgugguggggcccaacgucaacaagggcgaggacauccagcugcugaagagcgccuacgagaacuucaaccagcacgaggugcuccuggcgccgcugcucuccgccgggaucuucggcgccgaccccauccacagccugcgggugugcgucgacaccgugcgcaccaacguguaccuggccgucuucgacaagaaccucuacgacaagcugguguccagcuuccuggagaugaagagcgagaagcagguggagcagaagaucgccgagauccccaaggaggaggucaagcccuucaucaccgaguccaagccgagcguggagcagcggaagcaggacgacaagaagaucaaggcgugcguggaggaggucacgaccacccucgaggagaccaaguuccugacggagaaccugcuccuguacaucgacaucaacgggaaccugcaccccgacuccgccacccucgugagcgacaucgacaucaccuuccugaagaaggacgcccccuacaucgugggcgacgucgugcaggagggcgugcugaccgccgucgugauccccacgaagaaggccgggggcaccaccgagaugcucgcgaaggcccugcgcaaggugccgaccgacaacuacaucacgaccuaccccgggcagggccugaacggguacaccgucgaggaggccaagaccgugcucaagaagugcaaguccgccuucuacauccugcccagcaucaucuccaacgagaagcaggagauccugggcaccgugagcuggaaccuccgggagaugcuggcgcacgccgaggagacgcgcaagcugaugcccgucugcguggagaccaaggccaucguguccaccauccagcggaaguacaagggcaucaagauccaggagggggucguggacuacggcgcccgcuucuacuucuacaccagcaagacgaccguggccucccugaucaacacccucaacgaccugaacgagacccuggucacgaugccgcucggguacgugacccacggccugaaccuggaggaggcggcccgguacaugcgcagccucaaggugcccgccaccgucuccgugagcucccccgacgccgugaccgccuacaacggguaccugacgagcuccagcaagacccccgaggagcacuucaucgagaccaucucccuggcgggcagcuacaaggacuggagcuacuccggccagagcacccagcucgggaucgaguuccugaagcggggcgacaaguccgucuacuacacgagcaacccgaccaccuuccaccuggacggggaggugaucaccuucgacaaccucaagacgcugcugucccuccgcgaggugcggaccaucaaggucuucaccaccguggacaacaucaaccugcacacgcagguggucgacaugagcaugaccuacggccagcaguucggccccaccuaccuggacggggccgacgugaccaagaucaagccccacaacucccacgagggcaagacguucuacgugcucccgaacgacgacacccugcgcgucgaggccuucgaguacuaccacaccaccgaccccagcuuccuggggcgguacauguccgcccucaaccacacgaagaaguggaaguacccccaggugaacggccugaccagcaucaagugggccgacaacaacugcuaccuggcgaccgcccuccugacccugcagcagaucgagcucaaguucaaccccccggcccugcaggacgccuacuaccgcgcgcgggccggggaggccgccaacuucugcgcccugauccucgcguacugcaacaagacggugggcgagcugggcgacguccgcgagaccauguccuaccuguuccagcacgccaaccucgacagcugcaagcgggugcugaacgucgugugcaagaccugcgggcagcagcagaccacccugaagggcguggaggccgucauguacauggggacgcucuccuacgagcaguucaagaagggcgugcagauccccugcaccugcgggaagcaggccaccaaguaccuggugcagcaggagagccccuucgucaugauguccgcccccccggcgcaguacgagcugaagcacggcaccuucacgugcgccagcgaguacaccggcaacuaccagugcgggcacuacaagcacaucaccuccaaggagacccucuacugcaucgacggcgcccugcugacgaagagcagcgaguacaaggggcccaucaccgacguguucuacaaggagaacuccuacaccaccacgaucaagcccgugaccuacaagcucgacggcgucgugugcaccgagaucgaccccaagcuggacaacuacuacaagaaggacaacagcuacuucaccgagcagccgaucgaccuggugcccaaccagcccuaccccaacgccuccuucgacaacuucaaguucgucugcgacaacaucaaguucgccgacgaccucaaccagcugacgggguacaagaagccggcgagccgcgagcugaaggugaccuucuuccccgaccucaacggcgacguggucgccaucgacuacaagcacuacacccccuccuucaagaagggcgccaagcugcugcacaagcccaucguguggcacgugaacaacgccaccaacaaggcgacguacaagccgaacaccuggugcauccggugccucuggagcaccaagcccgucgagaccuccaacagcuucgacgugcugaaguccgaggacgcccaggggauggacaaccuggccugcgaggaccucaagcccgugagcgaggaggucguggagaaccccacgauccagaaggacgugcuggagugcaacgucaagaccaccgagguggugggcgacaucauccugaagccggccaacaacucccucaagaucaccgaggaggucgggcacacggaccugauggccgcguacguggacaacagcucccugaccaucaagaagcccaacgagcucagccgcgugcugggccugaagacccucgccacccacgggcuggccgccgucaacuccgugcccugggacacgaucgccaacuacgcgaagccguuccugaacaagguggucagcaccaccaccaacaucgugacgcgcugccucaaccgggugugcaccaacuacaugcccuacuucuucacccugcugcuccagcugugcaccuucacccgcuccacgaacagccggaucaaggccuccaugcccaccaccaucgccaagaacaccgucaagagcgugggcaaguucugccuggaggccagcuucaacuaccucaagucccccaacuucagcaagcugaucaacaucaucaucugguuccugcuccuguccgugugccugggcagccucaucuacuccacggccguccugggggugcugaugagcaaccucggcaugccguccuacugcaccggguaccgcgagggcuaccugaacagcaccaacgugaccaucgcgacguacugcaccggcuccauccccugcagcgucugccuguccgggcucgacagccuggacaccuaccccucccuggagaccauccagaucacgaucagcuccuucaagugggaccucaccgccuucggccugguggccgagugguuccuggccuacauccucuucacccgguucuucuacgugcuggggcuggccgcgaucaugcagcucuucuucagcuacuucgccguccacuucaucuccaacagcuggcugauguggcugaucaucaaccuggugcagauggcccccaucuccgccauggugcgcauguacaucuucuucgcgagcuucuacuacgucuggaagagcuacgugcacguggucgacggcugcaacuccagcaccugcaugaugugcuacaagcggaaccgcgccacgcggguggagugcaccaccaucgucaacggggugcgccgguccuucuacguguacgccaacggcggcaagggguucugcaagcuccacaacuggaacugcgucaacugcgacaccuucugcgccggcagcacguucaucuccgacgagguggcccgcgaccugagccugcaguucaagcggccgaucaaccccaccgaccaguccagcuacaucguggacuccgucaccgugaagaacgggagcauccaccucuacuucgacaaggcgggccagaagaccuacgagcgccacucccugagccacuucgugaaccuggacaaccuccgggccaacaacacgaaggggucccugcccaucaacgucaucguguucgacggcaagagcaagugcgaggaguccagcgccaaguccgccagcguguacuacucccagcugaugugccagcccauccuccugcuggaccaggcccucgucagcgacgugggcgacagcgcggagguggccgucaagauguucgacgccuacgugaacaccuucuccagcaccuucaacgugccgauggagaagcugaagacccuggucgccacggccgaggcggagcucgccaagaacgugucccuggacaacgugcugagcaccuucaucuccgccgcccgccagggguucgucgacagcgacguggagaccaaggacguggucgagugccucaagcugucccaccagagcgacaucgaggugaccggcgacuccugcaacaacuacaugcugacguacaacaagguggagaacaugaccccccgggaccucggggcgugcaucgacugcagcgcccgccacaucaacgcccaggucgccaagucccacaacaucgcccugaucuggaacgugaaggacuucaugagccuguccgagcagcuccggaagcagauccgcagcgcggccaagaagaacaaccugcccuucaagcugaccugcgccaccacgcgccagguggucaacguggugaccaccaagaucgcccucaagggcgggugaggacuagucccuguucccagagcccacuuuuuuuucuuuuuuugaaauaaaauagccugucuuucagaucucaaaggcucuuuucagagccaccaaaaaaaaaaaaaaaaaaaaaaaaaaaaaaaaaaaaaaaaaaaaaaaaaaaaaaaaaaaaaaaaaaaaaaaaaaaaaaaaaaaaaaaaaaaaaaaaaaaaa

SEQ ID NO: 20093 - RNA, 6113 nt, Artificial Sequence
  SARS-CoV-2__MT451236.1__non-structural protein 3 (NSP3) mRNA gc
aggagagucccgcagucggcguccagcggcucugcuuguucgugugugugucguugcaggccuuauucaagcuuaccauggcccccaccaaggugaccuucggcgacgacacggucaucgaggugcagggguacaagagcgugaacaucaccuucgagcuggacgagcgcaucgacaagguccucaacgagaagugcuccgccuacaccguggagcugggcaccgaggugaacgaguucgcgugcgucguggccgacgccgugaucaagacgcugcagccggucagcgagcuccugaccccccuggggaucgaccucgacgagugguccauggccaccuacuaccuguucgacgagagcggcgaguucaagcuggccucccacauguacugcagcuucuacccccccgacgaggacgaggaggagggggacugcgaggaggaggaguucgagccguccacccaguacgaguacggcacggaggacgacuaccagggcaagccccucgaguucggggcgaccagcgccgcccugcagcccgaggaggagcaggaggaggacuggcuggacgacgacucccagcagaccgugggccagcaggacgggagcaaggacaaccagaccacgaccauccagaccaucguggagguccagccccagcucgagauggagcugaccccgguggugcagacgaucgaggucaacuccuucagcggcuaccugaagcucaccgacaacguguacaucaagaacgccgacaucguggaggaggcgaagaaggucaagcccaccgugguggucaacgccgccaacguguaccugaagcacgggggcggcguggccggggcccugaacaaggcgaccaacaacgccaugcaggucgaguccgacgacuacaucgccacgaacggcccccucaagguggggggcagcugcguccuguccggccacaaccuggccaagcacugccuccacgugguggggcccaacgucaacaagggcgaggacauccagcugcugaagagcgccuacgagaacuucaaccagcacgaggugcuccuggcgccgcugcucuccgccgggaucuucggcgccgaccccauccacagccugcgggugugcgucgacaccgugcgcaccaacguguaccuggccgucuucgacaagaaccucuacgacaagcugguguccagcuuccuggagaugaagagcgagaagcagguggagcagaagaucgccgagauccccaaggaggaggucaagcccuucaucaccgaguccaagccgagcguggagcagcggaagcaggacgacaagaagaucaaggcgugcguggaggaggucacgaccacccucgaggagaccaaguuccugacggagaaccugcuccuguacaucgacaucaacgggaaccugcaccccgacuccgccacccucgugagcgacaucgacaucaccuuccugaagaaggacgcccccuacaucgugggcgacgucgugcaggagggcgugcugaccgccgucgugauccccacgaagaaggccgggggcaccaccgagaugcucgcgaaggcccugcgcaaggugccgaccgacaacuacaucacgaccuaccccgggcagggccugaacggguacaccgucgaggaggccaagaccgugcucaagaagugcaaguccgccuucuacauccugcccagcaucaucuccaacgagaagcaggagauccugggcaccgugagcuggaaccuccgggagaugcuggcgcacgccgaggagacgcgcaagcugaugcccgucugcguggagaccaaggccaucguguccaccauccagcggaaguacaagggcaucaagauccaggagggggucguggacuacggcgcccgcuucuacuucuacaccagcaagacgaccguggccucccugaucaacacccucaacgaccugaacgagacccuggucacgaugccgcucggguacgugacccacggccugaaccuggaggaggcggcccgguacaugcgcagccucaaggugcccgccaccgucuccgugagcucccccgacgccgugaccgccuacaacggguaccugacgagcuccagcaagacccccgaggagcacuucaucgagaccaucucccuggcgggcagcuacaaggacuggagcuacuccggccagagcacccagcucgggaucgaguuccugaagcggggcgacaaguccgucuacuacacgagcaacccgaccaccuuccaccuggacggggaggugaucaccuucgacaaccucaagacgcugcugucccuccgcgaggugcggaccaucaaggucuucaccaccguggacaacaucaaccugcacacgcagguggucgacaugagcaugaccuacggccagcaguucggccccaccuaccuggacggggccgacgugaccaagaucaagccccacaacucccacgagggcaagacguucuacgugcucccgaacgacgacacccugcgcgucgaggccuucgaguacuaccacaccaccgaccccagcuuccuggggcgguacauguccgcccucaaccacacgaagaaguggaaguacccccaggugaacggccugaccagcaucaagugggccgacaacaacugcuaccuggcgaccgcccuccugacccugcagcagaucgagcucaaguucaaccccccggcccugcaggacgccuacuaccgcgcgcgggccggggaggccgccaacuucugcgcccugauccucgcguacugcaacaagacggugggcgagcugggcgacguccgcgagaccauguccuaccuguuccagcacgccaaccucgacagcugcaagcgggugcugaacgucgugugcaagaccugcgggcagcagcagaccacccugaagggcguggaggccgucauguacauggggacgcucuccuacgagcaguucaagaagggcgugcagauccccugcaccugcgggaagcaggccaccaaguaccuggugcagcaggagagccccuucgucaugauguccgcccccccggcgcaguacgagcugaagcacggcaccuucacgugcgccagcgaguacaccggcaacuaccagugcgggcacuacaagcacaucaccuccaaggagacccucuacugcaucgacggcgcccugcugacgaagagcagcgaguacaaggggcccaucaccgacguguucuacaaggagaacuccuacaccaccacgaucaagcccgugaccuacaagcucgacggcgucgugugcaccgagaucgaccccaagcuggacaacuacuacaagaaggacaacagcuacuucaccgagcagccgaucgaccuggugcccaaccagcccuaccccaacgccuccuucgacaacuucaaguucgucugcgacaacaucaaguucgccgacgaccucaaccagcugacgggguacaagaagccggcgagccgcgagcugaaggugaccuucuuccccgaccucaacggcgacguggucgccaucgacuacaagcacuacacccccuccuucaagaagggcgccaagcugcugcacaagcccaucguguggcacgugaacaacgccaccaacaaggcgacguacaagccgaacaccuggugcauccggugccucuggagcaccaagcccgucgagaccuccaacagcuucgacgugcugaaguccgaggacgcccaggggauggacaaccuggccugcgaggaccucaagcccgugagcgaggaggucguggagaaccccacgauccagaaggacgugcuggagugcaacgucaagaccaccgagguggugggcgacaucauccugaagccggccaacaacucccucaagaucaccgaggaggucgggcacacggaccugauggccgcguacguggacaacagcucccugaccaucaagaagcccaacgagcucagccgcgugcugggccugaagacccucgccacccacgggcuggccgccgucaacuccgugcccugggacacgaucgccaacuacgcgaagccguuccugaacaagguggucagcaccaccaccaacaucgugacgcgcugccucaaccgggugugcaccaacuacaugcccuacuucuucacccugcugcuccagcugugcaccuucacccgcuccacgaacagccggaucaaggccuccaugcccaccaccaucgccaagaacaccgucaagagcgugggcaaguucugccuggaggccagcuucaacuaccucaagucccccaacuucagcaagcugaucaacaucaucaucugguuccugcuccuguccgugugccugggcagccucaucuacuccacggccgcgcuggggguccugaugagcaaccucggcaugccguccuacugcaccggguaccgcgagggcuaccugaacagcaccaacgugaccaucgccacguacugcaccggcuccauccccugcagcgugugccuguccgggcucgacagccuggacaccuaccccucccuggagaccauccagaucacgaucagcuccuucaagugggaccucaccgccuucggccuggucgccgagugguuccuggccuacauccucuucacccgguucuucuacgugcuggggcuggcggccaucaugcagcucuucuucagcuacuucgccgugcacuucaucuccaacagcuggcugauguggcugaucaucaaccugguccagauggcccccaucuccgcgauggugcgcauguacaucuucuucgccagcuucuacuacguguggaagagcuacguccacgugguggacggcugcaacuccagcaccugcaugaugugcuacaagcggaaccgcgccacgcgggucgagugcaccaccaucgugaacgggguccgccgguccuucuacguguacgccaacggcggcaagggguucugcaagcuccacaacuggaacugcgugaacugcgacaccuucugcgccggcagcacguucaucuccgacgaggucgcgcgcgaccugagccugcaguucaagcggccgaucaaccccaccgaccaguccagcuacaucguggacuccgugaccgucaagaacgggagcauccaccucuacuucgacaaggccggccagaagaccuacgagcgccacucccugagccacuucgugaaccuggacaaccuccgggccaacaacacgaaggggucccugcccaucaacgugaucgucuucgacggcaagagcaagugcgaggaguccagcgccaaguccgccagcguguacuacucccagcugaugugccagcccauccuccugcuggaccaggcgcucgugagcgacgucggcgacagcgccgagguggccgugaagauguucgacgccuacgucaacaccuucuccagcaccuucaacgugccgauggagaagcugaagacccugguggccacggcggaggccgagcucgccaagaacgucucccuggacaacgugcugagcaccuucaucuccgccgcgcgccagggguucguggacagcgacgucgagaccaaggacgugguggagugccucaagcugucccaccagagcgacaucgaggucaccggcgacuccugcaacaacuacaugcugacguacaacaagguggagaacaugaccccccgggaccucggggccugcaucgacugcagcgcccgccacaucaacgcccagguggccaagucccacaacaucgcgcugaucuggaacgucaaggacuucaugagccuguccgagcagcuccggaagcagauccgcagcgccgccaagaagaacaaccugcccuucaagcugaccugcgccaccacgcgccagguggugaacgucgugaccaccaagaucgcccucaagggcgggugaggacuagucccuguucccagagcccacuuuuuuuucuuuuuuugaaauaaaauagccugucuuucagaucucaaaggcucuuuucagagccaccaaaaaaaaaaaaaaaaaaaaaaaaaaaaaaaaaaaaaaaaaaaaaaaaaaaaaaaaaaaaaaaaaaaaaaaaaaaaaaaaaaaaaaaaaaaaaaaaaaaaa

SEQ ID NO: 20094 - RNA, 6113 nt, Artificial Sequence
  SARS-CoV-2__MT451238.1__non-structural protein 3 (NSP3) mRNA gc
aggagagucccgcagucggcguccagcggcucugcuuguucgugugugugucguugcaggccuuauucaagcuuaccauggcccccaccaaggugaccuucggcgacgacacggucaucgaggugcagggguacaagagcgugaacaucaccuucgagcuggacgagcgcaucgacaagguccucaacgagaagugcuccgccuacaccguggagcugggcaccgaggugaacgaguucgcgugcgucguggccgacgccgugaucaagacgcugcagccggucagcgagcuccugaccccccuguccaucgaccucgacgaguggagcauggccaccuacuaccuguucgacgaguccggggaguucaagcuggccagccacauguacugcuccuucuacccccccgacgaggacgaggaggagggcgacugcgaggaggaggaguucgagccgagcacccaguacgaguacgggacggaggacgacuaccagggcaagccccucgaguucggcgcgaccuccgccgcccugcagcccgaggaggagcaggaggaggacuggcuggacgacgacagccagcagaccguggggcagcaggacggcuccgaggacaaccagaccacgaccauccagaccaucguggagguccagccccagcucgagauggagcugaccccgguggugcagacgaucgaggucaacagcuucuccggguaccugaagcucaccgacaacguguacaucaagaacgccgacaucguggaggaggcgaagaaggucaagcccaccgugguggucaacgccgccaacguguaccugaagcacggcgggggcguggccggcgcccugaacaaggcgaccaacaacgccaugcaggucgagagcgacgacuacaucgccacgaacgggccccucaaggugggcggguccugcguccugagcggccacaaccuggccaagcacugccuccacguggugggccccaacgucaacaagggggaggacauccagcugcugaaguccgccuacgagaacuucaaccagcacgaggugcuccuggcgccgcugcucagcgccggcaucuucggggccgaccccauccacucccugcgggugugcgucgacaccgugcgcaccaacguguaccuggccgucuucgacaagaaccucuacgacaagcuggugagcagcuuccuggagaugaaguccgagaagcagguggagcagaagaucgccgagauccccaaggaggaggucaagcccuucaucaccgagagcaagccguccguggagcagcggaagcaggacgacaagaagaucaaggcgugcguggaggaggucacgaccacccucgaggagaccaaguuccugacggagaaccugcuccuguacaucgacaucaacggcaaccugcaccccgacagcgccacccucguguccgacaucgacaucaccuuccugaagaaggacgcccccuacaucgugggggacgucgugcaggagggcgugcugaccgccgucgugauccccacgaagaaggccggcgggaccaccgagaugcucgcgaaggcccugcgcaaggugccgaccgacaacuacaucacgaccuaccccggccaggggcugaacggcuacaccgucgaggaggccaagaccgugcucaagaagugcaagagcgccuucuacauccugcccuccaucaucagcaacgagaagcaggagauccuggggaccguguccuggaaccuccgggagaugcuggcgcacgccgaggagacgcgcaagcugaugcccgucugcguggagaccaaggccaucgugagcaccauccagcggaaguacaagggcaucaagauccaggagggcgucguggacuacggggcccgcuucuacuucuacaccuccaagacgaccguggccagccugaucaacacccucaacgaccugaacgagacccuggucacgaugccgcucggcuacgugacccacgggcugaaccuggaggaggcggcccgguacaugcgcucccucaaggugcccgccaccgucagcguguccagccccgacgccgugaccgccuacaacggcuaccugacguccagcuccaagacccccgaggagcacuucaucgagaccaucagccuggcggggagcuacaaggacugguccuacagcggccaguccacccagcucggcaucgaguuccugaagcggggggacaagagcgucuacuacacguccaacccgaccaccuuccaccuggacggcgaggugaucaccuucgacaaccucaagacgcugcugagccuccgcgaggugcggaccaucaaggucuucaccaccguggacaacaucaaccugcacacgcagguggucgacauguccaugaccuacgggcagcaguucggccccaccuaccuggacggcgccgacgugaccaagaucaagccccacaacagccacgaggggaagacguucuacgugcucccgaacgacgacacccugcgcgucgaggccuucgaguacuaccacaccaccgaccccuccuuccugggccgguacaugagcgcccucaaccacacgaagaaguggaaguacccccaggugaacgggcugaccuccaucaagugggccgacaacaacugcuaccuggcgaccgcccuccugacccugcagcagaucgagcucaaguucaaccccccggcccugcaggacgccuacuaccgcgcgcgggccggcgaggccgccaacuucugcgcccugauccucgcguacugcaacaagacggugggggagcugggcgacguccgcgagaccaugagcuaccuguuccagcacgccaaccucgacuccugcaagcgggugcugaacgucgugugcaagaccugcggccagcagcagaccacccugaaggggguggaggccgucauguacaugggcacgcucagcuacgagcaguucaagaagggggugcagauccccugcaccugcggcaagcaggccaccaaguaccuggugcagcaggagucccccuucgucaugaugagcgcccccccggcgcaguacgagcugaagcacgggaccuucacgugcgccuccgaguacaccggcaacuaccagugcggccacuacaagcacaucaccagcaaggagacccucuacugcaucgacggggcccugcugacgaagagcuccgaguacaagggccccaucaccgacguguucuacaaggagaacagcuacaccaccacgaucaagcccgugaccuacaagcucgacggggucgugugcaccgagaucgaccccaagcuggacaacuacuacaagaaggacaacuccuacuucaccgagcagccgaucgaccuggugcccaaccagcccuaccccaacgccagcuucgacaacuucaaguucgucugcgacaacaucaaguucgccgacgaccucaaccagcugacgggcuacaagaagccggcgucccgcgagcugaaggugaccuucuuccccgaccucaacggggacguggucgccaucgacuacaagcacuacacccccagcuucaagaagggcgccaagcugcugcacaagcccaucguguggcacgugaacaacgccaccaacaaggcgacguacaagccgaacaccuggugcauccggugccucugguccaccaagcccgucgagaccagcaacuccuucgacgugcugaagagcgaggacgcccagggcauggacaaccuggccugcgaggaccucaagcccguguccgaggaggucguggagaaccccacgauccagaaggacgugcuggagugcaacgucaagaccaccgagguggugggggacaucauccugaagccggccaacaacagccucaagaucaccgaggaggucggccacacggaccugauggccgcguacguggacaacuccagccugaccaucaagaagcccaacgagcucucccgcgugcuggggcugaagacccucgccacccacggccuggccgccgucaacagcgugcccugggacacgaucgccaacuacgcgaagccguuccugaacaagguggucuccaccaccaccaacaucgugacgcgcugccucaaccgggugugcaccaacuacaugcccuacuucuucacccugcugcuccagcugugcaccuucacccgcagcacgaacucccggaucaaggccagcaugcccaccaccaucgccaagaacaccgucaagagcguggggaaguucugccuggaggccuccuucaacuaccucaagagccccaacuucuccaagcugaucaacaucaucaucugguuccugcuccugagcgugugccugggcucccucaucuacagcacggccgcgcugggcguccugauguccaaccucgggaugccgagcuacugcaccggcuaccgcgagggguaccugaacuccaccaacgugaccaucgccacguacugcaccggcagcauccccugcuccgugugccugagcggccucgacucccuggacaccuaccccagccuggagaccauccagaucacgaucuccagcuucaagugggaccucaccgccuucgggcuggucgccgagugguuccuggccuacauccucuucacccgguucuucuacgugcugggccuggcggccaucaugcagcucuucuucuccuacuucgccgugcacuucaucagcaacuccuggcugauguggcugaucaucaaccugguccagauggcccccaucagcgcgauggugcgcauguacaucuucuucgccagcuucuacuacguguggaaguccuacguccacgugguggacgggugcaacagcuccaccugcaugaugugcuacaagcggaaccgcgccacgcgggucgagugcaccaccaucgugaacggcguccgccggagcuucuacguguacgccaacgggggcaagggcuucugcaagcuccacaacuggaacugcgugaacugcgacaccuucugcgccggguccacguucaucagcgacgaggucgcgcgcgaccugucccugcaguucaagcggccgaucaaccccaccgaccagagcuccuacaucguggacagcgugaccgucaagaacggcuccauccaccucuacuucgacaaggccgggcagaagaccuacgagcgccacagccugucccacuucgugaaccuggacaaccuccgggccaacaacacgaagggcagccugcccaucaacgugaucgucuucgacgggaaguccaagugcgaggagagcuccgccaagagcgccuccguguacuacagccagcugaugugccagcccauccuccugcuggaccaggcgcucgugagcgacgucggcgacuccgccgagguggccgugaagauguucgacgccuacgucaacaccuucagcuccaccuucaacgugccgauggagaagcugaagacccugguggccacggcggaggccgagcucgccaagaacgucagccuggacaacgugcuguccaccuucaucagcgccgcgcgccagggcuucguggacuccgacgucgagaccaaggacgugguggagugccucaagcugagccaccaguccgacaucgaggucaccggggacagcugcaacaacuacaugcugacguacaacaagguggagaacaugaccccccgggaccucggcgccugcaucgacugcuccgcccgccacaucaacgcccagguggccaagagccacaacaucgcgcugaucuggaacgucaaggacuucaugucccugagcgagcagcuccggaagcagauccgcuccgccgccaagaagaacaaccugcccuucaagcugaccugcgccaccacgcgccagguggugaacgucgugaccaccaagaucgcccucaaggggggcugaggacuagucccuguucccagagcccacuuuuuuuucuuuuuuugaaauaaaauagccugucuuucagaucucaaaggcucuuuucagagccaccaaaaaaaaaaaaaaaaaaaaaaaaaaaaaaaaaaaaaaaaaaaaaaaaaaaaaaaaaaaaaaaaaaaaaaaaaaaaaaaaaaaaaaaaaaaaaaaaaaaaa

SEQ ID NO: 20095 - RNA, 6113 nt, Artificial Sequence
  SARS-CoV-2__MT451255.1__non-structural protein 3 (NSP3) mRNA gc
aggagagucccgcagucggcguccagcggcucugcuuguucgugugugugucguugcaggccuuauucaagcuuaccauggcccccaccaaggugaccuucggcgacgacacggucaucgaggugcagggguacaagagcgugaacaucaccuucgagcuggacgagcgcaucgacaagguccucaacgagaagugcuccgccuacaccguggagcugggcaccgaggugaacgaguucgcgugcgucguggccgacgccgugaucaagacgcugcagccggucagcgagcuccugaccccccuggggaucgaccucgacgagugguccauggccaccuacuaccuguucgacgagagcggcgaguucaagcuggccucccacauguacugcagcuucuacccccccgacgaggacgaggaggagggggacugcgaggaggaggaguucgagccguccacccaguacgaguacggcacggaggacgacuaccagggcaagccccucgaguucggggcgaccagcgccgcccugcagcccgaggaggagcaggaggaggacuggcuggacgacgacucccagcagaccgugggccagcaggacgggagcgaggacaaccagaccacgaccauccagaccaucguggagguccagccccagcucgagauggagcugaccccgguggugcagacgaucgaggucaacuccuucagcggcuaccugaagcucaccgacaacguguacaucaagaacgccgacaucguggaggaggcgaagaaggucaagcccaccgugguggucaacgccgccaacguguaccugaagcacgggggcggcguggccggggcccugaacaaggcgaccaacaacgccaugcaggucgaguccgacgacuacaucgccacgaacggcccccucaagguggggggcagcugcguccuguccggccacaaccuggccaagcacugccuccacgugguggggcccaacgucaacaagggcgaggacauccagcugcugaagagcgccuacgagaacuucaaccagcacgaggugcuccuggcgccgcugcucuccgccgggaucuucggcgccgaccccauccacagccugcgggugugcgucgacaccgugcgcaccaacguguaccuggccgucuucgacaagaaccucuacgacaagcugguguccagcuuccuggagaugaagagcgagaagcagguggagcagaagaucgccgagauccccaaggaggaggucaagcccuucaucaccgaguccaagccgagcguggagcagcggaagcaggacgacaagaagaucaaggcgugcguggaggaggucacgaccacccucgaggagaccaaguuccugacggagaaccugcuccuguacaucgacaucaacgggaaccugcaccccgacuccgccacccucgugagcgacaucgacaucaccuuccugaagaaggacgcccccuacaucgugggcgacgucgugcaggagggcgugcugaccgccgucgugauccccacgaagaaggccgggggcaccaccgagaugcucgcgaaggcccugcgcaaggugccgaccgacaacuacaucacgaccuaccccgggcagggccugaacggguacaccgucgaggaggccaagaccgugcucaagaagugcaaguccgccuucuacauccugcccagcaucaucuccaacgagaagcaggagauccugggcaccgugagcuggaaccuccgggagaugcuggcgcacgccgaggagacgcgcaagcugaugcccgucugcguggagaccaaggccaucguguccaccauccagcggaaguacaagggcaucaagauccaggagggggucguggacuacggcgcccgcuucuacuucuacaccagcaagacgaccguggccucccugaucaacacccucaacgaccugaacgagacccuggucacgaugccgcucggguacgugacccacggccugaaccuggaggaggcggcccgguacaugcgcagccucaaggugcccgccaccgucuccgugagcucccccgacgccgugaccgccuacaacggguaccugacgagcuccagcaagacccccgaggagcacuucaucgagaccaucucccuggcgggcagcuacaaggacuggagcuacuccggccagagcacccagcucgggaucgaguuccugaagcggggcgacaaguccgucuacuacacgagcaacccgaccaccuuccaccuggacggggaggugaucaccuucgacaaccucaagacgcugcugucccuccgcgaggugcggaccaucaaggucuucaccaccguggacaacaucaaccugcacacgcagguggucgacaugagcaugaccuacggccagcaguucggccccaccuaccuggacggggccgacgugaccaagaucaagccccacaacucccacgagggcaagacguucuacgugcucccgaacgacgacacccugcgcgucgaggccuucgaguacuaccacaccaccgaccccagcuuccuggggcgguacauguccgcccucaaccacacgaagaaguggaaguacccccaggugaacggccugaccagcaucaagugggccgacaacaacugcuaccuggcgaccgcccuccugacccugcagcagaucgagcucaaguucaaccccccggcccugcaggacgccuacuaccgcgcgcgggccggggaggccgccaacuucugcgcccugauccucgcguacugcaacaagacggugggcgagcugggcgacguccgcgagaccauguccuaccuguuccagcacgccaaccucgacagcugcaagcgggugcugaacgucgugugcaagaccugcgggcagcagcagaccacccugaagggcguggaggccgucauguacauggggacgcucuccuacgagcaguucaagaagggcgugcagauccccugcaccugcgggaagcaggccaccaaguaccuggugcagcaggagagccccuucgucaugauguccgcccccccggcgcaguacgagcugaagcacggcaccuucacgugcgccagcgaguacaccggcaacuaccagugcgggcacuacaagcacaucaccuccaaggagacccucuacugcaucgacggcgcccugcugacgaagagcagcgaguacaaggggcccaucaccgacguguucuacaaggagaacuccuacaccaccacgaucaagcccgugaccuacaagcucgacggcgucgugugcaccgagaucgaccccaagcuggacaacuacuacaagaaggacaacagcuacuucaccgagcagccgaucgaccuggugcccaaccagcccuaccccaacgccuccuucgacaacuucaaguucgucugcgacaacaucaaguucgccgacgaccucaaccagcugacgggguacaagaagccggcgagccgcgagcugaaggugaccuucuuccccgaccucaacggcgacguggucgccaucgacuacaagcacuacacccccuccuucaagaagggcgccaagcugcugcacaagcccaucguguggcacgugaacaacgccaccaacaaggcgacguacaagccgaacaccuggugcauccggugccucuggagcaccaagcccgucgagaccuccaacagcuucgacgugcugaaguccgaggacgcccaggggauggacaaccuggccugcgaggaccucaagcccgugagcgaggaggucguggagaaccccacgauccagaaggacgugcuggagugcaacgucaagaccaccgagguggugggcgacaucauccugaagccggccaacaacucccucaagaucaccgaggaggucgggcacacggaccugauggccgcguacguggacaacagcucccugaccaucaagaagcccaacgagcucagccgcgugcugggccugaagacccucgccacccacgggcuggccgccgucaacuccgugcccugggacacgaucgccaacuacgcgaagccguuccugaacaagguggucagcaccaccaccaacaucgugacgcgcugccucaaccgggugugcaccaacuacaugcccuacuucuucacccugcugcuccagcugugcaccuucacccgcuccacgaacagccggaucaaggccuccaugcccaccaccaucgccaagaacaccgucaagagcgugggcaaguucugccuggaggccagcuucaacuaccucaagucccccaacuucuucaagcugaucaacaucaucaucugguuccugcuccugagcgugugccugggcucccucaucuacagcacggccgcgcuggggguccugauguccaaccucggcaugccgagcuacugcaccggguaccgcgagggcuaccugaacuccaccaacgugaccaucgccacguacugcaccggcagcauccccugcuccgugugccugagcgggcucgacucccuggacaccuaccccagccuggagaccauccagaucacgaucuccagcuucaagugggaccucaccgccuucggccuggucgccgagugguuccuggccuacauccucuucacccgguucuucuacgugcuggggcuggcggccaucaugcagcucuucuucuccuacuucgccgugcacuucaucagcaacuccuggcugauguggcugaucaucaaccugguccagauggcccccaucagcgcgauggugcgcauguacaucuucuucgccuccuucuacuacguguggaagagcuacguccacgugguggacggcugcaacagcuccaccugcaugaugugcuacaagcggaaccgcgccacgcgggucgagugcaccaccaucgugaacgggguccgccggagcuucuacguguacgccaacggcggcaagggguucugcaagcuccacaacuggaacugcgugaacugcgacaccuucugcgccggcuccacguucaucagcgacgaggucgcgcgcgaccugucccugcaguucaagcggccgaucaaccccaccgaccagagcuccuacaucguggacagcgugaccgucaagaacggguccauccaccucuacuucgacaaggccggccagaagaccuacgagcgccacagccugucccacuucgugaaccuggacaaccuccgggccaacaacacgaaggggagccugcccaucaacgugaucgucuucgacggcaaguccaagugcgaggagagcuccgccaagagcgccuccguguacuacagccagcugaugugccagcccauccuccugcuggaccaggcgcucguguccgacgucggcgacagcgccgagguggccgugaagauguucgacgccuacgucaacaccuucagcuccaccuucaacgugccgauggagaagcugaagacccugguggccacggcggaggccgagcucgccaagaacgucagccuggacaacgugcuguccaccuucaucagcgccgcgcgccagggguucguggacuccgacgucgagaccaaggacgugguggagugccucaagcugagccaccaguccgacaucgaggucaccggcgacagcugcaacaacuacaugcugacguacaacaagguggagaacaugaccccccgggaccucggggccugcaucgacugcuccgcccgccacaucaacgcccagguggccaagagccacaacaucgcgcugaucuggaacgucaaggacuucaugucccugagcgagcagcuccggaagcagauccgcuccgccgccaagaagaacaaccugcccuucaagcugaccugcgccaccacgcgccagguggugaacgucgugaccaccaagaucgcccucaagggcgggugaggacuagucccuguucccagagcccacuuuuuuuucuuuuuuugaaauaaaauagccugucuuucagaucucaaaggcucuuuucagagccaccaaaaaaaaaaaaaaaaaaaaaaaaaaaaaaaaaaaaaaaaaaaaaaaaaaaaaaaaaaaaaaaaaaaaaaaaaaaaaaaaaaaaaaaaaaaaaaaaaaaaa

SEQ ID NO: 20096 - RNA, 6113 nt, Artificial Sequence
  SARS-CoV-2__MT451356.1__non-structural protein 3 (NSP3) mRNA gc
aggagagucccgcagucggcguccagcggcucugcuuguucgugugugugucguugcaggccuuauucaagcuuaccauggcccccaccaaggugaccuucggcgacgacacggucaucgaggugcagggguacaagagcgugaacaucaccuucgagcuggacgagcgcaucgacaagguccucaacgagaagugcuccgccuacaccguggagcugggcaccgaggugaacgaguucgcgugcgucguggccgacgccgugaucaagacgcugcagccggucagcgagcuccugaccccccuggggaucgaccucgacgagugguccauggccaccuacuaccuguucgacgagagcggcgaguucaagcuggccucccacauguacugcagcuucuacccccccgacgaggacgaggaggagggggacugcgaggaggaggaguucgagccguccacccaguacgaguacggcacggaggacgacuaccagggcaagccccucgaguucggggcgaccagcgccgcccugcagcccgaggaggagcaggaggaggacuggcuggacgacgacucccagcagaccgugggccagcaggacgggagcgaggacaaccagaccacgaccauccagaccaucguggagguccagccccagcucgagauggagcugaccccgguggugcagacgaucgaggucaacuccuucagcggcuaccugaagcucaccgacaacguguacaucaagaacgccgacaucguggaggaggcgaagaaggucaagcccaccgugguggucaacgccgccaacguguaccugaagcacgggggcggcguggccggggcccugaacaaggcgaccaacaacgccaugcaggucgaguccgacgacuacaucgccacgaacggcccccucaagguggggggcagcugcguccuguccggccacaaccuggccaagcacugccuccacgugguggggcccaacgucaacaagggcgaggacauccagcugcugaagagcgccuacgagaacuucaaccagcacgaggugcuccuggcgccgcugcucuccgccgggaucuucggcgccgaccccauccacagccugcgggugugcgucgacaccgugcgcaccaacguguaccuggccgucuucgacaagaaccucuacgacaagcugguguccagcuuccuggagaugaagagcgagaagcagguggagcagaagaucgccgagauccccaaggaggaggucaagcccuucaucaccgaguccaagccgagcguggagcagcggaagcaggacgacaagaagaucaaggcgugcguggaggaggucacgaccacccucgaggagaccaaguuccugacggagaaccugcuccuguacaucgacaucaacgggaaccugcaccccgacuccgccacccucgugagcgacaucgacaucaccuuccugaagaaggacgcccccuacaucgugggcgacgucgugcaggagggcgugcugaccgccgucgugauccccacgaagaaggccgggggcaccaccgagaugcucgcgaaggcccugcgcaaggugccgaccgacaacuacaucacgaccuaccccgggcagggccugaacggguacaccgucgaggaggccaagaccgugcucaagaagugcaaguccgccuucuacauccugcccagcaucaucuccaacgagaagcaggagauccugggcaccgugagcuggaaccuccgggagaugcuggcgcacgccgaggagacgcgcaagcugaugcccgucugcguggagaccaaggccaucguguccaccauccagcggaaguacaagggcaucaagauccaggagggggucguggacuacggcgcccgcuucuacuucuacaccagcaagacgaccguggccucccugaucaacacccucaacgaccugaacgagacccuggucacgaugccgcucggguacgugacccacggccugaaccuggaggaggcggcccgguacaugcgcagccucaaggugcccgccaccgucuccgugagcucccccgacgccgugaccgccuacaacggguaccugacgagcuccagcaagacccccgaggagcacuucaucgagaccaucucccuggcgggcagcuacaaggacuggagcuacuccggccagagcacccagcucgggaucgaguuccugaagcggggcgacaaguccgucuacuacacgagcaacccgaccaccuuccaccuggacggggaggugaucaccuucgacaaccucaagacgcugcugucccuccgcgaggugcggaccaucaaggucuucaccaccguggacaacaucaaccugcacacgcagguggucgacaugagcaugaccuacggccagcaguucggccccaccuaccuggacggggccgacgugaccaagaucaagccccacaacucccacgagggcaagacguucuacgugcucccgaacgacgacacccugcgcgucgaggccuucgaguacuaccacaccaccgaccccagcuuccuggggcgguacauguccgcccucaaccacacgaagaaguggaaguacccccaggugaacggccugaccagcaucaagugggccgacaacaacugcuaccuggcgaccgcccuccugacccugcagcagaucgagcucaaguucaaccccccggcccugcaggacgccuacuaccgcgcgcgggccggggaggccgccaacuucugcgcccugauccucgcguacugcaacaagacggugggcgagcugggcgacguccgcgagaccauguccuaccuguuccagcacgccaaccucgacagcugcaagcgggugcugaacgucgugugcaagaccugcgggcagcagcagaccacccugaagggcguggaggccgucauguacauggggacgcucuccuacgagcaguucaagaagggcgugcagauccccugcaccugcgggaagcaggccaccaaguaccuggugcagcaggagagccccuucgucaugauguccgcccccccggcgcaguacgagcugaagcacggcaccuucacgugcgccagcgaguacaccggcaacuaccagugcgggcacuacaagcacaucaccuccaaggagacccucuacugcaucgacggcgcccugcugacgaagagcagcgaguacaaggggcccaucaccgacguguucuacaaggagaacuccuacaccaccacgaucaagcccgugaccuacaagcucgacggcgucgugugcaccgagaucgaccccaagcuggacaacuacuacaagaaggacaacagcuacuucaccgagcagccgaucgaccuggugcccaaccagcccuaccccaacgccuccuucgacaacuucaaguucgucugcgacaacaucaaguucgccgacgaccucaaccagcugacgggguacaagaagccggcgagccgcgagcugaaggugaccuucuuccccgaccucaacggcgacguggucgccaucgacuacaagcacuacacccccuccuucaagaagggcgccaagcugcugcacaagcccaucguguggcacgugaacaacgccaccaacaaggcgacguacaagccgaacaccuggugcauccggugccucuggagcaccaagcccgucgagaccuccaacagcuucgacgugcugaaguccgaggacgcccaggggauggacaaccuggccugcgaggaccucaagcccgugagcgaggaggucguggagaaccccacgauccagaaggacgugcuggagugcaacgucaagaccaccgagguggugggcgacaucauccugaagccggccaacaacucccucaagaucaccgaggaggucgggcacacggaccugauggccgcguacguggacaacagcucccugaccaucaagaagcccaacgagcucagccgcgugcugggccugaagacccucgccacccacgggcuggccgccgucaacuccgugcccugggacacgaucgccaacuacgcgaagccguuccugaacaagguggucagcaccaucaccaacaucgugacccgcugccucaaccgggugugcacgaacuacaugcccuacuucuucacccugcugcuccagcugugcaccuucacccgcuccaccaacagccggaucaaggccuccaugcccacgaccaucgccaagaacaccgucaagagcgugggcaaguucugccuggaggccagcuucaacuaccucaagucccccaacuucagcaagcugaucaacaucaucaucugguuccugcuccuguccgugugccugggcagccucaucuacuccaccgccgcgcuggggguccugaugagcaaccucggcaugccguccuacugcacgggguaccgcgagggcuaccugaacagcaccaacgugaccaucgccaccuacugcacgggcuccauccccugcagcgugugccuguccgggcucgacagccuggacaccuaccccucccuggagaccauccagaucaccaucagcuccuucaagugggaccucacggccuucggccuggucgccgagugguuccuggccuacauccucuucacccgguucuucuacgugcuggggcuggcggccaucaugcagcucuucuucagcuacuucgccgugcacuucaucuccaacagcuggcugauguggcugaucaucaaccugguccagauggcccccaucuccgcgauggugcgcauguacaucuucuucgccagcuucuacuacguguggaagagcuacguccacgugguggacggcugcaacuccagcaccugcaugaugugcuacaagcggaaccgcgccacccgggucgagugcacgaccaucgugaacgggguccgccgguccuucuacguguacgccaacggcggcaagggguucugcaagcuccacaacuggaacugcgugaacugcgacaccuucugcgccggcagcaccuucaucuccgacgaggucgcgcgcgaccugagccugcaguucaagcggccgaucaaccccacggaccaguccagcuacaucguggacuccgugaccgucaagaacgggagcauccaccucuacuucgacaaggccggccagaagaccuacgagcgccacucccugagccacuucgugaaccuggacaaccuccgggccaacaacaccaaggggucccugcccaucaacgugaucgucuucgacggcaagagcaagugcgaggaguccagcgccaaguccgccagcguguacuacucccagcugaugugccagcccauccuccugcuggaccaggcgcucgugagcgacgucggcgacagcgccgagguggccgugaagauguucgacgccuacgucaacacguucuccagcaccuucaacgugccgauggagaagcugaagacccugguggccaccgcggaggccgagcucgccaagaacgucucccuggacaacgugcugagcacguucaucuccgccgcgcgccagggguucguggacagcgacgucgagaccaaggacgugguggagugccucaagcugucccaccagagcgacaucgaggucaccggcgacuccugcaacaacuacaugcugaccuacaacaagguggagaacaugacgccccgggaccucggggccugcaucgacugcagcgcccgccacaucaacgcccagguggccaagucccacaacaucgcgcugaucuggaacgucaaggacuucaugagccuguccgagcagcuccggaagcagauccgcagcgccgccaagaagaacaaccugcccuucaagcugaccugcgccaccacccgccagguggugaacgucgugacgaccaagaucgcccucaagggcgggugaggacuagucccuguucccagagcccacuuuuuuuucuuuuuuugaaauaaaauagccugucuuucagaucucaaaggcucuuuucagagccaccaaaaaaaaaaaaaaaaaaaaaaaaaaaaaaaaaaaaaaaaaaaaaaaaaaaaaaaaaaaaaaaaaaaaaaaaaaaaaaaaaaaaaaaaaaaaaaaaaaaaa

SEQ ID NO: 20097 - RNA, 6113 nt, Artificial Sequence
  SARS-CoV-2__MT451466.1__non-structural protein 3 (NSP3) mRNA gc
aggagagucccgcagucggcguccagcggcucugcuuguucgugugugugucguugcaggccuuauucaagcuuaccauggcccccaccaaggugaccuucggcgacgacacggucaucgaggugcagggguacaagagcgugaacaucaccuucgagcuggacgagcgcaucgacaagguccucaacgagaagugcuccgccuacaccguggagcugggcaccgaggugaacgaguucgcgugcgucgugacggacgccgugaucaagacccugcagccggucagcgagcuccugaccccccuggggaucgaccucgacgagugguccauggccaccuacuaccuguucgacgagagcggcgaguucaagcuggccucccacauguacugcagcuucuacccccccgacgaggacgaggaggagggggacugcgaggaggaggaguucgagccguccacgcaguacgaguacggcaccgaggacgacuaccagggcaagccccucgaguucggggccaccagcgcggcccugcagcccgaggaggagcaggaggaggacuggcuggacgacgacucccagcagaccgugggccagcaggacgggagcgaggacaaccagacgaccaccauccagaccaucguggagguccagccccagcucgagauggagcugacgccgguggugcagaccaucgaggucaacuccuucagcggcuaccugaagcucaccgacaacguguacaucaagaacgccgacaucguggaggaggccaagaaggucaagcccaccgugguggucaacgcggccaacguguaccugaagcacgggggcggcguggccggggcccugaacaaggccacgaacaacgcgaugcaggucgaguccgacgacuacaucgccaccaacggcccccucaagguggggggcagcugcguccuguccggccacaaccuggccaagcacugccuccacgugguggggcccaacgucaacaagggcgaggacauccagcugcugaagagcgccuacgagaacuucaaccagcacgaggugcuccuggccccgcugcucuccgcggggaucuucggcgccgaccccauccacagccugcgggugugcgucgacaccgugcgcaccaacguguaccuggccgucuucgacaagaaccucuacgacaagcugguguccagcuuccuggagaugaagagcgagaagcagguggagcagaagaucgccgagauccccaaggaggaggucaagcccuucaucacggaguccaagccgagcguggagcagcggaagcaggacgacaagaagaucaaggccugcguggaggaggucaccaccacccucgaggagacgaaguuccugaccgagaaccugcuccuguacaucgacaucaacgggaaccugcaccccgacuccgcgacccucgugagcgacaucgacaucaccuuccugaagaaggacgcccccuacaucgugggcgacgucgugcaggagggcgugcugacggccgucgugauccccaccaagaaggccgggggcaccaccgagaugcucgccaaggcgcugcgcaaggugccgacggacaacuacaucaccaccuaccccgggcagggccugaacggguacaccgucgaggaggccaagaccgugcucaagaagugcaaguccgccuucuacauccugcccagcaucaucuccaacgagaagcaggagauccugggcacggugagcuggaaccuccgggagaugcuggcccacgcggaggagacccgcaagcugaugcccgucugcguggagaccaaggccaucguguccaccauccagcggaaguacaagggcaucaagauccaggagggggucguggacuacggcgcccgcuucuacuucuacacgagcaagaccaccguggccucccugaucaacacccucaacgaccugaacgagacgcuggucaccaugccgcucggguacgugacccacggccugaaccuggaggaggccgcgcgguacaugcgcuuccucaaggugcccgccaccgucagcguguccagccccgacgccgugacggccuacaacggguaccugaccuccagcuccaagacccccgaggagcacuucaucgagaccaucagccuggccggcuccuacaaggacuggagcuacagcggccaguccacgcagcucgggaucgaguuccugaagcggggcgacaagagcgucuacuacaccuccaacccgaccaccuuccaccuggacggggaggugaucacguucgacaaccucaagacccugcugagccuccgcgaggugcggaccaucaaggucuucaccacgguggacaacaucaaccugcacacccagguggucgacauguccaugaccuacggccagcaguucggccccaccuaccuggacggggcggacgugacgaagaucaagccccacaacagccacgagggcaagaccuucuacgugcucccgaacgacgacacccugcgcgucgaggccuucgaguacuaccacaccacggaccccuccuuccuggggcgguacaugagcgcccucaaccacaccaagaaguggaaguacccccaggugaacggccugaccuccaucaagugggccgacaacaacugcuaccuggccaccgcgcuccugacgcugcagcagaucgagcucaaguucaaccccccggcccugcaggacgccuacuaccgcgcccgggcgggggaggccgccaacuucugcgcccugauccucgccuacugcaacaagaccgugggcgagcugggcgacguccgcgagaccaugagcuaccuguuccagcacgcgaaccucgacuccugcaagcgggugcugaacgucgugugcaagaccugcgggcagcagcagaccacgcugaagggcguggaggccgucauguacauggggacccucagcuacgagcaguucaagaagggcgugcagauccccugcaccugcgggaagcaggccaccaaguaccuggugcagcaggagucccccuucgucaugaugagcgcccccccggcccaguacgagcugaagcacggcacguucaccugcgcguccgaguacaccggcaacuaccagugcgggcacuacaagcacaucaccagcaaggagacgcucuacugcaucgacggcgcccugcugaccaaguccagcgaguacaaggggcccaucaccgacguguucuacaaggagaacagcuacaccacgaccaucaagcccgugaccuacaagcucgacggcgucgugugcaccgagaucgaccccaagcuggacaacuacuacaagaaggacaacuccuacuucacggagcagccgaucgaccuggugcccaaccagcccuaccccaacgccagcuucgacaacuucaaguucgucugcgacaacaucaaguucgccgacgaccucaaccagcugaccggguacaagaagccggccucccgcgagcugaaggugaccuucuuccccgaccucaacggcgacguggucgcgaucgacuacaagcacuacacccccagcuucaagaagggcgccaagcugcugcacaagcccaucguguggcacgugaacaacgccacgaacaaggccaccuacaagccgaacaccuggugcauccggugccucugguccaccaagcccgucgagacgagcaacuccuucgacgugcugaagagcgaggacgcgcaggggauggacaaccuggccugcgaggaccucaagcccguguccgaggaggucguggagaaccccaccauccagaaggacgugcuggagugcaacgucaagaccaccgagguggugggcgacaucauccugaagccggccaacaacagccucaagaucacggaggaggucgggcacaccgaccugauggccgccuacguggacaacuccagccugaccaucaagaagcccaacgagcucucccgcgugcugggccugaagacccucgcgacgcacgggcuggccgccgucaacagcgugcccugggacaccaucgccaacuacgccaagccguuccugaacaagguggucuccaccaccacgaacaucgugacccgcugccucaaccgggugugcaccaacuacaugcccuacuucuucacccugcugcuccagcugugcaccuucacgcgcagcaccaacucccggaucaaggcgagcaugcccaccaccaucgccaagaacacggucaaguccgugggcaaguucugccuggaggccagcuucaacuaccucaagagccccaacuucuccaagcugaucaacaucaucaucugguuccugcuccugagcgugugccugggcucccucaucuacagcaccgccgcccuggggguccugauguccaaccucggcaugccgagcuacugcaccggguaccgcgagggcuaccugaacuccaccaacgugacgaucgcgaccuacugcaccggcagcauccccugcuccgugugccugagcgggcucgacucccuggacaccuaccccagccuggagacgauccagaucaccaucuccagcuucaagugggaccucaccgccuucggccuggucgccgagugguuccuggccuacauccucuucacccgguucuucuacgugcuggggcuggccgcgaucaugcagcucuucuucuccuacuucgccgugcacuucaucagcaacuccuggcugauguggcugaucaucaaccugguccagauggcccccaucagcgccauggugcgcauguacaucuucuucgcguccuucuacuacguguggaagagcuacguccacgugguggacggcugcaacagcuccacgugcaugaugugcuacaagcggaaccgcgccacccgggucgagugcaccaccaucgugaacgggguccgccggagcuucuacguguacgccaacggcggcaagggguucugcaagcuccacaacuggaacugcgugaacugcgacacguucugcgccggcuccaccuucaucagcgacgaggucgcccgcgaccugucccugcaguucaagcggccgaucaaccccaccgaccagagcuccuacaucguggacagcgugaccgucaagaacggguccauccaccucuacuucgacaaggcgggccagaagacguacgagcgccacagccugucccacuucgugaaccuggacaaccuccgggccaacaacaccaaggggagccugcccaucaacgugaucgucuucgacggcaaguccaagugcgaggagagcuccgccaagagcgccuccguguacuacagccagcugaugugccagcccauccuccugcuggaccaggcccucguguccgacgucggcgacagcgcggagguggccgugaagauguucgacgccuacgucaacaccuucagcuccaccuucaacgugccgauggagaagcugaagacgcugguggccaccgccgaggcggagcucgccaagaacgucagccuggacaacgugcuguccaccuucaucagcgccgcccgccagggguucguggacuccgacgucgagaccaaggacgugguggagugccucaagcugagccaccaguccgacaucgaggucacgggcgacagcugcaacaacuacaugcugaccuacaacaagguggagaacaugaccccccgggaccucggggcgugcaucgacugcuccgcccgccacaucaacgcccagguggccaagagccacaacaucgcccugaucuggaacgucaaggacuucaugucccugagcgagcagcuccggaagcagauccgcuccgcggccaagaagaacaaccugcccuucaagcugaccugcgccacgacccgccagguggugaacgucgugaccaccaagaucgcccucaagggcgggugaggacuagucccuguucccagagcccacuuuuuuuucuuuuuuugaaauaaaauagccugucuuucagaucucaaaggcucuuuucagagccaccaaaaaaaaaaaaaaaaaaaaaaaaaaaaaaaaaaaaaaaaaaaaaaaaaaaaaaaaaaaaaaaaaaaaaaaaaaaaaaaaaaaaaaaaaaaaaaaaaaaaa

SEQ ID NO: 20098 - RNA, 6113 nt, Artificial Sequence
  SARS-CoV-2__MT451470.1__non-structural protein 3 (NSP3) mRNA gc
aggagagucccgcagucggcguccagcggcucugcuuguucgugugugugucguugcaggccuuauucaagcuuaccauggcccccaccaaggugaccuucggcgacgacacggucaucgaggugcagggguacaagagcgugaacaucaccuucgagcuggacgagcgcaucgacaagguccucaacgagaagugcuccgccuacaccguggagcugggcaccgaggugaacgaguucgcgugcgucguggccgacgccgugaucaagacgcugcagccggucagcgagcuccugaccccccuggggaucgaccucgacgagugguccauggccaccuacuaccuguucgacgagagcggcgaguucaagcuggccucccacauguacugcagcuucuacccccccgacgaggacgaggaggagggggacugcgaggaggaggaguucgagccguccacccaguacgaguacggcacggaggacgacuaccagggcaagccccucgaguucggggcgaccagcgccgcccugcagcccgaggaggagcaggaggaggacuggcuggacgacgacucccagcagaccgugggccagcaggacgggagcgaggacaaccagaccacgaccauccagaccaucguggagguccagccccagcucgagauggagcugaccccgguggugcagacgaucgaggucaacuccuucagcggcuaccugaagcucaccgacaacguguacaucaagaacgccgacaucguggaggaggcgaagaaggucaagcccaccgugguggucaacgccgccaacguguaccugaagcacgggggcggcguggccggggcccugaacaaggcgaccaacaacgccaugcaggucgaguccgacgacuacaucgccacgaacggcccccucaagguggggggcagcugcguccuguccggccacaaccuggccaagcacugccuccacgugguggggcccaacgucaacaagggcgaggacauccagcugcugaagagcgccuacgagaacuucaaccagcacgaggugcuccuggcgccgcugcucuccgccgggaucuucggcgccgaccccauccacagccugcgggugugcgucgacaccgugcgcaccaacguguaccuggccgucuucgacaagaaccucuacgacaagcugguguccagcuuccuggagaugaagagcgagaagcagguggagcagaagaucgccgagauccccaaggaggaggucaagcccuucaucaccgaguccaagccgagcguggagcagcggaagcaggacgacaagaagaucaaggcgugcguggaggaggucacgaccacccucgaggagaccaaguuccugacggagaaccugcuccuguacaucgacaucaacgggaaccugcaccccgacuccgccacccucgugagcgacaucgacaucaccuuccugaagaaggacgcccccuacaucgugggcgacgucgugcaggagggcgugcugaccgccgucgugauccccacgaagaaggccgggggcaccaccgagaugcucgcgaaggcccugcgcaaggugccgaccgacaacuacaucacgaccuaccccgggcagggccugaacggguacaccgucgaggaggccaagaccgugcucaagaagugcaaguccgccuucuacauccugcccagcaucaucuccaacgagaagcaggagauccugggcaccgugagcuggaaccuccgggagaugcuggcgcacgccgaggagacgcgcaagcugaugcccgucugcguggagaccaaggccaucguguccaccauccagcggaaguacaagggcaucaagauccaggagggggucguggacuacggcgcccgcuucuacuucuacaccagcaagacgaccguggccucccugaucaacacccucaacgaccugaacgagacccuggucacgaugccgcucggguacgugacccacggccugaaccuggaggaggcggcccgguacaugcgcagccucaaggugcccgccaccgucuccgugagcucccccgacgccgugaccgccuacaacggguaccugacgagcuccagcaagacccccgaggagcacuucaucgagaccaucucccuggcgggcagcuacaaggacuggagcuacuccggccagagcacccagcucgggaucgaguuccugaagcggggcgacaaguccgucuacuacacgagcaacccgaccaccuuccaccuggacggggaggugaucaccuucgacaaccucaagacgcugcugucccuccgcgaggugcggaccaucaaggucuucaccaccguggacaacaucaaccugcacacgcagguggucgacaugagcaugaccuacggccagcaguucggccccaccuaccuggacggggccgacgugaccaagaucaagccccacaacucccacgagggcaagacguucuacgugcucccgaacgacgacacccugcgcgucgaggccuucgaguacuaccacaccaccgaccccagcuuccuggggcgguacauguccgcccucaaccacacgaagaaguggaaguacccccaggugaacggccugaccagcaucaagugggccgacaacaacugcuaccuggcgaccgcccuccugacccugcagcagaucgagcucaaguucaaccccccggcccugcaggacgccuacuaccgcgcgcgggccggggaggccgccaacuucugcgcccugauccucgcguacugcaacaagacggugggcgagcugggcgacguccgcgagaccauguccuaccuguuccagcacgccaaccucgacagcugcaagcgggugcugaacgucgugugcaagaccugcgggcagcagcagaucacccugaagggcguggaggccgucauguacauggggacccucuccuacgagcaguucaagaagggcgugcagauccccugcacgugcgggaagcaggccaccaaguaccuggugcagcaggagagccccuucgucaugauguccgcccccccggcgcaguacgagcugaagcacggcaccuucaccugcgccagcgaguacacgggcaacuaccagugcgggcacuacaagcacaucaccuccaaggagacccucuacugcaucgacggcgcccugcugaccaagagcagcgaguacaaggggcccaucacggacguguucuacaaggagaacuccuacaccaccaccaucaagcccgugacguacaagcucgacggcgucgugugcaccgagaucgaccccaagcuggacaacuacuacaagaaggacaacagcuacuucaccgagcagccgaucgaccuggugcccaaccagcccuaccccaacgccuccuucgacaacuucaaguucgucugcgacaacaucaaguucgccgacgaccucaaccagcugaccggguacaagaagccggcgagccgcgagcugaaggugacguucuuccccgaccucaacggcgacguggucgccaucgacuacaagcacuacacccccuccuucaagaagggcgccaagcugcugcacaagcccaucguguggcacgugaacaacgccaccaacaaggcgaccuacaagccgaacacguggugcauccggugccucuggagcaccaagcccgucgagaccuccaacagcuucgacgugcugaaguccgaggacgcccaggggauggacaaccuggccugcgaggaccucaagcccgugagcgaggaggucguggagaaccccaccauccagaaggacgugcuggagugcaacgucaagacgaccgagguggugggcgacaucauccugaagccggccaacaacucccucaagaucaccgaggaggucgggcacaccgaccugauggccgcguacguggacaacagcucccugacgaucaagaagcccaacgagcucagccgcgugcugggccugaagacccucgccacccacgggcuggccgccgucaacuccgugcccugggacaccaucgccaacuacgcgaagccguuccugaacaagguggucagcacgaccaccaacaucgugacccgcugccucaaccgggugugcacgaacuacaugcccuacuucuucacccugcugcuccagcugugcaccuucacccgcuccaccaacagccggaucaaggccuccaugcccacgaccaucgccaagaacaccgucaagagcgugggcaaguucugccuggaggccagcuucaacuaccucaagucccccaacuucagcaagcugaucaacaucaucaucugguuccugcuccuguccgugugccugggcagccucaucuacuccaccgccgcgcuggggguccugaugagcaaccucggcaugccguccuacugcacgggguaccgcgagggcuaccugaacagcaccaacgugaccaucgccaccuacugcacgggcuccauccccugcagcgugugccuguccgggcucgacagccuggacaccuaccccucccuggagaccauccagaucaccaucagcuccuucaagugggaccucacggccuucggccuggucgccgagugguuccuggccuacauccucuucacccgguucuucuacgugcuggggcuggcggccaucaugcagcucuucuucagcuacuucgccgugcacuucaucuccaacagcuggcugauguggcugaucaucaaccugguccagauggcccccaucuccgcgauggugcgcauguacaucuucuucgccagcuucuacuacguguggaagagcuacguccacgugguggacggcugcaacuccagcaccugcaugaugugcuacaagcggaaccgcgccacccgggucgagugcacgaccaucgugaacgggguccgccgguccuucuacguguacgccaacggcggcaagggguucugcaagcuccacaacuggaacugcgugaacugcgacaccuucugcgccggcagcaccuucaucuccgacgaggucgcgcgcgaccugagccugcaguucaagcggccgaucaaccccacggaccaguccagcuacaucguggacuccgugaccgucaagaacgggagcauccaccucuacuucgacaaggccggccagaagaccuacgagcgccacucccugagccacuucgugaaccuggacaaccuccgggccaacaacaccaaggggucccugcccaucaacgugaucgucuucgacggcaagagcaagugcgaggaguccagcgccaaguccgccagcguguacuacucccagcugaugugccagcccauccuccugcuggaccaggcgcucgugagcgacgucggcgacagcgccgagguggccgugaagauguucgacgccuacgucaacacguucuccagcaccuucaacgugccgauggagaagcugaagacccugguggccaccgcggaggccgagcucgccaagaacgucucccuggacaacgugcugagcacguucaucuccgccgcgcgccagggguucguggacagcgacgucgagaccaaggacgugguggagugccucaagcugucccaccagagcgacaucgaggucaccggcgacuccugcaacaacuacaugcugaccuacaacaagguggagaacaugacgccccgggaccucggggccugcaucgacugcagcgcccgccacaucaacgcccagguggccaagucccacaacaucgcgcugaucuggaacgucaaggacuucaugagccuguccgagcagcuccggaagcagauccgcagcgccgccaagaagaacaaccugcccuucaagcugaccugcgccaccacccgccagguggugaacgucgugacgaccaagaucgcccucaagggcgggugaggacuagucccuguucccagagcccacuuuuuuuucuuuuuuugaaauaaaauagccugucuuucagaucucaaaggcucuuuucagagccaccaaaaaaaaaaaaaaaaaaaaaaaaaaaaaaaaaaaaaaaaaaaaaaaaaaaaaaaaaaaaaaaaaaaaaaaaaaaaaaaaaaaaaaaaaaaaaaaaaaaaa

SEQ ID NO: 20099 - RNA, 6113 nt, Artificial Sequence
  SARS-CoV-2__MT451708.1__non-structural protein 3 (NSP3) mRNA gc
aggagagucccgcagucggcguccagcggcucugcuuguucgugugugugucguugcaggccuuauucaagcuuaccauggcccccaccaaggugaccuucggcgacgacacggucaucgaggugcagggguacaagagcgugaacaucaccuucgagcuggacgagcgcaucgacaagguccucaacgagaagugcuccgccuacaccguggagcugggcaccgaggugaacgaguucgcgugcgucguggccgacgccgugaucaagacgcugcagccggucagcgagcuccugaccccccuggggaucgaccucgacgagugguccauggccaccuacuaccuguucgacgagagcggcgaguucaagcuggccucccacauguacugcagcuucuacccccccgacgaggacgaggaggagggggacugcgaggaggaggaguucgagccguccacccaguacgaguacggcacggaggacgacuaccagggcaagccccucgaguucggggcgaccagcgccgcccugcagcccgaggaggagcaggaggaggacuggcuggacgacgacucccagcagaccgugggccagcaggacgggagcgaggacaaccagaucaccacgauccagaccaucguggagguccagccccagcucgagauggagcugaccccgguggugcagaccaucgaggucaacuccuucagcggcuaccugaagcucacggacaacguguacaucaagaacgccgacaucguggaggaggcgaagaaggucaagcccaccgugguggucaacgccgccaacguguaccugaagcacgggggcggcguggccggggcccugaacaaggcgaccaacaacgccaugcaggucgaguccgacgacuacaucgccaccaacggcccccucaagguggggggcagcugcguccuguccggccacaaccuggccaagcacugccuccacgugguggggcccaacgucaacaagggcgaggacauccagcugcugaagagcgccuacgagaacuucaaccagcacgaggugcuccuggcgccgcugcucuccgccgggaucuucggcgccgaccccauccacagccugcgggugugcgucgacacggugcgcaccaacguguaccuggccgucuucgacaagaaccucuacgacaagcugguguccagcuuccuggagaugaagagcgagaagcagguggagcagaagaucgccgagauccccaaggaggaggucaagcccuucaucaccgaguccaagccgagcguggagcagcggaagcaggacgacaagaagaucaaggcgugcguggaggaggucaccacgacccucgaggagaccaaguuccugaccgagaaccugcuccuguacaucgacaucaacgggaaccugcaccccgacuccgccacgcucgugagcgacaucgacaucaccuuccugaagaaggacgcccccuacaucgugggcgacgucgugcaggagggcgugcugaccgccgucgugauccccaccaagaaggccgggggcacgaccgagaugcucgcgaaggcccugcgcaaggugccgaccgacaacuacaucaccacguaccccgggcagggccugaacggguacaccgucgaggaggccaagaccgugcucaagaagugcaaguccgccuucuacauccugcccagcaucaucuccaacgagaagcaggagauccugggcaccgugagcuggaaccuccgggagaugcuggcgcacgccgaggagacccgcaagcugaugcccgucugcguggagacgaaggccaucguguccaccauccagcggaaguacaagggcaucaagauccaggagggggucguggacuacggcgcccgcuucuacuucuacaccagcaagaccacgguggccucccugaucaacacccucaacgaccugaacgagacccuggucaccaugccgcucggguacgugacgcacggccugaaccuggaggaggcggcccgguacaugcgcagccucaaggugcccgccaccgucuccgugagcucccccgacgccgugaccgccuacaacggguaccugaccagcuccagcaagacgcccgaggagcacuucaucgagaccaucucccuggcgggcagcuacaaggacuggagcuacuccggccagagcacccagcucgggaucgaguuccugaagcggggcgacaaguccgucuacuacaccagcaacccgacgaccuuccaccuggacggggaggugaucaccuucgacaaccucaagacccugcugucccuccgcgaggugcggacgaucaaggucuucaccaccguggacaacaucaaccugcacacccagguggucgacaugagcaugacguacggccagcaguucggccccaccuaccuggacggggccgacgugaccaagaucaagccccacaacucccacgagggcaagaccuucuacgugcucccgaacgacgacacgcugcgcgucgaggccuucgaguacuaccacaccaccgaccccagcuuccuggggcgguacauguccgcccucaaccacaccaagaaguggaaguacccccaggugaacggccugacgagcaucaagugggccgacaacaacugcuaccuggcgaccgcccuccugacccugcagcagaucgagcucaaguucaaccccccggcccugcaggacgccuacuaccgcgcgcgggccggggaggccgccaacuucugcgcccugauccucgcguacugcaacaagaccgugggcgagcugggcgacguccgcgagacgauguccuaccuguuccagcacgccaaccucgacagcugcaagcgggugcugaacgucgugugcaagaccugcgggcagcagcagaccacccugaagggcguggaggccgucauguacauggggacccucuccuacgagcaguucaagaagggcgugcagauccccugcacgugcgggaagcaggccaccaaguaccuggugcagcaggagagccccuucgucaugauguccgcccccccggcgcaguacgagcugaagcacggcaccuucaccugcgccagcgaguacacgggcaacuaccagugcgggcacuacaagcacaucaccuccaaggagacccucuacugcaucgacggcgcccugcugaccaagagcagcgaguacaaggggcccaucacggacguguucuacaaggagaacuccuacaccaccaccaucaagcccgugacguacaagcucgacggcgucgugugcaccgagaucgaccccaagcuggacaacuacuacaagaaggacaacagcuacuucaccgagcagccgaucgaccuggugcccaaccagcccuaccccaacgccuccuucgacaacuucaaguucgucugcgacaacaucaaguucgccgacgaccucaaccagcugaccggguacaagaagccggcgagccgcgagcugaaggugacguucuuccccgaccucaacggcgacguggucgccaucgacuacaagcacuacacccccuccuucaagaagggcgccaagcugcugcacaagcccaucguguggcacgugaacaacgccaccaacaaggcgaccuacaagccgaacacguggugcauccggugccucuggagcaccaagcccgucgagaccuccaacagcuucgacgugcugaaguccgaggacgcccaggggauggacaaccuggccugcgaggaccucaagcccgugagcgaggaggucguggagaaccccaccauccagaaggacgugcuggagugcaacgucaagacgaccgagguggugggcgacaucauccugaagccggccaacaacucccucaagaucaccgaggaggucgggcacaccgaccugauggccgcguacguggacaacagcucccugacgaucaagaagcccaacgagcucagccgcgugcugggccugaagacccucgccacccacgggcuggccgccgucaacuccgugcccugggacaccaucgccaacuacgcgaagccguuccugaacaagguggucagcacgaccaccaacaucgugacccgcugccucaaccgggugugcacgaacuacaugcccuacuucuucacccugcugcuccagcugugcaccuucacccgcuccaccaacagccggaucaaggccuccaugcccacgaccaucgccaagaacaccgucaagagcgugggcaaguucugccuggaggccagcuucaacuaccucaagucccccaacuucagcaagcugaucaacaucaucaucugguuccugcuccuguccgugugccugggcagccucaucuacuccaccgccgcgcuggggguccugaugagcaaccucggcaugccguccuacugcacgggguaccgcgagggcuaccugaacagcaccaacgugaccaucgccaccuacugcacgggcuccauccccugcagcgugugccuguccgggcucgacagccuggacaccuaccccucccuggagaccauccagaucaccaucagcuccuucaagugggaccucacggccuucggccuggucgccgagugguuccuggccuacauccucuucacccgguucuucuacgugcuggggcuggcggccaucaugcagcucuucuucagcuacuucgccgugcacuucaucuccaacagcuggcugauguggcugaucaucaaccugguccagauggcccccaucuccgcgauggugcgcauguacaucuucuucgccagcuucuacuacguguggaagagcuacguccacgugguggacggcugcaacuccagcaccugcaugaugugcuacaagcggaaccgcgccacccgggucgagugcacgaccaucgugaacgggguccgccgguccuucuacguguacgccaacggcggcaagggguucugcaagcuccacaacuggaacugcgugaacugcgacaccuucugcgccggcagcaccuucaucuccgacgaggucgcgcgcgaccugagccugcaguucaagcggccgaucaaccccacggaccaguccagcuacaucguggacuccgugaccgucaagaacgggagcauccaccucuacuucgacaaggccggccagaagaccuacgagcgccacucccugagccacuucgugaaccuggacaaccuccgggccaacaacaccaaggggucccugcccaucaacgugaucgucuucgacggcaagagcaagugcgaggaguccagcgccaaguccgccagcguguacuacucccagcugaugugccagcccauccuccugcuggaccaggcgcucgugagcgacgucggcgacagcgccgagguggccgugaagauguucgacgccuacgucaacacguucuccagcaccuucaacgugccgauggagaagcugaagacccugguggccaccgcggaggccgagcucgccaagaacgucucccuggacaacgugcugagcacguucaucuccgccgcgcgccagggguucguggacagcgacgucgagaccaaggacgugguggagugccucaagcugucccaccagagcgacaucgaggucaccggcgacuccugcaacaacuacaugcugaccuacaacaagguggagaacaugacgccccgggaccucggggccugcaucgacugcagcgcccgccacaucaacgcccagguggccaagucccacaacaucgcgcugaucuggaacgucaaggacuucaugagccuguccgagcagcuccggaagcagauccgcagcgccgccaagaagaacaaccugcccuucaagcugaccugcgccaccacccgccagguggugaacgucgugacgaccaagaucgcccucaagggcgggugaggacuagucccuguucccagagcccacuuuuuuuucuuuuuuugaaauaaaauagccugucuuucagaucucaaaggcucuuuucagagccaccaaaaaaaaaaaaaaaaaaaaaaaaaaaaaaaaaaaaaaaaaaaaaaaaaaaaaaaaaaaaaaaaaaaaaaaaaaaaaaaaaaaaaaaaaaaaaaaaaaaaa

SEQ ID NO: 20100 - RNA, 6113 nt, Artificial Sequence
  SARS-CoV-2__MT452576.1__non-structural protein 3 (NSP3) mRNA gc
aggagagucccgcagucggcguccagcggcucugcuuguucgugugugugucguugcaggccuuauucaagcuuaccauggcccccaccaaggugaccuucggcgacgacacggucaucgaggugcagggguacaagagcgugaacaucaccuucgagcuggacgagcgcaucgacaagguccucaacgagaagugcuccgccuacaccguggagcugggcaccgaggugaacgaguucgcgugcgucguggccgacgccgugaucaagacgcugcagccggucagcgagcuccugaccccccuggggaucgaccucgacgagugguccauggccaccuacuaccuguucgacgagagcggcgaguucaagcuggccucccacauguacugcagcuucuacccccccgacgaggacgaggaggagggggacugcgaggaggaggaguucgagccguccacccaguacgaguacggcacggaggacgacuaccagggcaagccccucgaguucggggcgaccagcgccgcccugcagcccgaggaggagcaggaggaggacuggcuggacgacgacucccagcagaccgugggccagcaggacgggagcgaggacaaccagaccacgaccauccagaccaucguggagguccagccccagcucgagauggagcugaccccgguggugcagacgaucgaggucaacuccuucagcggcuaccugaagcucaccgacaacguguacaucaagaacgccgacaucguggaggaggcgaagaaggucaagcccaccgugguggucaacgccgccaacguguaccugaagcacgggggcggcguggccggggcccugaacaaggcgaccaacaacgccaugcaggucgaguccgacgacuacaucgccacgaacggcccccucaagguggggggcagcugcguccuguccggccacaaccuggccaagcacugccuccacgugguggggcccaacgucaacaagggcgaggacauccagcugcugaagagcgccuacgagaacuucaaccagcacgaggugcuccuggcgccgcugcucuccgccgggaucuucggcgccgaccccauccacagccugcgggugugcgucgacaccgugcgcaccaacguguaccuggccgucuucgacaagaaccucuacgacaagcugguguccagcuuccuggagaugaagagcgagaagcagguggagcagaagaucgccgagauccccaaggaggaggucaagcccuucaucaccgaguccaagccgagcguggagcagcggaagcaggacgacaagaagaucaaggcgugcguggaggaggucacgaccacccucgaggagaccaaguuccugacggagaaccugcuccuguacaucgacaucaacgggaaccugcaccccgacuccgccacccucgugagcgacaucgacaucaccuuccugaagaaggacgcccccuacaucgugggcgacgucgugcaggagggcgugcugaccgccgucgugauccccacgaagaaggccgggggcaccaccgagaugcucgcgaaggcccugcgcaaggugccgaccgacaacuacaucacgaccuaccccgggcagggccugaacggguacaccgucgacgaggccaagaccgugcucaagaagugcaaguccgccuucuacauccugcccagcaucaucuccaacgagaagcaggagauccugggcaccgugagcuggaaccuccgggagaugcuggcgcacgccgaggagacgcgcaagcugaugcccgucugcguggagaccaaggccaucguguccaccauccagcggaaguacaagggcaucaagauccaggagggggucguggacuacggcgcccgcuucuacuucuacaccagcaagacgaccguggccucccugaucaacacccucaacgaccugaacgagacccuggucacgaugccgcucggguacgugacccacggccugaaccuggaggaggcggcccgguacaugcgcagccucaaggugcccgccaccgucuccgugagcucccccgacgccgugaccgccuacaacggguaccugacgagcuccagcaagacccccgaggagcacuucaucgagaccaucucccuggcgggcagcuacaaggacuggagcuacuccggccagagcacccagcucgggaucgaguuccugaagcggggcgacaaguccgucuacuacacgagcaacccgaccaccuuccaccuggacggggaggugaucaccuucgacaaccucaagacgcugcugucccuccgcgaggugcggaccaucaaggucuucaccaccguggacaacaucaaccugcacacgcagguggucgacaugagcaugaccuacggccagcaguucggccccaccuaccuggacggggccgacgugaccaagaucaagccccacaacucccacgagggcaagacguucuacgugcucccgaacgacgacacccugcgcgucgaggccuucgaguacuaccacaccaccgaccccagcuuccuggggcgguacauguccgcccucaaccacacgaagaaguggaaguacccccaggugaacggccugaccagcaucaagugggccgacaacaacugcuaccuggcgaccgcccuccugacccugcagcagaucgagcucaaguucaaccccccggcccugcaggacgccuacuaccgcgcgcgggccggggaggccgccaacuucugcgcccugauccucgcguacugcaacaagacggugggcgagcugggcgacguccgcgagaccauguccuaccuguuccagcacgccaaccucgacagcugcaagcgggugcugaacgucgugugcaagaccugcgggcagcagcagaccacccugaagggcguggaggccgucauguacauggggacgcucuccuacgagcaguucaagaagggcgugcagauccccugcaccugcgggaagcaggccaccaaguaccuggugcagcaggagagccccuucgucaugauguccgcccccccggcgcaguacgagcugaagcacggcaccuucacgugcgccagcgaguacaccggcaacuaccagugcgggcacuacaagcacaucaccuccaaggagacccucuacugcaucgacggcgcccugcugacgaagagcagcgaguacaaggggcccaucaccgacguguucuacaaggagaacuccuacaccaccacgaucaagcccgugaccuacaagcucgacggcgucgugugcaccgagaucgaccccaagcuggacaacuacuacaagaaggacaacagcuacuucaccgagcagccgaucgaccuggugcccaaccagcccuaccccaacgccuccuucgacaacuucaaguucgucugcgacaacaucaaguucgccgacgaccucaaccagcugacgggguacaagaagccggcgagccgcgagcugaaggugaccuucuuccccgaccucaacggcgacguggucgccaucgacuacaagcacuacacccccuccuucaagaagggcgccaagcugcugcacaagcccaucguguggcacgugaacaacgccaccaacaaggcgacguacaagccgaacaccuggugcauccggugccucuggagcaccaagcccgucgagaccuccaacagcuucgacgugcugaaguccgaggacgcccaggggauggacaaccuggccugcgaggaccucaagcccgugagcgaggaggucguggagaaccccacgauccagaaggacgugcuggagugcaacgucaagaccaccgagguggugggcgacaucauccugaagccggccaacaacucccucaagaucaccgaggaggucgggcacacggaccugauggccgcguacguggacaacagcucccugaccaucaagaagcccaacgagcucagccgcgugcugggccugaagacccucgccacccacgggcuggccgccgucaacuccgugcccugggacacgaucgccaacuacgcgaagccguuccugaacaagguggucagcaccaccaccaacaucgugacgcgcugccucaaccgggugugcaccaacuacaugcccuacuucuucacccugcugcuccagcugugcaccuucacccgcuccacgaacagccggaucaaggccuccaugcccaccaccaucgccaagaacaccgucaagagcgugggcaaguucugccuggaggccagcuucaacuaccucaagucccccaacuucagcaagcugaucaacaucaucaucugguuccugcuccuguccgugugccugggcagccucaucuacuccacggccgcgcuggggguccugaugagcaaccucggcaugccguccuacugcaccggguaccgcgagggcuaccugaacagcaccaacgugaccaucgccacguacugcaccggcuccauccccugcagcgugugccuguccgggcucgacagccuggacaccuaccccucccuggagaccauccagaucacgaucagcuccuucaagugggaccucaccgccuucggccuggucgccgagugguuccuggccuacauccucuucacccgguucuucuacgugcuggggcuggcggccaucaugcagcucuucuucagcuacuucgccgugcacuucaucuccaacagcuggcugauguggcugaucaucaaccugguccagauggcccccaucuccgcgauggugcgcauguacaucuucuucgccagcuucuacuacguguggaagagcuacguccacgugguggacggcugcaacuccagcaccugcaugaugugcuacaagcggaaccgcgccacgcgggucgagugcaccaccaucgugaacgggguccgccgguccuucuacguguacgccaacggcggcaagggguucugcaagcuccacaacuggaacugcgugaacugcgacaccuucugcgccggcagcacguucaucuccgacgaggucgcgcgcgaccugagccugcaguucaagcggccgaucaaccccaccgaccaguccagcuacaucguggacuccgugaccgucaagaacgggagcauccaccucuacuucgacaaggccggccagaagaccuacgagcgccacucccugagccacuucgugaaccuggacaaccuccgggccaacaacacgaaggggucccugcccaucaacgugaucgucuucgacggcaagagcaagugcgaggaguccagcgccaaguccgccagcguguacuacucccagcugaugugccagcccauccuccugcuggaccaggcgcucgugagcgacgucggcgacagcgccgagguggccgugaagauguucgacgccuacgucaacaccuucuccagcaccuucaacgugccgauggagaagcugaagacccugguggccacggcggaggccgagcucgccaagaacgucucccuggacaacgugcugagcaccuucaucuccgccgcgcgccagggguucguggacagcgacgucgagaccaaggacgugguggagugccucaagcugucccaccagagcgacaucgaggucaccggcgacuccugcaacaacuacaugcugacguacaacaagguggagaacaugaccccccgggaccucggggccugcaucgacugcagcgcccgccacaucaacgcccagguggccaagucccacaacaucgcgcugaucuggaacgucaaggacuucaugagccuguccgagcagcuccggaagcagauccgcagcgccgccaagaagaacaaccugcccuucaagcugaccugcgccaccacgcgccagguggugaacgucgugaccaccaagaucgcccucaagggcgggugaggacuagucccuguucccagagcccacuuuuuuuucuuuuuuugaaauaaaauagccugucuuucagaucucaaaggcucuuuucagagccaccaaaaaaaaaaaaaaaaaaaaaaaaaaaaaaaaaaaaaaaaaaaaaaaaaaaaaaaaaaaaaaaaaaaaaaaaaaaaaaaaaaaaaaaaaaaaaaaaaaaaa

SEQ ID NO: 20101 - RNA, 6113 nt, Artificial Sequence
  SARS-CoV-2__MT446312.1__non-structural protein 3 (NSP3) mRNA gc
aggagagucccgcagucggcguccagcggcucugcuuguucgugugugugucguugcaggccuuauucaagcuuaccauggcccccaccaaggugaccuucggcgacgacacggucaucgaggugcagggguacaagagcgugaacaucaccuucgagcuggacgagcgcaucgacaagguccucaacgagaagugcuccgccuacaccguggagcugggcaccgaggugaacgaguucgcgugcgucguggccgacgccgugaucaagacgcugcagccggucagcgagcuccugaccccccuggggaucgaccucgacgagugguccauggccaccuacuaccuguucgacgagagcggcgaguucaagcuggccucccacauguacugcagcuucuacccccccgacgaggacgaggaggagggggacugcgaggaggaggaguucgagccguccacccaguacgaguacggcacggaggacgacuaccagggcaagccccucgaguucggggcgaccagcgccgcccugcagcccgaggaggagcaggaggaggacuggcuggacgacgacucccagcagaccgugggccagcaggacgggagcgaggacaaccagaccacgaccauccagaccaucguggagguccagccccagcucgagauggagcugaccccgguggugcagacgaucgaggucaacuccuucagcggcuaccugaagcucaccgacaacguguacaucaagaacgccgacaucguggaggaggcgaagaaggucaagcccaccgugguggucaacgccgccaacguguaccugaagcacgggggcggcguggccggggcccugaacaaggcgaccaacaacgccaugcaggucgaguccgacgacuacaucgccacgaacggcccccucaagguggggggcagcugcguccuguccggccacaaccuggccaagcacugccuccacgugguggggcccaacgucaacaagggcgaggacauccagcugcugaagagcgccuacgagaacuucaaccagcacgaggugcuccuggcgccgcugcucuccgccgggaucuucggcgccgaccccauccacagccugcgggugugcgucgacaccgugcgcaccaacguguaccuggccgucuucgacaagaaccucuacgacaagcugguguccagcuuccuggagaugaagagcgagaagcagguggagcagaagaucgccgagauccccaaggaggaggucaagcccuucaucaccgaguccaagccgagcguggagcagcggaagcaggacgacaagaagaucaaggcgugcguggaggaggucacgaccacccucgaggagaccaaguuccugacggagaaccugcuccuguacaucgacaucaacgggaaccugcaccccgacuccgccacccucgugagcgacaucgacaucaccuuccugaagaaggacgcccccuacaucgugggcgacgucgugcaggagggcgugcugaccgccgucgugauccccacgaagaaggccgggggcaccaccgagaugcucgcgaaggcccugcgcaaggugccgaccgacaacuacaucacgaccuaccccgggcagggccugaacggguacaccgucgaggaggccaagaccgugcucaagaagugcaaguccgccuucuacauccugcccagcaucaucuccaacgagaagcaggagauccugggcaccgugagcuggaaccuccgggagaugcuggcgcacgccgaggagacgcgcaagcugaugcccgucugcguggagaccaaggccaucguguccaccauccagcggaaguacaagggcaucaagauccaggagggggucguggacuacggcgcccgcuucuacuucuacaccagcaagacgaccguggccucccugaucaacacccucaacgaccugaacgagacccuggucacgaugccgcucggguacgugacccacggccugaaccuggaggaggcggcccgguacaugcgcagccucaaggugcccgccaccgucuccgugagcucccccgacgccgugaccgccuacaacggguaccugacgagcuccagcaagacccccgaggagcacuucaucgagaccaucucccuggcgggcagcuacaaggacuggagcuacuccggccagagcacccagcucgggaucgaguuccugaagcggggcgacaaguccgucuacuacacgagcaacccgaccaccuuccaccuggacggggaggugaucaccuucgacaaccucaagacgcugcugucccuccgcgaggugcggaccaucaaggucuucaccaccguggacaacaucaaccugcacacgcagguggucgacaugagcaugaccuacggccagcaguucggccccaccuaccuggacggggccgacgugaccaagaucaagccccacaacucccacgagggcaagacguucuacgugcucccgaacgacgacacccugcgcgucgaggccuucgaguacuaccacaccaccgaccccagcuuccuggggcgguacauguccgcccucaaccacacgaagaaguggaaguacccccaggugaacggccugaccagcaucaagugggccgacaacaacugcuaccuggcgaccgcccuccugacccugcagcagaucgagcucaaguucaaccccccggcccugcaggacgccuacuaccgcgcgcgggccggggaggccgccaacuucugcgcccugauccucgcguacugcaacaagacggugggcgagcugggcgacguccgcgagaccauguccuaccuguuccagcacgccaaccucgacagcugcaagcgggugcugaacgucgugugcaagaccugcgggcagcagcagaccacccugaagggcguggaggccgucauguacauggggacgcucuccuacgagcaguucaagaagggcgugcagauccccugcaccugcgggaagcaggccaccaaguaccuggugcagcaggagagccccuucgucaugauguccgcccccccggcgcaguacgagcugaagcacggcaccuucacgugcgccagcgaguacaccggcaacuaccagugcgggcacuacaagcacaucaccuccaaggagacccucuacugcaucgacggcgcccugcugacgaagagcagcgaguacaaggggcccaucaccgacguguucuacaaggagaacuccuacaccaccacgaucaagcccgugaccuacaagcucgacggcgucgugugcaccgagaucgaccccaagcuggacaacuacuacaagaaggacaacagcuacuucaccgagcagccgaucgaccuggugcccaaccagcccuaccccaacgccuccuucgacaacuucaaguucgucugcgacaacaucaaguucgccgacgaccucaaccagcugacgggguacaagaagccggcgagccgcgagcugaaggugaccuucuuccccgaccucaacggcgacguggucgccaucgacuacaagcacuacacccccuccuucaagaagggcgccaagcugcugcacaagcccaucguguggcacgugaacaacgccaccaacaaggcgacguacaagccgaacaccuggugcauccggugccucuggagcaccaagcccgucgagaccuccaacagcuucgacgugcugaaguccgaggacgcccaggggauggacaaccuggccugcgaggaccucaagcccgugagcgaggaggucguggagaaccccacgauccagaaggacgugcuggagugcaacgucaagaccaccgagguggugggcgacaucauccugaagccggccaacaacucccucaagaucaccgaggaggucgggcacacggaccugauggccgcguacguggacaacagcucccugaccaucaagaagcccaacgagcucagccgcgugcugggccugaagacccucgccacccacgggcuggccgccgucaacuccgugcccugggacacgaucgccaacuacgcgaagccguuccugaacaagguggucagcaccaccaccaacaucgugacgcgcugccucaaccgggugugcaccaacuacaugcccuacuucuucacccugcugcuccagcugugcaccuucacccgcaucacgaacucccggaucaaggccagcaugcccaccaccaucgccaagaacaccgucaaguccgugggcaaguucugccuggaggccagcuucaacuaccucaagagccccaacuucuccaagcugaucaacaucaucaucugguuccugcuccugagcgugugccugggcucccucacguacagcaccgccgcgcuggggguccugauguccaaccucggcaugccgagcuacugcaccggguaccgcgagggcuaccugaacuccaccaacgugacgaucgccaccuacugcaccggcagcauccccugcuccgugugccugagcgggcucgacucccuggacaccuaccccagccuggagacgauccagaucaccaucuccagcuucaagugggaccucaccgccuucggccuggucgccgagugguuccuggccuacauccucuucacccgguucuucuacgugcuggggcuggcggccaucaugcagcucuucuucuccuacuucgccgugcacuucaucagcaacuccuggcugauguggcugaucaucaaccugguccagauggcccccaucagcgcgauggugcgcauguacaucuucuucgccuccuucuacuacguguggaagagcuacguccacgugguggacggcugcaacagcuccacgugcaugaugugcuacaagcggaaccgcgccacccgggucgagugcaccaccaucgugaacgggguccgccggagcuucuacguguacgccaacggcggcaagggguucugcaagcuccacaacuggaacugcgugaacugcgacacguucugcgccggcuccaccuucaucagcgacgaggucgcgcgcgaccugucccugcaguucaagcggccgaucaaccccaccgaccagagcuccuacaucguggacagcgugaccgucaagaacggguccauccaccucuacuucgacaaggccggccagaagacguacgagcgccacagccugucccacuucgugaaccuggacaaccuccgggccaacaacaccaaggggagccugcccaucaacgugaucgucuucgacggcaaguccaagugcgaggagagcuccgccaagagcgccuccguguacuacagccagcugaugugccagcccauccuccugcuggaccaggcgcucguguccgacgucggcgacagcgccgagguggccgugaagauguucgacgccuacgucaacaccuucagcuccaccuucaacgugccgauggagaagcugaagacgcugguggccaccgcggaggccgagcucgccaagaacgucagccuggacaacgugcuguccaccuucaucagcgccgcgcgccagggguucguggacuccgacgucgagaccaaggacgugguggagugccucaagcugagccaccaguccgacaucgaggucacgggcgacagcugcaacaacuacaugcugaccuacaacaagguggagaacaugaccccccgggaccucggggccugcaucgacugcuccgcccgccacaucaacgcccagguggccaagagccacaacaucgcgcugaucuggaacgucaaggacuucaugucccugagcgagcagcuccggaagcagauccgcuccgccgccaagaagaacaaccugcccuucaagcugaccugcgccacgacccgccagguggugaacgucgugaccaccaagaucgcccucaagggcgggugaggacuagucccuguucccagagcccacuuuuuuuucuuuuuuugaaauaaaauagccugucuuucagaucucaaaggcucuuuucagagccaccaaaaaaaaaaaaaaaaaaaaaaaaaaaaaaaaaaaaaaaaaaaaaaaaaaaaaaaaaaaaaaaaaaaaaaaaaaaaaaaaaaaaaaaaaaaaaaaaaaaaa

SEQ ID NO: 20102 - RNA, 6113 nt, Artificial Sequence
  SARS-CoV-2__MT446357.1__non-structural protein 3 (NSP3) mRNA gc
aggagagucccgcagucggcguccagcggcucugcuuguucgugugugugucguugcaggccuuauucaagcuuaccauggcccccaccaaggugaccuucggcgacgacacggucaucgaggugcagggguacaagagcgugaacaucaccuucgagcuggacgagcgcaucgacaagguccucaacgagaagugcuccgccuacaccguggagcugggcaccgaggugaacgaguucgcgugcgucguggccgacgccgugaucaagacgcugcagccggucagcgagcuccugaccccccuggggaucgaccucgacgagugguccauggccaccuacuaccuguucgacgagagcggcgaguucaagcuggccucccacauguacugcagcuucuacccccccgacgaggacgaggaggagggggacugcgaggaggaggaguucgagccguccacccaguacgaguacggcacggaggacgacuaccagggcaagccccucgaguucggggcgaccagcgccgcccugcagcccgaggaggagcaggaggaggacuggcuggacgacgacucccagcagaccgugggccagcaggacgggagcgaggacaaccagaccacgaccauccagaccaucguggagguccagccccagcucgagauggagcugaccccgguggugcagacgaucgaggucaacuccuucagcggcuaccugaagcucaccgacaacguguacaucaagaacgccgacaucguggaggaggcgaagaaggucaagcccaccgugguggucaacgccgccaacguguaccugaagcacgggggcggcguggccggggcccugaacaaggcgaccaacaacgccaugcaggucgaguccgacgacuacaucgccacgaacggcccccucaagguggggggcagcugcguccuguccggccacaaccuggccaagcacugccuccacgugguggggcccaacgucaacaagggcgaggacauccagcugcugaagagcgccuacgagaacuucaaccagcacgaggugcuccuggcgccgcugcucuccgccgggaucuucggcgccgaccccauccacagccugcgggugugcgucgacaccgugcgcaccaacguguaccuggccgucuucgacaagaaccucuacgacaagcugguguccagcuuccuggagaugaagagcgagaagcagguggagcagaagaucgccgagauccccaaggaggaggucaagcccuucaucaccgaguccaagccgagcguggagcagcggaagcaggacgacaagaagaucaaggcgugcguggaggaggucacgaccacccucgaggagaccaaguuccugacggagaaccugcuccuguacaucgacaucaacgggaaccugcaccccgacuccgccacccucgugagcgacaucgacaucaccuuccugaagaaggacgcccccuacaucgugggcgacgucgugcaggagggcgugcugaccgccgucgugauccccacgaagaaggccgggggcaccaccgagaugcucgcgaaggcccugcgcgaggugccgaccgacaacuacaucacgaccuaccccgggcagggccugaacggguacaccgucgaggaggccaagaccgugcucaagaagugcaaguccgccuucuacauccugcccagcaucaucuccaacgagaagcaggagauccugggcaccgugagcuggaaccuccgggagaugcuggcgcacgccgaggagacgcgcaagcugaugcccgucugcguggagaccaaggccaucguguccaccauccagcggaaguacaagggcaucaagauccaggagggggucguggacuacggcgcccgcuucuacuucuacaccagcaagacgaccguggccucccugaucaacacccucaacgaccugaacgagacccuggucacgaugccgcucggguacgugacccacggccugaaccuggaggaggcggcccgguacaugcgcagccucaaggugcccgccaccgucuccgugagcucccccgacgccgugaccgccuacaacggguaccugacgagcuccagcaagacccccgaggagcacuucaucgagaccaucucccuggcgggcagcuacaaggacuggagcuacuccggccagagcacccagcucgggaucgaguuccugaagcggggcgacaaguccgucuacuacacgagcaacccgaccaccuuccaccuggacggggaggugaucaccuucgacaaccucaagacgcugcugucccuccgcgaggugcggaccaucaaggucuucaccaccguggacaacaucaaccugcacacgcagguggucgacaugagcaugaccuacggccagcaguucggccccaccuaccuggacggggccgacgugaccaagaucaagccccacaacucccacgagggcaagacguucuacgugcucccgaacgacgacacccugcgcgucgaggccuucgaguacuaccacaccaccgaccccagcuuccuggggcgguacauguccgcccucaaccacacgaagaaguggaaguacccccaggugaacggccugaccagcaucaagugggccgacaacaacugcuaccuggcgaccgcccuccugacccugcagcagaucgagcucaaguucaaccccccggcccugcaggacgccuacuaccgcgcgcgggccggggaggccgccaacuucugcgcccugauccucgcguacugcaacaagacggugggcgagcugggcgacguccgcgagaccauguccuaccuguuccagcacgccaaccucgacagcugcaagcgggugcugaacgucgugugcaagaccugcgggcagcagcagaccacccugaagggcguggaggccgucauguacauggggacgcucuccuacgagcaguucaagaagggcgugcagauccccugcaccugcgggaagcaggccaccaaguaccuggugcagcaggagagccccuucgucaugauguccgcccccccggcgcaguacgagcugaagcacggcaccuucacgugcgccagcgaguacaccggcaacuaccagugcgggcacuacaagcacaucaccuccaaggagacccucuacugcaucgacggcgcccugcugacgaagagcagcgaguacaaggggcccaucaccgacguguucuacaaggagaacuccuacaccaccacgaucaagcccgugaccuacaagcucgacggcgucgugugcaccgagaucgaccccaagcuggacaacuacuacaagaaggacaacagcuacuucaccgagcagccgaucgaccuggugcccaaccagcccuaccccaacgccuccuucgacaacuucaaguucgucugcgacaacaucaaguucgccgacgaccucaaccagcugacgggguacaagaagccggcgagccgcgagcugaaggugaccuucuuccccgaccucaacggcgacguggucgccaucgacuacaagcacuacacccccuccuucaagaagggcgccaagcugcugcacaagcccaucguguggcacgugaacaacgccaccaacaaggcgacguacaagccgaacaccuggugcauccggugccucuggagcaccaagcccgucgagaccuccaacagcuucgacgugcugaaguccgaggacgcccaggggauggacaaccuggccugcgaggaccucaagcccgugagcgaggaggucguggagaaccccacgauccagaaggacgugcuggagugcaacgucaagaccaccgagguggugggcgacaucauccugaagccggccaacaacucccucaagaucaccgaggaggucgggcacacggaccugauggccgcguacguggacaacagcucccugaccaucaagaagcccaacgagcucagccgcgugcugggccugaagacccucgccacccacgggcuggccgccgucaacuccgugcccugggacacgaucgccaacuacgcgaagccguuccugaacaagguggucagcaccaccaccaacaucgugacgcgcugccucaaccgggugugcaccaacuacaugcccuacuucuucacccugcugcuccagcugugcaccuucacccgcuccacgaacagccggaucaaggccuccaugcccaccaccaucgccaagaacaccgucaagagcgugggcaaguucugccuggaggccagcuucaacuaccucaagucccccaacuucagcaagcugaucaacaucaucaucugguuccugcuccuguccgugugccugggcagccucaucuacuccacggccgcgcuggggguccugaugagcaaccucggcaugccguccuacugcaccggguaccgcgagggcuaccugaacagcaccaacgugaccaucgccacguacugcaccggcuccauccccugcagcgugugccuguccgggcucgacagccuggacaccuaccccucccuggagaccauccagaucacgaucagcuccuucaagugggaccucaccgccuucggccuggucgccgagugguuccuggccuacauccucuucacccgguucuucuacgugcuggggcuggcggccaucaugcagcucuucuucagcuacuucgccgugcacuucaucuccaacagcuggcugauguggcugaucaucaaccugguccagauggcccccaucuccgcgauggugcgcauguacaucuucuucgccagcuucuacuacguguggaagagcuacguccacgugguggacggcugcaacuccagcaccugcaugaugugcuacaagcggaaccgcgccacgcgggucgagugcaccaccaucgugaacgggguccgccgguccuucuacguguacgccaacggcggcaagggguucugcaagcuccacaacuggaacugcgugaacugcgacaccuucugcgccggcagcacguucaucuccgacgaggucgcgcgcgaccugagccugcaguucaagcggccgaucaaccccaccgaccaguccagcuacaucguggacuccgugaccgucaagaacgggagcauccaccucuacuucgacaaggccggccagaagaccuacgagcgccacucccugagccacuucgugaaccuggacaaccuccgggccaacaacacgaaggggucccugcccaucaacgugaucgucuucgacggcaagagcaagugcgaggaguccagcgccaaguccgccagcguguacuacucccagcugaugugccagcccauccuccugcuggaccaggcgcucgugagcgacgucggcgacagcgccgagguggccgugaagauguucgacgccuacgucaacaccuucuccagcaccuucaacgugccgauggagaagcugaagacccugguggccacggcggaggccgagcucgccaagaacgucucccuggacaacgugcugagcaccuucaucuccgccgcgcgccagggguucguggacagcgacgucgagaccaaggacgugguggagugccucaagcugucccaccagagcgacaucgaggucaccggcgacuccugcaacaacuacaugcugacguacaacaagguggagaacaugaccccccgggaccucggggccugcaucgacugcagcgcccgccacaucaacgcccagguggccaagucccacaacaucgcgcugaucuggaacgucaaggacuucaugagccuguccgagcagcuccggaagcagauccgcagcgccgccaagaagaacaaccugcccuucaagcugaccugcgccaccacgcgccagguggugaacgucgugaccaccaagaucgcccucaagggcgggugaggacuagucccuguucccagagcccacuuuuuuuucuuuuuuugaaauaaaauagccugucuuucagaucucaaaggcucuuuucagagccaccaaaaaaaaaaaaaaaaaaaaaaaaaaaaaaaaaaaaaaaaaaaaaaaaaaaaaaaaaaaaaaaaaaaaaaaaaaaaaaaaaaaaaaaaaaaaaaaaaaaaa

SEQ ID NO: 20103 - RNA, 6113 nt, Artificial Sequence
  SARS-CoV-2__MT447165.1__non-structural protein 3 (NSP3) mRNA gc
aggagagucccgcagucggcguccagcggcucugcuuguucgugugugugucguugcaggccuuauucaagcuuaccauggcccccaccaaggugaccuucggcgacgacacggucaucgaggugcagggguacaagagcgugaacaucaccuucgagcuggacgagcgcaucgacaagguccucaacgagaagugcuccgccuacaccguggagcugggcaccgaggugaacgaguucgcgugcgucguggccgacgccgugaucaagacgcugcagccggucagcgagcuccugaccccccuggggaucgaccucgacgagugguccauggccaccuacuaccuguucgacgagagcggcgaguucaagcuggccucccacauguacugcagcuucuacccccccgacgaggacgaggaggagggggacugcgaggaggaggaguucgagccguccacccaguacgaguacggcacggaggacgacuaccagggcaagccccucgaguucggggcgaccagcgccgcccugcagcccgaggaggagcaggaggaggacuggcuggacgacgacucccagcagaccgugggccagcaggacgggagcgaggacaaccagaccacgaccauccagaccaucguggagguccagccccagcucgagauggagcugaccccgguggugcagacgaucgaggucaacuccuucagcggcuaccugaagcucaccgacaacguguacaucaagaacgccgacaucguggaggaggcgaagaaggucaagcccaccgugguggucaacgccgccaacguguaccugaagcacgggggcggcguggccggggcccugaacaaggcgaccaacaacgccaugcaggucgaguccgacgacuacaucgccacgaacggcccccucaagguggggggcagcugcguccuguccggccacaaccuggccaagcacugccuccacgugguggggcccaacgucaacaagggcgaggacauccagcugcugaagagcgccuacgagaacuucaaccagcacgaggugcuccuggcgccgcugcucuccgccgggaucuucggcgccgaccccauccacagccugcgggugugcgucgacaccgugcgcaccaacguguaccuggccgucuucgacaagaaccucuacgacaagcugguguccagcuuccuggagaugaagagcgagaagcagguggagcagaagaucgccgagauccccaaggaggaggucaagcccuucaucaccgaguccaagccgagcguggagcagcggaagcaggacgacaagaagaucaaggcgugcguggaggaggucacgaccacccucgaggagaccaaguuccugacggagaaccugcuccuguacaucgacaucaacgggaaccugcaccccgacuccgccacccucgugagcgacaucgacaucaccuuccugaagaaggacgcccccuacaucgugggcgacgucgugcaggagggcgugcugaccgccgucgugauccccacgaagaaggccgggggcaccaccgagaugcucgcgaaggcccugcgcaaggugccgaccgacaacuacaucacgaccuaccccgggcagggccugaacggguacaccgucgaggaggccaagaccgugcucaagaagugcaaguccgccuucuacauccugcccagcaucaucuccaacgagaagcaggagauccugggcaccgugagcuggaacuuccgggagaugcucgcgcacgccgaggagacgcgcaagcugaugcccgucugcguggagaccaaggccaucguguccaccauccagcggaaguacaagggcaucaagauccaggagggggucguggacuacggcgcccgcuucuacuucuacaccagcaagacgaccguggccucccugaucaacacccugaacgaccucaacgagacccuggucacgaugccgcugggguacgugacccacggccucaaccuggaggaggcggcccgguacaugcgcagccugaaggugcccgccaccgucuccgugagcucccccgacgccgugaccgccuacaacggguaccucacgagcuccagcaagacccccgaggagcacuucaucgagaccaucucccuggcgggcagcuacaaggacuggagcuacuccggccagagcacccagcuggggaucgaguuccucaagcggggcgacaaguccgucuacuacacgagcaacccgaccaccuuccaccuggacggggaggugaucaccuucgacaaccugaagacgcuccugucccugcgcgaggugcggaccaucaaggucuucaccaccguggacaacaucaaccuccacacgcagguggucgacaugagcaugaccuacggccagcaguucggccccaccuaccuggacggggccgacgugaccaagaucaagccccacaacucccacgagggcaagacguucuacgugcugccgaacgacgacacccuccgcgucgaggccuucgaguacuaccacaccaccgaccccagcuuccuggggcgguacauguccgcccugaaccacacgaagaaguggaaguacccccaggugaacggccucaccagcaucaagugggccgacaacaacugcuaccuggcgaccgcccugcucacccugcagcagaucgagcugaaguucaaccccccggcccuccaggacgccuacuaccgcgcgcgggccggggaggccgccaacuucugcgcccugauccuggcguacugcaacaagacggugggcgagcucggcgacguccgcgagaccauguccuaccuguuccagcacgccaaccuggacagcugcaagcgggugcucaacgucgugugcaagaccugcgggcagcagcagaccacccugaagggcguggaggccgucauguacauggggacgcuguccuacgagcaguucaagaagggcgugcagauccccugcaccugcgggaagcaggccaccaaguaccucgugcagcaggagagccccuucgucaugauguccgcccccccggcgcaguacgagcugaagcacggcaccuucacgugcgccagcgaguacaccggcaacuaccagugcgggcacuacaagcacaucaccuccaaggagacccuguacugcaucgacggcgcccuccugacgaagagcagcgaguacaaggggcccaucaccgacguguucuacaaggagaacuccuacaccaccacgaucaagcccgugaccuacaagcuggacggcgucgugugcaccgagaucgaccccaagcucgacaacuacuacaagaaggacaacagcuacuucaccgagcagccgaucgaccuggugcccaaccagcccuaccccaacgccuccuucgacaacuucaaguucgucugcgacaacaucaaguucgccgacgaccugaaccagcucacgggguacaagaagccggcgagccgcgagcugaaggugaccuucuuccccgaccugaacggcgacguggucgccaucgacuacaagcacuacacccccuccuucaagaagggcgccaagcuccugcacaagcccaucguguggcacgugaacaacgccaccaacaaggcgacguacaagccgaacaccuggugcauccggugccuguggagcaccaagcccgucgagaccuccaacagcuucgacgugcucaaguccgaggacgcccaggggauggacaaccuggccugcgaggaccugaagcccgugagcgaggaggucguggagaaccccacgauccagaaggacgugcucgagugcaacgucaagaccaccgagguggugggcgacaucauccugaagccggccaacaacucccugaagaucaccgaggaggucgggcacacggaccucauggccgcguacguggacaacagcucccugaccaucaagaagcccaacgagcugagccgcgugcucggccugaagacccuggccacccacgggcucgccgccgucaacuccgugcccugggacacgaucgccaacuacgcgaagccguuccugaacaagguggucagcaccaccaccaacaucgugacgcgcugccugaaccgggugugcaccaacuacaugcccuacuucuucacccuccugcugcagcucugcaccuucacccgcuccacgaacagccggaucaaggccuccaugcccaccaccaucgccaacaacaccgucaagagcgugggcaaguucugccuggaggccagcuucaacuaccugaagucccccaacuucagcaagcucaucaacaucaucaucugguuccugcugcucuccgugugccugggcagccugaucuacuccacggccgcgcucgggguccugaugagcaaccugggcaugccguccuacugcaccggguaccgcgagggcuaccucaacagcaccaacgugaccaucgccacguacugcaccggcuccauccccugcagcgugugccuguccgggcuggacagccucgacaccuaccccucccuggagaccauccagaucacgaucagcuccuucaagugggaccugaccgccuucggccucgucgccgagugguuccuggccuacauccuguucacccgguucuucuacgugcucgggcuggcggccaucaugcagcuguucuucagcuacuucgccgugcacuucaucuccaacagcuggcucauguggcugaucaucaaccugguccagauggcccccaucuccgcgauggugcgcauguacaucuucuucgccagcuucuacuacguguggaagagcuacguccacgugguggacggcugcaacuccagcaccugcaugaugugcuacaagcggaaccgcgccacgcgggucgagugcaccaccaucgugaacgggguccgccgguccuucuacguguacgccaacggcggcaagggguucugcaagcugcacaacuggaacugcgugaacugcgacaccuucugcgccggcagcacguucaucuccgacgaggucgcgcgcgaccucagccugcaguucaagcggccgaucaaccccaccgaccaguccagcuacaucguggacuccgugaccgucaagaacgggagcauccaccuguacuucgacaaggccggccagaagaccuacgagcgccacucccucagccacuucgugaaccuggacaaccugcgggccaacaacacgaaggggucccuccccaucaacgugaucgucuucgacggcaagagcaagugcgaggaguccagcgccaaguccgccagcguguacuacucccagcugaugugccagcccauccugcuccuggaccaggcgcuggugagcgacgucggcgacagcgccgagguggccgugaagauguucgacgccuacgucaacaccuucuccagcaccuucaacgugccgauggagaagcucaagacccugguggccacggcggaggccgagcuggccaagaacgucucccucgacaacgugcugagcaccuucaucuccgccgcgcgccagggguucguggacagcgacgucgagaccaaggacgugguggagugccugaagcucucccaccagagcgacaucgaggucaccggcgacuccugcaacaacuacaugcugacguacaacaagguggagaacaugaccccccgggaccugggggccugcaucgacugcagcgcccgccacaucaacgcccagguggccaagucccacaacaucgcgcucaucuggaacgucaaggacuucaugagccuguccgagcagcugcggaagcagauccgcagcgccgccaagaagaacaaccuccccuucaagcugaccugcgccaccacgcgccagguggugaacgucgugaccaccaagaucgcccugaagggcgggugaggacuagucccuguucccagagcccacuuuuuuuucuuuuuuugaaauaaaauagccugucuuucagaucucaaaggcucuuuucagagccaccaaaaaaaaaaaaaaaaaaaaaaaaaaaaaaaaaaaaaaaaaaaaaaaaaaaaaaaaaaaaaaaaaaaaaaaaaaaaaaaaaaaaaaaaaaaaaaaaaaaaa

SEQ ID NO: 20104 - RNA, 6113 nt, Artificial Sequence
  SARS-CoV-2__MT447171.1__non-structural protein 3 (NSP3) mRNA gc
aggagagucccgcagucggcguccagcggcucugcuuguucgugugugugucguugcaggccuuauucaagcuuaccauggcccccaccaaggugaccuucggcgacgacacggucaucgaggugcagggguacaagagcgugaacaucaccuucgagcuggacgagcgcaucgacaagguccucaacgagaagugcuccgccuacaccguggagcugggcaccgaggugaacgaguucgcgugcgucguggccgacgccgugaucaagacgcugcagccggucagcgagcuccugaccccccuggggaucgaccucgacgagugguccauggccaccuacuaccuguucgacgagagcggcgaguucaagcuggccucccacauguacugcagcuucuacccccccgacgaggacgaggaggagggggacugcgaggaggaggaguucgagccguccacccaguacgaguacggcacggaggacgacuaccagggcaagccccucgaguucggggcgaccagcgccgcccugcagcccgaggaggagcaggaggaggacuggcuggacgacgacucccagcagaccgugggccagcaggacgggagcgaggacaaccagaccacgaccauccagaccaucguggagguccagccccagcucgagauggagcugaccccgguggugcagacgaucgaggucaacuccuucagcggcuaccugaagcucaccgacaacguguacaucaagaacgccgacaucguggaggaggcgaagaaggucaagcccaccgugguggucaacgccgccaacguguaccugaagcacgggggcggcguggccggggcccugaacaaggcgaccaacaacgccaugcaggucgaguccgacgacuacaucgccacgaacggcccccucaagguggggggcagcugcguccuguccggccacaaccuggccaagcacugccuccacgugguggggcccaacgucaacaagggcgaggacauccagcugcugaagagcgccuacgagaacuucaaccagcacgaggugcuccuggcgccgcugcucuccgccgggaucuucggcgccgaccccauccacagccugcgggugugcgucgacaucgugcgcaccaacguguaccuggccgucuucgacaagaaccucuacgacaagcugguguccagcuuccuggagaugaagagcgagaagcagguggagcagaagaucgccgagauccccaaggaggaggucaagcccuucaucaccgaguccaagccgagcguggagcagcggaagcaggacgacaagaagaucaaggcgugcguggaggaggucaccacgacccucgaggagaccaaguuccugaccgagaaccugcuccuguacaucgacaucaacgggaaccugcaccccgacuccgccacgcucgugagcgacaucgacaucaccuuccugaagaaggacgcccccuacaucgugggcgacgucgugcaggagggcgugcugaccgccgucgugauccccaccaagaaggccgggggcacgaccgagaugcucgcgaaggcccugcgcaaggugccgaccgacaacuacaucaccacguaccccgggcagggccugaacggguacaccgucgaggaggccaagaccgugcucaagaagugcaaguccgccuucuacauccugcccagcaucaucuccaacgagaagcaggagauccugggcaccgugagcuggaacuuccgggagaugcucgcgcacgccgaggagacccgcaagcugaugcccgucugcguggagacgaaggccaucguguccaccauccagcggaaguacaagggcaucaagauccaggagggggucguggacuacggcgcccgcuucuacuucuacaccagcaagaccacgguggccucccugaucaacacccugaacgaccucaacgagacccuggucaccaugccgcugggguacgugacgcacggccucaaccuggaggaggcggcccgguacaugcgcagccugaaggugcccgccaccgucuccgugagcucccccgacgccgugaccgccuacaacggguaccucaccagcuccagcaagacgcccgaggagcacuucaucgagaccaucucccuggcgggcagcuacaaggacuggagcuacuccggccagagcacccagcuggggaucgaguuccucaagcggggcgacaaguccgucuacuacaccagcaacccgacgaccuuccaccuggacggggaggugaucaccuucgacaaccugaagacccuccugucccugcgcgaggugcggacgaucaaggucuucaccaccguggacaacaucaaccuccacacccagguggucgacaugagcaugacguacggccagcaguucggccccaccuaccuggacggggccgacgugaccaagaucaagccccacaacucccacgagggcaagaccuucuacgugcugccgaacgacgacacgcuccgcgucgaggccuucgaguacuaccacaccaccgaccccagcuuccuggggcgguacauguccgcccugaaccacaccaagaaguggaaguacccccaggugaacggccucacgagcaucaagugggccgacaacaacugcuaccuggcgaccgcccugcucacccugcagcagaucgagcugaaguucaaccccccggcccuccaggacgccuacuaccgcgcgcgggccggggaggccgccaacuucugcgcccugauccuggcguacugcaacaagaccgugggcgagcucggcgacguccgcgagacgauguccuaccuguuccagcacgccaaccuggacagcugcaagcgggugcucaacgucgugugcaagaccugcgggcagcagcagaccacccugaagggcguggaggccgucauguacauggggacccuguccuacgagcaguucaagaagggcgugcagauccccugcacgugcgggaagcaggccaccaaguaccucgugcagcaggagagccccuucgucaugauguccgcccccccggcgcaguacgagcugaagcacggcaccuucaccugcgccagcgaguacacgggcaacuaccagugcgggcacuacaagcacaucaccuccaaggagacccuguacugcaucgacggcgcccuccugaccaagagcagcgaguacaaggggcccaucacggacguguucuacaaggagaacuccuacaccaccaccaucaagcccgugacguacaagcuggacggcgucgugugcaccgagaucgaccccaagcucgacaacuacuacaagaaggacaacagcuacuucaccgagcagccgaucgaccuggugcccaaccagcccuaccccaacgccuccuucgacaacuucaaguucgucugcgacaacaucaaguucgccgacgaccugaaccagcucaccggguacaagaagccggcgagccgcgagcugaaggugacguucuuccccgaccugaacggcgacguggucgccaucgacuacaagcacuacacccccuccuucaagaagggcgccaagcuccugcacaagcccaucguguggcacgugaacaacgccaccaacaaggcgaccuacaagccgaacacguggugcauccggugccuguggagcaccaagcccgucgagaccuccaacagcuucgacgugcucaaguccgaggacgcccaggggauggacaaccuggccugcgaggaccugaagcccgugagcgaggaggucguggagaaccccaccauccagaaggacgugcucgagugcaacgucaagacgaccgagguggugggcgacaucauccugaagccggccaacaacucccugaagaucaccgaggaggucgggcacaccgaccucauggccgcguacguggacaacagcucccugacgaucaagaagcccaacgagcugagccgcgugcucggccugaagacccuggccacccacgggcucgccgccgucaacuccgugcccugggacaccaucgccaacuacgcgaagccguuccugaacaagguggucagcacgaccaccaacaucgugacccgcugccugaaccgggugugcacgaacuacaugcccuacuucuucacccuccugcugcagcucugcaccuucacccgcuccaccaacagccggaucaaggccuccaugcccacgaccaucgccaagaacaccgucaagagcgugggcaaguucugccuggaggccagcuucaacuaccugaagucccccaacuucagcaagcucaucaacaucaucaucugguuccugcugcucuccgugugccugggcagccugaucuacuccaccgccgcgcucgggguccugaugagcaaccugggcaugccguccuacugcacgggguaccgcgagggcuaccucaacagcaccaacgugaccaucgccaccuacugcacgggcuccauccccugcagcgugugccuguccgggcuggacagccucgacaccuaccccucccuggagaccauccagaucaccaucagcuccuucaagugggaccugacggccuucggccucgucgccgagugguuccuggccuacauccuguucacccgguucuucuacgugcucgggcuggcggccaucaugcagcuguucuucagcuacuucgccgugcacuucaucuccaacagcuggcucauguggcugaucaucaaccugguccagauggcccccaucuccgcgauggugcgcauguacaucuucuucgccagcuucuacuacguguggaagagcuacguccacgugguggacggcugcaacuccagcaccugcaugaugugcuacaagcggaaccgcgccacccgggucgagugcacgaccaucgugaacgggguccgccgguccuucuacguguacgccaacggcggcaagggguucugcaagcugcacaacuggaacugcgugaacugcgacaccuucugcgccggcagcaccuucaucuccgacgaggucgcgcgcgaccucagccugcaguucaagcggccgaucaaccccacggaccaguccagcuacaucguggacuccgugaccgucaagaacgggagcauccaccuguacuucgacaaggccggccagaagaccuacgagcgccacucccucagccacuucgugaaccuggacaaccugcgggccaacaacaccaaggggucccuccccaucaacgugaucgucuucgacggcaagagcaagugcgaggaguccagcgccaaguccgccagcguguacuacucccagcugaugugccagcccauccugcuccuggaccaggcgcuggugagcgacgucggcgacagcgccgagguggccgugaagauguucgacgccuacgucaacacguucuccagcaccuucaacgugccgauggagaagcucaagacccugguggccaccgcggaggccgagcuggccaagaacgucucccucgacaacgugcugagcacguucaucuccgccgcgcgccagggguucguggacagcgacgucgagaccaaggacgugguggagugccugaagcucucccaccagagcgacaucgaggucaccggcgacuccugcaacaacuacaugcugaccuacaacaagguggagaacaugacgccccgggaccugggggccugcaucgacugcagcgcccgccacaucaacgcccagguggccaagucccacaacaucgcgcucaucuggaacgucaaggacuucaugagccuguccgagcagcugcggaagcagauccgcagcgccgccaagaagaacaaccuccccuucaagcugaccugcgccaccacccgccagguggugaacgucgugacgaccaagaucgcccugaagggcgggugaggacuagucccuguucccagagcccacuuuuuuuucuuuuuuugaaauaaaauagccugucuuucagaucucaaaggcucuuuucagagccaccaaaaaaaaaaaaaaaaaaaaaaaaaaaaaaaaaaaaaaaaaaaaaaaaaaaaaaaaaaaaaaaaaaaaaaaaaaaaaaaaaaaaaaaaaaaaaaaaaaaaa

SEQ ID NO: 20105 - RNA, 6113 nt, Artificial Sequence
  SARS-CoV-2__MT439297.1__non-structural protein 3 (NSP3) mRNA gc
aggagagucccgcagucggcguccagcggcucugcuuguucgugugugugucguugcaggccuuauucaagcuuaccauggcccccaccaaggugaccuucggcgacgacacggucaucgaggugcagggguacaagagcgugaacaucaccuucgagcuggacgagcgcaucgacaagguccucaacgagaagugcuccgccuacaccguggagcugggcaccgaggugaacgaguucgcgugcgucguggccgacgccgugaucaagacgcugcagccggucagcgagcuccugaccccccuggggaucgaccucgacgagugguccauggccaccuacuaccuguucgacgagagcggcgaguucaagcuggccucccacauguacugcagcuucuacccccccgacgaggacgaggaggagggggacugcgaggaggaggaguucgagccguccacccaguacgaguacggcacggaggacgacuaccagggcaagccccucgaguucggggcgaccagcgccgcccugcagcccgaggaggagcaggaggaggacuggcuggacgacgacucccagcagaccgugggccagcaggacgggagcgaggacaaccagaccacgaccauccagaccaucguggagguccagccccagcucgagauggagcugaccccgguggugcagacgaucgaggucaacuccuucagcggcuaccugaagcucaccgacaacguguacaucaagaacgccgacaucguggaggaggcgaagaaggucaagcccaccgugguggucaacgccgccaacguguaccugaagcacgggggcggcguggccggggcccugaacaaggcgaccaacaacgccaugcaggucgaguccgacgacuacaucgccacgaacggcccccucaagguggggggcagcugcguccuguccggccacaaccuggccaagcacugccuccacgugguggggcccaacgucaacaagggcgaggacauccagcugcugaagagcgccuacgagaacuucaaccagcacgaggugcuccuggcgccgcugcucuccgccgggaucuucggcgccgaccccauccacagccugcgggugugcgucgacaccgugcgcaccaacguguaccuggccgucuucgacaagaaccucuacgacaagcugguguccagcuuccuggagaugaagagcgagaagcagguggagcagaagaucgccgagauccccaaggaggaggucaagcccuucaucaccgaguccaagccgagcguggagcagcggaagcaggacgacaagaagaucaaggcgugcguggaggaggucacgaccacccucgaggagaccaaguuccugacggagaaccugcuccuguacaucgacaucaacgggaaccugcaccccgacuccgccacccucgugagcgacaucgacaucaccuuccugaagaaggacgcccccuacaucgugggcgacgucgugcaggagggcgugcugaccgccgucgugauccccacgaagaaggccgggggcaccaccgagaugcucgcgaaggcccugcgcaaggugccgaccgacaacuacaucacgaccuaccccgggcagggccugaacggguacaccgucgaggaggccaagaccgugcucaagaagugcaaguccgccuucuacauccugcccagcaucaucuccaacgagaagcaggagauccugggcaccgugagcuggaaccuccgggagaugcuggcgcacgccgaggagacgcgcaagcugaugcccgucugcguggagaccaaggccaucguguccaccauccagcggaaguacaagggcaucaagauccaggagggggucguggacuacggcgcccgcuucuacuucuacaccagcaagacgaccguggccucccugaucaacacccucaacgaccugaacgagacccuggucacgaugccgcucggguacgugacccacggccugaaccuggaggaggcggcccgguacaugcgcagccucaaggugcccgccaccgucuccgugagcucccccgacgccgugaccgccuacaacggguaccugacgagcuccagcaagacccccgaggagcacuucaucgagaccaucucccuggcgggcagcuacaaggacuggagcuacuccggccagagcacccagcucgggaucgaguuccugaagcggggcgacaaguccgucuacuacacgagcaacccgaccaccuuccaccuggacggggaggugaucaccuucgacaaccucaagacgcugcugucccuccgcgaggugcggaccaucaaggucuucaccaccguggacaacaucaaccugcacacgcagguggucgacaugagcaugaccuacggccagcaguucggccccaccuaccuggacggggccgacgugaccaagaucaagccccacaacucccacgagggcaagacguucuacgugcucccgaacgacgacacccugcgcgucgaggccuucgaguacuaccacaccaccgaccccagcuuccuggggcgguacauguccgcccucaaccacacgaagaaguggaaguacccccaggugaacggccugaccagcaucaagugggccgacaacaacugcuaccuggcgaccgcccuccugacccugcagcagaucgagcucaaguucaaccccccggcccugcaggacgccuacuaccgcgcgcgggccggggaggccgccaacuucugcgcccugauccucgcguacugcaacaagacggugggcgagcugggcgacguccgcgagaccauguccuaccuguuccagcacgccaaccucgacagcugcaagcgggugcugaacgucgugugcaagaccugcgggcagcagcagaccacccugaagggcguggaggccgucauguacauggggacgcucuccuacgagcaguucaagaagggcgugcagauccccugcaccugcgggaagcaggccaccaaguaccuggugcagcaggagagccccuucgucaugauguccgcccccccggcgcaguacgagcugaagcacggcaccuucacgugcgccagcgaguacaccggcaacuaccagugcgggcacuacaagcacaucaccuccaaggagacccucuacugcaucgacggcgcccugcugacgaagagcagcgaguacaaggggcccaucaccgacguguucuacaaggagaacuccuacaccaccacgaucaagcccgugaccuacaagcucgacggcgucgugugcaccgagaucgaccccaagcuggacaacuacuacaagaaggacaacagcuacuucaccgagcagccgaucgaccuggugcccaaccagcccuaccccaacgccuccuucgacaacuucaaguucgucugcgacaacaucaaguucgccgacgaccucaaccagcugacgggguacaagaagccggcgagccgcgagcugaaggugaccuucuuccccgaccucaacggcgacguggucgccaucgacuacaagcacuacacccccuccuucaagaagggcgccaagcugcugcacaagcccaucguguggcacgugaacaacgccaccaacaaggcgacguacaagccgaacaccuggugcauccggugccucuggagcaccaagcccgucgagaccuccaacagcuucgacgugcugaaguccgaggacgcccaggggauggacaaccuggccugcgaggaccucaagcccgugagcgaggaggucguggagaaccccacgauccagaaggacgugcuggagugcaacgucaagaccaccgagguggugggcgacaucauccugaagccggccaacaacucccucaagaucaccgaggaggucgggcacacggaccugauggccgcguacguggacaacagcucccugaccaucaagaagcccaacgagcucagccgcgugcugggccugaagacccucgccacccacgggcuggccgccgucaacuccgugcccugggacacgaucgccaacuacgcgaagccguuccugaacaagguggucagcaccaccaccaacaucgugacgcgcugccucaaccgggugugcaccaacuacaugcccuacuucuucacccugcugcuccagcugugcaccuucacccgcuccacgaacagccggaucaaggccuccaugcccaccaccaucgccaagaacaccgucaagagcgugggcaaguucugccuggaggccgccuucaacuaccucaagagccccaacuucuccaagcugaucaacaucaucaucugguuccugcuccugagcgugugccugggcucccucaucuacagcacggcggcccuggggguccugauguccaaccucggcaugccgagcuacugcaccggguaccgcgagggcuaccugaacuccaccaacgugaccaucgccacguacugcaccggcagcauccccugcuccgugugccugagcgggcucgacucccuggacaccuaccccagccuggagaccauccagaucacgaucuccagcuucaagugggaccucaccgccuucggccuggucgccgagugguuccuggcguacauccucuucacccgguucuucuacgugcuggggcuggccgccaucaugcagcucuucuucuccuacuucgccgugcacuucaucagcaacuccuggcugauguggcugaucaucaaccugguccagauggcgcccaucagcgccauggugcgcauguacaucuucuucgccuccuucuacuacguguggaagagcuacguccacgugguggacggcugcaacagcuccaccugcaugaugugcuacaagcggaaccgcgccacgcgggucgagugcaccaccaucgugaacgggguccgccggagcuucuacguguacgccaacggcggcaagggguucugcaagcuccacaacuggaacugcgugaacugcgacaccuucugcgcgggcuccacguucaucagcgacgaggucgcccgcgaccugucccugcaguucaagcggccgaucaaccccaccgaccagagcuccuacaucguggacagcgugaccgucaagaacggguccauccaccucuacuucgacaaggccggccagaagaccuacgagcgccacagccugucccacuucgugaaccuggacaaccuccgggccaacaacacgaaggggagccugcccaucaacgugaucgucuucgacggcaaguccaagugcgaggagagcuccgccaagagcgcguccguguacuacagccagcugaugugccagcccauccuccugcuggaccaggcccucguguccgacgucggcgacagcgccgagguggccgugaagauguucgacgccuacgucaacaccuucagcuccaccuucaacgugccgauggagaagcugaagacccugguggcgacggccgaggccgagcucgccaagaacgucagccuggacaacgugcuguccaccuucaucagcgcggcccgccagggguucguggacuccgacgucgagaccaaggacgugguggagugccucaagcugagccaccaguccgacaucgaggucaccggcgacagcugcaacaacuacaugcugacguacaacaagguggagaacaugaccccccgggaccucggggccugcaucgacugcuccgcccgccacaucaacgcccagguggcgaagagccacaacaucgcccugaucuggaacgucaaggacuucaugucccugagcgagcagcuccggaagcagauccgcuccgccgccaagaagaacaaccugcccuucaagcugaccugcgccaccacgcgccagguggugaacgucgugaccaccaagaucgcgcucaagggcgggugaggacuagucccuguucccagagcccacuuuuuuuucuuuuuuugaaauaaaauagccugucuuucagaucucaaaggcucuuuucagagccaccaaaaaaaaaaaaaaaaaaaaaaaaaaaaaaaaaaaaaaaaaaaaaaaaaaaaaaaaaaaaaaaaaaaaaaaaaaaaaaaaaaaaaaaaaaaaaaaaaaaaa

SEQ ID NO: 20106 - RNA, 6113 nt, Artificial Sequence
  SARS-CoV-2__MT434786.1__non-structural protein 3 (NSP3) mRNA gc
aggagagucccgcagucggcguccagcggcucugcuuguucgugugugugucguugcaggccuuauucaagcuuaccauggcccccaccaaggugaccuucggcgacgacacggucaucgaggugcagggguacaagagcgugaacaucaccuucgagcuggacgagcgcaucgacaagguccucaacgagaagugcuccgccuacaccguggagcugggcaccgaggugaacgaguucgcgugcgucguggccgacgccgugaucaagacgcugcagccggucagcgagcuccugaccccccuggggaucgaccucgacgagugguccauggccaccuacuaccuguucgacgagagcggcgaguucaagcuggccucccacauguacugcagcuucuacccccccgacgaggacgaggaggagggggacugcgaggaggaggaguucgagccguccacccaguacgaguacggcacggaggacgacuaccagggcaagccccucgaguucggggcgaccagcgccgcccugcagcccgaggaggagcaggaggaggacuggcuggacgacgacucccagcagaccgugggccagcaggacgggagcgaggacaaccagaccacgaccauccagaccaucguggagguccagccccagcucgagauggagcugaccccgguggugcagacgaucgaggucaacuccuucagcggcuaccugaagcucaccgacaacguguacaucaagaacgccgacaucguggaggaggcgaagaaggucaagcccaccgugguggucaacgccgccaacguguaccugaagcacgggggcggcguggccggggcccugaacaaggcgaccaacaacgccaugcaggucgaguccgacgacuacaucgccacgaacggcccccucaagguggggggcagcugcguccuguccggccacaaccuggccaagcacugccuccacgugguggggcccaacgucaacaagggcgaggacauccagcugcugaagagcgccuacgagaacuucaaccagcacgaggugcuccuggcgccgcugcucuccgccgggaucuucggcgccgaccccauccacagccugcgggugugcgucgacaccgugcgcaccaacguguaccuggccgucuucgacaagaaccucuacgacaagcugguguccagcuuccuggagaugaagagcgagaagcagguggagcagaagaucgccgagauccccaaggaggaggucaagcccuucaucaccgaguccaagccgagcguggagcagcggaagcaggacgacaagaagaucaaggcgugcguggaggaggucacgaccacccucgaggagaccaaguuccugacggagaaccugcuccuguacaucgacaucaacgggaaccugcaccccgacuccgccacccucgugagcgacaucgacaucaccuuccugaagaaggacgcccccuacaucgugggcgacgucgugcaggagggcgugcugaccgccgucgugauccccacgaagaaggccgggggcaccaccgagaugcucgcgaaggcccugcgcaaggugccgaccgacaacuacaucacgaccuaccccgggcagggccugaacggguacaccgucgaggaggccaagaccgugcucaagaagugcaaguccgccuucuacauccugcccagcaucaucuccaacgagaagcaggagauccugggcaccgugagcuggaaccuccgggagaugcuggcgcacgccgaggagacgcgcaagcugaugcccgucugcguggagaccaaggccaucguguccaccauccagcggaaguacaagggcaucaagauccaggagggggucguggacuacggcgcccgcuucuacuucuacaccagcaagacgaccguggccucccugaucaacacccucaacgaccugaacgagacccuggucacgaugccgcucggguacgugacccacggccugaaccuggaggaggcggcccgguacaugcgcagccucaaggugcccgccaccgucuccgugagcucccccgacgccgugaccgccuacaacggguaccugacgagcuccagcaagacccccgaggagcacuucaucgagaccaucucccuggcgggcagcuacaaggacuggagcuacuccggccagagcacccagcucgggaucgaguuccugaagcggggcgacaaguccgucuacuacacgagcaacccgaccaccuuccaccuggacggggaggugaucaccuucgacaaccucaagacgcugcugucccuccgcgaggugcggaccaucaaggucuucaccaccguggacaacaucaaccugcacacgcagguggucgacaugagcaugaccuacggccagcaguucggccccaccuaccuggacggggccgacgugaccaagaucaagccccacaacucccacgagggcaagacguucuacgugcucccgaacgacgacacccugcgcgucgaggccuucgaguacuaccacaccaccgaccccagcuuccuggggcgguacauguccgcccucaaccacacgaagaaguggaaguacccccaggugaacggccugaccagcaucaagugggccgacaacaacugcuaccuggcgaccgcccuccugacccugcagcagaucgagcucaaguucaaccccccggcccugcaggacgccuacuaccgcgcgcgggccggggaggccgccaacuucugcgcccugauccucgcguacugcaacaagacggugggcgagcugggcgacguccgcgagaccauguccuaccuguuccagcacgccaaccucgacagcugcaagcgggugcugaacgucgugugcaagaccugcgggcagcagcagaccacccugaagggcguggaggccgucauguacauggggacgcucuccuacgagcaguucaagaagggcgugcagauccccugcaccugcgggaagcaggccaccaaguaccuggugcagcaggagagccccuucgucaugauguccgcccccccggcgcaguacgagcugaagcacggcaccuucacgugcgccagcgaguacaccggcaacuaccagugcgggcacuacaagcacaucaccuccaaggagacccucuacugcaucgacggcgcccugcugacgaagagcagcgaguacaaggggcccaucaccgacguguucuacaaggagaacuccuacaccaccacgaucaagcccgugaccuacaagcucgacggcgucgugugcaccgagaucgaccccaagcuggacaacuacuacaagaaggacaacagcuacuucaccgagcagccgaucgaccuggugcccaaccagcccuaccccaacgccuccuucgacaacuucaaguucgucugcgacaacaucaaguucgccgacgaccucaaccagcugacgggguacaagaagccggcgagccgcgagcugaaggugaccuucuuccccgaccucaacggcgacguggucgccaucgacuacaagcacuacacccccuccuucaagaagggcgccaagcugcugcacaagcccaucguguggcacgugaacaacgccaccaacaaggcgacguacaagccgaacaccuggugcauccggugccucuggagcaccaagcccgucgagaccuccaacagcuucgacgugcugaaguccgaggacgcccaggggauggacaaccuggccugcgaggaccucaagcccgugagcgaggaggucguggagaaccccacgauccagaaggacgugcuggagugcaacgucaagaccaccgagguggugggcgacaucauccugaagccggccaacaacucccucaagaucaccgaggaggucgggcacacggaccugauggccgcguacguggacaacagcucccugaccaucaagaagcccaacgagcucagccgcgugcugggccugaagacccucgccacccgcgggcuggccgccgucaacuccgugcccugggacacgaucgccaacuacgcgaagccguuccugaacaagguggucagcaccaccaccaacaucgugacgcggugccucaaccgcgugugcaccaacuacaugcccuacuucuucacccugcugcuccagcugugcaccuucacccgguccacgaacagccgcaucaaggccuccaugcccaccaccaucgccaagaacaccgucaagagcgugggcaaguucugccuggaggccagcuucaacuaccucaagucccccaacuucagcaagcugaucaacaucaucaucugguuccugcuccuguccgugugccugggcagccucaucuacuccacggccgcgcuggggguccugaugagcaaccucggcaugccguccuacugcaccggguaccgggagggcuaccugaacagcaccaacgugaccaucgccacguacugcaccggcuccauccccugcagcgugugccuguccgggcucgacagccuggacaccuaccccucccuggagaccauccagaucacgaucagcuccuucaagugggaccucaccgccuucggccuggucgccgagugguuccuggccuacauccucuucacccgcuucuucuacgugcuggggcuggcggccaucaugcagcucuucuucagcuacuucgccgugcacuucaucuccaacagcuggcugauguggcugaucaucaaccugguccagauggcccccaucuccgcgauggugcggauguacaucuucuucgccagcuucuacuacguguggaagagcuacguccacgugguggacggcugcaacuccagcaccugcaugaugugcuacaagcgcaaccgggccacgcgcgucgagugcaccaccaucgugaacgggguccggcgcuccuucuacguguacgccaacggcggcaagggguucugcaagcuccacaacuggaacugcgugaacugcgacaccuucugcgccggcagcacguucaucuccgacgaggucgcgcgggaccugagccugcaguucaagcgcccgaucaaccccaccgaccaguccagcuacaucguggacuccgugaccgucaagaacgggagcauccaccucuacuucgacaaggccggccagaagaccuacgagcggcacucccugagccacuucgugaaccuggacaaccuccgcgccaacaacacgaaggggucccugcccaucaacgugaucgucuucgacggcaagagcaagugcgaggaguccagcgccaaguccgccagcguguacuacucccagcugaugugccagcccauccuccugcuggaccaggcgcucgugagcgacgucggcgacagcgccgagguggccgugaagauguucgacgccuacgucaacaccuucuccagcaccuucaacgugccgauggagaagcugaagacccugguggccacggcggaggccgagcucgccaagaacgucucccuggacaacgugcugagcaccuucaucuccgccgcgcggcagggguucguggacagcgacgucgagaccaaggacgugguggagugccucaagcugucccaccagagcgacaucgaggucaccggcgacuccugcaacaacuacaugcugacguacaacaagguggagaacaugaccccccgcgaccucggggccugcaucgacugcagcgcccggcacaucaacgcccagguggccaagucccacaacaucgcgcugaucuggaacgucaaggacuucaugagccuguccgagcagcuccgcaagcagauccgcagcgccgccaagaagaacaaccugcccuucaagcugaccugcgccaccacgcggcagguggugaacgucgugaccaccaagaucgcccucaagggcgggugaggacuagucccuguucccagagcccacuuuuuuuucuuuuuuugaaauaaaauagccugucuuucagaucucaaaggcucuuuucagagccaccaaaaaaaaaaaaaaaaaaaaaaaaaaaaaaaaaaaaaaaaaaaaaaaaaaaaaaaaaaaaaaaaaaaaaaaaaaaaaaaaaaaaaaaaaaaaaaaaaaaaa

SEQ ID NO: 20107 - RNA, 6113 nt, Artificial Sequence
  SARS-CoV-2__MT365032.1__non-structural protein 3 (NSP3) mRNA gc
aggagagucccgcagucggcguccagcggcucugcuuguucgugugugugucguugcaggccuuauucaagcuuaccauggcccccaccaaggugaccuucggcgacgacacggucaucgaggugcagggguacaagagcgugaacaucaccuucgagcuggacgagcgcaucgacaagguccucaacgagaagugcuccgccuacaccguggagcugggcaccgaggugaacgaguucgcgugcgucguggccgacgccgugaucaagacgcugcagccggucagcgagcuccugaccccccuggggaucgaccucgacgagugguccauggccaccuacuaccuguucgacgagagcggcgaguucaagcuggccucccacauguacugcagcuucuacccccccgacgaggacgaggaggagggggacugcgaggaggaggaguucgagccguccacccaguacgaguacggcacggaggacgacuaccagggcaagccccucgaguucggggcgaccagcgccgcccugcagcccgaggaggagcaggaggaggacuggcuggacgacgacucccagcagaccgugggccagcaggacgggagcgaggacaaccagaccacgaccauccagaccaucguggagguccagccccagcucgagauggagcugaccccgguggugcagacgaucgaggucaacuccuucagcggcuaccugaagcucaccgacaacguguacaucaagaacgccgacaucguggaggaggcgaagaaggucaagcccaccgugguggucaacgccgccaacguguaccugaagcacgggggcggcguggccggggcccugaacaaggcgaccaacaacgccaugcaggucgaguccgacgacuacaucgccacgaacggcccccucaagguggggggcagcugcguccuguccggccacaaccuggccaagcacugccuccacgugguggggcccaacgucaacaagggcgaggacauccagcugcugaagagcgccuacgagaacuucaaccagcacgaggugcuccuggcgccgcugcucuccgccgggaucuucggcgccgaccccauccacagccugcgggugugcgucgacaccgugcgcaccaacguguaccuggccgucuucgacaagaaccucuacgacaagcugguguccagcuuccuggagaugaagagcgagaagcagguggagcagaagaucgccgagauccccaaggaggaggucaagcccuucaucaccgaguccaagccgagcguggagcagcggaagcaggacgacaagaagaucaaggcgugcguggaggaggucacgaccacccucgaggagaccaaguuccugacggagaaccugcuccuguacaucgacaucaacgggaaccugcaccccgacuccgccacccucgugagcgacaucgacaucaccuuccugaagaaggacgcccccuacaucgugggcgacgucgugcaggagggcgugcugaccgucguggugauccccacgaagaaggccgggggcaccaccgagaugcucgccaaggcgcugcgcaaggucccgaccgacaacuacaucacgaccuaccccgggcagggccugaacggguacaccguggaggaggccaagaccgugcucaagaagugcaaguccgccuucuacauccugcccagcaucaucuccaacgagaagcaggagauccugggcaccgucagcuggaaccuccgggagaugcuggcccacgcggaggagacgcgcaagcugaugcccgugugcguggagaccaaggccaucgucuccaccauccagcggaaguacaagggcaucaagauccaggagggggugguggacuacggcgcccgcuucuacuucuacaccagcaagacgaccgucgccucccugaucaacacccucaacgaccugaacgagacccuggugacgaugccgcucggguacgugacccacggccugaaccuggaggaggccgcgcgguacaugcgcagccucaagguccccgccaccguguccgugagcucccccgacgccgucaccgccuacaacggguaccugacgagcuccagcaagacccccgaggagcacuucaucgagaccaucucccuggccggcagcuacaaggacuggagcuacuccggccagagcacccagcucgggaucgaguuccugaagcggggcgacaaguccguguacuacacgagcaacccgaccaccuuccaccuggacggggaggugaucaccuucgacaaccucaagacgcugcugucccuccgcgagguccggaccaucaagguguucaccaccguggacaacaucaaccugcacacgcaggucguggacaugagcaugaccuacggccagcaguucggccccaccuaccuggacggggcggacgugaccaagaucaagccccacaacucccacgagggcaagacguucuacguccucccgaacgacgacacccugcgcguggaggccuucgaguacuaccacaccaccgaccccagcuuccuggggcgguacauguccgcccucaaccacacgaagaaguggaaguacccccaggugaacggccugaccagcaucaagugggccgacaacaacugcuaccuggccaccgcgcuccugacccugcagcagaucgagcucaaguucaaccccccggcccugcaggacgccuacuaccgcgcccgggcgggggaggccgccaacuucugcgcccugauccucgccuacugcaacaagacggucggcgagcugggcgacgugcgcgagaccauguccuaccuguuccagcacgcgaaccucgacagcugcaagcggguccugaacguggugugcaagaccugcgggcagcagcagaccacccugaagggcgucgaggccgugauguacauggggacgcucuccuacgagcaguucaagaagggcgugcagauccccugcaccugcgggaagcaggccaccaaguaccugguccagcaggagagccccuucgugaugauguccgcccccccggcccaguacgagcugaagcacggcaccuucacgugcgcgagcgaguacaccggcaacuaccagugcgggcacuacaagcacaucaccuccaaggagacccucuacugcaucgacggcgcccugcugacgaagagcagcgaguacaaggggcccaucaccgacguguucuacaaggagaacuccuacaccaccacgaucaagcccgucaccuacaagcucgacggcguggugugcaccgagaucgaccccaagcuggacaacuacuacaagaaggacaacagcuacuucaccgagcagccgaucgaccugguccccaaccagcccuaccccaacgccuccuucgacaacuucaaguucgugugcgacaacaucaaguucgccgacgaccucaaccagcugacgggguacaagaagccggccagccgcgagcugaaggugaccuucuuccccgaccucaacggcgacgucguggcgaucgacuacaagcacuacacccccuccuucaagaagggcgccaagcugcugcacaagcccaucguguggcacgucaacaacgccaccaacaaggccacguacaagccgaacaccuggugcauccggugccucuggagcaccaagcccguggagaccuccaacagcuucgacgugcugaaguccgaggacgcgcaggggauggacaaccuggccugcgaggaccucaagcccgucagcgaggaggugguggagaaccccacgauccagaaggacguccuggagugcaacgugaagaccaccgagguggucggcgacaucauccugaagccggccaacaacucccucaagaucaccgaggagguggggcacacggaccugauggccgccuacguggacaacagcucccugaccaucaagaagcccaacgagcucagccgcguccugggccugaagacccucgcgacccacgggcuggccgccgugaacuccgugcccugggacacgaucgccaacuacgccaagccguuccugaacaaggucgugagcaccaccaccaacaucgugacgcgcugccucaaccgggucugcaccaacuacaugcccuacuucuucacccugcugcuccagcugugcaccuucacccgcuccacgaacagccggaucaaggcguccaugcccaccaccaucgccaagaacaccgugaagagcgugggcaaguucugccuggaggccagcuucaacuaccucaagucccccaacuucagcaagcugaucaacaucaucaucugguuccugcuccuguccgucugccugggcagccucaucuacuccacggccgcccugggggugcugaugagcaaccucggcaugccguccuacugcaccggguaccgcgagggcuaccugaacagcaccaacgugaccaucgcgacguacugcaccggcuccauccccugcagcgucugccuguccgggcucgacagccuggacaccuaccccucccuggagaccauccagaucacgaucagcuccuucaagugggaccucaccgccuucggccugguggccgagugguuccuggccuacauccucuucacccgguucuucuacgugcuggggcuggccgcgaucaugcagcucuucuucagcuacuucgccguccacuucaucuccaacagcuggcugauguggcugaucaucaaccuggugcagauggcccccaucuccgccauggugcgcauguacaucuucuucgcgagcuucuacuacgucuggaagagcuacgugcacguggucgacggcugcaacuccagcaccugcaugaugugcuacaagcggaaccgcgccacgcggguggagugcaccaccaucgucaacggggugcgccgguccuucuacguguacgccaacggcggcaagggguucugcaagcuccacaacuggaacugcgucaacugcgacaccuucugcgccggcagcacguucaucuccgacgagguggcccgcgaccugagccugcaguucaagcggccgaucaaccccaccgaccaguccagcuacaucguggacuccgucaccgugaagaacgggagcauccaccucuacuucgacaaggcgggccagaagaccuacgagcgccacucccugagccacuucgugaaccuggacaaccuccgggccaacaacacgaaggggucccugcccaucaacgucaucguguucgacggcaagagcaagugcgaggaguccagcgccaaguccgccagcguguacuacucccagcugaugugccagcccauccuccugcuggaccaggcccucgucagcgacgugggcgacagcgcggagguggccgucaagauguucgacgccuacgugaacaccuucuccagcaccuucaacgugccgauggagaagcugaagacccuggucgccacggccgaggcggagcucgccaagaacgugucccuggacaacgugcugagcaccuucaucuccgccgcccgccagggguucgucgacagcgacguggagaccaaggacguggucgagugccucaagcugucccaccagagcgacaucgaggugaccggcgacuccugcaacaacuacaugcugacguacaacaagguggagaacaugaccccccgggaccucggggcgugcaucgacugcagcgcccgccacaucaacgcccaggucgccaagucccacaacaucgcccugaucuggaacgugaaggacuucaugagccuguccgagcagcuccggaagcagauccgcagcgcggccaagaagaacaaccugcccuucaagcugaccugcgccaccacgcgccagguggucaacguggugaccaccaagaucgcccucaagggcgggugaggacuagucccuguucccagagcccacuuuuuuuucuuuuuuugaaauaaaauagccugucuuucagaucucaaaggcucuuuucagagccaccaaaaaaaaaaaaaaaaaaaaaaaaaaaaaaaaaaaaaaaaaaaaaaaaaaaaaaaaaaaaaaaaaaaaaaaaaaaaaaaaaaaaaaaaaaaaaaaaaaaaa

SEQ ID NO: 20108 - RNA, 6113 nt, Artificial Sequence
  SARS-CoV-2__MT428551.1__non-structural protein 3 (NSP3) mRNA gc
aggagagucccgcagucggcguccagcggcucugcuuguucgugugugugucguugcaggccuuauucaagcuuaccauggcccccaccaaggugaccuucggcgacgacacggucaucgaggugcagggguacaagagcgugaacaucaccuucgagcuggacgagcgcaucgacaagguccucaacgagaagugcuccgccuacaccguggagcugggcaccgaggugaacgaguucgcgugcgucguggccgacgccgugaucaagacgcugcagccggucagcgagcuccugaccccccuggggaucgaccucgacgagugguccauggccaccuacuaccuguucgacgagagcggcgaguucaagcuggccucccacauguacugcagcuucuacccccccgacgaggacgaggaggagggggacugcgaggaggaggaguucgagccguccacccaguacgaguacggcacggaggacgacuaccagggcaagccccucgaguucggggcgaccagcgccgcccugcagcccgaggaggagcaggaggaggacuggcuggacgacgacucccagcagaccgugggccagcaggacgggagcgaggacaaccagaccacgaccauccagaccaucguggagguccagccccagcucgagauggagcugaccccgguggugcagacgaaggucaacuccuucagcggcuaccugaagcucaccgacaacguguacaucaagaacgccgacaucguggaggaggcgaagaaggucaagcccaccgugguggucaacgccgccaacguguaccugaagcacgggggcggcguggccggggcccugaacaaggcgaccaacaacgccaugcaggucgaguccgacgacuacaucgccacgaacggcccccucaagguggggggcagcugcguccuguccggccacaaccuggccaagcacugccuccacgugguggggcccaacgucaacaagggcgaggacauccagcugcugaagagcgccuacgagaacuucaaccagcacgaggugcuccuggcgccgcugcucuccgccgggaucuucggcgccgaccccauccacagccugcgggugugcgucgacaccgugcgcaccaacguguaccuggccgucuucgacaagaaccucuacgacaagcugguguccagcuuccuggagaugaagagcgagaagcagguggagcagaagaucgccgagauccccaaggaggaggucaagcccuucaucaccgaguccaagccgagcguggagcagcggaagcaggacgacaagaagaucaaggcgugcguggaggaggucacgaccacccucgaggagaccaaguuccugacggagaaccugcuccuguacaucgacaucaacgggaaccugcaccccgacuccgccacccucgugagcgacaucgacaucaccuuccugaagaaggacgcccccuacaucgugggcgacgucgugcaggagggcgugcugaccgccgucgugauccccacgaagaaggccgggggcaccaccgagaugcucgcgaaggcccugcgcaaggugccgaccgacaacuacaucacgaccuaccccgggcagggccugaacggguacaccgucgaggaggccaagaccgugcucaagaagugcaaguccgccuucuacauccugcccagcaucaucuccaacgagaagcaggagauccugggcaccgugagcuggaaccuccgggagaugcuggcgcacgccgaggagacgcgcaagcugaugcccgucugcguggagaccaaggccaucguguccaccauccagcggaaguacaagggcaucaagauccaggagggggucguggacuacggcgcccgcuucuacuucuacaccagcaagacgaccguggccucccugaucaacacccucaacgaccugaacgagacccuggucacgaugccgcucggguacgugacccacggccugaaccuggaggaggcggcccgguacaugcgcagccucaaggugcccgccaccgucuccgugagcucccccgacgccgugaccgccuacaacggguaccugacgagcuccagcaagacccccgaggagcacuucaucgagaccaucucccuggcgggcagcuacaaggacuggagcuacuccggccagagcacccagcucgggaucgaguuccugaagcggggcgacaaguccgucuacuacacgagcaacccgaccaccuuccaccuggacggggaggugaucaccuucgacaaccucaagacgcugcugucccuccgcgaggugcggaccaucaaggucuucaccaccguggacaacaucaaccugcacacgcagguggucgacaugagcaugaccuacggccagcaguucggccccaccuaccuggacggggccgacgugaccaagaucaagccccacaacucccacgagggcaagacguucuacgugcucccgaacgacgacacccugcgcgucgaggccuucgaguacuaccacaccaccgaccccagcuuccuggggcgguacauguccgcccucaaccacacgaagaaguggaaguacccccaggugaacggccugaccagcaucaagugggccgacaacaacugcuaccuggcgaccgcccuccugacccugcagcagaucgagcucaaguucaaccccccggcccugcaggacgccuacuaccgcgcgcgggccggggaggccgccaacuucugcgcccugauccucgcguacugcaacaagacggugggcgagcugggcgacguccgcgagaccauguccuaccuguuccagcacgccaaccucgacagcugcaagcgggugcugaacgucgugugcaagaccugcgggcagcagcagaccacccugaagggcguggaggccgucauguacauggggacgcucuccuacgagcaguucaagaagggcgugcagauccccugcaccugcgggaagcaggccaccaaguaccuggugcagcaggagagccccuucgucaugauguccgcccccccggcgcaguacgagcugaagcacggcaccuucacgugcgccagcgaguacaccggcaacuaccagugcgggcacuacaagcacaucaccuccaaggagacccucuacugcaucgacggcgcccugcugacgaagagcagcgaguacaaggggcccaucaccgacguguucuacaaggagaacuccuacaccaccacgaucaagcccgugaccuacaagcucgacggcgucgugugcaccgagaucgaccccaagcuggacaacuacuacaagaaggacaacagcuacuucaccgagcagccgaucgaccuggugcccaaccagcccuaccccaacgccuccuucgacaacuucaaguucgucugcgacaacaucaaguucgccgacgaccucaaccagcugacgggguacaagaagccggcgagccgcgagcugaaggugaccuucuuccccgaccucaacggcgacguggucgccaucgacuacaagcacuacacccccuccuucaagaagggcgccaagcugcugcacaagcccaucguguggcacgugaacaacgccaccaacaaggcgacguacaagccgaacaccuggugcauccggugccucuggagcaccaagcccgucgagaccuccaacagcuucgacgugcugaaguccgaggacgcccaggggauggacaaccuggccugcgaggaccucaagcccgugagcgaggaggucguggagaaccccacgauccagaaggacgugcuggagugcaacgucaagaccaccgagguggugggcgacaucauccugaagccggccaacaacucccucaagaucaccgaggaggucgggcacacggaccugauggccgcguacguggacaacagcucccugaccaucaagaagcccaacgagcucagccgcgugcugggccugaagacccucgccacccacgggcuggccgccgucaacuccgugcccugggacacgaucgccaacuacgcgaagccguuccugaacaagguggucagcaccaccaccaacaucgugacgcgcugccucaaccgggugugcaccaacuacaugcccuacuucuucacccugcugcuccagcugugcaccuucacccgcuccacgaacagccggaucaaggccuccaugcccaccaccaucgccaagaacaccgucaagagcgugggcaaguucugccuggaggccagcuucaacuaccucaagucccccaacuucagcaagcugaucaacaucaucaucugguuccugcuccuguccgugugccugggcagccucaucuacuccacggccgcgcuggggguccugaugagcaaccucggcaugccguccuacugcaccggguaccgcgagggcuaccugaacagcaccaacgugaccaucgccacguacugcaccggcuccauccccugcagcgugugccuguccgggcucgacagccuggacaccuaccccucccuggagaccauccagaucacgaucagcuccuucaagugggaccucaccgccuucggccuggucgccgagugguuccuggccuacauccucuucacccgguucuucuacgugcuggggcuggcggccaucaugcagcucuucuucagcuacuucgccgugcacuucaucuccaacagcuggcugauguggcugaucaucaaccugguccagauggcccccaucuccgcgauggugcgcauguacaucuucuucgccagcuucuacuacguguggaagagcuacguccacgugguggacggcugcaacuccagcaccugcaugaugugcuacaagcggaaccgcgccacgcgggucgagugcaccaccaucgugaacgggguccgccgguccuucuacguguacgccaacggcggcaagggguucugcaagcuccacaacuggaacugcgugaacugcgacaccuucugcgccggcagcacguucaucuccgacgaggucgcgcgcgaccugagccugcaguucaagcggccgaucaaccccaccgaccaguccagcuacaucguggacuccgugaccgucaagaacgggagcauccaccucuacuucgacaaggccggccagaagaccuacgagcgccacucccugagccacuucgugaaccuggacaaccuccgggccaacaacacgaaggggucccugcccaucaacgugaucgucuucgacggcaagagcaagugcgaggaguccagcgccaaguccgccagcguguacuacucccagcugaugugccagcccauccuccugcuggaccaggcgcucgugagcgacgucggcgacagcgccgagguggccgugaagauguucgacgccuacgucaacaccuucuccagcaccuucaacgugccgauggagaagcugaagacccugguggccacggcggaggccgagcucgccaagaacgucucccuggacaacgugcugagcaccuucaucuccgccgcgcgccagggguucguggacagcgacgucgagaccaaggacgugguggagugccucaagcugucccaccagagcgacaucgaggucaccggcgacuccugcaacaacuacaugcugacguacaacaagguggagaacaugaccccccgggaccucggggccugcaucgacugcagcgcccgccacaucaacgcccagguggccaagucccacaacaucgcgcugaucuggaacgucaaggacuucaugagccuguccgagcagcuccggaagcagauccgcagcgccgccaagaagaacaaccugcccuucaagcugaccugcgccaccacgcgccagguggugaacgucgugaccaccaagaucgcccucaagggcgggaagugaggacuagucccuguucccagagcccacuuuuuuuucuuuuuuugaaauaaaauagccugucuuucagaucucaaaggcucuuuucagagccaccaaaaaaaaaaaaaaaaaaaaaaaaaaaaaaaaaaaaaaaaaaaaaaaaaaaaaaaaaaaaaaaaaaaaaaaaaaaaaaaaaaaaaaaaaaaaaaaaaaaaa

SEQ ID NO: 20109 - RNA, 6113 nt, Artificial Sequence
  SARS-CoV-2__MT419842.1__non-structural protein 3 (NSP3) mRNA gc
aggagagucccgcagucggcguccagcggcucugcuuguucgugugugugucguugcaggccuuauucaagcuuaccauggcccccaccaaggugaccuucggcgacgacacggucaucgaggugcagggguacaagagcgugaacaucaccuucgagcuggacgagcgcaucgacaagguccucaacgagaagugcuccgccuacaccguggagcugggcaccgaggugaacgaguucgcgugcgucguggccgacgccgugaucaagacgcugcagccggucagcgagcuccugaccccccuggggaucgaccucgacgagugguccauggccaccuacuaccuguucgacgagagcggcgaguucaagcuggccucccacauguacugcagcuucuacccccccgacgaggacgaggaggagggggacugcgaggaggaggaguucgagccguccacccaguacgaguacggcacggaggacgacuaccagggcaagccccucgaguucggggcgaccagcgccgcccugcagcccgaggaggagcaggaggaggacuggcuggacgacgacucccagcagaccgugggccagcaggacgggagcgaggacaaccagaccacgaccauccagaccaucguggagguccagccccagcucgagauggagcugaccccgguggugcagacgaucgaggucaacuccuucagcggcuaccugaagcucaccgacaacguguacaucaagaacgccgacaucguggaggaggcgaagaaggucaagcccaccgugguggucaacgccgccaacguguaccugaagcacgggggcggcguggccggggcccugaacaaggcgaccaacaacgccaugcaggucgaguccgacgacuacaucgccacgaacggcccccucaagguggggggcagcugcguccuguccggccacaaccuggccaagcacugccuccacgugguggggcccaacgucaacaagggcgaggacauccagcugcugaagagcgccuacgagaacuucaaccagcacgaggugcuccuggcgccgcugcucuccgccgggaucuucggcgccgaccccauccacagccugcgggugugcgucgacaccgugcgcaccaacguguaccuggccgucuucgacaagaaccucuacgacaagcugguguccagcuuccuggagaugaagagcgagaagcagguggagcagaagaucgccgagauccccaaggaggaggucaagcccuucaucaccgaguccaagccgagcguggagcagcggaagcaggacgacaagaagaucaaggcgugcguggaggaggucacgaccacccucgaggagaccaaguuccugacggagaaccugcuccuguacaucgacaucaacgggaaccugcaccccgacuccgccacccucgugagcgacaucgacaucaccuuccugaagaaggacgcccccuacaucgugggcgacgucgugcaggagggcgugcugaccgccgucgugauccccacgaagaaggccgggggcaccaccgagaugcucgcgaaggcccugcgcaaggugccgaccgacaacuacaucacgaccuaccccgggcagggccugaacggguacaccgucgaggaggccaagaccgugcucaagaagugcaaguccgccuucuacauccugcccagcaucaucuccaacgagaagcaggagauccugggcaccgugagcuggaaccuccgggagaugcuggcgcacgccgaggagacgcgcaagcugaugcccgucugcguggagaccaaggccaucguguccaccauccagcggaaguacaagggcaucaagauccaggagggggucguggacuacggcgcccgcuucuacuucuacaccagcaagacgaccguggccucccugaucaacacccucaacgaccugaacgagacccuggucacgaugccgcucggguacgugacccacggccugaaccuggaggaggcggcccgguacaugcgcagccucaaggugcccgccaccgucuccgugagcucccccgacgccgugaccgccuacaacggguaccugacgagcuccagcaagacccccgaggagcacuucaucgagaccaucucccuggcgggcagcuacaaggacuggagcuacuccggccagagcacccagcucgggaucgaguuccugaagcggggcgacaaguccgucuacuacacgagcaacccgaccaccuuccaccuggacggggaggugaucaccuucgacaaccucaagacgcugcugucccuccgcgaggugcggaccaucaaggucuucaccaccguggacaacaucaaccugcacacgcagguggucgacaugagcaugaccuacggccagcaguucggccccaccuaccuggacggggccgacgugaccaagaucaagccccacaacucccacgagggcaagacguucuacgugcucccgaacgacgacacccugcgcgucgaggccuucgaguacuaccacaccaccgaccccagcuuccuggggcgguacauguccgcccucaaccacacgaagaaguggaaguacccccaggugaacggccugaccagcaucaagugggccgacaacaacugcuaccuggcgaccgcccuccugacccugcagcagaucgagcucaaguucaaccccccggcccugcaggacgccuacuaccgcgcgcgggccggggaggccgccaacuucugcgcccugauccucgcguacugcaacaagacggugggcgagcugggcgacguccgcgagaccauguccuaccuguuccagcacgccaaccucgacagcugcaagcgggugcugaacgucgugugcaagaccugcgggcagcagcagaccacccugaagggcguggaggccgucauguacauggggacgcucuccuacgagcaguucaagaagggcgugcagauccccugcaccugcgggaagcaggccaccaaguaccuggugcagcaggagagccccuucgucaugauguccgcccccccggcgcaguacgagcugaagcacggcaccuucacgugcgccagcgaguacaccggcaacuaccagugcgggcacuacaagcacaucaccuccaaggagacccucuacugcaucgacggcgcccugcugacgaagagcagcgaguacaaggggcccaucaccgacguguucuacaaggagaacuccuacaccaccacgaucaagcccgugaccuacaagcucgacggcgucgugugcaccgagaucgaccccaagcuggacaacuacuacaagaaggacaacagcuacuucaccgagcagccgaucgaccuggugcccaaccagcccuaccccaacgccuccuucgacaacuucaaguucgucugcgacaacaucaaguucgccgacgaccucaaccagcugacgggguacaagaagccggcgagccgcgagcugaaggugaccuucuuccccgaccucaacggcgacguggucgccaucgacuacaagcacuacacccccuccuucaagaagggcgccaagcugcugcacaagcccaucguguggcacgugaacaacgccaccaacaaggcgacguacaagccgaacaccuggugcauccggugccucuggagcaccaagcccgucgagaccuccaacagcuucgacgugcugaaguccgaggacgcccaggggauggacaaccuggccugcgaggaccucaagcccgugagcgaggaggucguggagaaccccacgauccagaaggacgugcuggagugcaacgucaagaccaccgagguggugggcgacaucauccugaagccggccaacaacucccucaagaucaccgaggaggucgggcacacggaccugauggccgcguacguggacaacagcucccugaccaucaagaagcccaacgagcucagccgcgugcugggccugaagacccucgccacccacgggcuggccgccgucaacuccgugcccugggacacgaucgccaacuacgcgaagccguuccugaacaagguggucagcaccaccaccaacaucgugacgcgcugccucaaccgggugugcaccaacuacaugcccuacuucuucacccugcugcuccagcugugcaccuucacccgcuccacgaacagccggaucaaggccuccaugcccaccaccaucgccaagaacaccgucaagagcgugggcaaguucugccuggaggccagcuucaacuaccucaagucccccaacuucagcaagcugaucaacaucaucaucugguuccugcuccuguccgugugccugggcagccucaucuacuccacggccgcgcuggggguccugaugagcaaccucggcaugccguccuacugcaccggguaccgcgagggcuaccugaacagcaccaacgugaccaucgccacguacugcaccggcuccauccccugcagcgugugccuguccgggcucgacagccuggacaccuaccccucccuggagaccauccagaucacgaucagcuccuucaagugggaccucaccgccuucggccuggucgccgagugguuccuggccuacauccucuucacccgguucuucuacgugcuggggcuggcggccaucaugcagcucuucuucagcuacuucgccgugcacuucaucuccaacagcuggcugauguggcugaucaucaaccugguccagauggcccccaucuccgcgauggugcgcauguacaucuucuucgccagcuucuacuacguguggaagagcuacguccacgugguggacggcugcaacuccagcaccugcaugaugugcuacaagcggaaccgcgccacgcgggucgagugcaccaccaucgugaacgggguccgccgguccuucuacguguacgccaacggcggcaagggguucugcaagcuccacaacuggaacugcgugaacugcgacaccuucugcgccggcagcacguucaucuccgacgaggucgcgcgcgaccugagccugcaguucaagcggccgaucaaccccaccgaccaguccagcuacaucguggacuccgugaccgucaagaacgggagcauccaccucuacuucgacaaggccggccagaagaccuacgagcgccacuuccugucccacuucgugaaccuggacaaccuccgggccaacaacacgaaggggagccugcccaucaacgugaucgucuucgacggcaaguccaagugcgaggagagcuccgccaagagcgccuccguguacuacagccagcugaugugccagcccauccuccugcuggaccaggcgcucguguccgacgucggcgacagcgccgagguggccgugaagauguucgacgccuacgucaacaccuucagcuccaccuucaacgugccgauggagaagcugaagacccugguggccacggcggaggccgagcucgccaagaacgucagccuggacaacgugcuguccaccuucaucagcgccgcgcgccagggguucguggacuccgacgucgagaccaaggacgugguggagugccucaagcugagccaccaguccgacaucgaggucaccggcgacagcugcaacaacuacaugcugacguacaacaagguggagaacaugaccccccgggaccucggggccugcaucgacugcuccgcccgccacaucaacgcccagguggccaagagccacaacaucgcgcugaucuggaacgucaaggacuucaugucccugagcgagcagcuccggaagcagauccgcuccgccgccaagaagaacaaccugcccuucaagcugaccugcgccaccacgcgccagguggugaacgucgugaccaccaagaucgcccucaagggcgggugaggacuagucccuguucccagagcccacuuuuuuuucuuuuuuugaaauaaaauagccugucuuucagaucucaaaggcucuuuucagagccaccaaaaaaaaaaaaaaaaaaaaaaaaaaaaaaaaaaaaaaaaaaaaaaaaaaaaaaaaaaaaaaaaaaaaaaaaaaaaaaaaaaaaaaaaaaaaaaaaaaaaa

SEQ ID NO: 20110 - RNA, 6113 nt, Artificial Sequence
  SARS-CoV-2__MT412134.1__non-structural protein 3 (NSP3) mRNA gc
aggagagucccgcagucggcguccagcggcucugcuuguucgugugugugucguugcaggccuuauucaagcuuaccauggcccccaccaaggugaccuucggcgacgacacggucaucgaggugcagggguacaagagcgugaacaucaccuucgagcuggacgagcgcaucgacaagguccucaacgagaagugcuccgccuacaccguggagcugggcaccgaggugaacgaguucgcgugcgucguggccgacgccgugaucaagacgcugcagccggucagcgagcuccugaccccccuggggaucgaccucgacgagugguccauggccaccuacuaccuguucgacgagagcggcgaguucaagcuggccucccacauguacugcagcuucuacccccccgacgaggacgaggaggagggggacugcgaggaggaggaguucgagccguccacccaguacgaguacggcacggaggacgacuaccagggcaagccccucgaguucggggcgaccagcgccgcccugcagcccgaggaggagcaggaggaggacuggcuggacgacgacucccagcagaccgugggccagcaggacgggagcgaggacaaccagaccacgaccauccagaccaucguggagguccagccccagcucgagauggagcugaccccgguggugcagacgaucgaggucaacuccuucagcggcuaccugaagcucaccgacaacguguacaucaagaacgccgacaucguggaggaggcgaagaaggucaagcccaccgugguggucaacgccgccaacguguaccugaagcacgggggcggcguggccggggcccugaacaaggcgaccaacaacgccaugcaggucgaguccgacgacuacaucgccacgaacggcccccucaagguggggggcagcugcguccuguccggccacaaccuggccaagcacugccuccacgugguggggcccaacgucaacaagggcgaggacauccagcugcugaagagcgccuacgagaacuucaaccagcacgaggugcuccuggcgccgcugcucuccgccgggaucuucggcgccgaccccauccacagccugcgggugugcgucgacaccgugcgcaccaacguguaccuggccgucuucgacaagaaccucuacgacaagcugguguccagcuuccuggagaugaagagcgagaagcagguggagcagaagaucgccgagauccccaaggaggaggucaagcccuucaucaccgaguccaagccgagcguggagcagcggaagcaggacgacaagaagaucaaggcgugcguggaggaggucacgaccacccucgaggagaccaaguuccugacggagaaccugcuccuguacaucgacaucaacgggaaccugcaccccgacuccgccacccucgugagcgacaucgacaucaccuuccugaagaaggacgcccccuacaucgugggcgacgucgugcaggagggcgugcugaccgccgucgugauccccacgaagaaggccgggggcaccaccgagaugcucgcgaaggcccugcgcaaggugccgaccgacaacuacaucacgaccuaccccgggcagggccugaacggguacaccgucgaggaggccaagaccgugcucaagaagugcaaguccgccuucuacauccugcccagcaucaucuccaacgagaagcaggagauccugggcaccgugagcuggaaccuccgggagaugcuggcgcacgccgaggagacgcgcaagcugaugcccgucugcguggagaccaaggccaucguguccaccauccagcggaaguacaagggcaucaagauccaggagggggucguggacuacggcgcccgcuucuacuucuacaccagcaagacgaccguggccucccugaucaacacccucaacgaccugaacgagacccuggucacgaugccgcucggguacgugacccacggccugaaccuggaggaggcggcccgguacaugcgcagccucaaggugcccgccaccgucuccgugagcucccccgacgccgugaccgccuacaacggguaccugacgagcuccagcaagacccccgaggagcacuucaucgagaccaucucccuggcgggcagcuacaaggacuggagcuacuccggccagagcacccagcucgggaucgaguuccugaagcggggcgacaaguccgucuacuacacgagcaacccgaccaccuuccaccuggacggggaggugaucaccuucgacaaccucaagacgcugcugucccuccgcgaggugcggaccaucaaggucuucaccaccguggacaacaucaaccugcacacgcagguggucgacaugagcaugaccuacggccagcaguucggccccaccuacuucgacggggccgacgugaccaagaucaagccccacaacucccacgagggcaagacguucuacgugcugccgaacgacgacacccuccgcgucgaggccuucgaguacuaccacaccaccgaccccagcuuccuggggcgguacauguccgcccugaaccacacgaagaaguggaaguacccccaggugaacggccucaccagcaucaagugggccgacaacaacugcuaccuggcgaccgcccugcucacccugcagcagaucgagcugaaguucaaccccccggcccuccaggacgccuacuaccgcgcgcgggccggggaggccgccaacuucugcgcccugauccuggcguacugcaacaagacggugggcgagcucggcgacguccgcgagaccauguccuaccuguuccagcacgccaaccuggacagcugcaagcgggugcucaacgucgugugcaagaccugcgggcagcagcagaccacccugaagggcguggaggccgucauguacauggggacgcuguccuacgagcaguucaagaagggcgugcagauccccugcaccugcgggaagcaggccaccaaguaccucgugcagcaggagagccccuucgucaugauguccgcccccccggcgcaguacgagcugaagcacggcaccuucacgugcgccagcgaguacaccggcaacuaccagugcgggcacuacaagcacaucaccuccaaggagacccuguacugcaucgacggcgcccuccugacgaagagcagcgaguacaaggggcccaucaccgacguguucuacaaggagaacuccuacaccaccacgaucaagcccgugaccuacaagcuggacggcgucgugugcaccgagaucgaccccaagcucgacaacuacuacaagaaggacaacagcuacuucaccgagcagccgaucgaccuggugcccaaccagcccuaccccaacgccuccuucgacaacuucaaguucgucugcgacaacaucaaguucgccgacgaccugaaccagcucacgggguacaagaagccggcgagccgcgagcugaaggugaccuucuuccccgaccugaacggcgacguggucgccaucgacuacaagcacuacacccccuccuucaagaagggcgccaagcuccugcacaagcccaucguguggcacgugaacaacgccaccaacaaggcgacguacaagccgaacaccuggugcauccggugccuguggagcaccaagcccgucgagaccuccaacagcuucgacgugcucaaguccgaggacgcccaggggauggacaaccuggccugcgaggaccugaagcccgugagcgaggaggucguggagaaccccacgauccagaaggacgugcucgagugcaacgucaagaccaccgagguggugggcgacaucauccugaagccggccaacaacucccugaagaucaccgaggaggucgggcacacggaccucauggccgcguacguggacaacagcucccugaccaucaagaagcccaacgagcugagccgcgugcucggccugaagacccuggccacccacgggcucgccgccgucaacuccgugcccugggacacgaucgccaacuacgcgaagccguuccugaacaagguggucagcaccaccaccaacaucgugacgcgcugccugaaccgggugugcaccaacuacaugcccuacuucuucacccuccugcugcagcucugcaccuucacccgcuccacgaacagccggaucaaggccuccaugcccaccaccaucgccaagaacaccgucaagagcgugggcaaguucugccuggaggccagcuucaacuaccugaagucccccaacuucagcaagcucaucaacaucaucaucugguuccugcugcucuccgugugccugggcagccugaucuacuccacggccgcgcucgggguccugaugagcaaccugggcaugccguccuacugcaccggguaccgcgagggcuaccucaacagcaccaacgugaccaucgccacguacugcaccggcuccauccccugcagcgugugccuguccgggcuggacagccucgacaccuaccccucccuggagaccauccagaucacgaucagcuccuucaagugggaccugaccgccuucggccucgucgccgagugguuccuggccuacauccuguucacccgguucuucuacgugcucgggcuggcggccaucaugcagcuguucuucagcuacuucgccgugcacuucaucuccaacagcuggcucauguggcugaucaucaaccugguccagauggcccccaucuccgcgauggugcgcauguacaucuucuucgccagcuucuacuacguguggaagagcuacguccacgugguggacggcugcaacuccagcaccugcaugaugugcuacaagcggaaccgcgccacgcgggucgagugcaccaccaucgugaacgggguccgccgguccuucuacguguacgccaacggcggcaagggguucugcaagcugcacaacuggaacugcgugaacugcgacaccuucugcgccggcagcacguucaucuccgacgaggucgcgcgcgaccucagccugcaguucaagcggccgaucaaccccaccgaccaguccagcuacaucguggacuccgugaccgucaagaacgggagcauccaccuguacuucgacaaggccggccagaagaccuacgagcgccacucccucagccacuucgugaaccuggacaaccugcgggccaacaacacgaaggggucccuccccaucaacgugaucgucuucgacggcaagagcaagugcgaggaguccagcgccaaguccgccagcguguacuacucccagcugaugugccagcccauccugcuccuggaccaggcgcuggugagcgacgucggcgacagcgccgagguggccgugaagauguucgacgccuacgucaacaccuucuccagcaccuucaacgugccgauggagaagcucaagacccugguggccacggcggaggccgagcuggccaagaacgucucccucgacaacgugcugagcaccuucaucuccgccgcgcgccagggguucguggacagcgacgucgagaccaaggacgugguggagugccugaagcucucccaccagagcgacaucgaggucaccggcgacuccugcaacaacuacaugcugacguacaacaagguggagaacaugaccccccgggaccugggggccugcaucgacugcagcgcccgccacaucaacgcccagguggccaagucccacaacaucgcgcucaucuggaacgucaaggacuucaugagccuguccgagcagcugcggaagcagauccgcagcgccgccaagaagaacaaccuccccuucaagcugaccugcgccaccacgcgccagguggugaacgucgugaccaccaagaucgcccugaagggcgggugaggacuagucccuguucccagagcccacuuuuuuuucuuuuuuugaaauaaaauagccugucuuucagaucucaaaggcucuuuucagagccaccaaaaaaaaaaaaaaaaaaaaaaaaaaaaaaaaaaaaaaaaaaaaaaaaaaaaaaaaaaaaaaaaaaaaaaaaaaaaaaaaaaaaaaaaaaaaaaaaaaaaa

SEQ ID NO: 20111 - RNA, 6113 nt, Artificial Sequence
  SARS-CoV-2__MT412226.1__non-structural protein 3 (NSP3) mRNA gc
aggagagucccgcagucggcguccagcggcucugcuuguucgugugugugucguugcaggccuuauucaagcuuaccauggcccccaccaaggugaccuucggcgacgacacggucaucgaggugcagggguacaagagcgugaacaucaccuucgagcuggacgagcgcaucgacaagguccucaacgagaagugcuccgccuacaccguggagcugggcaccgaggugaacgaguucgcgugcgucguggccgacgccgugaucaagacgcugcagccggucagcgagcuccugaccccccuggggaucgaccucgacgagugguccauggccaccuacuaccuguucgacgagagcggcgaguucaagcuggccucccacauguacugcagcuucuacccccccgacgaggacgaggaggagggggacugcgaggaggaggaguucgagccguccacccaguacgaguacggcacggaggacgacuaccagggcaagccccucgaguucggggcgaccagcgccgcccugcagcccgaggaggagcaggaggaggacuggcuggacgacgacucccagcagaccgugggccagcaggacgggagcgaggacaaccagaccacgaccauccagaccaucguggagguccagccccagcucgagauggagcugaccccgguggugcagacgaucgaggucaacuccuucagcggcuaccugaagcucaccgacaacguguacaucaagaacgccgacaucguggaggaggcgaagaaggucaagcccaccgugguggucaacgccgccaacguguaccugaagcacgggggcggcguggccggggcccugaacaaggcgaccaacaacgccaugcaggucgaguccgacgacuacaucgccacgaacggcccccucaagguggggggcagcugcguccuguccggccacaaccuggccaagcacugccuccacgugguggggcccaacgucaacaagggcgaggacauccagcugcugaagagcgccuacgagaacuucaaccagcacgaggugcuccuggcgccgcugcucuccgccgggaucuucggcgccgaccccauccacagccugcgggugugcgucgacaccgugcgcaccaacguguaccuggccgucuucgacaagaaccucuacgacaagcugguguccagcuuccuggagaugaagagcgagaagcagguggagcagaagaucgccgagauccccaaggaggaggucaagcccuucaucaccgaguccaagccgagcguggagcagcggaagcaggacgacaagaagaucaaggcgugcguggaggaggucacgaccacccucgaggagaccaaguuccugacggagaaccugcuccuguacaucgacaucaacgggaaccugcaccccgacuccgccacccucgugagcgacaucgacaucaccuuccugaagaaggacgcccccuacaucgugggcgacgucgugcaggagggcgugcugaccgccgucgugauccccacgaagaaggccgggggcaccaccgagaugcucgcgaaggcccugcgcaaggugccgaccgacaacuacaucacgaccuaccccgggcagggccugaacggguacaccgucgaggaggccaagaccgugcucaagaagugcaaguccgccuucuacauccugcccagcaucaucuccaacgagaagcaggagauccugggcaccgugagcuggaaccuccgggagaugcuggcgcacgccgaggagacgcgcaagcugaugcccgucugcguggagaccaaggccaucguguccaccauccagcggaaguacaagggcaucaagauccaggagggggucguggacuacggcgcccgcuucuacuucuacaccagcaagacgaccguggccucccugaucaacacccucaacgaccugaacgagacccuggucacgaugccgcucggguacgugacccacggccugaaccuggaggaggcggcccgguacaugcgcagccucaaggugcccgccaccgucuccgugagcucccccgacgccgugaccgccuacaacggguaccugacgagcuccagcaagacccccgaggagcacuucaucgagaccaucucccuggcgggcagcuacaaggacuggagcuacuccggccagagcacccagcucgggaucgaguuccugaagcggggcgacaaguccgucuacuacacgagcaacccgaccaccuuccaccuggacggggaggugaucaccuucgacaaccucaagacgcugcugucccuccgcgaggugcggaccaucaaggucuucaccaccguggacaacaucaaccugcacacgcagguggucgacaugagcaugaccuacggccagcaguucggccccaccuaccuggacggggccgacgugaccaagaucaagccccacaacucccacgagggcaagacguucuacgugcucccgaacgacgacacccugcgcgucgaggccuucgaguacuaccacaccaccgaccccagcuuccuggggcgguacauguccgcccucaaccacacgaagaaguggaaguacccccaggugaacggccugaccagcaucaagugggccgacaacaacugcuaccuggcgaccgcccuccugacccugcagcagaucgagcucaaguucaaccccccggcccugcaggacgccuacuaccgcgcgcgggccggggaggccgccaacuucugcgcccugauccucgcguacugcaacaagacggugggcgagcugggcgacguccgcgagaccauguccuaccuguuccagcacgccaaccucgacagcugcaagcgggugcugaacgucgugugcaagaccugcgggcagcagcagaccacccugaagggcguggaggccgucauguacauggggacgcucuccuacgagcaguucaagaagggcgugcagauccccugcaccugcgggaagcaggccaccaaguaccuggugcagcaggagagccccuucgucaugauguccgcccccccggcgcaguacgagcugaagcacggcaccuucacgugcgccagcgaguacaccggcaacuaccagugcgggcacuacaagcacaucaccuccaaggagacccucuacugcaucgacggcgcccugcugacgaagagcagcgaguacaaggggcccaucaccgacguguucuacaaggagaacuccuacaccaccacgaucaagcccgugaccuacaagcucgacggcgucgugugcaccgagaucgaccccaagcuggacaacuacuacaagaaggacaacagcuacuucaccgagcagccgaucgaccuggugcccaaccagcccuaccccaacgccuccuucgacaacuucaaguucgucugcgacaacaucaaguucgccgacgaccucaaccagcugacgggguacaagaagccggcgagccgcgagcugaaggugaccuucuuccccgaccucaacggcgacguggucgccaucgacuacaagcacuacacccccuccuucaagaagggcgccaagcugcugcacaagcccaucguguggcacgugaacaacgccaccaacaaggcgacguacaagccgaacaccuggugcauccggugccucuggagcaccaagcccgucgagaccuccaacagcuucgacgugcugaaguccgaggacgcccaggggauggacaaccuggccugcgaggaccucaagcccgugagcgaggaggucguggagaaccccacgauccagaaggacgugcuggagugcaacgucaagaccaccgagguggugggcgacaucauccugaagccggccaacaacucccucaagaucaccgaggaggucgggcacacggaccugauggccgcguacguggacaacagcucccugaccaucaagaagcccaacgagcucagccgcgugcugggccugaagacccucgccacccacgggcuggccgccgucaacuccgugcccugggacacgaucgccaacuacgcgaagccguuccugaacaagguggucagcaccaccaccacgaucgugacccgcugccucaaccgggugugcaccaacuacaugcccuacuucuucacccugcugcuccagcugugcaccuucacgcgcuccaccaacagccggaucaaggccuccaugcccaccaccaucgccaagaacacggucaagagcgugggcaaguucugccuggaggccagcuucaacuaccucaagucccccaacuucagcaagcugaucaacaucaucaucugguuccugcuccuguccgugugccugggcagccucaucuacuccaccgccgcgcuggggguccugaugagcaaccucggcaugccguccuacugcaccggguaccgcgagggcuaccugaacagcaccaacgugacgaucgccaccuacugcaccggcuccauccccugcagcgugugccuguccgggcucgacagccuggacaccuaccccucccuggagacgauccagaucaccaucagcuccuucaagugggaccucaccgccuucggccuggucgccgagugguuccuggccuacauccucuucacccgguucuucuacgugcuggggcuggcggccaucaugcagcucuucuucagcuacuucgccgugcacuucaucuccaacagcuggcugauguggcugaucaucaaccugguccagauggcccccaucuccgcgauggugcgcauguacaucuucuucgccagcuucuacuacguguggaagagcuacguccacgugguggacggcugcaacuccagcacgugcaugaugugcuacaagcggaaccgcgccacccgggucgagugcaccaccaucgugaacgggguccgccgguccuucuacguguacgccaacggcggcaagggguucugcaagcuccacaacuggaacugcgugaacugcgacacguucugcgccggcagcaccuucaucuccgacgaggucgcgcgcgaccugagccugcaguucaagcggccgaucaaccccaccgaccaguccagcuacaucguggacuccgugaccgucaagaacgggagcauccaccucuacuucgacaaggccggccagaagacguacgagcgccacucccugagccacuucgugaaccuggacaaccuccgggccaacaacaccaaggggucccugcccaucaacgugaucgucuucgacggcaagagcaagugcgaggaguccagcgccaaguccgccagcguguacuacucccagcugaugugccagcccauccuccugcuggaccaggcgcucgugagcgacgucggcgacagcgccgagguggccgugaagauguucgacgccuacgucaacaccuucuccagcaccuucaacgugccgauggagaagcugaagacgcugguggccaccgcggaggccgagcucgccaagaacgucucccuggacaacgugcugagcaccuucaucuccgccgcgcgccagggguucguggacagcgacgucgagaccaaggacgugguggagugccucaagcugucccaccagagcgacaucgaggucacgggcgacuccugcaacaacuacaugcugaccuacaacaagguggagaacaugaccccccgggaccucggggccugcaucgacugcagcgcccgccacaucaacgcccagguggccaagucccacaacaucgcgcugaucuggaacgucaaggacuucaugagccuguccgagcagcuccggaagcagauccgcagcgccgccaagaagaacaaccugcccuucaagcugaccugcgccacgacccgccagguggugaacgucgugaccaccaagaucgcccucaagggcgggugaggacuagucccuguucccagagcccacuuuuuuuucuuuuuuugaaauaaaauagccugucuuucagaucucaaaggcucuuuucagagccaccaaaaaaaaaaaaaaaaaaaaaaaaaaaaaaaaaaaaaaaaaaaaaaaaaaaaaaaaaaaaaaaaaaaaaaaaaaaaaaaaaaaaaaaaaaaaaaaaaaaaa

SEQ ID NO: 20112 - RNA, 6113 nt, Artificial Sequence
  SARS-CoV-2__MT412324.1__non-structural protein 3 (NSP3) mRNA gc
aggagagucccgcagucggcguccagcggcucugcuuguucgugugugugucguugcaggccuuauucaagcuuaccauggcccccaccaaggugaccuucggcgacgacacggucaucgaggugcagggguacaagagcgugaacaucaccuucgagcuggacgagcgcaucgacaagguccucaacgagaagugcuccgccuacaccguggagcugggcaccgaggugaacgaguucgcgugcgucguggccgacgccgugaucaagacgcugcagccggucagcgagcuccugaccccccuggggaucgaccucgacgagugguccauggccaccuacuaccuguucgacgagagcggcgaguucaagcuggccucccacauguacugcagcuucuacccccccgacgaggacgaggaggagggggacugcgaggaggaggaguucgagccguccacccaguacgaguacggcacggaggacgacuaccagggcaagccccucgaguucggggcgaccagcgccgcccugcagcccgaggaggagcaggaggaggacuggcuggacgacgacucccagcagaccgugggccagcaggacgggagcgaggacaaccagaccacgaccauccagaccaucguggagguccagccccagcucgagauggagcugaccccgguggugcagacgaucgaggucaacuccuucagcggcuaccugaagcucaccgacaacguguacaucaagaacgccgacaucguggaggaggcgaagaaggucaagcccaccgugguggucaacgccgccaacguguaccugaagcacgggggcggcguggccggggcccugaacaaggcgaccaacaacgccaugcaggucgaguccgacgacuacaucgccacgaacggcccccucaagguggggggcagcugcguccuguccggccacaaccuggccaagcacugccuccacgugguggggcccaacgucaacaagggcgaggacauccagcugcugaagagcgccuacgagaacuucaaccagcacgaggugcuccuggcgccgcugcucuccgccgggaucuucggcgccgaccccauccacagccugcgggugugcgucgacaccgugcgcaccaacguguaccuggccgucuucgacaagaaccucuacgacaagcugguguccagcuuccuggagaugaagagcgagaagcagguggagcagaagaucgccgagauccccaaggaggaggucaagcccuucaucaccgaguccaagccgagcguggagcagcggaagcaggacgacaagaagaucaaggcgugcguggaggaggucacgaccacccucgaggagaccaaguuccugacggagaaccugcuccuguacaucgacaucaacgggaaccugcaccccgacuccgccacccucgugagcgacaucgacaucaccuuccugaagaaggacgcccccuacaucgugggcgacgucgugcaggagggcgugcugaccgccgucgugauccccacgaagaaggccgggggcaccaccgagaugcucgcgaaggcccugcgcaaggugccgaccgacaacuacaucacgaccuaccccgggcagggccugaacggguacaccgucgaggaggccaagaccgugcucaagaagugcaaguccgccuucuacauccugcccagcaucaucuccaacgagaagcaggagauccugggcaccgugagcuggaaccuccgggagaugcuggcgcacgccgaggagacgcgcaagcugaugcccgucugcguggagaccaaggccaucguguccaccauccagcggaaguacaagggcaucaagauccaggagggggucguggacuacggcgcccgcuucuacuucuacaccagcaagacgaccguggccucccugaucaacacccucaacgaccugaacgagacccuggucacgaugccgcucggguacgugacccacggccugaaccuggaggaggcggcccgguacaugcgcagccucaaggugcccgccaccgucuccgugagcucccccgacgccgugaccgccuacaacggguaccugacgagcuccagcaagacccccgaggagcacuucaucgagaccaucucccuggcgggcagcuacaaggacuggagcuacuccggccagagcacccagcucgggaucgaguuccugaagcggggcgacaaguccgucuacuacacgagcaacccgaccaccuuccaccuggacggggaggugaucaccuucgacaaccucaagacgcugcugucccuccgcgaggugcggaccaucaaggucuucaccaccguggacaacaucaaccugcacacgcagguggucgacaugagcaugaccuacggccagcaguucggccccaccuaccuggacggggccgacgugaccaagaucaagccccacaacucccacgagggcaagacguucuacgugcucccgaacgacgacacccugcgcgucgaggccuucgaguacuaccacaccaccgaccccagcuuccuggggcgguacauguccgcccucaaccacacgaagaaguggaaguacgcccaggugaacggccugaccagcaucaagugggcggacaacaacugcuaccuggccaccgcccuccugacccugcagcagaucgagcucaaguucaacccccccgcccugcaggacgcguacuaccgcgcccgggccggggaggccgccaacuucugcgcgcugauccucgccuacugcaacaagacggugggcgagcugggcgacguccgcgagaccauguccuaccuguuccagcacgccaaccucgacagcugcaagcgggugcugaacgucgugugcaagaccugcgggcagcagcagaccacccugaagggcguggaggccgucauguacauggggacgcucuccuacgagcaguucaagaagggcgugcagaucccgugcaccugcgggaagcaggccaccaaguaccuggugcagcaggagagccccuucgucaugauguccgcgccccccgcccaguacgagcugaagcacggcaccuucacgugcgccagcgaguacaccggcaacuaccagugcgggcacuacaagcacaucaccuccaaggagacccucuacugcaucgacggcgcccugcugacgaagagcagcgaguacaaggggccgaucaccgacguguucuacaaggagaacuccuacaccaccacgaucaagcccgugaccuacaagcucgacggcgucgugugcaccgagaucgaccccaagcuggacaacuacuacaagaaggacaacagcuacuucaccgagcagcccaucgaccuggugccgaaccagcccuaccccaacgccuccuucgacaacuucaaguucgucugcgacaacaucaaguucgcggacgaccucaaccagcugacgggguacaagaagcccgccagccgcgagcugaaggugaccuucuucccggaccucaacggcgacguggucgccaucgacuacaagcacuacacccccuccuucaagaagggcgccaagcugcugcacaagcccaucguguggcacgugaacaacgcgaccaacaaggccacguacaagcccaacaccuggugcauccggugccucuggagcaccaagccggucgagaccuccaacagcuucgacgugcugaaguccgaggacgcccaggggauggacaaccuggccugcgaggaccucaagcccgugagcgaggaggucguggagaaccccacgauccagaaggacgugcuggagugcaacgucaagaccaccgagguggugggcgacaucauccugaagcccgccaacaacucccucaagaucaccgaggaggucgggcacacggaccugauggcggccuacguggacaacagcucccugaccaucaagaagccgaacgagcucagccgcgugcugggccugaagacccucgccacccacgggcuggccgccgucaacuccgugcccugggacacgaucgcgaacuacgccaagcccuuccugaacaagguggucagcaccaccaccaacaucgugacgcgcugccucaaccgggugugcaccaacuacaugccguacuucuucacccugcugcuccagcugugcaccuucacccgcuccacgaacagccggaucaaggccuccaugcccaccaccaucgccaagaacaccgucaagagcgugggcaaguucugccuggaggccagcuucaacuaccucaagucccccaacuucagcaagcugaucaacaucaucaucugguuccugcuccuguccgugugccugggcagccucaucuacuccacggcggcccuggggguccugaugagcaaccucggcaugcccuccuacugcaccggguaccgcgagggcuaccugaacagcaccaacgugaccaucgccacguacugcaccggcuccaucccgugcagcgugugccuguccgggcucgacagccuggacaccuaccccucccuggagaccauccagaucacgaucagcuccuucaagugggaccucaccgccuucggccuggucgccgagugguuccuggcguacauccucuucacccgguucuucuacgugcuggggcuggccgccaucaugcagcucuucuucagcuacuucgccgugcacuucaucuccaacagcuggcugauguggcugaucaucaaccugguccagauggcgcccaucuccgccauggugcgcauguacaucuucuucgccagcuucuacuacguguggaagagcuacguccacgugguggacggcugcaacuccagcaccugcaugaugugcuacaagcggaaccgcgccacgcgggucgagugcaccaccaucgugaacgggguccgccgguccuucuacguguacgccaacggcggcaagggguucugcaagcuccacaacuggaacugcgugaacugcgacaccuucugcgcgggcagcacguucaucuccgacgaggucgcccgcgaccugagccugcaguucaagcggcccaucaacccgaccgaccaguccagcuacaucguggacuccgugaccgucaagaacgggagcauccaccucuacuucgacaaggccggccagaagaccuacgagcgccacucccugagccacuucgugaaccuggacaaccuccgggccaacaacacgaaggggucccugcccaucaacgugaucgucuucgacggcaagagcaagugcgaggaguccagcgccaaguccgcgagcguguacuacucccagcugaugugccagcccauccuccugcuggaccaggcccucgugagcgacgucggcgacagcgccgagguggccgugaagauguucgacgccuacgucaacaccuucuccagcaccuucaacgugcccauggagaagcugaagacccugguggcgacggccgaggccgagcucgccaagaacgucucccuggacaacgugcugagcaccuucaucuccgcggcccgccagggguucguggacagcgacgucgagaccaaggacgugguggagugccucaagcugucccaccagagcgacaucgaggucaccggcgacuccugcaacaacuacaugcugacguacaacaagguggagaacaugaccccgcgggaccucggggccugcaucgacugcagcgcccgccacaucaacgcccagguggcgaagucccacaacaucgcccugaucuggaacgucaaggacuucaugagccuguccgagcagcuccggaagcagauccgcagcgccgccaagaagaacaaccugcccuucaagcugaccugcgccaccacgcgccagguggugaacgucgugaccaccaagaucgcgcucaagggcgggugaggacuagucccuguucccagagcccacuuuuuuuucuuuuuuugaaauaaaauagccugucuuucagaucucaaaggcucuuuucagagccaccaaaaaaaaaaaaaaaaaaaaaaaaaaaaaaaaaaaaaaaaaaaaaaaaaaaaaaaaaaaaaaaaaaaaaaaaaaaaaaaaaaaaaaaaaaaaaaaaaaaaa

SEQ ID NO: 20113 - RNA, 6113 nt, Artificial Sequence
  SARS-CoV-2__MT412325.1__non-structural protein 3 (NSP3) mRNA gc
aggagagucccgcagucggcguccagcggcucugcuuguucgugugugugucguugcaggccuuauucaagcuuaccauggcccccaccaaggugaccuucggcgacgacacggucaucgaggugcagggguacaagagcgugaacaucaccuucgagcuggacgagcgcaucgacaagguccucaacgagaagugcuccgccuacaccguggagcugggcaccgaggugaacgaguucgcgugcgucguggccgacgccgugaucaagacgcugcagccggucagcgagcuccugaccccccuggggaucgaccucgacgagugguccauggccaccuacuaccuguucgacgagagcggcgaguucaagcuggccucccacauguacugcagcuucuacccccccgacgaggacgaggaggagggggacugcgaggaggaggaguucgagccguccacccaguacgaguacggcacggaggacgacuaccagggcaagccccucgaguucggggcgaccagcgccgcccugcagcccgaggaggagcaggaggaggacuggcuggacgacgacucccagcagaccgugggccagcaggacgggagcgaggacaaccagaccacgaccauccagaccaucguggagguccagccccagcucgagauggagcugaccccgguggugcagacgaucgaggucaacuccuucagcggcuaccugaagcucaccgacaacguguacaucaagaacgccgacaucguggaggaggcgaagaaggucaagcccaccgugguggucaacgccgccaacguguaccugaagcacgggggcggcguggccggggcccugaacaaggcgaccaacaacgccaugcaggucgaguccgacgacuacaucgccacgaacggcccccucaagguggggggcagcugcguccuguccggccacaaccuggccaagcacugccuccacgugguggggcccaacgucaacaagggcgaggacauccagcugcugaagagcgccuacgagaacuucaaccagcacgaggugcuccuggcgccgcugcucuccgccgggaucuucggcgccgaccccauccacagccugcgggugugcgucgacaccgugcgcaccaacguguaccuggccgucuucgacaagaaccucuacgacaagcugguguccagcuuccuggagaugaagagcgagaagcagguggagcagaagaucgccgagauccccaaggaggaggucaagcccuucaucaccgaguccaagccgagcguggagcagcggaagcaggacgacaagaagaucaaggcgugcguggaggaggucacgaccacccucgaggagaccaaguuccugacggagaaccugcuccuguacaucgacaucaacgggaaccugcaccccgacuccgccacccucgugagcgacaucgacaucaccuuccugaagaaggacgcccccuacaucgugggcgacgucgugcaggagggcgugcugaccgccgucgugauccccacgaagaaggccgggggcaccaccgagaugcucgcgaaggcccugcgcaaggugccgaccgacaacuacaucacgaccuaccccgggcagggccugaacggguacaccgucgaggaggccaagaccgugcucaagaagugcaaguccgccuucuacauccugcccagcaucaucuccaacgagaagcaggagauccugggcaccgugagcuggaaccuccgggagaugcuggcgcacgccgaggagacgcgcaagcugaugcccgucugcguggagaccaaggccaucguguccaccauccagcggaaguacaagggcaucaagauccaggagggggucguggacuacggcgcccgcuucuacuucuacaccagcaagacgaccguggccucccugaucaacacccucaacgaccugaacgagacccuggucacgaugccgcucggguacgugacccacggccugaaccuggaggaggcggcccgguacaugcgcagccucaaggugcccgccaccgucuccgugagcucccccgacgccgugaccgccuacaacggguaccugacgagcuccagcaagacccccgaggagcacuucaucgagaccaucucccuggcgggcagcuacaaggacuggagcuacuccggccagagcacccagcucgggaucgaguuccugaagcggggcgacaaguccgucuacuacacgagcaacccgaccaccuuccaccuggacggggaggugaucaccuucgacaaccucaagacgcugcugucccuccgcgaggugcggaccaucaaggucuucaccaccguggacaacaucaaccugcacacgcagguggucgacaugagcaugaccuacggccagcaguucggccccaccuaccuggacggggccgacgugaccaagaucaagccccacaacucccacgagggcaagacguucuacgugcucccgaacgacgacacccugcgcgucgaggccuucgaguacuaccacaccaccgaccccagcuuccuggggcgguacauguccgcccucaaccacacgaagaaguggaaguacccccaggugaacggccugaccagcaucaagugggccgacaacaacugcuaccuggcgaccgcccuccugacccugcagcagaucgagcucaaguucaaccccccggcccugcaggacgccuacuaccgcgcgcgggccggggaggccgccaacuucugcgcccugauccucgcguacugcaacaagacggugggcgagcugggcgacguccgcgagaccauguccuaccuguuccagcacgccaagcucgacagcugcaagcgggugcugaacgucgugugcaagaccugcgggcagcagcagaccacccugaagggcguggaggccgucauguacauggggacgcucuccuacgagcaguucaagaagggcgugcagauccccugcaccugcgggaagcaggccaccaaguaccuggugcagcaggagagccccuucgucaugauguccgcccccccggcgcaguacgagcugaagcacggcaccuucacgugcgccagcgaguacaccggcaacuaccagugcgggcacuacaagcacaucaccuccaaggagacccucuacugcaucgacggcgcccugcugacgaagagcagcgaguacaaggggcccaucaccgacguguucuacaaggagaacuccuacaccaccacgaucaagcccgugaccuacaagcucgacggcgucgugugcaccgagaucgaccccaagcuggacaacuacuacaagaaggacaacagcuacuucaccgagcagccgaucgaccuggugcccaaccagcccuaccccaacgccuccuucgacaacuucaaguucgucugcgacaacaucaaguucgccgacgaccucaaccagcugacgggguacaagaagccggcgagccgcgagcugaaggugaccuucuuccccgaccucaacggcgacguggucgccaucgacuacaagcacuacacccccuccuucaagaagggcgccaagcugcugcacaagcccaucguguggcacgugaacaacgccaccaacaaggcgacguacaagccgaacaccuggugcauccggugccucuggagcaccaagcccgucgagaccuccaacagcuucgacgugcugaaguccgaggacgcccaggggauggacaaccuggccugcgaggaccucaagcccgugagcgaggaggucguggagaaccccacgauccagaaggacgugcuggagugcaacgucaagaccaccgagguggugggcgacaucauccugaagccggccaacaacucccucaagaucaccgaggaggucgggcacacggaccugauggccgcguacguggacaacagcucccugaccaucaagaagcccaacgagcucagccgcgugcugggccugaagacccucgccacccacgggcuggccgccgucaacuccgugcccugggacacgaucgccaacuacgcgaagccguuccugaacaagguggucagcaccaccaccaacaucgugacgcgcugccucaaccgggugugcaccaacuacaugcccuacuucuucacccugcugcuccagcugugcaccuucacccgcuccacgaacagccggaucaaggccuccaugcccaccaccaucgccaagaacaccgucaagagcgugggcaaguucugccuggaggccagcuucaacuaccucaagucccccaacuucagcaagcugaucaacaucaucaucugguuccugcuccuguccgugugccugggcagccucaucuacuccacggccgcgcuggggguccugaugagcaaccucggcaugccguccuacugcaccggguaccgcgagggcuaccugaacagcaccaacgugaccaucgccacguacugcaccggcuccauccccugcagcgugugccuguccgggcucgacagccuggacaccuaccccucccuggagaccauccagaucacgaucagcuccuucaagugggaccucaccgccuucggccuggucgccgagugguuccuggccuacauccucuucacccgguucuucuacgugcuggggcuggcggccaucaugcagcucuucuucagcuacuucgccgugcacuucaucuccaacagcuggcugauguggcugaucaucaaccugguccagauggcccccaucuccgcgauggugcgcauguacaucuucuucgccagcuucuacuacguguggaagagcuacguccacgugguggacggcugcaacuccagcaccugcaugaugugcuacaagcggaaccgcgccacgcgggucgagugcaccaccaucgugaacgggguccgccgguccuucuacguguacgccaacggcggcaagggguucugcaagcuccacaacuggaacugcgugaacugcgacaccuucugcgccggcagcacguucaucuccgacgaggucgcgcgcgaccugagccugcaguucaagcggccgaucaaccccaccgaccaguccagcuacaucguggacuccgugaccgucaagaacgggagcauccaccucuacuucgacaaggccggccagaagaccuacgagcgccacucccugagccacuucgugaaccuggacaaccuccgggccaacaacacgaaggggucccugcccaucaacgugaucgucuucgacggcaagagcaagugcgaggaguccagcgccaaguccgccagcguguacuacucccagcugaugugccagcccauccuccugcuggaccaggcgcucgugagcgacgucggcgacagcgccgagguggccgugaagauguucgacgccuacgucaacaccuucuccagcaccuucaacgugccgauggagaagcugaagacccugguggccacggcggaggccgagcucgccaagaacgucucccuggacaacgugcugagcaccuucaucuccgccgcgcgccagggguucguggacagcgacgucgagaccaaggacgugguggagugccucaagcugucccaccagagcgacaucgaggucaccggcgacuccugcaacaacuacaugcugacguacaacaagguggagaacaugaccccccgggaccucggggccugcaucgacugcagcgcccgccacaucaacgcccagguggccaagucccacaacaucgcgcugaucuggaacgucaaggacuucaugagccuguccgagcagcuccggaagcagauccgcagcgccgccaagaagaacaaccugcccuucaagcugaccugcgccaccacgcgccagguggugaacgucgugaccaccaagaucgcccucaagggcgggugaggacuagucccuguucccagagcccacuuuuuuuucuuuuuuugaaauaaaauagccugucuuucagaucucaaaggcucuuuucagagccaccaaaaaaaaaaaaaaaaaaaaaaaaaaaaaaaaaaaaaaaaaaaaaaaaaaaaaaaaaaaaaaaaaaaaaaaaaaaaaaaaaaaaaaaaaaaaaaaaaaaaa

SEQ ID NO: 20114 - RNA, 6113 nt, Artificial Sequence
  SARS-CoV-2__MT415896.1__non-structural protein 3 (NSP3) mRNA gc
aggagagucccgcagucggcguccagcggcucugcuuguucgugugugugucguugcaggccuuauucaagcuuaccauggcccccaccaaggugaccuucggcgacgacacggucaucgaggugcagggguacaagagcgugaacaucaccuucgagcuggacgagcgcaucgacaagguccucaacgagaagugcuccgccuacaccguggagcugggcaccgaggugaacgaguucgcgugcgucguggccgacgccgugaucaagacgcugcagccggucagcgagcuccugaccccccuggggaucgaccucgacgagugguccauggccaccuacuaccuguucgacgagagcggcgaguucaagcuggccucccacauguacugcagcuucuacccccccgacgaggacgaggaggagggggacugcgaggaggaggaguucgagccguccacccaguacgaguacggcacggaggacgacuaccagggcaagccccucgaguucggggcgaccagcgccgcccugcagcuggaggaggagcaggaggaggacuggcucgacgacgacucccagcagaccgugggccagcaggacgggagcgaggacaaccagaccacgaccauccagaccaucguggagguccagccccagcuggagauggagcugacccccguggugcagacgaucgaggucaacuccuucagcggcuaccucaagcugaccgacaacguguacaucaagaacgccgacaucguggaggaggcgaagaaggucaagccgaccgugguggucaacgccgccaacguguaccugaagcacgggggcggcguggccggggcccucaacaaggcgaccaacaacgccaugcaggucgaguccgacgacuacaucgccacgaacggcccccugaagguggggggcagcugcguccuguccggccacaaccucgccaagcacugccugcacgugguggggcccaacgucaacaagggcgaggacauccagcugcucaagagcgccuacgagaacuucaaccagcacgaggugcugcuggcgccccuccuguccgccgggaucuucggcgccgacccgauccacagccugcgggugugcgucgacaccgugcgcaccaacguguaccucgccgucuucgacaagaaccuguacgacaagcugguguccagcuuccucgagaugaagagcgagaagcagguggagcagaagaucgccgagauccccaaggaggaggucaagcccuucaucaccgaguccaagcccagcguggagcagcggaagcaggacgacaagaagaucaaggcgugcguggaggaggucacgaccacccuggaggagaccaaguuccugacggagaaccuccugcuguacaucgacaucaacgggaaccuccacccggacuccgccacccuggugagcgacaucgacaucaccuuccugaagaaggacgcccccuacaucgugggcgacgucgugcaggagggcgugcucaccgccgucgugauccccacgaagaaggccgggggcaccaccgagaugcuggcgaaggcccugcgcaaggugcccaccgacaacuacaucacgaccuacccggggcagggccucaacggguacaccgucgaggaggccaagaccgugcugaagaagugcaaguccgccuucuacauccugcccagcaucaucuccaacgagaagcaggagauccucggcaccgugagcuggaaccugcgggagaugcuggcgcacgccgaggagacgcgcaagcugaugcccgucugcguggagaccaaggccaucguguccaccauccagcggaaguacaagggcaucaagauccaggagggggucguggacuacggcgcccgcuucuacuucuacaccagcaagacgaccguggccucccucaucaacacccugaacgaccugaacgagacccucgucacgaugccccugggguacgugacccacggccugaaccucgaggaggcggcccgguacaugcgcagccugaaggugccggccaccgucuccgugagcucccccgacgccgugaccgccuacaacggguaccugacgagcuccagcaagacccccgaggagcacuucaucgagaccaucucccucgcgggcagcuacaaggacuggagcuacuccggccagagcacccagcuggggaucgaguuccugaagcggggcgacaaguccgucuacuacacgagcaaccccaccaccuuccaccucgacggggaggugaucaccuucgacaaccugaagacgcugcucucccugcgcgaggugcggaccaucaaggucuucaccaccguggacaacaucaaccugcacacgcagguggucgacaugagcaugaccuacggccagcaguucggcccgaccuaccucgacggggccgacgugaccaagaucaagccccacaacucccacgagggcaagacguucuacgugcugcccaacgacgacacccugcgcgucgaggccuucgaguacuaccacaccaccgacccgagcuuccucgggcgguacauguccgcccugaaccacacgaagaaguggaaguacccccaggugaacggccugaccagcaucaagugggccgacaacaacugcuaccucgcgaccgcccugcugacccuccagcagaucgagcugaaguucaacucccccgcccugcaggacgccuacuaccgcgcgcgggccggggaggccgccaacuucugcgcccucauccuggcguacugcaacaagacggugggcgagcugggcgacguccgcgagaccaugagcuaccucuuccagcacgccaaccuggacuccugcaagcgggugcugaacgucgugugcaagaccugcgggcagcagcagaccacccucaagggcguggaggccgucauguacauggggacgcugagcuacgagcaguucaagaagggcgugcagauccccugcaccugcgggaagcaggccaccaaguaccuggugcagcaggaguccccguucgucaugaugagcgccccccccgcgcaguacgagcucaagcacggcaccuucacgugcgccuccgaguacaccggcaacuaccagugcgggcacuacaagcacaucaccagcaaggagacccuguacugcaucgacggcgcccugcucacgaagagcuccgaguacaaggggcccaucaccgacguguucuacaaggagaacagcuacaccaccacgaucaagccggugaccuacaagcuggacggcgucgugugcaccgagaucgaccccaagcuggacaacuacuacaagaaggacaacuccuacuucaccgagcagcccaucgaccucgugcccaaccagccguaccccaacgccagcuucgacaacuucaaguucgucugcgacaacaucaaguucgccgacgaccugaaccagcugacgggguacaagaagcccgcgucccgcgagcucaaggugaccuucuuccccgaccugaacggcgacguggucgccaucgacuacaagcacuacaccccgagcuucaagaagggcgccaagcugcuccacaagcccaucguguggcacgugaacaacgccaccaacaaggcgacguacaagcccaacaccuggugcauccggugccugugguccaccaagcccgucgagaccagcaacuccuucgacgugcugaagagcgaggacgcccaggggauggacaaccucgccugcgaggaccugaagccgguguccgaggaggucguggagaaccccacgauccagaaggacgugcuggagugcaacgucaagaccaccgagguggugggcgacaucauccucaagcccgccaacaacagccugaagaucaccgaggaggucgggcacacggaccugauggccgcguacguggacaacuccagccucaccaucaagaagcccaacgagcugucccgcgugcugggccucaagacccuggccacccacgggcuggccgccgucaacagcgugccgugggacacgaucgccaacuacgcgaagcccuuccucaacaagguggucuccaccaccaccaacaucgugacgcgcugccugaaccgggugugcaccaacuacaugcccuacuucuucacccugcuccugcagcugugcaccuucacccgcagcacgaacucccggaucaaggccagcaugccgaccaccaucgccaagaacaccgucaagagcgugggcaaguucugccucgaggccuccuucaacuaccugaagagccccaacuucuccaagcugaucaacaucaucaucugguuccuccugcugagcgugugccucggcucccugaucuacagcacggccgcgcuggggguccucauguccaaccugggcaugcccagcuacugcaccggguaccgcgagggcuaccugaacuccaccaacgugaccaucgccacguacugcaccggcagcauccccugcuccgugugccucagcgggcuggacucccuggacaccuacccgagccucgagaccauccagaucacgaucuccagcuucaagugggaccugaccgccuucggccuggucgccgagugguuccucgccuacauccuguucacccgguucuucuacgugcuggggcucgcggccaucaugcagcuguucuucuccuacuucgccgugcacuucaucagcaacuccuggcugauguggcugaucaucaaccucguccagauggcccccaucagcgcgauggugcgcauguacaucuucuucgccagcuucuacuacguguggaaguccuacguccacgugguggacggcugcaacagcuccaccugcaugaugugcuacaagcggaaccgcgccacgcgggucgagugcaccaccaucgugaacgggguccgccggagcuucuacguguacgccaacggcggcaagggguucugcaagcugcacaacuggaacugcgugaacugcgacaccuucugcgccggcuccacguucaucagcgacgaggucgcgcgcgaccugucccuccaguucaagcggcccaucaaccccaccgaccagagcuccuacaucguggacagcgugaccgucaagaacggguccauccaccuguacuucgacaaggccggccagaagaccuacgagcgccacagccugucccacuucgugaaccucgacaaccugcgggccaacaacacgaaggggagccugccgaucaacgugaucgucuucgacggcaaguccaagugcgaggagagcuccgccaagagcgccuccguguacuacagccagcucaugugccagcccauccugcugcucgaccaggcgcuggugagcgacgucggcgacuccgccgagguggccgugaagauguucgacgccuacgucaacaccuucagcuccaccuucaacgugcccauggagaagcugaagacccucguggccacggcggaggccgagcuggccaagaacgucagccuggacaacgugcucuccaccuucaucagcgccgcgcgccagggguucguggacuccgacgucgagaccaaggacgugguggagugccugaagcugagccaccaguccgacaucgaggucaccggcgacagcugcaacaacuacaugcucacguacaacaagguggagaacaugaccccccgggaccugggggccugcaucgacugcuccgcccgccacaucaacgcccagguggccaagagccacaacaucgcgcugaucuggaacgucaaggacuucaugucccucagcgagcagcugcggaagcagauccgcuccgccgccaagaagaacaaccugccguucaagcucaccugcgccaccacgcgccagguggugaacgucgugaccaccaagaucgcccugaagggcgggugaggacuagucccuguucccagagcccacuuuuuuuucuuuuuuugaaauaaaauagccugucuuucagaucucaaaggcucuuuucagagccaccaaaaaaaaaaaaaaaaaaaaaaaaaaaaaaaaaaaaaaaaaaaaaaaaaaaaaaaaaaaaaaaaaaaaaaaaaaaaaaaaaaaaaaaaaaaaaaaaaaaaa

SEQ ID NO: 20115 - RNA, 6113 nt, Artificial Sequence
  SARS-CoV-2__MT385436.1__non-structural protein 3 (NSP3) mRNA gc
aggagagucccgcagucggcguccagcggcucugcuuguucgugugugugucguugcaggccuuauucaagcuuaccauggcccccaccaaggugaccuucggcgacgacacggucaucgaggugcagggguacaagagcgugaacaucaccuucgagcuggacgagcgcaucgacaagguccucaacgagaagugcuccgccuacaccguggagcugggcaccgaggugaacgaguucgcgugcgucgugacggacgccgugaucaagacccugcagccggucagcgagcuccugaccccccuggggaucgaccucgacgagugguccauggccaccuacuaccuguucgacgagagcggcgaguucaagcuggccucccacauguacugcagcuucuacccccccgacgaggacgaggaggagggggacugcgaggaggaggaguucgagccguccacgcaguacgaguacggcaccgaggacgacuaccagggcaagccccucgaguucggggccaccagcgcggcccugcagcccgaggaggagcaggaggaggacuggcuggacgacgacucccagcagaccgugggccagcaggacgggagcgaggacaaccagacgaccaccauccagaccaucguggagguccagccccagcucgagauggagcugacgccgguggugcagaccaucgaggucaacuccuucagcggcuaccugaagcucaccgacaacguguacaucaagaacgccgacaucguggaggaggccaagaaggucaagcccaccgugguggucaacgcggccaacguguaccugaagcacgggggcggcguggccggggcccugaacaaggccacgaacaacgcgaugcaggucgaguccgacgacuacaucgccaccaacggcccccucaagguggggggcagcugcguccuguccggccacaaccuggccaagcacugccuccacgugguggggcccaacgucaacaagggcgaggacauccagcugcugaagagcgccuacgagaacuucaaccagcacgaggugcuccuggccccgcugcucuccgcggggaucuucggcgccgaccccauccacagccugcgggugugcgucgacaccgugcgcaccaacguguaccuggccgucuucgacaagaaccucuacgacaagcugguguccagcuuccuggagaugaagagcgagaagcagguggagcagaagaucgccgagauccccaaggaggaggucaagcccuucaucacggaguccaagccgagcguggagcagcggaagcaggacgacaagaagaucaaggccugcguggaggaggucaccaccacccucgaggagacgaaguuccugaccgagaaccugcuccuguacaucgacaucaacgggaaccugcaccccgacuccgcgacccucgugagcgacaucgacaucaccuuccugaagaaggacgcccccuacaucgugggcgacgucgugcaggagggcgugcugacggccgucgugauccccaccaagaaggccgggggcaccaccgagaugcucgccaaggcgcugcgcaaggugccgacggacaacuacaucaccaccuaccccgggcagggccugaacggguacaccgucgaggaggccaagaccgugcucaagaagugcaaguccgccuucuacauccugcccagcaucaucuccaacgagaagcaggagauccugggcacggugagcuggaaccuccgggagaugcuggcccacgcggaggagacccgcaagcugaugcccgucugcguggagaccaaggccaucguguccaccauccagcggaaguacaagggcaucaagauccaggagggggucguggacuacggcgcccgcuucuacuucuacacgagcaagaccaccguggccucccugaucaacacccucaacgaccugaacgagacgcuggucaccaugccgcucggguacgugacccacggccugaaccuggaggaggccgcgcgguacaugcgcagccucaaggugcccgccaccgucuccgugagcucccccgacgccgugacggccuacaacggguaccugaccagcuccagcaagacccccgaggagcacuucaucgagaccaucucccuggccggcagcuacaaggacuggagcuacuccggccagagcacgcagcucgggaucgaguuccugaagcggggcgacaaguccgucuacuacaccagcaacccgaccaccuuccaccuggacggggaggugaucacguucgacaaccucaagacccugcugucccuccgcgaggugcggaccaucaaggucuucaccacgguggacaacaucaaccugcacacccagguggucgacaugagcaugaccuacggccagcaguucggccccaccuaccuggacggggcggacgugacgaagaucaagccccacaacucccacgagggcaagaccuucuacgugcucccgaacgacgacacccugcgcgucgaggccuucgaguacuaccacaccacggaccccagcuuccuggggcgguacauguccgcccucaaccacaccaagaaguggaaguacccccaggugaacggccugaccagcaucaagugggccgacaacaacugcuaccuggccaccgcgcuccugacgcugcagcagaucgagcucaaguucaaccccccggcccugcaggacgccuacuaccgcgcccgggcgggggaggccgccaacuucugcgcccugauccucgccuacugcaacaagaccgugggcgagcugggcgacguccgcgagaccauguccuaccuguuccagcacgcgaaccucgacagcugcaagcgggugcugaacgucgugugcaagaccugcgggcagcagcagaccacgcugaagggcguggaggccgucauguacauggggacccucuccuacgagcaguucaagaagggcgugcagauccccugcaccugcgggaagcaggccaccaaguaccuggugcagcaggagagccccuucgucaugauguccgcccccccggcccaguacgagcugaagcacggcacguucaccugcgcgagcgaguacaccggcaacuaccagugcgggcacuacaagcacaucaccuccaaggagacgcucuacugcaucgacggcgcccugcugaccaagagcagcgaguacaaggggcccaucaccgacguguucuacaaggagaacuccuacaccacgaccaucaagcccgugaccuacaagcucgacggcgucgugugcaccgagaucgaccccaagcuggacaacuacuacaagaaggacaacagcuacuucacggagcagccgaucgaccuggugcccaaccagcccuaccccaacgccuccuucgacaacuucaaguucgucugcgacaacaucaaguucgccgacgaccucaaccagcugaccggguacaagaagccggccagccgcgagcugaaggugaccuucuuccccgaccucaacggcgacguggucgcgaucgacuacaagcacuacacccccuccuucaagaagggcgccaagcugcugcacaagcccaucguguggcacgugaacaacgccacgaacaaggccaccuacaagccgaacaccuggugcauccggugccucuggagcaccaagcccgucgagacguccaacagcuucgacgugcugaaguccgaggacgcgcaggggauggacaaccuggccugcgaggaccucaagcccgugagcgaggaggucguggagaaccccaccauccagaaggacgugcuggagugcaacgucaagaccaccgagguggugggcgacaucauccugaagccggccaacaacucccucaagaucacggaggaggucgggcacaccgaccugauggccgccuacguggacaacagcucccugaccaucaagaagcccaacgagcucagccgcgugcugggccugaagacccucgcgacgcacgggcuggccgccgucaacuccgugcccugggacaccaucgccaacuacgccaagccguuccugaacaagguggucagcaccaccacgaacaucgugacccgcugccucaaccgggugugcaccaacuacaugcccuacuucuucacccugcugcuccagcugugcaccuucacgcgcuccaccaacagccggaucaaggcguccaugcccaccaccaucgccaagaacacggucaagagcgugggcaaguucugccuggaggccagcuucaacuaccucaagucccccaacuucagcaagcuggugaacaucaucaucugguuccugcuccuguccgucugccugggcagccucaucuacuccaccgccgcccugggggugcugaugagcaaccucggcaugccguccuacugcaccggguaccgcgagggcuaccugaacagcaccaacgugacgaucgcgaccuacugcaccggcuccauccccugcagcgucugccuguccgggcucgacagccuggacaccuaccccucccuggagacgauccagaucaccaucagcuccuucaagugggaccucaccgccuucggccugguggccgagugguuccuggccuacauccucuucacccgguucuucuacgugcuggggcuggccgcgaucaugcagcucuucuucagcuacuucgccguccacuucaucuccaacagcuggcugauguggcugaucaucaaccuggugcagauggcccccaucuccgccauggugcgcauguacaucuucuucgcgagcuucuacuacgucuggaagagcuacgugcacguggucgacggcugcaacuccagcacgugcaugaugugcuacaagcggaaccgcgccacccggguggagugcaccaccaucgucaacggggugcgccgguccuucuacguguacgccaacggcggcaagggguucugcaagcuccacaacuggaacugcgucaacugcgacacguucugcgccggcagcaccuucaucuccgacgagguggcccgcgaccugagccugcaguucaagcggccgaucaaccccaccgaccaguccagcuacaucguggacuccgucaccgugaagaacgggagcauccaccucuacuucgacaaggcgggccagaagacguacgagcgccacucccugagccacuucgugaaccuggacaaccuccgggccaacaacaccaaggggucccugcccaucaacgucaucguguucgacggcaagagcaagugcgaggaguccagcgccaaguccgccagcguguacuacucccagcugaugugccagcccauccuccugcuggaccaggcccucgucagcgacgugggcgacagcgcggagguggccgucaagauguucgacgccuacgugaacaccuucuccagcaccuucaacgugccgauggagaagcugaagacgcuggucgccaccgccgaggcggagcucgccaagaacgugucccuggacaacgugcugagcaccuucaucuccgccgcccgccagggguucgucgacagcgacguggagaccaaggacguggucgagugccucaagcugucccaccagagcgacaucgaggugacgggcgacuccugcaacaacuacaugcugaccuacaacaagguggagaacaugaccccccgggaccucggggcgugcaucgacugcagcgcccgccacaucaacgcccaggucgccaagucccacaacaucgcccugaucuggaacgugaaggacuucaugagccuguccgagcagcuccggaagcagauccgcagcgcggccaagaagaacaaccugcccuucaagcugaccugcgccacgacccgccagguggucaacguggugaccaccaagaucgcccucaagggcgggugaggacuagucccuguucccagagcccacuuuuuuuucuuuuuuugaaauaaaauagccugucuuucagaucucaaaggcucuuuucagagccaccaaaaaaaaaaaaaaaaaaaaaaaaaaaaaaaaaaaaaaaaaaaaaaaaaaaaaaaaaaaaaaaaaaaaaaaaaaaaaaaaaaaaaaaaaaaaaaaaaaaaa

SEQ ID NO: 20116 - RNA, 6113 nt, Artificial Sequence
  SARS-CoV-2__MT385454.1__non-structural protein 3 (NSP3) mRNA gc
aggagagucccgcagucggcguccagcggcucugcuuguucgugugugugucguugcaggccuuauucaagcuuaccauggcccccaccaaggugaccuucggcgacgacacggucaucgaggugcagggguacaagagcgugaacaucaccuucgagcuggacgagcgcaucgacaagguccucaacgagaagugcuccgccuacaccguggagcugggcaccgaggugaacgaguucgcgugcgucguggccgacgccgugaucaagacgcugcagccggucagcgagcuccugaccccccuggggaucgaccucgacgagugguccauggccaccuacuaccuguucgacgagagcggcgaguucaagcuggccucccacauguacugcagcuucuacccccccgacgaggacgaggaggagggggacugcgaggaggaggaguucgagccguccacccaguacgaguacggcacggaggacgacuaccagggcaagccccucgaguucggggcgaccagcgccgcccugcagcccgaggaggagcaggaggaggacuggcuggacgacgacucccagcagaccgugggccagcaggacgggagcgaggacaaccagaccacgaccauccagaccaucguggagguccagccccagcucgagauggagcugaccccgguggugcagacgaucgaggucaacuccuucagcggcuaccugaagcucaccgacaacguguacaucaagaacgccgacaucguggaggaggcgaagaaggucaagcccaccgugguggucaacgccgccaacguguaccugaagcacgggggcggcguggccggggcccugaacaaggcgaccaacaacgccaugcaggucgaguccgacgacuacaucgccacgaacggcccccucaagguggggggcagcugcguccuguccggccacaaccuggccaagcacugccuccacgugguggggcccaacgucaacaagggcgaggacauccagcugcugaagagcgccuacgagaacuucaaccagcacgaggugcuccuggcgccgcugcucuccgccgggaucuucggcgccgaccccauccacagccugcgggugugcgucgacaccgugcgcaccaacguguaccuggccgucuucgacaagaaccucuacgacaagcugguguccagcuuccuggagaugaagagcgagaagcagguggagcagaagaucgccgagauccccaaggaggaggucaagcccuucaucaccgaguccaagccgagcguggagcaggacgacaagaagaucaaggcgugcguggaggaggucacgaccacccucgaggagaccaaguuccugacggagaaccugcuccuguacaucgacaucaacgggaaccugcaccccgacuccgccacccucgugagcgacaucgacaucaccuuccugaagaaggacgcccccuacaucgugggcgacgucgugcaggagggcgugcugaccgccgucgugauccccacgaagaaggccgggggcaccaccgagaugcucgcgaaggcccugcggaaggugccgaccgacaacuacaucacgaccuaccccgggcagggccugaacggguacaccgucgaggaggccaagaccgugcucaagaagugcaaguccgccuucuacauccugcccagcaucaucuccaacgagaagcaggagauccugggcaccgugagcuggaaccuccgcgagaugcuggcgcacgccgaggagacgcggaagcugaugcccgucugcguggagaccaaggccaucguguccaccauccagcgcaaguacaagggcaucaagauccaggagggggucguggacuacggcgcccgguucuacuucuacaccagcaagacgaccguggccucccugaucaacacccucaacgaccugaacgagacccuggucacgaugccgcucggguacgugacccacggccugaaccuggaggaggcggcccgcuacaugcggagccucaaggugcccgccaccgucuccgugagcucccccgacgccgugaccgccuacaacggguaccugacgagcuccagcaagacccccgaggagcacuucaucgagaccaucucccuggcgggcagcuacaaggacuggagcuacuccggccagagcacccagcucgggaucgaguuccugaagcgcggcgacaaguccgucuacuacacgagcaacccgaccaccuuccaccuggacggggaggugaucaccuucgacaaccucaagacgcugcugucccuccgggaggugcgcaccaucaaggucuucaccaccguggacaacaucaaccugcacacgcagguggucgacaugagcaugaccuacggccagcaguucggccccaccuaccuggacggggccgacgugaccaagaucaagccccacaacucccacgagggcaagacguucuacgugcucccgaacgacgacacccugcgggucgaggccuucgaguacuaccacaccaccgaccccagcuuccuggggcgcuacauguccgcccucaaccacacgaagaaguggaaguacccccaggugaacggccugaccagcaucaagugggccgacaacaacugcuaccuggcgaccgcccuccugacccugcagcagaucgagcucaaguucaaccccccggcccugcaggacgccuacuaccgggcgcgcgccggggaggccgccaacuucugcgcccugauccucgcguacugcaacaagacggugggcgagcugggcgacguccgggagaccauguccuaccuguuccagcacgccaaccucgacagcugcaagcgcgugcugaacgucgugugcaagaccugcgggcagcagcagaccacccugaagggcguggaggccgucauguacauggggacgcucuccuacgagcaguucaagaagggcgugcagauccccugcaccugcgggaagcaggccaccaaguaccuggugcagcaggagagccccuucgucaugauguccgcccccccggcgcaguacgagcugaagcacggcaccuucacgugcgccagcgaguacaccggcaacuaccagugcgggcacuacaagcacaucaccuccaaggagacccucuacugcaucgacggcgcccugcugacgaagagcagcgaguacaaggggcccaucaccgacguguucuacaaggagaacuccuacaccaccacgaucaagcccgugaccuacaagcucgacggcgucgugugcaccgagaucgaccccaagcuggacaacuacuacaagaaggacaacagcuacuucaccgagcagccgaucgaccuggugcccaaccagcccuaccccaacgccuccuucgacaacuucaaguucgucugcgacaacaucaaguucgccgacgaccucaaccagcugacgggguacaagaagccggcgagccgggagcugaaggugaccuucuuccccgaccucaacggcgacguggucgccaucgacuacaagcacuacacccccuccuucaagaagggcgccaagcugcugcacaagcccaucguguggcacgugaacaacgccaccaacaaggcgacguacaagccgaacaccuggugcauccgcugccucuggagcaccaagcccgucgagaccuccaacagcuucgacgugcugaaguccgaggacgcccaggggauggacaaccuggccugcgaggaccucaagcccgugagcgaggaggucguggagaaccccacgauccagaaggacgugcuggagugcaacgucaagaccaccgagguggugggcgacaucauccugaagccggccaacaacucccucaagaucaccgaggaggucgggcacacggaccugauggccgcguacguggacaacagcucccugaccaucaagaagcccaacgagcucagccgggugcugggccugaagacccucgccacccacgggcuggccgccgucaacuccgugcccugggacacgaucgccaacuacgcgaagccguuccugaacaagguggucagcaccaccaccaacaucgugacgcgcugccucaaccgcgugugcaccaacuacaugcccuacuucuucacccugcugcuccagcugugcaccuucacccgguccacgaacagccgcaucaaggccuccaugcccaccaccaucgccaagaacaccgucaagagcgugggcaaguucugccuggaggccagcuucaacuaccucaagucccccaacuucagcaagcugaucaacaucaucaucugguuccugcuccuguccgugugccugggcagccucaucuacuccacggccgcgcuggggguccugaugagcaaccucggcaugccguccuacugcaccggguaccgggagggcuaccugaacagcaccaacgugaccaucgccacguacugcaccggcuccauccccugcagcgugugccuguccgggcucgacagccuggacaccuaccccucccuggagaccauccagaucacgaucagcuccuucaagugggaccucaccgccuucggccuggucgccgagugguuccuggccuacauccucuucacccgcuucuucuacgugcuggggcuggcggccaucaugcagcucuucuucagcuacuucgccgugcacuucaucuccaacagcuggcugauguggcugaucaucaaccugguccagauggcccccaucuccgcgauggugcggauguacaucuucuucgccagcuucuacuacguguggaagagcuacguccacgugguggacggcugcaacuccagcaccugcaugaugugcuacaagcgcaaccgggccacgcgcgucgagugcaccaccaucgugaacgggguccggcgcuccuucuacguguacgccaacggcggcaagggguucugcaagcuccacaacuggaacugcgugaacugcgacaccuucugcgccggcagcacguucaucuccgacgaggucgcgcgggaccugagccugcaguucaagcgcccgaucaaccccaccgaccaguccagcuacaucguggacuccgugaccgucaagaacgggagcauccaccucuacuucgacaaggccggccagaagaccuacgagcggcacucccugagccacuucgugaaccuggacaaccuccgcgccaacaacacgaaggggucccugcccaucaacgugaucgucuucgacggcaagagcaagugcgaggaguccagcgccaaguccgccagcguguacuacucccagcugaugugccagcccauccuccugcuggaccaggcgcucgugagcgacgucggcgacagcgccgagguggccgugaagauguucgacgccuacgucaacaccuucuccagcaccuucaacgugccgauggagaagcugaagacccugguggccacggcggaggccgagcucgccaagaacgucucccuggacaacgugcugagcaccuucaucuccgccgcgcggcagggguucguggacagcgacgucgagaccaaggacgugguggagugccucaagcugucccaccagagcgacaucgaggucaccggcgacuccugcaacaacuacaugcugacguacaacaagguggagaacaugaccccccgcgaccucggggccugcaucgacugcagcgcccggcacaucaacgcccagguggccaagucccacaacaucgcgcugaucuggaacgucaaggacuucaugagccuguccgagcagcuccgcaagcagauccggagcgccgccaagaagaacaaccugcccuucaagcugaccugcgccaccacgcgccagguggugaacgucgugaccaccaagaucgcccucaagggcgggaagaucgugugaggacuagucccuguucccagagcccacuuuuuuuucuuuuuuugaaauaaaauagccugucuuucagaucucaaaggcucuuuucagagccaccaaaaaaaaaaaaaaaaaaaaaaaaaaaaaaaaaaaaaaaaaaaaaaaaaaaaaaaaaaaaaaaaaaaaaaaaaaaaaaaaaaaaaaaaaaaaaaaaaaaaa

SEQ ID NO: 20117 - RNA, 6113 nt, Artificial Sequence
  SARS-CoV-2__MT385461.1__non-structural protein 3 (NSP3) mRNA gc
aggagagucccgcagucggcguccagcggcucugcuuguucgugugugugucguugcaggccuuauucaagcuuaccauggcccccaccaaggugaccuucggcgacgacacggucaucgaggugcagggguacaagagcgugaacaucaccuucgagcuggacgagcgcaucgacaagguccucaacgagaagugcuccgccuacaccguggagcugggcaccgaggugaacgaguucgcgugcgucguggccgacgccgugaucaagacgcugcagccggucagcgagcuccugaccccccuggggaucgaccucgacgagugguccauggccaccuacuaccuguucgacgagagcggcgaguucaagcuggccucccacauguacugcagcuucuacccccccgacgaggacgaggaggagggggacugcgaggaggaggaguucgagccguccacccaguacgaguacggcacggaggacgacuaccagggcaagccccucgaguucggggcgaccagcgccgcccugcagcccgaggaggagcaggaggaggacuggcuggacgacgacucccagcagaccgugggccagcaggacgggagcgaggacaaccagaccacgaccauccagaccaucguggagguccagccccagcucgagauggagcugaccccgguggugcagacgaucgaggucaacuccuucagcggcuaccugaagcucaccgacaacguguacaucaagaacgccgacaucguggaggaggcgaagaaggucaagcccaccgugguggucaacgccgccaacguguaccugaagcacgggggcggcguggccggggcccugaacaaggcgaccaacaacgccaugcaggucgaguccgacgacuacaucgccacgaacggcccccucaagguggggggcagcugcguccuguccggccacaaccuggccaagcacugccuccacgugguggggcccaacgucaacaagggcgaggacauccagcugcugaagagcgccuacgagaacuucaaccagcacgaggugcuccuggcgccgcugcucuccgccgggaucuucggcgccgaccccauccacagccugcgggugugcgucgacaccgugcgcaccaacguguaccuggccgucuucgacaagaaccucuacgacaagcugguguccagcuuccuggagaugaagagcgagaagcagguggagcagaagaucgccgagauccccaaggaggaggucaagcccuucaucaccgaguccaagccgagcguggagcagcggaagcaggacgacaagaagaucaaggcgugcguggaggaggucacgaccacccucgaggagaccaaguuccugacggagaaccugcuccuguacaucgacaucaacgggaaccugcaccccgacuccgccacccucgugagcgacaucgacaucaccuuccugaagaaggacgcccccuacaucgugggcgacgucgugcaggagggcgugcugaccgccgucgugauccccacgaagaaggccgggggcaccaccgagaugcucgcgaaggcccugcgcaaggugccgaccgacaacuacaucacgaccuaccccgggcagggccugaacggguacaccgucgaggaggccaagaccgugcucaagaagugcaaguccgccuucuacauccugcccagcaucaucuccaacgagaagcaggagauccugggcaccgugagcuggaaccuccgggagaugcuggcgcacgccgaggagacgcgcaagcugaugcccgucugcguggagaccaaggccaucguguccaccauccagcggaaguacaagggcaucaagauccaggagggggucguggacuacggcgcccgcuucuacuucuacaccagcaagacgaccguggccucccugaucaacacccucaacgaccugaacgagacccuggucacgaugccgcucggguacgugacccacggccugaaccuggaggaggcggcccgguacaugcgcagccucaaggugcccgccaccgucuccgugagcucccccgacgccgugaccgccuacaacggguaccugacgagcuccagcaagacccccgaggagcacuucaucgagaccaucucccuggcgggcagcuacaaggacuggagcuacuccggccagagcacccagcucgggaucgaguuccugaagcggggcgacaaguccgucuacuacacgagcaacccgaccaccuuccaccuggacggggaggugaucaccuucgacaaccucaagacgcugcugucccuccgcgaggugcggaccaucaaggucuucaccaccguggacaacaucaaccugcacacgcagguggucgacaugagcaugaccuacggccagcaguucggccccaccuaccuggacggggccgacgugaccaagaucaagccccacaacucccacgagggcaagacguucuacgugcucccgaacgacgacacccugcgcgucgaggccuucgaguacuaccacaccaccgaccccagcuuccuggggcgguacauguccgcccucaaccacacgaagaaguggaaguacccccaggugaacggccugaccagcaucaagugggccgacaacaacugcuaccuggcgaccgcccuccugacccugcagcagaucgagcucaaguucaaccccccggcccugcaggacgccuacuaccgcgcgcgggccggggaggccgccaacuucugcgcccugauccucgcguacugcaacaagacggugggcgagcugggcgacguccgcgagaccauguccuaccuguuccagcacgccaaccucgacagcugcaagcgggugcugaacgucgugugcaagaccugcgggcagcagcagaccacccugaagggcguggaggccgucauguacauggggacgcucuccuacgagcaguucaagaagggcgugcagauccccugcaccugcgggaagcaggccaccaaguaccuggugcagcaggagagccccuucgucaugauguccgcccccccggcgcaguacgagcugaagcacggcaccuucacgugcgccagcgaguacaccggcaacuaccagugcgggcacuacaagcacaucaccuccaaggagacccucuacugcaucgacggcgcccugcugacgaagagcagcgaguacaaggggcccaucaccgacguguucuacaaggagaacuccuacaccaccacgaucaagcccgugaccuacaagcucgacggcgucgugugcaccgagaucgaccccaagcuggacaacuacuacaagaaggacaacagcuacuucaccgagcagccgaucgaccuggugcccaaccagcccuaccccaacgccuccuucgacaacuucaaguucgucugcgacaacaucaaguucgccgacgaccucaaccagcugacgggguacaagaagccggcgagccgcgagcugaaggugaccuucuuccccgaccucaacggcgacguggucgccaucgacuacaagcacuacacccccuccuucaagaagggcgccaagcugcugcacaagcccaucguguggcacgugaacaacgccaccaacaaggcgacguacaagccgaacaccuggugcauccggugccucuggagcaccaagcccgucgagaccuccaacagcuucgacgugcugaaguccgaggacgcccaggggauggacaaccuggccugcgaggaccucaagcccgugagcgaggaggucguggagaaccccacgauccagaaggacgugcuggagugcaacgucaagaccaccgagguggugggcgacaucauccugaagccggccaacaacucccucaagaucaccgaggaggucgggcacacggaccugauggccgcguacguggacaacagcucccugaccaucaagaagcccaacgagcucagccgcgugcugggccugaagacccucgccacccacgggcuggccgccgucaacuccgugcccugggacacgaucgccaacuacgcgaagccguuccugaacaagguggucagcaccaccaccaacaucgugacgcgcugccucaaccgggugugcaccaacuacaugcccuacuucuucacccugcugcuccagcugugcaccuucacccgcuccacgaacagccggaucaaggccuccaugcccaccaccaucgccaagaacaccgucaagagcgugggcaaguucugccuggaggccagcuucaacuaccucaagucccccaacuucagcaagcugaucaacaucaucaucugguuccugcuccuguccgugugccugggcagccucaucuacuccacggccgcgcuggggguccugaugagcaaccucggcaugccguccuacugcaccggguaccgcgagggcuaccugaacagcaccaacgugaccaucgccacguacugcaccggcuccauccccugcagcgugugccuguccgggcucgacagccuggacaccuaccccucccuggagaccauccagaucacgaucagcuccuucaagugggaccucaccgccuucggccuggucgccgagugguuccuggccuacauccucuucacccgguucuucuacgugcuggggcuggcggccaucaugcagcucuucuucagcuacuucgccgugcacuucaucuccaacagcuggcugauguggcugaucaucaaccugguccagauggcccccaucuccgcgauggugcgcauguacaucuucuucgccagcuucuacuacguguggaagagcuacguccacgugguggacggcugcaacuccagcaccugcaugaugugcuacaagcggaaccgcgccacgcgggucgagugcaccaccaucgugaacgggguccgccgguccuucuacguguacgccaacggcggcaagggguucugcaagcuccacaacuggaacugcgugaacugcgacaccuucugcgccggcagcacguucaucuccgacgaggucgcgcgcgaccugagccugcaguucaagcggccgaucaaccccaccgaccaguccagcuacaucguggacuccgugaccgucaagaacgggagcauccaccucuacuucgacaaggccggccagaagaccuacgagcgccacucccugagccacuucgugaaccuggacaaccuccgggccaacaacacgaaggggucccugcccaucaacgugaucgucuucgacggcgagagcaagugcgaggaguccagcgccaaguccgccagcguguacuacucccagcugaugugccagcccauccuccugcuggaccaggcgcucgugagcgacgucggcgacagcgccgagguggccgugaagauguucgacgccuacgucaacaccuucuccagcaccuucaacgugccgauggagaagcugaagacccugguggccacggcggaggccgagcucgccaagaacgucucccuggacaacgugcugagcaccuucaucuccgccgcgcgccagggguucguggacagcgacgucgagaccaaggacgugguggagugccucaagcugucccaccagagcgacaucgaggucaccggcgacuccugcaacaacuacaugcugacguacaacaagguggagaacaugaccccccgggaccucggggccugcaucgacugcagcgcccgccacaucaacgcccagguggccaagucccacaacaucgcgcugaucuggaacgucaaggacuucaugagccuguccgagcagcuccggaagcagauccgcagcgccgccaagaagaacaaccugcccuucaagcugaccugcgccaccacgcgccagguggugaacgucgugaccaccaagaucgcccucaagggcgggugaggacuagucccuguucccagagcccacuuuuuuuucuuuuuuugaaauaaaauagccugucuuucagaucucaaaggcucuuuucagagccaccaaaaaaaaaaaaaaaaaaaaaaaaaaaaaaaaaaaaaaaaaaaaaaaaaaaaaaaaaaaaaaaaaaaaaaaaaaaaaaaaaaaaaaaaaaaaaaaaaaaaa

SEQ ID NO: 20118 - RNA, 6113 nt, Artificial Sequence
  SARS-CoV-2__MT385465.1__non-structural protein 3 (NSP3) mRNA gc
aggagagucccgcagucggcguccagcggcucugcuuguucgugugugugucguugcaggccuuauucaagcuuaccauggcccccaccaaggugaccuucggcgacgacacggucaucgaggugcagggguacaagagcgugaacaucaccuucgagcuggacgagcgcaucgacaagguccucaacgagaagugcuccgccuacaccguggagcugggcaccgaggugaacgaguucgcgugcgucguggccgacgccgugaucaagacgcugcagccggucagcgagcuccugaccccccuggggaucgaccucgacgagugguccauggccaccuacuaccuguucgacgagagcggcgaguucaagcuggccucccacauguacugcagcuucuacccccccgacgaggacgaggaggagggggacugcgaggaggaggaguucgagccguccacccaguacgaguacggcacggaggacgacuaccagggcaagccccucgaguucggggcgaccagcgccgcccugcagcccgaggaggagcaggaggaggacuggcuggacgacgacucccagcagaccgugggccagcaggacgggagcgaggacaaccagaccacgaccauccagaccaucguggagguccagccccagcucgagauggagcugaccccgguggugcagacgaucgaggucaacuccuucagcggcuaccugaagcucaccgacaacguguacaucaagaacgccgacaucguggaggaggcgaagaaggucaagcccaccgugguggucaacgccgccaacguguaccugaagcacgggggcggcguggccggggcccugaacaaggcgaccaacaacgccaugcaggucgaguccgacgacuacaucgccacgaacggcccccucaagguggggggcagcugcguccuguccggccacaaccuggccaagcacugccuccacgugguggggcccaacgucaacaagggcgaggacauccagcugcugaagagcgccuacgagaacuucaaccagcacgaggugcuccuggcgccgcugcucuccgccgggaucuucggcgccgaccccauccacagccugcgggugugcgucgacaccgugcgcaccaacguguaccuggccgucuucgacaagaaccucuacgacaagcugguguccagcuuccuggagaugaagagcgagaagcagguggagcagaagaucgccgagauccccaaggaggaggucaagcccuucaucaccgaguccaagccgagcguggagcagcggaagcaggacgacaagaagaucaaggcgugcguggaggaggucacgaccacccucgaggagaccaaguuccugacggagaaccugcuccuguacaucgacaucaacgggaaccugcaccccgacuccgccacccucgugagcgacaucgacaucaccuuccugaagaaggacgcccccuacaucgugggcgacgucgugcaggagggcgugcugaccgccgucgugauccccacgaagaaggccgggggcaccaccgagaugcucgcgaaggcccugcgcaaggugccgaccgacaacuacaucacgaccuaccccgggcagggccugaacggguacaccgucgaggaggccaagaccgugcucaagaagugcaaguccgccuucuacauccugcccagcaucaucuccaacgagaagcaggagauccugggcaccgugagcuggaaccuccgggagaugcuggcgcacgccgaggagacgcgcaagcugaugcccgucugcguggagaccaaggccaucguguccaccauccagcggaaguacaagggcaucaagauccaggagggggucguggacuacggcgcccgcuucuacuucuacaccagcaagacgaccguggccucccugaucaacacccucaacgaccugaacgagacccuggucacgaugccgcucggguacgugacccacggccugaaccuggaggaggcggcccgguacaugcgcagccucaaggugcccgccaccgucuccgugagcucccccgacgccgugaccgccuacaacggguaccugacgagcuccagcaagacccccgaggagcacuucaucgagaccaucucccuggcgggcagcuacaaggacuggagcuacuccggccagagcacccagcucgggaucgaguuccugaagcggggcgacaaguccgucuacuacacgagcaacccgaccaccuuccaccuggacggggaggugaucaccuucgacaaccucaagacgcugcugucccuccgcgaggugcggaccaucaaggucuucaccaccguggacaacaucaaccugcacacgcagguggucgacaugagcaugaccuacggccagcaguucggccccaccuaccuggacggggccgacgugaccaagaucaagccccacaacucccacgagggcaagacguucuacgugcucccgaacgacgacacccugcgcgucgaggccuucgaguacuaccacaccaccgaccccagcuuccuggggcgguacauguccgcccucaaccacacgaagaaguggaaguacccccaggugaacggccugaccagcaucaagugggccgacaacaacugcuaccuggcgaccgcccuccugacccugcagcagaucgagcucaaguucaaccccccggcccugcaggacgccuacuaccgcgcgcgggccggggaggccgccaacuucugcgcccugauccucgcguacugcaacaagacggugggcgagcugggcgacguccgcgagaccauguccuaccuguuccagcacgccaaccucgacagcugcaagcgggugcugaacgucgugugcaagaccugcgggcagcagcagaccacccugaagggcguggaggccgucauguacauggggacgcucuccuacgagcaguucaagaagggcgugcagauccccugcaccugcgggaagcaggccaccaaguaccuggugcagcaggagagccccuucgucaugauguccgcccccccggcgcaguacgagcugaagcacggcaccuucacgugcgccagcgaguacaccggcaacuaccagugcgggcacuacaagcacaucaccuccaaggagacccucuacugcaucgacggcgcccugcugacgaagagcagcgaguacaaggggcccaucaccgacguguucuacaaggagaacuccuacaccaccacgaucaagcccgugaccuacaagcucgacggcgucgugugcaccgagaucgaccccaagcuggacaacuacuacaagaaggacaacagcuacuucaccgagcagccgaucgaccuggugcccaaccagcccuaccccaacgccuccuucgacaacuucaaguucgucugcgacaacaucaaguucgccgacgaccucaaccagcugacgggguacaagaagccggcgagccgcgagcugaaggugaccuucuuccccgaccucaacggcgacguggucgccaucgacuacaagcacuacacccccuccuucaagaagggcgccaagcugcugcacaagcccaucguguggcacgugaacaacgccaccaacaaggcgacguacaagccgaacaccuggugcauccggugccucuggagcaccaagcccgucgagaccuccaacagcuucgacgugcugaaguccgaggacgcccaggggauggacaaccuggccugcgaggaccucaagcccgugagcgaggaggucguggagaaccccacgauccagaaggacgugcuggagugcaacgucaagaccaccgagguggugggcgacaucauccugaagccggccaacaacucccucaagaucaccgaggaggucgggcacacggaccugauggccgcguacguggacaacagcucccugaccaucaagaagcccaacgagcucagccgcgugcugggccugaagacccucgccacccacgggcuggccgccgucaacuccgugcccugggacacgaucgccaacuacgcgaagccguuccugaacaagguggucagcaccaccaccaacaucgugacgcgcugccucaaccgggugugcaccaacuacaugcccuacuucuucacccugcugcuccagcugugcaccuucacccgcuccacgaacagccggaucaaggccuccaugcccaccaccaucgccaagaacaccgucaagagcgugggcaaguucugccuggaggccagcuucaacuaccucaagucccccaacuucagcaagcugaucaacaucaucaucugguuccugcuccuguccgugugccugggcagccucaucuacuccacggccgcgcuggggguccugaugagcaaccucggcaugccguccuacugcaccggguaccgcgagggcuaccugaacuucaccaacgugaccaucgccacguacugcaccggcagcauccccugcuccgugugccugagcgggcucgacucccuggacaccuaccccagccuggagaccauccagaucacgaucuccagcuucaagugggaccucaccgccuucggccuggucgccgagugguuccuggccuacauccucuucacccgguucuucuacgugcuggggcuggcggccaucaugcagcucuucuucuccuacuucgccgugcacuucaucagcaacuccuggcugauguggcugaucaucaaccugguccagauggcccccaucagcgcgauggugcgcauguacaucuucuucgccuccuucuacuacguguggaagagcuacguccacgugguggacggcugcaacagcuccaccugcaugaugugcuacaagcggaaccgcgccacgcgggucgagugcaccaccaucgugaacgggguccgccggagcuucuacguguacgccaacggcggcaagggguucugcaagcuccacaacuggaacugcgugaacugcgacaccuucugcgccggcuccacguucaucagcgacgaggucgcgcgcgaccugucccugcaguucaagcggccgaucaaccccaccgaccagagcuccuacaucguggacagcgugaccgucaagaacggguccauccaccucuacuucgacaaggccggccagaagaccuacgagcgccacagccugucccacuucgugaaccuggacaaccuccgggccaacaacacgaaggggagccugcccaucaacgugaucgucuucgacggcaaguccaagugcgaggagagcuccgccaagagcgccuccguguacuacagccagcugaugugccagcccauccuccugcuggaccaggcgcucguguccgacgucggcgacagcgccgagguggccgugaagauguucgacgccuacgucaacaccuucagcuccaccuucaacgugccgauggagaagcugaagacccugguggccacggcggaggccgagcucgccaagaacgucagccuggacaacgugcuguccaccuucaucagcgccgcgcgccagggguucguggacuccgacgucgagaccaaggacgugguggagugccucaagcugagccaccaguccgacaucgaggucaccggcgacagcugcaacaacuacaugcugacguacaacaagguggagaacaugaccccccgggaccucggggccugcaucgacugcuccgcccgccacaucaacgcccagguggccaagagccacaacaucgcgcugaucuggaacgucaaggacuucaugucccugagcgagcagcuccggaagcagauccgcuccgccgccaagaagaacaaccugcccuucaagcugaccugcgccaccacgcgccagguggugaacgucgugaccaccaagaucgcccucaagggcgggugaggacuagucccuguucccagagcccacuuuuuuuucuuuuuuugaaauaaaauagccugucuuucagaucucaaaggcucuuuucagagccaccaaaaaaaaaaaaaaaaaaaaaaaaaaaaaaaaaaaaaaaaaaaaaaaaaaaaaaaaaaaaaaaaaaaaaaaaaaaaaaaaaaaaaaaaaaaaaaaaaaaaa

SEQ ID NO: 20119 - RNA, 6113 nt, Artificial Sequence
  SARS-CoV-2__MT385471.1__non-structural protein 3 (NSP3) mRNA gc
aggagagucccgcagucggcguccagcggcucugcuuguucgugugugugucguugcaggccuuauucaagcuuaccauggcccccaccaaggugaccuucggcgacgacacggucaucgaggugcagggguacaagagcgugaacaucaccuucgagcuggacgagcgcaucgacaagguccucaacgagaagugcuccgccuacaccguggagcugggcaccgaggugaacgaguucgcgugcgucguggccgacgccgugaucaagacgcugcagccggucagcgagcuccugaccccccuggggaucgaccucgacgagugguccauggccaccuacuaccuguucgacgagagcggcgaguucaagcuggccucccacauguacugcagcuucuacccccccgacgaggacgaggaggagggggacugcgaggaggaggaguucgagccguccacccaguacgaguacggcacggaggacgacuaccagggcaagccccucgaguucggggcgaccagcgccgcccugcagcccgaggaggagcaggaggaggacuggcuggacgacgacucccagcagaccgugggccagcaggacgggagcgaggacaaccagaccacgaccauccagaccaucguggagguccagccccagcucgagauggagcugaccccgguggugcagacgaucgaggucaacuccuucagcggcuaccugaagcucaccgacaacguguacaucaagaacgccgacaucguggaggaggcgaagaaggucaagcccaccgugguggucaacgccgccaacguguaccugaagcacgggggcggcguggccggggcccugaacaaggcgaccaacaacgccaugcaggucgaguccgacgacuacaucgccacgaacggcccccucaagguggggggcagcugcguccuguccggccacaaccuggccaagcacugccuccacgugguggggcccaacgucaacaagggcgaggacauccagcugcugaagagcgccuacgagaacuucaaccagcacgaggugcuccuggcgccgcugcucuccgccgggaucuucggcgccgaccccauccacagccugcgggugugcgucgacaccgugcgcaccaacguguaccuggccgucuucgacaagaaccucuacgacaagcugguguccagcuuccuggagaugaagagcgagaagcagguggagcagaagaucgccgagauccccaaggaggaggucaagcccuucaucaccgaguccaagccgagcguggagcagcggaagcaggacgacaagaagaucaaggcgugcguggaggaggucacgaccacccucgaggagaccaaguuccugacggagaaccugcuccuguacaucgacaucaacgggaaccugcaccccgacuccgccacccucgugagcgacaucgacaucaccuuccugaagaaggacgcccccuacaucgugggcgacgucgugcaggagggcgugcugaccgccgucgugauccccacgaagaaggccgggggcaccaccgagaugcucgcgaaggcccugcgcaaggugccgaccgacaacuacaucacgaccuaccccgggcagggccugaacggguacaccgucgaggaggccaagaccgugcucaagaagugcaaguccgccuucuacauccugcccagcaucaucuccaacgagaagcaggagauccugggcaccgugagcuggaaccuccgggagaugcuggcgcacgccgaggagacgcgcaagcugaugcccgucugcguggagaccaaggccaucguguccaccauccagcggaaguacaagggcaucaagauccaggagggggucguggacuacggcgcccgcuucuacuucuacaccagcaagacgaccguggccucccugaucaacacccucaacgaccugaacgagacccuggucacgaugccgcucggguacgugacccacggccugaaccuggaggaggcggcccgguacaugcgcagccucaaggugcccgccaccgucuccgugagcucccccgacgccgugaccgccuacaacggguaccugacgagcuccagcaagacccccgaggagcacuucaucgagaccaucucccuggcgggcagcuacaaggacuggagcuacuccggccagagcacccagcucgggaucgaguuccugaagcggggcgacaaguccgucuacuacacgagcaacccgaccaccuuccaccuggacggggaggugaucaccuucgacaaccucaagacgcugcugucccuccgcgaggugcggaccaucaaggucuucaccaccguggacaacaucaaccugcacacgcagguggucgacaugagcaugaccuacggccagcaguucggccccaccuaccuggacggggccgacgugaccaagaucaagccccacaacucccacgagggcaagacguucuacgugcucccgaacgacgacacccugcgcgucgaggccuucgaguacuaccacaccaccgaccccagcuuccuggggcgguacauguccgcccucaaccacacgaagaaguggaaguacccccaggugaacggccugaccagcaucaagugggccgacaacaacugcuaccuggcgaccgcccuccugacccugcagcagaucgagcucaaguucaaccccccggcccugcaggacgccuacuaccgcgcgcgggccggggaggccgccaacuucugcgcccugauccucgcguacugcaacaagacggugggcgagcugggcgacguccgcgagaccauguccuaccuguuccagcacgccaaccucgacagcugcaagcgggugcugaacgucgugugcaagaccugcgggcagcagcagaccacccugaagggcguggaggccgucauguacauggggacgcucuccuacgagcaguucaagaagggcgugcagauccccugcaccugcgggaagcaggccaccaaguaccuggugcagcaggagagccccuucgucaugauguccgcccccccggcgcaguacgagcugaagcacggcaccuucacgugcgccagcgaguacaccggcaacuaccagugcgggcacuacaagcacaucaccuccaaggagacccucuacugcaucgacggcgcccugcugacgaagagcagcgaguacaaggggcccaucaccgacguguucuacaaggagaacuccuacaccaccacgaucaagcccgugaccuacaagcucgacggcgucgugugcaccgagaucgaccccaagcuggacaacuacuacaagaaggacaacagcuacuucaccgagcagccgaucgaccuggugcccaaccagcccuaccccaacgccuccuucgacaacuucaaguucgucugcgacaacaucaaguucgccgacgaccucaaccagcugacgggguacaagaagccggcgagccgcgagcugaaggugaccuucuuccccgaccucaacggcgacguggucgccaucgacuacaagcacuacacccccuccuucaagaagggcgccaagcugcugcacaagcccaucguguggcacgugaacaacgccaccaacaaggcgacguacaagccgaacaccuggugcauccggugccucuggagcaccaagcccgucgagaccuccaacagcuucgacgugcugaaguccgaggacgcccaggggauggacaaccuggccugcgaggaccucaagcccgugagcgaggaggucguggagaaccccacgauccagaaggacgugcuggagugcaacgucaagaccaccgagguggugggcgacaucauccugaagccggccaacaacucccucaagaucaccgaggaggucgggcacacggaccugauggccgcguacguggacaacagcucccugaccaucaagaagcccaacgagcucagccgcgugcugggccugaagacccucgccacccacgggcuggccgccgucaacuccgugcccugggacacgaucgccaacuacgcgaagccguuccugaacaagguggucagcaccaccaccaacaucgugacgcgcugccucaaccgggugugcaccaacuacaugcccuacuucuucacccugcugcuccagcugugcaccuucacccgcuccacgaacagccggaucaaggccuccaugcccaccaccaucgccaagaacaccgucaagagcgugggcaaguucugccuggaggccagcuucaacuaccucaagucccccaacuucagcaagcugaucaacaucaucaucugguuccugcuccuguccgugugccugggcagccucaucuacuccacggccgcgcuggggguccugaugagcaaccucggcaugccguccuacugcaccggguaccgcgagggcuaccugaacagcaccaacgugaccaucgccacguacugcaccggcuccauccccugcagcgugugccuguccgggcucgacagccuggacaccuaccccucccuggagaccauccagaucacgaucagcuccuucaagugggaccucaccgccuucggccuggucgccgagugguuccuggccuacauccucuucacccgguucuucuacauccuggggcuggcggccaucaugcagcucuucuucagcuacuucgccgugcacuucaucuccaacagcuggcugauguggcugaucaucaaccuggugcagauggcccccaucuccgcgaugguccgcauguacaucuucuucgccagcuucuacuacguguggaagagcuacgugcacgucguggacggcugcaacuccagcaccugcaugaugugcuacaagcggaaccgcgccacgcggguggagugcaccaccaucgucaacggggugcgccgguccuucuacgucuacgccaacggcggcaagggguucugcaagcuccacaacuggaacugcgugaacugcgacaccuucugcgccggcagcacguucaucuccgacgagguggcgcgcgaccugagccugcaguucaagcggccgaucaaccccaccgaccaguccagcuacaucgucgacuccgugaccgugaagaacgggagcauccaccucuacuucgacaaggccggccagaagaccuacgagcgccacucccugagccacuucgucaaccuggacaaccuccgggccaacaacacgaaggggucccugcccaucaacgugaucguguucgacggcaagagcaagugcgaggaguccagcgccaaguccgccagcgucuacuacucccagcugaugugccagcccauccuccugcuggaccaggcgcucgugagcgacgugggcgacagcgccgaggucgccgugaagauguucgacgccuacgugaacaccuucuccagcaccuucaacgucccgauggagaagcugaagacccugguggccacggcggaggccgagcucgccaagaacgugucccuggacaacguccugagcaccuucaucuccgccgcgcgccagggguucguggacagcgacguggagaccaaggacgucguggagugccucaagcugucccaccagagcgacaucgaggugaccggcgacuccugcaacaacuacaugcugacguacaacaaggucgagaacaugaccccccgggaccucggggccugcaucgacugcagcgcccgccacaucaacgcccagguggccaagucccacaacaucgcgcugaucuggaacgugaaggacuucaugagccuguccgagcagcuccggaagcagauccgcagcgccgccaagaagaacaaccugcccuucaagcugaccugcgccaccacgcgccaggucgugaacguggucaccaccaagaucgcccucaagggcgggugaggacuagucccuguucccagagcccacuuuuuuuucuuuuuuugaaauaaaauagccugucuuucagaucucaaaggcucuuuucagagccaccaaaaaaaaaaaaaaaaaaaaaaaaaaaaaaaaaaaaaaaaaaaaaaaaaaaaaaaaaaaaaaaaaaaaaaaaaaaaaaaaaaaaaaaaaaaaaaaaaaaaa

SEQ ID NO: 20120 - RNA, 6113 nt, Artificial Sequence
  SARS-CoV-2__MT375458.1__non-structural protein 3 (NSP3) mRNA gc
aggagagucccgcagucggcguccagcggcucugcuuguucgugugugugucguugcaggccuuauucaagcuuaccauggcccccaccaaggugaccuucggcgacgacacggucaucgaggugcagggguacaagagcgugaacaucaccuucgagcuggacgagcgcaucgacaagguccucaacgagaagugcuccgccuacaccguggagcugggcaccgaggugaacgaguucgcgugcgucguggccgacgccgugaucaagacgcugcagccggucagcgagcuccugaccccccuggggaucgaccucgacgagugguccauggccaccuacuaccuguucgacgagagcggcgaguucaagcuggccucccacauguacugcagcuucuacccccccgacgaggacgaggaggagggggacugcgaggaggaggaguucgagccguccacccaguacgaguacggcacggaggacgacuaccagggcaagccccucgaguucggggcgaccagcgccgcccugcagcccgaggaggagcaggaggaggacuggcuggacgacgacucccagcagaccgugggccagcaggacgggagcgaggacaaccagaccacgaccauccagaccaucguggagguccagccccagcucgagauggagcugaccccgguggugcagacgaucgaggucaacuccuucagcggcuaccugaagcucaccgacaacguguacaucaagaacgccgacaucguggaggaggcgaagaaggucaagcccaccgugguggucaacgccgccaacguguaccugaagcacgggggcggcguggccggggcccugaacaaggcgaccaacaacgccaugcaggucgaguccgacgacuacaucgccacgaacggcccccucaagguggggggcagcugcguccuguccggccacaaccuggccaagcacugccuccacgugguggggcccaacgucaacaagggcgaggacauccagcugcugaagagcgccuacgagaacuucaaccagcacgaggugcuccuggcgccgcugcucuccgccgggaucuucggcgccgaccccauccacagccugcgggugugcgucgacaccgugcgcaccaacguguaccuggccgucuucgacaagaaccucuacgacaagcugguguccagcuuccuggagaugaagagcgagaagcagguggagcagaagaucgccgagauccccaaggaggaggucaagcccuucaucaccgaguccaagccgagcguggagcagcggaagcaggacgacaagaagaucaaggcgugcguggaggaggucacgaccacccucgaggagaccaaguuccugacggagaaccugcuccuguacaucgacaucaacgggaaccugcaccccgacuccgccacccucgugagcgacaucgacaucaccuuccugaagaaggacgcccccuacaucgugggcgacgucgugcaggagggcgugcugaccgccgucgugauccccacgaagaaggccgggggcaccaccgagaugcucgcgaaggcccugcgcaaggugccgaccgacaacuacaucacgaccuaccccgggcagggccugaacggguacaccgucgaggaggccaagaccgugcucaagaagugcaaguccgccuucuacauccugcccagcaucaucuccaacgagaagcaggagauccugggcaccgugagcuggaaccuccgggagaugcuggcgcacgccgaggagacgcgcaagcugaugcccgucugcguggagaccaaggccaucguguccaccauccagcggaaguacaagggcaucaagauccaggagggggucguggacuacggcgcccgcuucuacuucuacaccagcaagacgaccguggccucccugaucaacacccucaacgaccugaacgagacccuggucacgaugccgcucggguacgugacccacggccugaaccuggaggaggcggcccgguacaugcgcagccucaaggugcccgccaccgucuccgugagcucccccgacgccgugaccgccuacaacggguaccugacgagcuccagcaagacccccgaggagcacuucaucgagaccaucucccuggcgggcagcuacaaggacuggagcuacuccggccagagcacccagcucgggaucgaguuccugaagcggggcgacaaguccgucuacuacacgagcaacccgaccaccuuccaccuggacggggaggugaucaccuucgacaaccucaagacgcugcugucccuccgcgaggugcggaccaucaaggucuucaccaccguggacaacaucaaccugcacacgcagguggucgacaugagcaugaccuacggccagcaguucggccccaccuaccuggacggggccgacgugaccaagaucaagccccacaacucccacgagggcaagacguucuacgugcucccgaacgacgacacccugcgcgucgaggccuucgaguacuaccacaccaccgaccccagcuuccuggggcgguacauguccgcccucaaccacacgaagaaguggaaguacccccaggugaacggccugaccagcaucaagugggccgacaacaacugcuaccuggcgaccgcccuccugacccugcagcagaucgagcucaaguucaaccccccggcccugcaggacgccuacuaccgcgcgcgggccggggaggccgccaacuucugcgcccugauccucgcguacugcaacaagacggugggcgagcugggcgacguccgcgagaccauguccuaccuguuccagcacgccaaccucgacagcugcaagcgggugcugaacgucgugugcaagaccugcgggcagcagcagaccacccugaagggcguggaggccgucauguacauggggacgcucuccuacgagcaguucaagaagggcgugcagauccccugcaccugcgggaagcaggccaccaaguaccuggugcagcaggagagccccuucgucaugauguccgcccagcccgcgcaguacgagcugaagcacggcaccuucacgugcgccagcgaguacaccggcaacuaccagugcgggcacuacaagcacaucaccuccaaggagacccucuacugcaucgacggcgcccugcugacgaagagcagcgaguacaaggggccgaucaccgacguguucuacaaggagaacuccuacaccaccacgaucaagcccgugaccuacaagcucgacggcgucgugugcaccgagaucgaccccaagcuggacaacuacuacaagaaggacaacagcuacuucaccgagcagcccaucgaccuggugccgaaccagcccuaccccaacgccuccuucgacaacuucaaguucgucugcgacaacaucaaguucgccgacgaccucaaccagcugacgggguacaagaagcccgcgagccgcgagcugaaggugaccuucuucccggaccucaacggcgacguggucgccaucgacuacaagcacuacacccccuccuucaagaagggcgccaagcugcugcacaagcccaucguguggcacgugaacaacgccaccaacaaggcgacguacaagcccaacaccuggugcauccggugccucuggagcaccaagccggucgagaccuccaacagcuucgacgugcugaaguccgaggacgcccaggggauggacaaccuggccugcgaggaccucaagcccgugagcgaggaggucguggagaaccccacgauccagaaggacgugcuggagugcaacgucaagaccaccgagguggugggcgacaucauccugaagcccgccaacaacucccucaagaucaccgaggaggucgggcacacggaccugauggccgcguacguggacaacagcucccugaccaucaagaagccgaacgagcucagccgcgugcugggccugaagacccucgccacccacgggcuggccgccgucaacuccgugcccugggacacgaucgccaacuacgcgaagcccuuccugaacaagguggucagcaccaccaccaacaucgugacgcgcugccucaaccgggugugcaccaacuacaugccguacuucuucacccugcugcuccagcugugcaccuucacccgcuccacgaacagccggaucaaggccuccaugcccaccaccaucgccaagaacaccgucaagagcgugggcaaguucugccuggaggccagcuucaacuaccucaagucccccaacuucagcaagcugaucaacaucaucaucugguuccugcuccuguccgugugccugggcagccucaucuacuccacggccgcgcuggggguccugaugagcaaccucggcaugcccuccuacugcaccggguaccgcgagggcuaccugaacagcaccaacgugaccaucgccacguacugcaccggcuccaucccgugcagcgugugccuguccgggcucgacagccuggacaccuaccccucccuggagaccauccagaucacgaucagcuccuucaagugggaccucaccgccuucggccuggucgccgagugguuccuggccuacauccucuucacccgguucuucuacgugcuggggcuggcggccaucaugcagcucuucuucagcuacuucgccgugcacuucaucuccaacagcuggcugauguggcugaucaucaaccugguccagauggcccccaucuccgcgauggugcgcauguacaucuucuucgccagcuucuacuacguguggaagagcuacguccacgugguggacggcugcaacuccagcaccugcaugaugugcuacaagcggaaccgcgccacgcgggucgagugcaccaccaucgugaacgggguccgccgguccuucuacguguacgccaacggcggcaagggguucugcaagcuccacaacuggaacugcgugaacugcgacaccuucugcgccggcagcacguucaucuccgacgaggucgcgcgcgaccugagccugcaguucaagcggcccaucaacccgaccgaccaguccagcuacaucguggacuccgugaccgucaagaacgggagcauccaccucuacuucgacaaggccggccagaagaccuacgagcgccacucccugagccacuucgugaaccuggacaaccuccgggccaacaacacgaaggggucccugcccaucaacgugaucgucuucgacggcaagagcaagugcgaggaguccagcgccaaguccgccagcguguacuacucccagcugaugugccagcccauccuccugcuggaccaggcgcucgugagcgacgucggcgacagcgccgagguggccgugaagauguucgacgccuacgucaacaccuucuccagcaccuucaacgugcccauggagaagcugaagacccugguggccacggcggaggccgagcucgccaagaacgucucccuggacaacgugcugagcaccuucaucuccgccgcgcgccagggguucguggacagcgacgucgagaccaaggacgugguggagugccucaagcugucccaccagagcgacaucgaggucaccggcgacuccugcaacaacuacaugcugacguacaacaagguggagaacaugaccccgcgggaccucggggccugcaucgacugcagcgcccgccacaucaacgcccagguggccaagucccacaacaucgcgcugaucuggaacgucaaggacuucaugagccuguccgagcagcuccggaagcagauccgcagcgccgccaagaagaacaaccugcccuucaagcugaccugcgccaccacgcgccagguggugaacgucgugaccaccaagaucgcccucaagggcgggugaggacuagucccuguucccagagcccacuuuuuuuucuuuuuuugaaauaaaauagccugucuuucagaucucaaaggcucuuuucagagccaccaaaaaaaaaaaaaaaaaaaaaaaaaaaaaaaaaaaaaaaaaaaaaaaaaaaaaaaaaaaaaaaaaaaaaaaaaaaaaaaaaaaaaaaaaaaaaaaaaaaaa

SEQ ID NO: 20121 - RNA, 6113 nt, Artificial Sequence
  SARS-CoV-2__MT252702.1__non-structural protein 3 (NSP3) mRNA gc
aggagagucccgcagucggcguccagcggcucugcuuguucgugugugugucguugcaggccuuauucaagcuuaccauggcccccaccaaggugaccuucggcgacgacacggucaucgaggugcagggguacaagagcgugaacaucaccuucgagcuggacgagcgcaucgacaagguccucaacgagaagugcuccgccuacaccguggagcugggcaccgaggugaacgaguucgcgugcgucguggccgacgccgugaucaagacgcugcagccggucagcgagcuccugaccccccuggggaucgaccucgacgagugguccauggccaccuacuaccuguucgacgagagcggcgaguucaagcuggccucccacauguacugcagcuucuacccccccgacgaggacgaggaggagggggacugcgaggaggaggaguucgagccguccacccaguacgaguacggcacggaggacgacuaccagggcaagccccucgaguucggggcgaccagcgccgcccugcagcccgaggaggagcaggaggaggacuggcuggacgacgacucccagcagaccgugggccagcaggacgggagcgaggacaaccagaccacgaccauccagaccaucguggagguccagccccagcucgagauggagcugaccccgguggugcagacgaucgaggucaacuccuucagcggcuaccugaagcucaccgacaacguguacaucaagaacgccgacaucguggaggaggcgaagaaggucaagcccaccgugguggucaacgccgccaacguguaccugaagcacgggggcggcguggccggggcccugaacaaggcgaccaacaacgccaugcaggucgaguccgacgacuacaucgccacgaacggcccccucaagguggggggcagcugcguccuguccggccacaaccuggccaagcacugccuccacgugguggggcccaacgucaacaagggcgaggacauccagcugcugaagagcgccuacgagaacuucaaccagcacgaggugcuccuggcgccgcugcucuccgccgggaucuucggcgccgaccccauccacagccugcgggugugcgucgacaccgugcgcaccaacguguaccuggccgucuucgacaagaaccucuacgacaagcugguguccagcuuccuggagaugaagagcgagaagcagguggagcagaagaucgccgagauccccaaggaggaggucaagcccuucaucaccgaguccaagccgagcguggagcagcggaagcaggacgacaagaagaucaaggcgugcguggaggaggucacgaccacccucgaggagaccaaguuccugacggagaaccugcuccuguacaucgacaucaacgggaaccugcaccccgacuccgccacccucgugagcgacaucgacaucaccuuccugaagaaggacgcccccuacaucgugggcgacgucgugcaggagggcgugcugaccgccgucgugauccccacgaagaaggccgggggcaccaccgagaugcucgcgaaggcccugcgcaaggugccgaccgacaacuacaucacgaccuaccccgggcagggccugaacggguacaccgucgaggaggccaagaccgugcucaagaagugcaaguccgccuucuacauccugcccagcaucaucuccaacgagaagcaggagauccugggcaccgugagcuggaaccuccgggagaugcuggcgcacgccgaggagacgcgcaagcugaugcccgucugcguggagaccaaggccaucguguccaccauccagcggaaguacaagggcaucaagauccaggagggggucguggacuacggcgcccgcuucuacuucuacaccagcaagacgaccguggccucccugaucaacacccucaacgaccugaacgagacccuggucacgaugccgcucggguacgugacccacggccugaaccuggaggaggcggcccgguacaugcgcagccucaaggugcccgccaccgucuccgugagcucccccgacgccgugaccgccuacaacggguaccugacgagcuccagcaagacccccgaggagcacuucaucgagaccaucucccuggcgggcagcuacaaggacuggagcuacuccggccagagcacccagcucgggaucgaguuccugaagcggggcgacaaguccgucuacuacacgagcaacccgaccaccuuccaccuggacggggaggugaucaccuucgacaaccucaagacgcugcugucccuccgcgaggugcggaccaucaaggucuucaccaccguggacaacaucaaccugcacacgcagguggucgacaugagcaugaccuacggccagcaguucggccccaccuaccuggacggggccgacgugaccaagaucaagccccacaacucccacgagggcaagacguucuacgugcucccgaacgacgacacccugcgcgucgaggccuucgaguacuaccacaccaccgaccccagcuuccuggggcgguacauguccgcccucaaccacacgaagaaguggaaguacccccaggugaacggccugaccagcaucaagugggccgacaacaacugcuaccuggcgaccgcccuccugacccugcagcagaucgagcucaaguucaaccccccggcccugcaggacgccuacuaccgcgcgcgggccggggaggccgccaacuucugcgcccugauccucgcguacugcaacaagacggugggcgagcugggcgacguccgcgagaccauguccuaccuguuccagcacgccaaccucgacagcugcaagcgggugcugaacgucgugugcaagaccugcgggcagcagcagaccacccugaagggcguggaggccgucauguacauggggacgcucuccuacgagcaguucaagaagggcgugcagauccccugcaccugcgggaagcaggccaccaaguaccuggugcagcaggagagccccuucgucaugauguccgcccccccggcgcaguacgagcugaagcacggcaccuucacgugcgccagcgaguacaccggcaacuaccagugcgggcacuacaagcacaucaccuccaaggagacccucuacugcaucgacggcgcccugcugacgaagagcagcgaguacaaggggcccaucaccgacguguucuacaaggagaacuccuacaccaccacgaucaagcccgugaccuacaagcucgacggcgucgugugcaccgagaucgaccccaagcuggacaacuacuacaagaaggacaacagcuacuucaccgagcagccgaucgaccuggugcccaaccagcccuaccccaacgccuccuucgacaacuucaaguucgucugcgacaacaucaaguucgccgacgaccucaaccagcugacgggguacaagaagccggcgagccgcgagcugaaggugaccuucuuccccgaccucaacggcgacguggucgccaucgacuacaagcacuacacccccuccuucaagaagggcgccaagcugcugcacaagcccaucguguggcacgugaacaacgccaccaacaaggcgacguacaagccgaacaccuggugcauccggugccucuggagcaccaagcccgucgagaccuccaacagcuucgacgugcugaaguccgaggacgcccaggggauggacaaccuggccugcgaggaccucaagcccgugagcgaggaggucguggagaaccccacgauccagaaggacgugcuggagugcaacgucaagaccaccgagguggugggcgacaucauccugaagccggccaacaacucccucaagaucaccgaggaggucgggcacacggaccugauggccgcguacguggacaacagcucccugaccaucaagaagcccaacgagcucagccgcgugcugggccugaagacccucgccacccacgggcuggccgccgucaacuccgugcccugggacacgaucgccaacuacgcgaagccguuccugaacaagguggucagcaccaccaccaacaucgugacgcgcugccucaaccgggugugcaccaacuacaugcccuacuucuucacccugcugcuccagcugugcaccuucacccgcuccacgaacagccggaucaaggccuccaugcccaccaccaucgccaagaacaccgucaagagcgugggcaaguucugccuggaggccagcuucaacuaccucaagucccccaacuucagcaagcugaucaacaucaucaucugguuccugcuccuguccgugugccugggcagccucaucuacuccacggccgcgcuggggguccugaugagcaaccucggcaugccguccuacugcaccggguaccgcgagggcuaccuggacagcaccaacgugaccaucgccacguacugcaccggcuccauccccugcagcgugugccuguccgggcucgacagccuggacaccuaccccucccuggagaccauccagaucacgaucagcuccuucaagugggaccucaccgccuucggccuggucgccgagugguuccuggccuacauccucuucacccgguucuucuacgugcuggggcuggcggccaucaugcagcucuucuucagcuacuucgccgugcacuucaucuccaacagcuggcugauguggcugaucaucaaccugguccagauggcccccaucuccgcgauggugcgcauguacaucuucuucgccagcuucuacuacguguggaagagcuacguccacgugguggacggcugcaacuccagcaccugcaugaugugcuacaagcggaaccgcgccacgcgggucgagugcaccaccaucgugaacgggguccgccgguccuucuacguguacgccaacggcggcaagggguucugcaagcuccacaacuggaacugcgugaacugcgacaccuucugcgccggcagcacguucaucuccgacgaggucgcgcgcgaccugagccugcaguucaagcggccgaucaaccccaccgaccaguccagcuacaucguggacuccgugaccgucaagaacgggagcauccaccucuacuucgacaaggccggccagaagaccuacgagcgccacucccugagccacuucgugaaccuggacaaccuccgggccaacaacacgaaggggucccugcccaucaacgugaucgucuucgacggcaagagcaagugcgaggaguccagcgccaaguccgccagcguguacuacucccagcugaugugccagcccauccuccugcuggaccaggcgcucgugagcgacgucggcgacagcgccgagguggccgugaagauguucgacgccuacgucaacaccuucuccagcaccuucaacgugccgauggagaagcugaagacccugguggccacggcggaggccgagcucgccaagaacgucucccuggacaacgugcugagcaccuucaucuccgccgcgcgccagggguucguggacagcgacgucgagaccaaggacgugguggagugccucaagcugucccaccagagcgacaucgaggucaccggcgacuccugcaacaacuacaugcugacguacaacaagguggagaacaugaccccccgggaccucggggccugcaucgacugcagcgcccgccacaucaacgcccagguggccaagucccacaacaucgcgcugaucuggaacgucaaggacuucaugagccuguccgagcagcuccggaagcagauccgcagcgccgccaagaagaacaaccugcccuucaagcugaccugcgccaccacgcgccagguggugaacgucgugaccaccaagaucgcccucaagggcgggugaggacuagucccuguucccagagcccacuuuuuuuucuuuuuuugaaauaaaauagccugucuuucagaucucaaaggcucuuuucagagccaccaaaaaaaaaaaaaaaaaaaaaaaaaaaaaaaaaaaaaaaaaaaaaaaaaaaaaaaaaaaaaaaaaaaaaaaaaaaaaaaaaaaaaaaaaaaaaaaaaaaaa

SEQ ID NO: 20122 - RNA, 6113 nt, Artificial Sequence
  SARS-CoV-2__MT252708.1__non-structural protein 3 (NSP3) mRNA gc
aggagagucccgcagucggcguccagcggcucugcuuguucgugugugugucguugcaggccuuauucaagcuuaccauggcccccaccaaggugaccuucggcgacgacacggucaucgaggugcagggguacaagagcgugaacaucaccuucgagcuggacgagcgcaucgacaagguccucaacgagaagugcuccgccuacaccguggagcugggcaccgaggugaacgaguucgcgugcgucguggccgacgccgugaucaagacgcugcagccggucagcgagcuccugaccccccuggggaucgaccucgacgagugguccauggccaccuacuaccuguucgacgagagcggcgaguucaagcuggccucccacauguacugcagcuucuacccccccgacgaggacgaggaggagggggacugcgaggaggaggaguucgagccguccacccaguacgaguacggcacggaggacgacuaccagggcaagccccucgaguucggggcgaccagcgccgcccugcagcccgaggaggagcaggaggaggacuggcuggacgacgacucccagcagaccgugggccagcaggacgggagcgaggacaaccagaccacgaccauccagaccaucguggagguccagccccagcucgagauggagcugaccccgguggugcagacgaucgaggucaacuccuucagcggcuaccugaagcucaccgacaacguguacaucaagaacgccgacaucguggaggaggcgaagaaggucaagcccaccgugguggucaacgccgccaacguguaccugaagcacgggggcggcguggccggggcccugaacaaggcgaccaacaacgccaugcaggucgaguccgacgacuacaucgccacgaacggcccccucaagguggggggcagcugcguccuguccggccacaacuucgccaagcacugccugcacgugguggggcccaacgucaacaagggcgaggacauccagcuccugaagagcgccuacgagaacuucaaccagcacgaggugcugcucgcgccgcugcuguccgccgggaucuucggcgccgaccccauccacagccuccgggugugcgucgacaccgugcgcaccaacguguaccuggccgucuucgacaagaaccuguacgacaagcucguguccagcuuccuggagaugaagagcgagaagcagguggagcagaagaucgccgagauccccaaggaggaggucaagcccuucaucaccgaguccaagccgagcguggagcagcggaagcaggacgacaagaagaucaaggcgugcguggaggaggucacgaccacccuggaggagaccaaguuccucacggagaaccugcugcucuacaucgacaucaacgggaaccugcaccccgacuccgccacccuggugagcgacaucgacaucaccuuccucaagaaggacgcccccuacaucgugggcgacgucgugcaggagggcgugcugaccgccgucgugauccccacgaagaaggccgggggcaccaccgagaugcuggcgaaggcccuccgcaaggugccgaccgacaacuacaucacgaccuaccccgggcagggccugaacggguacaccgucgaggaggccaagaccgugcugaagaagugcaaguccgccuucuacauccuccccagcaucaucuccaacgagaagcaggagauccugggcaccgugagcuggaaccugcgggagaugcucgcgcacgccgaggagacgcgcaagcugaugcccgucugcguggagaccaaggccaucguguccaccauccagcggaaguacaagggcaucaagauccaggagggggucguggacuacggcgcccgcuucuacuucuacaccagcaagacgaccguggccucccugaucaacacccugaacgaccucaacgagacccuggucacgaugccgcugggguacgugacccacggccucaaccuggaggaggcggcccgguacaugcgcagccugaaggugcccgucaccguguccgugagcucccccgacgccgucaccgccuacaacggguaccucacgagcuccagcaagacccccgaggagcacuucaucgagaccaccucccuggccggcagcuacaaggacuggagcuacuccggccagagcacgcagcuggggaucgaguuccucaagcggggcgacaaguccguguacuacaccagcaacccgaccaccuuccaccuggacggggaggugaucacguucgacaaccugaagacccuccugucccugcgcgagguccggaccaucaagguguucaccacgguggacaacaucaaccuccacacccaggucguggacaugagcaugaccuacggccagcaguucggccccaccuaccuggacggggcggacgugacgaagaucaagccccacaacucccacgagggcaagaccuucuacguccugccgaacgacgacacccuccgcguggaggccuucgaguacuaccacaccacggaccccagcuuccuggggcgguacauguccgcccugaaccacaccaagaaguggaaguacccccaggugaacggccucaccagcaucaagugggccgacaacaacugcuaccuggccaccgcgcugcucacgcugcagcagaucgagcugaaguucaaccccccggcccuccaggacgccuacuaccgcgcccgggcgggggaggccgccaacuucugcgcccugauccuggccuacugcaacaagaccgucggcgagcucggcgacgugcgcgagaccauguccuaccuguuccagcacgcgaaccuggacagcugcaagcggguccucaacguggugugcaagaccugcgggcagcagcagaccacgcugaagggcgucgaggccgugauguacauggggacccuguccuacgagcaguucaagaagggcgugcagauccccugcaccugcgggaagcaggccaccaaguaccucguccagcaggagagccccuucgugaugauguccgcccccccggcccaguacgagcugaagcacggcacguucaccugcgcgagcgaguacaccggcaacuaccagugcgggcacuacaagcacaucaccuccaaggagacgcuguacugcaucgacggcgcccuccugaccaagagcagcgaguacaaggggcccaucaccgacguguucuacaaggagaacuccuacaccacgaccaucaagcccgucaccuacaagcuggacggcguggugugcaccgagaucgaccccaagcucgacaacuacuacaagaaggacaacagcuacuucacggagcagccgaucgaccugguccccaaccagcccuaccccaacgccuccuucgacaacuucaaguucgugugcgacaacaucaaguucgccgacgaccugaaccagcucaccggguacaagaagccggccagccgcgagcugaaggugaccuucuuccccgaccugaacggcgacgucguggcgaucgacuacaagcacuacacccccuccuucaagaagggcgccaagcuccugcacaagcccaucguguggcacgucaacaacgccacgaacaaggccaccuacaagccgaacaccuggugcauccggugccuguggagcaccaagcccguggagacguccaacagcuucgacgugcucaaguccgaggacgcgcaggggauggacaaccuggccugcgaggaccugaagcccgucagcgaggaggugguggagaaccccaccauccagaaggacguccucgagugcaacgugaagaccaccgagguggucggcgacaucauccugaagccggccaacaacucccugaagaucacggaggagguggggcacaccgaccucauggccgccuacguggacaacagcucccugaccaucaagaagcccaacgagcugagccgcguccucggccugaagacccuggcgacgcacgggcucgccgccgugaacuccgugcccugggacaccaucgccaacuacgccaagccguuccugaacaaggucgugagcaccaccacgaacaucgugacccgcugccugaaccgggucugcaccaacuacaugcccuacuucuucacccuccugcugcagcucugcaccuucacgcgcuccaccaacagccggaucaaggcguccaugcccaccaccaucgccaagaacacggugaagagcgugggcaaguucugccuggaggccagcuucaacuaccugaagucccccaacuucagcaagcucaucaacaucaucaucugguuccugcugcucuccgucugccugggcagccugaucuacuccaccgccgcccucggggugcugaugagcaaccugggcaugccguccuacugcaccggguaccgcgagggcuaccucaacagcaccaacgugacgaucgcgaccuacugcaccggcuccauccccugcagcgucugccuguccgggcuggacagccucgacaccuaccccucccuggagacgauccagaucaccaucagcuccuucaagugggaccugaccgccuucggccucguggccgagugguuccuggccuacauccuguucacccgguucuucuacgugcucgggcuggccgcgaucaugcagcuguucuucagcuacuucgccguccacuucaucuccaacagcuggcucauguggcugaucaucaaccuggugcagauggcccccaucuccgccauggugcgcauguacaucuucuucgcgagcuucuacuacgucuggaagagcuacgugcacguggucgacggcugcaacuccagcacgugcaugaugugcuacaagcggaaccgcgccacccggguggagugcaccaccaucgucaacggggugcgccgguccuucuacguguacgccaacggcggcaagggguucugcaagcugcacaacuggaacugcgucaacugcgacacguucugcgccggcagcaccuucaucuccgacgagguggcccgcgaccucagccugcaguucaagcggccgaucaaccccaccgaccaguccagcuacaucguggacuccgucaccgugaagaacgggagcauccaccuguacuucgacaaggcgggccagaagacguacgagcgccacucccucagccacuucgugaaccuggacaaccugcgggccaacaacaccaaggggucccuccccaucaacgucaucguguucgacggcaagagcaagugcgaggaguccagcgccaaguccgccagcguguacuacucccagcugaugugccagcccauccugcuccuggaccaggcccuggucagcgacgugggcgacagcgcggagguggccgucaagauguucgacgccuacgugaacaccuucuccagcaccuucaacgugccgauggagaagcucaagacgcuggucgccaccgccgaggcggagcuggccaagaacgugucccucgacaacgugcugagcaccuucaucuccgccgcccgccagggguucgucgacagcgacguggagaccaaggacguggucgagugccugaagcucucccaccagagcgacaucgaggugacgggcgacuccugcaacaacuacaugcugaccuacaacaagguggagaacaugaccccccgggaccugggggcgugcaucgacugcagcgcccgccacaucaacgcccaggucgccaagucccacaacaucgcccucaucuggaacgugaaggacuucaugagccuguccgagcagcugcggaagcagauccgcagcgcggccaagaagaacaaccuccccuucaagcugaccugcgccacgacccgccagguggucaacguggugaccaccaagaucgcccugaagggcgggugaggacuagucccuguucccagagcccacuuuuuuuucuuuuuuugaaauaaaauagccugucuuucagaucucaaaggcucuuuucagagccaccaaaaaaaaaaaaaaaaaaaaaaaaaaaaaaaaaaaaaaaaaaaaaaaaaaaaaaaaaaaaaaaaaaaaaaaaaaaaaaaaaaaaaaaaaaaaaaaaaaaaa

SEQ ID NO: 20123 - RNA, 6113 nt, Artificial Sequence
  SARS-CoV-2__MT252749.1__non-structural protein 3 (NSP3) mRNA gc
aggagagucccgcagucggcguccagcggcucugcuuguucgugugugugucguugcaggccuuauucaagcuuaccauggcccccaccaaggugaccuucggcgacgacacggucaucgaggugcagggguacaagagcgugaacaucaccuucgagcuggacgagcgcaucgacaagguccucaacgagaagugcuccgccuacaccguggagcugggcaccgaggugaacgaguucgcgugcgucguggccgacgccgugaucaagacgcugcagccggucagcgagcuccugaccccccuggggaucgaccucgacgagugguccauggccaccuacuaccuguucgacgagagcggcgaguucaagcuggccucccacauguacugcagcuucuacccccccgacgaggacgaggaggagggggacugcgaggaggaggaguucgagccguccacccaguacgaguacggcacggaggacgacuaccagggcaagccccucgaguucggggcgaccagcgccgcccugcagcccgaggaggagcaggaggaggacuggcuggacgacgacucccagcagaccgugggccagcaggacgggagcgaggacaaccagaccacgaccauccagaccaucguggagguccagccccagcucgagauggagcugaccccgguggugcagacgaucgaggucaacuccuucagcggcuaccugaagcucaccgacaacguguacaucaagaacgccgacaucguggaggaggcgaagaaggucaagcccaccgugguggucaacgccgccaacguguaccugaagcacgggggcggcguggccggggcccugaacaaggcgaccaacaacgccaugcaggucgaguccgacgacuacaucgccacgaacggcccccucaagguggggggcagcugcguccuguccggccacaaccuggccaagcacugccuccacgugguggggcccaacgucaacgagggcgaggacauccagcugcugaagagcgccuacgagaacuucaaccagcacgaggugcuccuggcgccgcugcucuccgccgggaucuucggcgccgaccccauccacagccugcgggugugcgucgacaccgugcgcaccaacguguaccuggccgucuucgacaagaaccucuacgacaagcugguguccagcuuccuggagaugaagagcgagaagcagguggagcagaagaucgccgagauccccaaggaggaggucaagcccuucaucaccgaguccaagccgagcguggagcagcggaagcaggacgacaagaagaucaaggcgugcguggaggaggucacgaccacccucgaggagaccaaguuccugacggagaaccugcuccuguacaucgacaucaacgggaaccugcaccccgacuccgccacccucgugagcgacaucgacaucaccuuccugaagaaggacgcccccuacaucgugggcgacgucgugcaggagggcgugcugaccgccgucgugauccccacgaagaaggccgggggcaccaccgagaugcucgcgaaggcccugcgcaaggugccgaccgacaacuacaucacgaccuaccccgggcagggccugaacggguacaccgucgaggaggccaagaccgugcucaagaagugcaaguccgccuucuacauccugcccagcaucaucuccaacgagaagcaggagauccugggcaccgugagcuggaaccuccgggagaugcuggcgcacgccgaggagacgcgcaagcugaugcccgucugcguggagaccaaggccaucguguccaccauccagcggaaguacaagggcaucaagauccaggagggggucguggacuacggcgcccgcuucuacuucuacaccagcaagacgaccguggccucccugaucaacacccucaacgaccugaacgagacccuggucacgaugccgcucggguacgugacccacggccugaaccuggaggaggcggcccgguacaugcgcagccucaaggugcccgccaccgucuccgugagcucccccgacgccgugaccgccuacaacggguaccugacgagcuccagcaagacccccgaggagcacuucaucgagaccaucucccuggcgggcagcuacaaggacuggagcuacuccggccagagcacccagcucgggaucgaguuccugaagcggggcgacaaguccgucuacuacacgagcaacccgaccaccuuccaccuggacggggaggugaucaccuucgacaaccucaagacgcugcugucccuccgcgaggugcggaccaucaaggucuucaccaccguggacaacaucaaccugcacacgcagguggucgacaugagcaugaccuacggccagcaguucggccccaccuaccuggacggggccgacgugaccaagaucaagccccacaacucccacgagggcaagacguucuacgugcucccgaacgacgacacccugcgcgucgaggccuucgaguacuaccacaccaccgaccccagcuuccuggggcgguacauguccgcccucaaccacacgaagaaguggaaguacccccaggugaacggccugaccagcaucaagugggccgacaacaacugcuaccuggcgaccgcccuccugacccugcagcagaucgagcucaaguucaaccccccggcccugcaggacgccuacuaccgcgcgcgggccggggaggccgccaacuucugcgcccugauccucgcguacugcaacaagacggugggcgagcugggcgacguccgcgagaccauguccuaccuguuccagcacgccaaccucgacagcugcaagcgggugcugaacgucgugugcaagaccugcgggcagcagcagaccacccugaagggcguggaggccgucauguacauggggacgcucuccuacgagcaguucaagaagggcgugcagauccccugcaccugcgggaagcaggccaccaaguaccuggugcagcaggagagccccuucgucaugauguccgcccccccggcgcaguacgagcugaagcacggcaccuucacgugcgccagcgaguacaccggcaacuaccagugcgggcacuacaagcacaucaccuccaaggagacccucuacugcaucgacggcgcccugcugacgaagagcagcgaguacaaggggcccaucaccgacguguucuacaaggagaacuccuacaccaccacgaucaagcccgugaccuacaagcucgacggcgucgugugcaccgagaucgaccccaagcuggacaacuacuacaagaaggacaacagcuacuucaccgagcagccgaucgaccuggugcccaaccagcccuaccccaacgccuccuucgacaacuucaaguucgucugcgacaacaucaaguucgccgacgaccucaaccagcugacgggguacaagaagccggcgagccgcgagcugaaggugaccuucuuccccgaccucaacggcgacguggucgccaucgacuacaagcacuacacccccuccuucaagaagggcgccaagcugcugcacaagcccaucguguggcacgugaacaacgccaccaacaaggcgacguacaagccgaacaccuggugcauccggugccucuggagcaccaagcccgucgagaccuccaacagcuucgacgugcugaaguccgaggacgcccaggggauggacaaccuggccugcgaggaccucaagcccgugagcgaggaggucguggagaaccccacgauccagaaggacgugcuggagugcaacgucaagaccaccgagguggugggcgacaucauccugaagccggccaacaacucccucaagaucaccgaggaggucgggcacacggaccugauggccgcguacguggacaacagcucccugaccaucaagaagcccaacgagcucagccgcgugcugggccugaagacccucgccacccacgggcuggccgccgucaacuccgugcccugggacacgaucgccaacuacgcgaagccguuccugaacaagguggucagcaccaccaccaacaucgugacgcgcugccucaaccgggugugcaccaacuacaugcccuacuucuucacccugcugcuccagcugugcaccuucacccgcuccacgaacagccggaucaaggccuccaugcccaccaccaucgccaagaacaccgucaagagcgugggcaaguucugccuggaggccagcuucaacuaccucaagucccccaacuucagcaagcugaucaacaucaucaucugguuccugcuccuguccgugugccugggcagccucaucuacuccacggccgcgcuggggguccugaugagcaaccucggcaugccguccuacugcaccggguaccgcgagggcuaccugaacagcaccaacgugaccaucgccacguacugcaccggcuccauccccugcagcgugugccuguccgggcucgacagccuggacaccuaccccucccuggagaccauccagaucacgaucagcuccuucaagugggaccucaccgccuucggccuggucgccgagugguuccuggccuacauccucuucacccgguucuucuacgugcuggggcuggcggccaucaugcagcucuucuucagcuacuucgccgugcacuucaucuccaacagcuggcugauguggcugaucaucaaccugguccagauggcccccaucuccgcgauggugcgcauguacaucuucuucgccagcuucuacuacguguggaagagcuacguccacgugguggacggcugcaacuccagcaccugcaugaugugcuacaagcggaaccgcgccacgcgggucgagugcaccaccaucgugaacgggguccgccgguccuucuacguguacgccaacggcggcaagggguucugcaagcuccacaacuggaacugcgugaacugcgacaccuucugcgccggcagcacguucaucuccgacgaggucgcgcgcgaccugagccugcaguucaagcggccgaucaaccccaccgaccaguccagcuacaucguggacuccgugaccgucaagaacgggagcauccaccucuacuucgacaaggccggccagaagaccuacgagcgccacucccugagccacuucgugaaccuggacaaccuccgggccaacaacacgaaggggucccugcccaucaacgugaucgucuucgacggcaagagcaagugcgaggaguccagcgccaaguccgccagcguguacuacucccagcugaugugccagcccauccuccugcuggaccaggcgcucgugagcgacgucggcgacagcgccgagguggccgugaagauguucgacgccuacgucaacaccuucuccagcaccuucaacgugccgauggagaagcugaagacccugguggccacggcggaggccgagcucgccaagaacgucucccuggacaacgugcugagcaccuucaucuccgccgcgcgccagggguucguggacagcgacgucgagaccaaggacgugguggagugccucaagcugucccaccagagcgacaucgaggucaccggcgacuccugcaacaacuacaugcugacguacaacaagguggagaacaugaccccccgggaccucggggccugcaucgacugcagcgcccgccacaucaacgcccagguggccaagucccacaacaucgcgcugaucuggaacgucaaggacuucaugagccuguccgagcagcuccggaagcagauccgcagcgccgccaagaagaacaaccugcccuucaagcugaccugcgccaccacgcgccagguggugaacgucgugaccaccaagaucgcccucaagggcgggugaggacuagucccuguucccagagcccacuuuuuuuucuuuuuuugaaauaaaauagccugucuuucagaucucaaaggcucuuuucagagccaccaaaaaaaaaaaaaaaaaaaaaaaaaaaaaaaaaaaaaaaaaaaaaaaaaaaaaaaaaaaaaaaaaaaaaaaaaaaaaaaaaaaaaaaaaaaaaaaaaaaaa

SEQ ID NO: 20124 - RNA, 6113 nt, Artificial Sequence
  SARS-CoV-2__MT371049.1__non-structural protein 3 (NSP3) mRNA gc
aggagagucccgcagucggcguccagcggcucugcuuguucgugugugugucguugcaggccuuauucaagcuuaccauggcccccaccaaggugaccuucggcgacgacacggucaucgaggugcagggguacaagagcgugaacaucaccuucgagcuggacgagcgcaucgacaagguccucaacgagaagugcuccgccuacaccguggagcugggcaccgaggugaacgaguucgcgugcgucguggccgacgccgugaucaagacgcugcagccggucagcgagcuccugaccccccuggggaucgaccucgacgagugguccauggccaccuacuaccuguucgacgagagcggcgaguucaagcuggccucccacauguacugcagcuucuacccccccgacgaggacgaggaggagggggacugcgaggaggaggaguucgagccguccacccaguacgaguacggcacggaggacgacuaccagggcaagccccucgaguucggggcgaccagcgccgcccugcagcccgaggaggagcaggaggaggacuggcuggacgacgacucccagcagaccgugggccagcaggacgggagcgaggacaaccagaccacgaccauccagaccaucguggagguccagccccagcucgagauggagcugaccccgguggugcagacgaucgaggucaacuccuucagcggcuaccugaagcucaccgacaacguguacaucaagaacgccgacaucguggaggaggcgaagaaggucaagcccaccgugguggucaacgccgccaacguguaccugaagcacgggggcggcguggccggggcccugaacaaggcgaccaacaacgccaugcaggucgaguccgacgacuacaucgccacgaacggcccccucaagguggggggcagcugcguccuguccggccacaaccuggccaagcacugccuccacgugguggggcccaacgucaacaagggcgaggacauccagcugcugaagagcgccuacgagaacuucaaccagcacgaggugcuccuggcgccgcugcucuccgccgggaucuucggcgccgaccccauccacagccugcgggugugcgucgacaccgugcgcaccaacguguaccuggccgucuucgacaagaaccucuacgacaagcugguguccagcuuccuggagaugaagagcgagaagcagguggagcagaagaucgccgagauccccaaggaggaggucaagcccuucaucaccgaguccaagccgagcguggagcagcggaagcaggacgacaagaagaucaaggcgugcguggaggaggucacgaccacccucgaggagaccaaguuccugacggagaaccugcuccuguacaucgacaucaacgggaaccugcaccccgacuccgccacccucgugagcgacaucgacaucaccuuccugaagaaggacgcccccuacaucgugggcgacgucgugcaggagggcgugcugaccgccgucgugauccccacgaagaaggccgggggcaccaccgagauccucgcgaaggcccugcgcaaggugccgaccgacaacuacaucacgaccuaccccgggcagggccugaacggguacaccgucgaggaggccaagaccgugcucaagaagugcaaguccgccuucuacauccugcccagcaucaucuccaacgagaagcaggagauccugggcaccgugagcuggaaccuccgggagaugcuggcgcacgccgaggagacgcgcaagcugaugcccgucugcguggagaccaaggccaucguguccaccauccagcggaaguacaagggcaucaagauccaggagggggucguggacuacggcgcccgcuucuacuucuacaccagcaagacgaccguggccucccugaucaacacccucaacgaccugaacgagacccuggucacgaugccgcucggguacgugacccacggccugaaccuggaggaggcggcccgguacaugcgcagccucaaggugcccgccaccgucuccgugagcucccccgacgccgugaccgccuacaacggguaccugacgagcuccagcaagacccccgaggagcacuucaucgagaccaucucccuggcgggcagcuacaaggacuggagcuacuccggccagagcacccagcucgggaucgaguuccugaagcggggcgacaaguccgucuacuacacgagcaacccgaccaccuuccaccuggacggggaggugaucaccuucgacaaccucaagacgcugcugucccuccgcgaggugcggaccaucaaggucuucaccaccguggacaacaucaaccugcacacgcagguggucgacaugagcaugaccuacggccagcaguucggccccaccuaccuggacggggccgacgugaccaagaucaagccccacaacucccacgagggcaagacguucuacgugcucccgaacgacgacacccugcgcgucgaggccuucgaguacuaccacaccaccgaccccagcuuccuggggcgguacauguccgcccucaaccacacgaagaaguggaaguacccccaggugaacggccugaccagcaucaagugggccgacaacaacugcuaccuggcgaccgcccuccugacccugcagcagaucgagcucaaguucaaccccccggcccugcaggacgccuacuaccgcgcgcgggccggggaggccgccaacuucugcgcccugauccucgcguacugcaacaagacggugggcgagcugggcgacguccgcgagaccauguccuaccuguuccagcacgccaaccucgacagcugcaagcgggugcugaacgucgugugcaagaccugcgggcagcagcagaccacccugaagggcguggaggccgucauguacauggggacgcucuccuacgagcaguucaagaagggcgugcagauccccugcaccugcgggaagcaggccaccaaguaccuggugcagcaggagagccccuucgucaugauguccgcccccccggcgcaguacgagcugaagcacggcaccuucacgugcgccagcgaguacaccggcaacuaccagugcgggcacuacaagcacaucaccuccaaggagacccucuacugcaucgacggcgcccugcugacgaagagcagcgaguacaaggggcccaucaccgacguguucuacaaggagaacuccuacaccaccacgaucaagcccgugaccuacaagcucgacggcgucgugugcaccgagaucgaccccaagcuggacaacuacuacaagaaggacaacagcuacuucaccgagcagccgaucgaccuggugcccaaccagcccuaccccaacgccuccuucgacaacuucaaguucgucugcgacaacaucaaguucgccgacgaccucaaccagcugacgggguacaagaagccggcgagccgcgagcugaaggugaccuucuuccccgaccucaacggcgacguggucgccaucgacuacaagcacuacacccccuccuucaagaagggcgccaagcugcugcacaagcccaucguguggcacgugaacaacgccaccaacaaggcgacguacaagccgaacaccuggugcauccggugccucuggagcaccaagcccgucgagaccuccaacagcuucgacgugcugaaguccgaggacgcccaggggauggacaaccuggccugcgaggaccucaagcccgugagcgaggaggucguggagaaccccacgauccagaaggacgugcuggagugcaacgucaagaccaccgagguggugggcgacaucauccugaagccggccaacaacucccucaagaucaccgaggaggucgggcacacggaccugauggccgcguacguggacaacagcucccugaccaucaagaagcccaacgagcucagccgcgugcugggccugaagacccucgccacccacgggcuggccgccgucaacuccgugcccugggacacgaucgccaacuacgcgaagccguuccugaacaagguggucagcaccaccaccaacaucgugacgcgcugccucaaccgggugugcaccaacuacaugcccuacuucuucacccugcugcuccagcugugcaccuucacccgcuccacgaacagccggaucaaggccuccaugcccaccaccaucgccaagaacaccgucaagagcgugggcaaguucugccuggaggccagcuucaacuaccucaagucccccaacuucagcaagcugaucaacaucaucaucugguuccugcuccuguccgugugccugggcagccucaucuacuccacggccgcgcuggggguccugaugagcaaccucggcaugccguccuacugcaccggguaccgcgagggcuaccugaacagcaccaacgugaccaucgccacguacugcaccggcuccauccccugcagcgugugccuguccgggcucgacagccuggacaccuaccccucccuggagaccauccagaucacgaucagcuccuucaagugggaccucaccgccuucggccuggucgccgagugguuccuggccuacauccucuucacccgguucuucuacgugcuggggcuggcggccaucaugcagcucuucuucagcuacuucgccgugcacuucaucuccaacagcuggcugauguggcugaucaucaaccugguccagauggcccccaucuccgcgauggugcgcauguacaucuucuucgccagcuucuacuacguguggaagagcuacguccacgugguggacggcugcaacuccagcaccugcaugaugugcuacaagcggaaccgcgccacgcgggucgagugcaccaccaucgugaacgggguccgccgguccuucuacguguacgccaacggcggcaagggguucugcaagcuccacaacuggaacugcgugaacugcgacaccuucugcgccggcagcacguucaucuccgacgaggucgcgcgcgaccugagccugcaguucaagcggccgaucaaccccaccgaccaguccagcuacaucguggacuccgugaccgucaagaacgggagcauccaccucuacuucgacaaggccggccagaagaccuacgagcgccacucccugagccacuucgugaaccuggacaaccuccgggccaacaacacgaaggggucccugcccaucaacgugaucgucuucgacggcaagagcaagugcgaggaguccagcgccaaguccgccagcguguacuacucccagcugaugugccagcccauccuccugcuggaccaggcgcucgugagcgacgucggcgacagcgccgagguggccgugaagauguucgacgccuacgucaacaccuucuccagcaccuucaacgugccgauggagaagcugaagacccugguggccacggcggaggccgagcucgccaagaacgucucccuggacaacgugcugagcaccuucaucuccgccgcgcgccagggguucguggacagcgacgucgagaccaaggacgugguggagugccucaagcugucccaccagagcgacaucgaggucaccggcgacuccugcaacaacuacaugcugacguacaacaagguggagaacaugaccccccgggaccucggggccugcaucgacugcagcgcccgccacaucaacgcccagguggccaagucccacaacaucgcgcugaucuggaacgucaaggacuucaugagccuguccgagcagcuccggaagcagauccgcagcgccgccaagaagaacaaccugcccuucaagcugaccugcgccaccacgcgccagguggugaacgucgugaccaccaagaucgcccucaagggcgggugaggacuagucccuguucccagagcccacuuuuuuuucuuuuuuugaaauaaaauagccugucuuucagaucucaaaggcucuuuucagagccaccaaaaaaaaaaaaaaaaaaaaaaaaaaaaaaaaaaaaaaaaaaaaaaaaaaaaaaaaaaaaaaaaaaaaaaaaaaaaaaaaaaaaaaaaaaaaaaaaaaaaa

SEQ ID NO: 20125 - RNA, 6113 nt, Artificial Sequence
  SARS-CoV-2__MT370859.1__non-structural protein 3 (NSP3) mRNA gc
aggagagucccgcagucggcguccagcggcucugcuuguucgugugugugucguugcaggccuuauucaagcuuaccauggcccccaccaaggugaccuucggcgacgacacggucaucgaggugcagggguacaagagcgugaacaucaccuucgagcuggacgagcgcaucgacaagguccucaacgagaagugcuccgccuacaccguggagcugggcaccgaggugaacgaguucgcgugcgucguggccgacgccgugaucaagacgcugcagccggucagcgagcuccugaccccccuggggaucgaccucgacgagugguccauggccaccuacuaccuguucgacgagagcggcgaguucaagcuggccucccacauguacugcagcuucuacccccccgacgaggacgaggaggagggggacugcgaggaggaggaguucgagccguccacccaguacgaguacggcacggaggacgacuaccagggcaagccccucgaguucggggcgaccagcgccgcccugcagcccgaggaggagcaggaggaggacuggcuggacgacgacucccagcagaccgugggccagcaggacgggagcgaggacaaccagaccacgaccauccagaccaucguggagguccagccccagcucgagauggagcugaccccgguggugcagacgaucgaggucaacuccuucagcggcuaccugaagcucaccgacaacguguacaucaagaacgccgacaucguggaggaggcgaagaaggucaagcccaccgugguggucaacgccgccaacguguaccugaagcacgggggcggcguggccggggcccugaacaaggcgaccaacaacgccaugcaggucgaguccgacgacuacaucgccacgaacggcccccucaagguggggggcagcugcguccuguccggccacaaccuggccaagcacugccuccacgugguggggcccaacgucaacaagggcgaggacauccagcugcugaagagcgccuacgagaacuucaaccagcacgaggugcuccuggcgccgcugcucuccgccgggaucuucggcgccgaccccauccacagccugcgggugugcgucgacaccgugcgcaccaacguguaccuggccgucuucgacaagaaccucuacgacaagcugguguccagcuuccuggagaugaagagcgagaagcagguggagcagaagaucgccgagauccccaaggaggaggucaagcccuucaucaccgaguccaagccgagcguggagcagcggaagcaggacgacaagaagaucaaggcgugcguggaggaggucacgaccacccucgaggagaccaaguuccugacggagaaccugcuccuguacaucgacaucaacgggaaccugcaccccgacuccgccacccucgugagcgacaucgacaucaccuuccugaagaaggacgcccccuacaucgugggcgacgucgugcaggagggcgugcugaccgccgucgugauccccacgaagaaggccgggggcaccaccgagaugcucgcgaaggcccugcgcaaggugccgaccgacaacuacaucacgaccuaccccgggcagggccugaacggguacaccgucgaggaggccaagaccgugcucaagaagugcaaguccgccuucuacauccugcccagcaucaucuccaacgagaagcaggagauccugggcaccgugagcuggaaccuccgggagaugcuggcgcacgccgaggagacgcgcaagcugaugcccgucugcguggagaccaaggccaucguguccaccauccagcggaaguacaagggcaucaagauccaggagggggucguggacuacggcgcccgcuucuacuucuacaccagcaagacgaccguggccucccugaucaacacccucaacgaccugaacgagacccuggucacgaugccgcucggguacgugacccacggccugaaccuggaggaggcggcccgguacaugcgcagccucaaggugcccgccaccgucuccgugagcucccccgacgccgugaccgccuacaacggguaccugacgagcuccagcaagacccccgaggagcacuucaucgagaccaucucccuggcgggcagcuacaaggacuggagcuacuccggccagagcacccagcucgggaucgaguuccugaagcggggcgacaaguccgucuacuacacgagcaacccgaccaccuuccaccuggacggggaggugaucaccuucgacaaccucaagacgcugcugucccuccgcgaggugcggaccaucaaggucuucaccaccguggacaacaucaaccugcacacgcagguggucgacaugagcaugaccuacggccagcaguucggccccaccuaccuggacggggccgacgugaccaagaucaagccccacaacucccacgagggcaagacguucuacgugcucccgaacgacgacacccugcgcgucgaggccuucgaguacuaccacaccaccgaccccagcuuccuggggcgguacauguccgcccucaaccacacgaagaaguggaaguacccccaggugaacggccugaccagcaucaagugggccgacaacaacugcuaccuggcgaccgcccuccugacccugcagcagaucgagcucaaguucaaccccccggcccugcaggacgccuacuaccgcgcgcgggccggggaggccgccaacuucugcgcccugauccucgcguacugcaacaagacggugggcgagcugggcgacguccgcgagaccauguccuaccuguuccagcacgccaaccucgacagcugcaagcgggugcugaacgucgugugcaagaccugcgggcagcagcagaccacccugaagggcguggaggccgucauguacauggggacgcucuccuacgagcaguucaagaagggcgugcagauccccugcaccugcgggaagcaggccaccaaguaccuggugcagcaggagagccccuucgucaugauguccgcccccccggcgcaguacgagcugaagcacggcaccuucacgugcgccagcgaguacaccggcaacuaccagugcgggcacuacaagcacaucaccuccaaggagacccucuacugcaucgacggcgcccugcugacgaagagcagcgaguacaaggggcccaucaccgacguguucuacaaggagaacuccuacaccaccacgaucaagcccgugaccuacaagcucgacggcgucgugugcaccgagaucgaccccaagcuggacaacuacuacaagaaggacaacagcuacuucaccgagcagccgaucgaccuggugcccaaccagcccuaccccaacgccuccuucgacaacuucaaguucgucugcgacaacaucaaguucgccgacgaccucaaccagcugacgggguacaagaagccggcgagccgcgagcugaaggugaccuucuuccccgaccucaacggcgacguggucgccaucgacuacaagcacuacacccccuccuucaagaagggcgccaagcugcugcacaagcccaucguguggcacgugaacaacgccaccaacaaggcgacguacaagccgaacaccuggugcauccggugccucuggagcaccaagcccgucgagaccuccaacagcuucgacgugcugaaguccgaggacgcccaggggauggacaaccuggccugcgaggaccucaagcccgugagcgaggaggucguggagaaccccacgauccagaaggacgugcuggagugcaacgucaagaccaccgagguggugggcgacaucauccugaagccggccaacaacucccucaagaucaccgaggaggucgggcacacggaccugauggccgcguacguggacaacagcucccugaccaucaagaagcccaacgagcucagccgcgugcugggccugaagacccucgccacccacgggcuggccgccgucaacuccgugcccugggacacgaucgccaacuacgcgaagccguuccugaacaagguggucagcaccaccaccaacaucgugacgcgcugccucaaccgggugugcaccaacuacaugcccuacuucuucacccugcugcuccagcugugcaccuucacccgcuccacgaacagccggaucaaggccuccaugcccaccaccaucgccaagaacaccgucaagagcgugggcaaguucugccuggaggccagcuucaacuaccucaagucccccaacuucagcaagcugaucaacaucaucaucugguuccugcuccuguccgugugccugggcagccucaucuacuccacggccgcgcuggggguccugaugagcaaccucggcaugccguccuacugcaccggguaccgcgagggcuaccugaacagcaccaacgugaccaucgccacguacugcaccggcuccauccccugcagcgugugccuguccgggcucgacagccuggacaccuaccccucccuggagaccauccagaucacgaucagcuccuucaagugggaccucaccgccuucggccuggucgccgagugguuccuggccuacauccucuucacccgguucuucuacgugcuggggcuggcggccaucaugcagcucuucuucagcuacuucgccgugcacuucaucuccaacagcuggcugauguggcugaucaucaaccugguccagauggcccccaucuccgcgauggugcgcauguacaucuucuucgccagcuucuacuacguguggaagagcuacguccacgugguggacggcugcaacuccagcaccugcaugaugugcuacaagcggaaccgcgccacgcgggucgagugcaccaccaucgugaacgggguccgccgguccuucuacguguacgccaacggcggcaagggguucugcaagcuccacaacuggaacugcgugaacugcgacaccuucugcgccggcagcacguucaucuccgacgaggucgcgcgcgaccugagccugcaguucaagcggccgaucaaccccaccgaccaguccagcuacaucguggacuccgugaccgucaagaacgggagcauccgccucuacuucgacaaggccggccagaagaccuacgagcggcacucccugagccacuucgugaaccuggacaaccuccgcgccaacaacacgaaggggucccugcccaucaacgugaucgucuucgacggcaagagcaagugcgaggaguccagcgccaaguccgccagcguguacuacucccagcugaugugccagcccauccuccugcuggaccaggcgcucgugagcgacgucggcgacagcgccgagguggccgugaagauguucgacgccuacgucaacaccuucuccagcaccuucaacgugccgauggagaagcugaagacccugguggccacggcggaggccgagcucgccaagaacgucucccuggacaacgugcugagcaccuucaucuccgccgcgcggcagggguucguggacagcgacgucgagaccaaggacgugguggagugccucaagcugucccaccagagcgacaucgaggucaccggcgacuccugcaacaacuacaugcugacguacaacaagguggagaacaugaccccccgcgaccucggggccugcaucgacugcagcgcccggcacaucaacgcccagguggccaagucccacaacaucgcgcugaucuggaacgucaaggacuucaugagccuguccgagcagcuccgcaagcagauccgcagcgccgccaagaagaacaaccugcccuucaagcugaccugcgccaccacgcggcagguggugaacgucgugaccaccaagaucgcccucaagggcgggugaggacuagucccuguucccagagcccacuuuuuuuucuuuuuuugaaauaaaauagccugucuuucagaucucaaaggcucuuuucagagccaccaaaaaaaaaaaaaaaaaaaaaaaaaaaaaaaaaaaaaaaaaaaaaaaaaaaaaaaaaaaaaaaaaaaaaaaaaaaaaaaaaaaaaaaaaaaaaaaaaaaaa

SEQ ID NO: 20126 - RNA, 6113 nt, Artificial Sequence
  SARS-CoV-2__MT370862.1__non-structural protein 3 (NSP3) mRNA gc
aggagagucccgcagucggcguccagcggcucugcuuguucgugugugugucguugcaggccuuauucaagcuuaccauggcccccaccaaggugaccuucggcgacgacacggucaucgaggugcagggguacaagagcgugaacaucaccuucgagcuggacgagcgcaucgacaagguccucaacgagaagugcuccgccuacaccguggagcugggcaccgaggugaacgaguucgcgugcgucguggccgacgccgugaucaagacgcugcagccggucagcgagcuccugaccccccuggggaucgaccucgacgagugguccauggccaccuacuaccuguucgacgagagcggcgaguucaagcuggccucccacauguacugcagcuucuacccccccgacgaggacgaggaggagggggacugcgaggaggaggaguucgagccguccacccaguacgaguacggcacggaggacgacuaccagggcaagccccucgaguucggggcgaccagcgccgcccugcagcccgaggaggagcaggaggaggacuggcuggacgacgacucccagcagaccgugggccagcaggacgggagcgaggacaaccagaccacgaccauccagaccaucguggagguccagccccagcucgagauggagcugaccccgguggugcagacgaucgaggucaacuccuucagcggcuaccugaagcucaccgacaacguguacaucaagaacgccgacaucguggaggaggcgaagaaggucaagcccaccgugguggucaacgccgccaacguguaccugaagcacgggggcggcguggccggggcccugaacaaggcgaccaacaacgccaugcaggucgaguccgacgacuacaucgccacgaacggcccccucaagguggggggcagcugcguccuguccggccacaaccuggccaagcacugccuccacgugguggggcccaacgucaacaagggcgaggacauccagcugcugaagagcgccuacgagaacuucaaccagcacgaggugcuccuggcgccgcugcucuccgccgggaucuucggcgccgaccccauccacagccugcgggugugcgucgacaccgugcgcaccaacguguaccuggccgucuucgacaagaaccucuacgacaagcugguguccagcuuccuggagaugaagagcgagaagcagguggagcagaagaucgccgagauccccaaggaggaggucaagcccuucaucaccgaguccaagccgagcguggagcagcggaagcaggacgacaagaagaucaaggcgugcguggaggaggucacgaccacccucgaggagaccaaguuccugacggagaaccugcuccuguacaucgacaucaacgggaaccugcaccccgacuccgccacccucgugagcgacaucgacaucaccuuccugaagaaggacgcccccuacaucgugggcgacgucgugcaggagggcgugcugaccgccgucgugauccccacgaagaaggccgggggcaccaccgagaugcucgcgaaggcccugcgcaaggugccgaccgacaacuacaucacgaccuaccccgggcagggccugaacggguacaccgucgaggaggccaagaccgugcucaagaagugcaaguccgccuucuacauccugcccagcaucaucuccaacgagaagcaggagauccugggcaccgugagcuggaaccuccgggagaugcuggcgcacgccgaggagacgcgcaagcugaugcccgucugcguggagaccaaggccaucguguccaccauccagcggaaguacaagggcaucaagauccaggagggggucguggacuacggcgcccgcuucuacuucuacaccagcaagacgaccguggccucccugaucaacacccucaacgaccugaacgagacccuggucacgaugccgcucggguacgugacccacggccugaaccuggaggaggcggcccgguacaugcgcagccucaaggugcccgccaccgucuccgugagcucccccgacgccgugaccgccuacaacggguaccugacgagcuccagcaagacccccgaggagcacuucaucgagaccaucucccuggcgggcagcuacaaggacuggagcuacuccggccagagcacccagcucgggaucgaguuccugaagcggggcgacaaguccgucuacuacacgagcaacccgaccaccuuccaccuggacggggaggugaucaccuucgacaaccucaagacgcugcugucccuccgcgaggugcggaccaucaaggucuucaccaccguggacaacaucaaccugcacacgcagguggucgacaugagcaugaccuacggccagcaguucggccccaccuaccuggacggggccgacgugaccaagaucaagccccacaacucccacgagggcaagacguucuacgugcucccgaacgacgacacccugcgcgucgaggccuucgaguacuaccacaccaccgaccccagcuuccuggggcgguacauguccgcccucaaccacacgaagaaguggaaguacccccaggugaacggccugaccagcaucaagugggccgacaacaacugcuaccuggcgaccgcccuccugacccugcagcagaucgagcucaaguucaaccccccggcccugcaggacgccuacuaccgcgcgcgggccggggaggccgccaacuucugcgcccugauccucgcguacugcaacaagacggugggcgagcugggcgacguccgcgagaccauguccuaccuguuccagcacgccaaccucgacagcugcaagcgggugcugaacgucgugugcaagaccugcgggcagcagcagaccacccugaagggcguggaggccgucauguacauggggacgcucuccuacgagcaguucaagaagggcgugcagauccccugcaccugcgggaagcaggccaccaaguaccuggugcagcaggagagccccuucgucaugauguccgcccccccggcgcaguacgagcugaagcacggcaccuucacgugcgccagcgaguacaccggcaacuaccagugcgggcacuacaagcacaucaccuccaaggagacccucuacugcaucgacggcgcccugcugacgaagagcagcgaguacaaggggcccaucaccgacguguucuacaaggagaacuccuacaccaccacgaucaagcccgugaccuacaagcucgacggcgucgugugcaccgagaucgaccccaagcuggacaacuacuacaagaaggacaacagcuacuucaccgagcagccgaucgaccuggugcccaaccagcccuaccccaacgccuccuucgacaacuucaaguucgucugcgacaacaucaaguucgccgacgaccucaaccagcugacgggguacaagaagccggcgagccgcgagcugaaggugaccuucuuccccgaccucaacggcgacguggucgccaucgacuacaagcacuacacccccuccuucaagaagggcgccaagcugcugcacaagcccaucguguggcacgugaacaacgccaccaacaaggcgacguacaagccgaacaccuggugcauccggugccucuggagcaccaagcccgucgggaccuccaacagcuucgacgugcugaaguccgaggacgcccagggcauggacaaccuggccugcgaggaccucaagcccgugagcgaggaggucguggagaaccccacgauccagaaggacgugcuggagugcaacgucaagaccaccgagguggugggggacaucauccugaagccggccaacaacucccucaagaucaccgaggaggucggccacacggaccugauggccgcguacguggacaacagcucccugaccaucaagaagcccaacgagcucagccgcgugcuggggcugaagacccucgccacccacggccuggccgccgucaacuccgugcccugggacacgaucgccaacuacgcgaagccguuccugaacaagguggucagcaccaccaccaacaucgugacgcgcugccucaaccgggugugcaccaacuacaugcccuacuucuucacccugcugcuccagcugugcaccuucacccgcuccacgaacagccggaucaaggccuccaugcccaccaccaucgccaagaacaccgucaagagcgugggcaaguucugccuggaggccagcuucaacuaccucaagucccccaacuucagcaagcugaucaacaucaucaucugguuccugcuccuguccgugugccuggggagccucaucuacuccacggccgcgcugggcguccugaugagcaaccucgggaugccguccuacugcaccggcuaccgcgagggcuaccugaacagcaccaacgugaccaucgccacguacugcaccggguccauccccugcagcgugugccuguccggccucgacagccuggacaccuaccccucccuggagaccauccagaucacgaucagcuccuucaagugggaccucaccgccuucgggcuggucgccgagugguuccuggccuacauccucuucacccgguucuucuacgugcugggccuggcggccaucaugcagcucuucuucagcuacuucgccgugcacuucaucuccaacagcuggcugauguggcugaucaucaaccugguccagauggcccccaucuccgcgauggugcgcauguacaucuucuucgccagcuucuacuacguguggaagagcuacguccacgugguggacgggugcaacuccagcaccugcaugaugugcuacaagcggaaccgcgccacgcgggucgagugcaccaccaucgugaacggcguccgccgguccuucuacguguacgccaacggcgggaagggcuucugcaagcuccacaacuggaacugcgugaacugcgacaccuucugcgccgggagcacguucaucuccgacgaggucgcgcgcgaccugagccugcaguucaagcggccgaucaaccccaccgaccaguccagcuacaucguggacuccgugaccgucaagaacggcagcauccaccucuacuucgacaaggccgggcagaagaccuacgagcgccacucccugagccacuucgugaaccuggacaaccuccgggccaacaacacgaagggcucccugcccaucaacgugaucgucuucgacggcaagagcaagugcgaggaguccagcgccaaguccgccagcguguacuacucccagcugaugugccagcccauccuccugcuggaccaggcgcucgugagcgacgucggggacagcgccgagguggccgugaagauguucgacgccuacgucaacaccuucuccagcaccuucaacgugccgauggagaagcugaagacccugguggccacggcggaggccgagcucgccaagaacgucucccuggacaacgugcugagcaccuucaucuccgccgcgcgccagggcuucguggacagcgacgucgagaccaaggacgugguggagugccucaagcugucccaccagagcgacaucgaggucaccggggacuccugcaacaacuacaugcugacguacaacaagguggagaacaugaccccccgggaccucggcgccugcaucgacugcagcgcccgccacaucaacgcccagguggccaagucccacaacaucgcgcugaucuggaacgucaaggacuucaugagccuguccgagcagcuccggaagcagauccgcagcgccgccaagaagaacaaccugcccuucaagcugaccugcgccaccacgcgccagguggugaacgucgugaccaccaagaucgcccucaaggggggcugaggacuagucccuguucccagagcccacuuuuuuuucuuuuuuugaaauaaaauagccugucuuucagaucucaaaggcucuuuucagagccaccaaaaaaaaaaaaaaaaaaaaaaaaaaaaaaaaaaaaaaaaaaaaaaaaaaaaaaaaaaaaaaaaaaaaaaaaaaaaaaaaaaaaaaaaaaaaaaaaaaaaa

SEQ ID NO: 20127 - RNA, 6113 nt, Artificial Sequence
  SARS-CoV-2__MT370908.1__non-structural protein 3 (NSP3) mRNA gc
aggagagucccgcagucggcguccagcggcucugcuuguucgugugugugucguugcaggccuuauucaagcuuaccauggcccccaccaaggugaccuucggcgacgacacggucaucgaggugcagggguacaagagcgugaacaucaccuucgagcuggacgagcgcaucgacaagguccucaacgagaagugcuccgccuacaccguggagcugggcaccgaggugaacgaguucgcgugcgucguggccgacgccgugaucaagacgcugcagccggucagcgagcuccugaccccccuggggaucgaccucgacgagugguccauggccaccuacuaccuguucgacgagagcggcgaguucaagcuggccucccacauguacugcagcuucuacccccccgacgaggacgaggaggagggggacugcgaggaggaggaguucgagccguccacccaguacgaguacggcacggaggacgacuaccagggcaagccccucgaguucggggcgaccagcgccgugcugcagcccgaggaggagcaggaggaggacuggcuggacgacgacucccagcagaccgugggccagcaggacgggagcgaggacaaccagaccacgaccauccagaccaucgucgaggugcagccccagcucgagauggagcugaccccggugguccagacgaucgaggugaacuccuucagcggcuaccugaagcucaccgacaacguguacaucaagaacgccgacaucgucgaggaggccaagaaggugaagcccaccguggucgugaacgcggccaacguguaccugaagcacgggggcggcgucgccggggcccugaacaaggccaccaacaacgcgaugcagguggaguccgacgacuacaucgccacgaacggcccccucaaggucgggggcagcugcgugcuguccggccacaaccuggccaagcacugccuccacguggucgggcccaacgugaacaagggcgaggacauccagcugcugaagagcgccuacgagaacuucaaccagcacgaggugcuccuggccccgcugcucuccgcggggaucuucggcgccgaccccauccacagccugcgggucugcguggacaccgugcgcaccaacgucuaccuggccguguucgacaagaaccucuacgacaagcugguguccagcuuccuggagaugaagagcgagaagcaggucgagcagaagaucgccgagauccccaaggaggaggugaagcccuucaucaccgaguccaagccgagcguggagcagcggaagcaggacgacaagaagaucaaggccugcgucgaggaggugacgaccacccucgaggagaccaaguuccugacggagaaccugcuccuguacaucgacaucaacgggaaccugcaccccgacuccgcgacccucgugagcgacaucgacaucaccuuccugaagaaggacgcccccuacaucgucggcgacguggugcaggagggcguccugaccgccguggugauccccacgaagaaggccgggggcaccaccgagaugcucgccaaggcgcugcgcaaggucccgaccgacaacuacaucacgaccuaccccgggcagggccugaacggguacaccguggaggaggccaagaccgugcucaagaagugcaaguccgccuucuacauccugcccagcaucaucuccaacgagaagcaggagauccugggcaccgucagcuggaaccuccgggagaugcuggcccacgcggaggagacgcgcaagcugaugcccgugugcguggagaccaaggccaucgucuccaccauccagcggaaguacaagggcaucaagauccaggagggggugguggacuacggcgcccgcuucuacuucuacaccagcaagacgaccgucgccucccugaucaacacccucaacgaccugaacgagacccuggugacgaugccgcucggguacgugacccacggccugaaccuggaggaggccgcgcgguacaugcgcagccucaagguccccgccaccguguccgugagcucccccgacgccgucaccgccuacaacggguaccugacgagcuccagcaagacccccgaggagcacuucaucgagaccaucucccuggccggcagcuacaaggacuggagcuacuccggccagagcacccagcucgggaucgaguuccugaagcggggcgacaaguccguguacuacacgagcaacccgaccaccuuccaccuggacggggaggugaucaccuucgacaaccucaagacgcugcugucccuccgcgagguccggaccaucaagguguucaccaccguggacaacaucaaccugcacacgcaggucguggacaugagcaugaccuacggccagcaguucggccccaccuaccuggacggggcggacgugaccaagaucaagccccacaacucccacgagggcaagacguucuacguccucccgaacgacgacacccugcgcguggaggccuucgaguacuaccacaccaccgaccccagcuuccuggggcgguacauguccgcccucaaccacacgaagaaguggaaguacccccaggugaacggccugaccagcaucaagugggccgacaacaacugcuaccuggccaccgcgcuccugacccugcagcagaucgagcucaaguucaaccccccggcccugcaggacgccuacuaccgcgcccgggcgggggaggccgccaacuucugcgcccugauccucgccuacugcaacaagacggucggcgagcugggcgacgugcgcgagaccauguccuaccuguuccagcacgcgaaccucgacagcugcaagcggguccugaacguggugugcaagaccugcgggcagcagcagaccacccugaagggcgucgaggccgugauguacauggggacgcucuccuacgagcaguucaagaagggcgugcagauccccugcaccugcgggaagcaggccaccaaguaccugguccagcaggagagccccuucgugaugauguccgcccccccggcccaguacgagcugaagcacggcaccuucacgugcgcgagcgaguacaccggcaacuaccagugcgggcacuacaagcacaucaccuccaaggagacccucuacugcaucgacggcgcccugcugacgaagagcagcgaguacaaggggcccaucaccgacguguucuacaaggagaacuccuacaccaccacgaucaagcccgucaccuacaagcucgacggcguggugugcaccgagaucgaccccaagcuggacaacuacuacaagaaggacaacagcuacuucaccgagcagccgaucgaccugguccccaaccagcccuaccccaacgccuccuucgacaacuucaaguucgugugcgacaacaucaaguucgccgacgaccucaaccagcugacgggguacaagaagccggccagccgcgagcugaaggugaccuucuuccccgaccucaacggcgacgucguggcgaucgacuacaagcacuacacccccuccuucaagaagggcgccaagcugcugcacaagcccaucguguggcacgucaacaacgccaccaacaaggccacguacaagccgaacaccuggugcauccggugccucuggagcaccaagcccguggagaccuccaacagcuucgacgugcugaaguccgaggacgcgcaggggauggacaaccuggccugcgaggaccucaagcccgucagcgaggaggugguggagaaccccacgauccagaaggacguccuggagugcaacgugaagaccaccgagguggucggcgacaucauccugaagccggccaacaacucccucaagaucaccgaggagguggggcacacggaccugauggccgccuacguggacaacagcucccugaccaucaagaagcccaacgagcucagccgcguccugggccugaagacccucgcgacccacgggcuggccgccgugaacuccgugcccugggacacgaucgccaacuacgccaagccguuccugaacaaggucgugagcaccaccaccaacaucgugacgcgcugccucaaccgggucugcaccaacuacaugcccuacuucuucacccugcugcuccagcugugcaccuucacccgcuccacgaacagccggaucaaggcguccaugcccaccaccaucgccaagaacaccgugaagagcgugggcaaguucugccuggaggccagcuucaacuaccucaagucccccaacuucagcaagcugaucaacaucaucaucugguuccugcuccuguccgucugccugggcagccucaucuacuccacggccgcccugggggugcugaugagcaaccucggcaugccguccuacugcaccggguaccgcgagggcuaccugaacagcaccaacgugaccaucgcgacguacugcaccggcuccauccccugcagcgucugccuguccgggcucgacagccuggacaccuaccccucccuggagaccauccagaucacgaucagcuccuucaagugggaccucaccgccuucggccugguggccgagugguuccuggccuacauccucuucacccgguucuucuacgugcuggggcuggccgcgaucaugcagcucuucuucagcuacuucgccguccacuucaucuccaacagcuggcugauguggcugaucaucaaccuggugcagauggcccccaucuccgccauggugcgcauguacaucuucuucgcgagcuucuacuacgucuggaagagcuacgugcacguggucgacggcugcaacuccagcaccugcaugaugugcuacaagcggaaccgcgccacgcggguggagugcaccaccaucgucaacggggugcgccgguccuucuacguguacgccaacggcggcaagggguucugcaagcuccacaacuggaacugcgucaacugcgacaccuucugcgccggcagcacguucaucuccgacgagguggcccgcgaccugagccugcaguucaagcggccgaucaaccccaccgaccaguccagcuacaucguggacuccgucaccgugaagaacgggagcauccaccucuacuucgacaaggcgggccagaagaccuacgagcgccacucccugagccacuucgugaaccuggacaaccuccgggccaacaacacgaaggggucccugcccaucaacgucaucguguucgacggcaagagcaagugcgaggaguccagcgccaaguccgccagcguguacuacucccagcugaugugccagcccauccuccugcuggaccaggcccucgucagcgacgugggcgacagcgcggagguggccgucaagauguucgacgccuacgugaacaccuucuccagcaccuucaacgugccgauggagaagcugaagacccuggucgccacggccgaggcggagcucgccaagaacgugucccuggacaacgugcugagcaccuucaucuccgccgcccgccagggguucgucgacagcgacguggagaccaaggacguggucgagugccucaagcugucccaccagagcgacaucgaggugaccggcgacuccugcaacaacuacaugcugacguacaacaagguggagaacaugaccccccgggaccucggggcgugcaucgacugcagcgcccgccacaucaacgcccaggucgccaagucccacaacaucgcccugaucuggaacgugaaggacuucaugagccuguccgagcagcuccggaagcagauccgcagcgcggccaagaagaacaaccugcccuucaagcugaccugcgccaccacgcgccagguggucaacguggugaccaccaagaucgcccucaagggcgggugaggacuagucccuguucccagagcccacuuuuuuuucuuuuuuugaaauaaaauagccugucuuucagaucucaaaggcucuuuucagagccaccaaaaaaaaaaaaaaaaaaaaaaaaaaaaaaaaaaaaaaaaaaaaaaaaaaaaaaaaaaaaaaaaaaaaaaaaaaaaaaaaaaaaaaaaaaaaaaaaaaaaa

SEQ ID NO: 20128 - RNA, 6113 nt, Artificial Sequence
  SARS-CoV-2__MT370953.1__non-structural protein 3 (NSP3) mRNA gc
aggagagucccgcagucggcguccagcggcucugcuuguucgugugugugucguugcaggccuuauucaagcuuaccauggcccccaccaaggugaccuucggcgacgacacggucaucgaggugcagggguacaagagcgugaacaucaccuucgagcuggacgagcgcaucgacaagguccucaacgagaagugcuccgccuacaccguggagcugggcaccgaggugaacgaguucgcgugcgucguggccgacgccgugaucaagacgcugcagccggucagcgagcuccugaccccccuggggaucgaccucgacgagugguccauggccaccuacuaccuguucgacgagagcggcgaguucaagcuggccucccacauguacugcagcuucuacccccccgacgaggacgaggaggagggggacugcgaggaggaggaguucgagccguccacccaguacgaguacggcacggaggacgacuaccagggcaagccccucgaguucggggcgaccagcgccgcccugcagcccgaggaggagcaggaggaggacuggcuggacgacgacucccagcagaccgugggccagcaggacgggagcgaggacaaccagaccacgaccauccagaccaucguggagguccagccccagcucgagauggagcugaccccgguggugcagacgaucgaggucaacuccuucagcggcuaccugaagcucaccgacaacguguacaucaagaacgccgacaucguggaggaggcgaagaaggucaagcccaccgugguggucaacgccgccaacguguaccugaagcacgggggcggcguggccggggcccugaacaaggcgaccaacaacgccaugcaggucgaguccgacgacuacaucgccacgaacggcccccucaagguggggggcagcugcguccuguccggccacaaccuggccaagcacugccuccacgugguggggcccaacgucaacaagggcgaggacauccagcugcugaagagcgccuacgagaacuucaaccagcacgaggugcuccuggcgccgcugcucuccgccgggaucuucggcgccgaccccauccacagccugcgggugugcgucgacaccgugcgcaccaacguguaccuggccgucuucgacaagaaccucuacgacaagcugguguccagcuuccuggagaugaagagcgagaagcagguggagcagaagaucgccgagauccccaaggaggaggucaagcccuucaucaccgaguccaagccgagcguggagcagcggaagcaggacgacaagaagaucaaggcgugcguggaggaggucacgaccacccucgaggagaccaaguuccugacggagaaccugcuccuguacaucgacaucaacgggaaccugcaccccgacuccgccacccucgugagcgacaucgacaucaccuuccugaagaaggacgcccccuacaucgugggcgacgucgugcaggagggcgugcugaccgccgucgugauccccacgaagaaggccgggggcaccaccgagaugcucgcgaaggcccugcgcaaggugccgaccgacaacuacaucacgaccuaccccgggcagggccugaacggguacaccgucgaggaggccaagaccgugcucaagaagugcaaguccgccuucuacauccugcccagcaucaucuccaacgagaagcaggagauccugggcaccgugagcuggaaccuccgggagaugcuggcgcacgccgaggagacgcgcaagcugaugcccgucugcguggagaccaaggccaucguguccaccauccagcggaaguacaagggcaucaagauccaggagggggucguggacuacggcgcccgcuucuacuucuacaccugcaagacgaccguggccagccugaucaacacccucaacgaccugaacgagacccuggucacgaugccgcucggguacgugacccacggccugaaccuggaggaggcggcccgguacaugcgcucccucaaggugcccgccaccgucagcguguccagccccgacgccgugaccgccuacaacggguaccugacguccagcuccaagacccccgaggagcacuucaucgagaccaucagccuggcgggcuccuacaaggacuggagcuacagcggccaguccacccagcucgggaucgaguuccugaagcggggcgacaagagcgucuacuacacguccaacccgaccaccuuccaccuggacggggaggugaucaccuucgacaaccucaagacgcugcugagccuccgcgaggugcggaccaucaaggucuucaccaccguggacaacaucaaccugcacacgcagguggucgacauguccaugaccuacggccagcaguucggccccaccuaccuggacggggccgacgugaccaagaucaagccccacaacagccacgagggcaagacguucuacgugcucccgaacgacgacacccugcgcgucgaggccuucgaguacuaccacaccaccgaccccuccuuccuggggcgguacaugagcgcccucaaccacacgaagaaguggaaguacccccaggugaacggccugaccuccaucaagugggccgacaacaacugcuaccuggcgaccgcccuccugacccugcagcagaucgagcucaaguucaaccccccggcccugcaggacgccuacuaccgcgcgcgggccggggaggccgccaacuucugcgcccugauccucgcguacugcaacaagacggugggcgagcugggcgacguccgcgagaccaugagcuaccuguuccagcacgccaaccucgacuccugcaagcgggugcugaacgucgugugcaagaccugcgggcagcagcagaccacccugaagggcguggaggccgucauguacauggggacgcucagcuacgagcaguucaagaagggcgugcagauccccugcaccugcgggaagcaggccaccaaguaccuggugcagcaggagucccccuucgucaugaugagcgcccccccggcgcaguacgagcugaagcacggcaccuucacgugcgccuccgaguacaccggcaacuaccagugcgggcacuacaagcacaucaccagcaaggagacccucuacugcaucgacggcgcccugcugacgaaguccagcgaguacaaggggcccaucaccgacguguucuacaaggagaacagcuacaccaccacgaucaagcccgugaccuacaagcucgacggcgucgugugcaccgagaucgaccccaagcuggacaacuacuacaagaaggacaacuccuacuucaccgagcagccgaucgaccuggugcccaaccagcccuaccccaacgccagcuucgacaacuucaaguucgucugcgacaacaucaaguucgccgacgaccucaaccagcugacgggguacaagaagccggcgucccgcgagcugaaggugaccuucuuccccgaccucaacggcgacguggucgccaucgacuacaagcacuacacccccagcuucaagaagggcgccaagcugcugcacaagcccaucguguggcacgugaacaacgccaccaacaaggcgacguacaagccgaacaccuggugcauccggugccucugguccaccaagcccgucgagaccagcaacuccuucgacgugcugaagagcgaggacgcccaggggauggacaaccuggccugcgaggaccucaagcccguguccgaggaggucguggagaaccccacgauccagaaggacgugcuggagugcaacgucaagaccaccgagguggugggcgacaucauccugaagccggccaacaacagccucaagaucaccgaggaggucgggcacacggaccugauggccgcguacguggacaacuccagccugaccaucaagaagcccaacgagcucucccgcgugcugggccugaagacccucgccacccacgggcuggccgccgucaacagcgugcccugggacacgaucgccaacuacgcgaagccguuccugaacaagguggucuccaccaccaccaacaucgugacgcgcugccucaaccgggugugcaccaacuacaugcccuacuucuucacccugcugcuccagcugugcaccuucacccgcagcacgaacucccggaucaaggccagcaugcccaccaccaucgccaagaacaccgucaaguccgugggcaaguucugccuggaggccagcuucaacuaccucaagagccccaacuucuccaagcugaucaacaucaucaucugguuccugcuccugagcgugugccugggcucccucaucuacagcacggccgcgcuggggguccugauguccaaccucggcaugccgagcuacugcaccggguaccgcgagggcuaccugaacuccaccaacgugaccaucgccacguacugcaccggcagcauccccugcuccgugugccugagcgggcucgacucccuggacaccuaccccagccuggagaccauccagaucacgaucuccagcuucaagugggaccucaccgccuucggccuggucgccgagugguuccuggccuacauccucuucacccgguucuucuacgugcuggggcuggcggccaucaugcagcucuucuucuccuacuucgccgugcacuucaucagcaacuccuggcugauguggcugaucaucaaccugguccagauggcccccaucagcgcgauggugcgcauguacaucuucuucgccuccuucuacuacguguggaagagcuacguccacgugguggacggcugcaacagcuccaccugcaugaugugcuacaagcggaaccgcgccacgcgggucgagugcaccaccaucgugaacgggguccgccggagcuucuacguguacgccaacggcggcaagggguucugcaagcuccacaacuggaacugcgugaacugcgacaccuucugcgccggcuccacguucaucagcgacgaggucgcgcgcgaccugucccugcaguucaagcggccgaucaaccccaccgaccagagcuccuacaucguggacagcgugaccgucaagaacggguccauccaccucuacuucgacaaggccggccagaagaccuacgagcgccacagccugucccacuucgugaaccuggacaaccuccgggccaacaacacgaaggggagccugcccaucaacgugaucgucuucgacggcaaguccaagugcgaggagagcuccgccaagagcgccuccguguacuacagccagcugaugugccagcccauccuccugcuggaccaggcgcucguguccgacgucggcgacagcgccgagguggccgugaagauguucgacgccuacgucaacaccuucagcuccaccuucaacgugccgauggagaagcugaagacccugguggccacggcggaggccgagcucgccaagaacgucagccuggacaacgugcuguccaccuucaucagcgccgcgcgccagggguucguggacuccgacgucgagaccaaggacgugguggagugccucaagcugagccaccaguccgacaucgaggucaccggcgacagcugcaacaacuacaugcugacguacaacaagguggagaacaugaccccccgggaccucggggccugcaucgacugcuccgcccgccacaucaacgcccagguggccaagagccacaacaucgcgcugaucuggaacgucaaggacuucaugucccugagcgagcagcuccggaagcagauccgcuccgccgccaagaagaacaaccugcccuucaagcugaccugcgccaccacgcgccagguggugaacgucgugaccaccaagaucgcccucaagggcgggugaggacuagucccuguucccagagcccacuuuuuuuucuuuuuuugaaauaaaauagccugucuuucagaucucaaaggcucuuuucagagccaccaaaaaaaaaaaaaaaaaaaaaaaaaaaaaaaaaaaaaaaaaaaaaaaaaaaaaaaaaaaaaaaaaaaaaaaaaaaaaaaaaaaaaaaaaaaaaaaaaaaaa

SEQ ID NO: 20129 - RNA, 6113 nt, Artificial Sequence
  SARS-CoV-2__MT370987.1__non-structural protein 3 (NSP3) mRNA gc
aggagagucccgcagucggcguccagcggcucugcuuguucgugugugugucguugcaggccuuauucaagcuuaccauggcccccaccaaggugaccuucggcgacgacacggucaucgaggugcagggguacaagagcgugaacaucaccuucgagcuggacgagcgcaucgacaagguccucaacgagaagugcuccgccuacaccguggagcugggcaccgaggugaacgaguucgcgugcgucguggccgacgccgugaucaagacgcugcagccggucagcgagcuccugaccccccuggggaucgaccucgacgagugguccauggccaccuacuaccuguucgacgagagcggcgaguucaagcuggccucccacauguacugcagcuucuacccccccgacgaggacgaggaggagggggacugcgaggaggaggaguucgagccguccacccaguacgaguacggcacggaggacgacuaccagggcaagccccucgaguucggggcgaccagcgccgcccugcagcccgaggaggagcaggaggaggacuggcuggacgacgacucccagcagaccgugggccagcaggacgggagcgaggacaaccagaccacgaccauccagaccaucguggagguccagccccagcucgagauggagcugaccccgguggugcagacgaucgaggucaacuccuucagcggcuaccugaagcucaccgacaacguguacaucaagaacgccgacaucguggaggaggcgaagaaggucaagcccaccgugguggucaacgccgccaacguguaccugaagcacgggggcggcguggccggggcccugaacaaggcgaccaacaacgccaugcaggucgaguccgacgacuacaucgccacgaacggcccccucaagguggggggcagcugcguccuguccggccacaaccuggccaagcacugccuccacgugguggggcccaacgucaacaagggcgaggacauccagcugcugaagagcgccuacgagaacuucaaccagcacgaggugcuccuggcgccgcugcucuccgccgggaucuucggcgccgaccccauccacagccugcgggugugcgucgacaccgugcgcaccaacguguaccuggccgucuucgacaagaaccucuacgacaagcugguguccagcuuccuggagaugaagagcgagaagcagguggagcagaagaucgccgagauccccaaggaggaggucaagcccuucaucaccgaguccaagccgagcguggagcagcggaagcaggacgacaagaagaucaaggcgugcguggaggaggucacgaccacccucgaggagaccaaguuccugacggagaaccugcuccuguacaucgacaucaacgggaaccugcaccccgacuccgccacccucgugagcgacaucgacaucaccuuccugaagaaggacgcccccuacaucgugggcgacgucgugcaggagggcgugcugaccgccgucgugauccccacgaagaaggccgggggcaccaccgagaugcucgcgaaggcccugcgcaaggugccgaccgacaacuacaucacgaccuaccccgggcagggccugaacggguacaccgucgaggaggccaagaccgugcucaagaagugcaaguccgccuucuacauccugcccagcaucaucuccaacgagaagcaggagauccugggcaccgugagcuggaaccuccgggagaugcuggcgcacgccgaggagacgcgcaagcugaugcccgucugcguggagaccaaggccaucguguccaccauccagcggaaguacaagggcaucaagauccaggagggggucguggacuacggcgcccgcuucuacuucuacaccagcaagacgaccguggccucccugaucaacacccucaacgaccugaacgagacccuggucacgaugccgcucggguacgugacccacggccugaaccuggaggaggcggcccgguacaugcgcagccucaaggugcccgccaccgucuccgugagcucccccgacgccgugaccgccuacaacggguaccugacgagcuccagcaagacccccgaggagcacuucaucgagaccaucucccuggcgggcagcuacaaggacuggagcuacuccggccagagcacccagcucgggaucgaguuccugaagcggggcgacaaguccgucuacuacacgagcaacccgaccaccuuccaccuggacggggaggugaucaccuucgacaaccucaagacgcugcugucccuccgcgaggugcggaccaucaaggucuucaccaccguggacaacaucaaccugcacacgcagguggucgacaugagcaugaccuacggccagcaguucggccccaccuaccuggacggggccgacgugaccaagaucaagccccacaacucccacgagggcaagacguucuacgugcucccgaacgacgacacccugcgcgucgaggccuucgaguacuaccacaccaccgaccccagcuuccuggggcgguacauguccgcccucaaccacacgaagaaguggaaguacccccaggugaacggccugaccagcaucaagugggccgacaacaacugcuaccuggcgaccgcccuccugacccugcagcagaucgagcucaaguucaaccccccggcccugcaggacgccuacuaccgcgcgcgggccggggaggccgccaacuucugcgcccugauccucgcguacugcaacaagacggugggcgagcugggcgacguccgcgagaccauguccuaccuguuccagcacgccaaccucgacagcugcaagcgggugcugaacgucgugugcaagaccugcgggcagcagcagaccacccugaagggcguggaggccgucauguacauggggacgcucuccuacgagcaguucaagaagggcgugcagauccccugcaccugcgggaagcaggccaccaaguaccuggugcagcaggagagccccuucgucaugauguccgcccccccggcgcaguacgagcugaagcacggcaccuucacgugcgccagcgaguacaccggcaacuaccagugcgggcacuacaagcacaucaccuccaaggagacccucuacugcaucgacggcgcccugcugacgaagagcagcgaguacaaggggcccaucaccgacguguucuacaaggagaacuccuacaccaccacgaucaagcccgugaccuacaagcucgacggcgucgugugcaccgagaucgaccccaagcuggacaacuacuacaagaaggacaacagcuacuucaccgagcagccgaucgaccuggugcccaaccagcccuaccccaacgccuccuucgacaacuucaaguucgucugcgacaacaucaaguucgccgacgaccucaaccagcugacgggguacaagaagccggcgagccgcgagcugaaggugaccuucuuccccgaccucaacggcgacguggucgccaucgacuacaagcacuacacccccuccuucaagaagggcgccaagcugcugcacaagcccaucguguggcacgugaacaacgccaccaacaaggcgacguacaagccgaacaccuggugcauccggugccucuggagcaccaagcccgucgagaccuccaacagcuucgacgugcugaaguccgaggacgcccaggggauggacaaccuggccugcgaggaccucaagcccgugagcgaggaggucguggagaaccccacgauccagaaggacgugcuggagugcaacgucaagaccaccgagguggugggcgacaucauccugaagccggccaacaacucccucaagaucaccgaggaggucgggcacacggaccugauggccgcguacguggacaacagcucccugaccaucaagaagcccaacgagcucagccgcgugcugggccugaagacccucgccacccacgggcuggccgccgucaacuccgugcccugggacacgaucgccaacuacgcgaagccguuccugaacaagguggucagcaccaccaccaacaucgugacgcgcugccucaaccgggugugcaccaacuacaugcccuacuucuucacccugcugcuccagcugugcaccuucacccgcuccacgaacagccggaucaaggccuccaugcccaccaccaucgccaagaacaccgucaagagcgugggcaaguucugccuggaggccagcuucaacuaccucaagucccccaacuucagcaagcugaucaacaucaucaucugguuccugcuccuguccgugugccugggcagccucaucuacuccacggccgcgcuggggguccugaugagcaaccucggcaugccguccuacugcaccggguaccgcgagggcuaccugaacagcaccaacgugaccaucgccacguacugcaccggcuccauccccugcagcgugugccuguccgggcucgacagccuggacaccuaccccucccuggagaccauccagaucacgaucagcuccuucaagugggaccucaccgccuucggccuggucgccgagugguuccuggccuacauccucuucacccgguucuucuacgugcuggggcuggcggccaucaugcagcucuucuucagcuacuucgccgugcacuucaucuccaacagcuggcugauguggcugaucaucaaccugguccagauggcccccaucuccgcgauggugcgcauguacaucuucuucgccagcuucuacuacguguggaagagcuacguccacgugguggacggcugcaacuccagcaccugcaugaugugcuacaagcggaaccgcgccacgcgggucgagugcaccaccaucgugaacgggguccgccgguccuucuacguguacgccaacggcggcaagggguucugcaagcuccacaacuggaacugcgugaacugcgacaccuucugcgccggcagcacguucaucuccgacgaggucgcgcgcgaccugagccugcaguucaagcggccgaucaaccccaucgaccaguccagcuacaucguggacuccgugaccgucaagaacgggagcauccaccucuacuucgacaaggccggccagaagaccuacgagcgccacucccugagccacuucgugaaccuggacaaccuccgggccaacaacaccaaggggucccugcccaucaacgugaucgucuucgacggcaagagcaagugcgaggaguccagcgccaaguccgccagcguguacuacucccagcugaugugccagcccauccuccugcuggaccaggcgcucgugagcgacgucggcgacagcgccgagguggccgugaagauguucgacgccuacgucaacacguucuccagcaccuucaacgugccgauggagaagcugaagacccugguggccaccgcggaggccgagcucgccaagaacgucucccuggacaacgugcugagcacguucaucuccgccgcgcgccagggguucguggacagcgacgucgagaccaaggacgugguggagugccucaagcugucccaccagagcgacaucgaggucaccggcgacuccugcaacaacuacaugcugaccuacaacaagguggagaacaugacgccccgggaccucggggccugcaucgacugcagcgcccgccacaucaacgcccagguggccaagucccacaacaucgcgcugaucuggaacgucaaggacuucaugagccuguccgagcagcuccggaagcagauccgcagcgccgccaagaagaacaaccugcccuucaagcugaccugcgccaccacccgccagguggugaacgucgugacgaccaagaucgcccucaagggcgggugaggacuagucccuguucccagagcccacuuuuuuuucuuuuuuugaaauaaaauagccugucuuucagaucucaaaggcucuuuucagagccaccaaaaaaaaaaaaaaaaaaaaaaaaaaaaaaaaaaaaaaaaaaaaaaaaaaaaaaaaaaaaaaaaaaaaaaaaaaaaaaaaaaaaaaaaaaaaaaaaaaaaa

SEQ ID NO: 20130 - RNA, 6113 nt, Artificial Sequence
  SARS-CoV-2__MT371002.1__non-structural protein 3 (NSP3) mRNA gc
aggagagucccgcagucggcguccagcggcucugcuuguucgugugugugucguugcaggccuuauucaagcuuaccauggcccccaccaaggugaccuucggcgacgacacggucaucgaggugcagggguacaagagcgugaacaucaccuucgagcuggacgagcgcaucgacaagguccucaacgagaagugcuccgccuacaccguggagcugggcaccgaggugaacgaguucgcgugcgucguggccgacgccgugaucaagacgcugcagccggucagcgagcuccugaccccccuggggaucgaccucgacgagugguccauggccaccuacuaccuguucgacgagagcggcgaguucaagcuggccucccacauguacugcagcuucuacccccccgacgaggacgaggaggagggggacugcgaggaggaggaguucgagccguccacccaguacgaguacggcacggaggacgacuaccagggcaagccccucgaguucggggcgaccagcgccgcccugcagcccgaggaggagcaggaggaggacuggcuggacgacgacucccagcagaccgugggccagcaggacgggagcgaggacaaccagaccacgaccauccagaccaucguggagguccagccccagcucgagauggagcugaccccgguggugcagacgaucgaggucaacuccuucagcggcuaccugaagcucaccgacaacguguacaucaagaacgccgacaucguggaggaggcgaagaaggucaagcccaccgugguggucaacgccgccaacguguaccugaagcacgggggcggcguggccggggcccugaacaaggcgaccaacaacgccaugcaggucgaguccgacgacuacaucgccacgaacggcccccucaagguggggggcagcugcguccuguccggccacaaccuggccaagcacugccuccacgugguggggcccaacgucaacaagggcgaggacauccagcugcugaagagcgccuacgagaacuucaaccagcacgaggugcuccuggcgccgcugcucuccgccgggaucuucggcgccgaccccauccacagccugcgggugugcgucgacaccgugcgcaccaacguguaccuggccgucuucgacaagaaccucuacgacaagcugguguccagcuuccuggagaugaagagcgagaagcagguggagcagaagaucgccgagauccccaaggaggaggucaagcccuucaucaccgaguccaagccgagcguggagcagcggaagcaggacgacaagaagaucaaggcgugcguggaggaggucacgaccacccucgaggagaccaaguuccugacggagaaccugcuccuguacaucgacaucaacgggaaccugcaccccgacuccgccacccucgugagcgacaucgacaucaccuuccugaagaaggacgcccccuacaucgugggcgacgucgugcaggagggcgugcugaccgccgucgugauccccacgaagaaggccgggggcaccaccgagaugcucgcgaaggcccugcgcaaggugccgaccgacaacuacaucacgaccuaccccgggcagggccugaacggguacaccgucgaggaggccaagaccgugcucaagaagugcaaguccgccuucuacauccugcccagcaucaucuccaacgagaagcaggagauccugggcaccgugagcuggaaccuccgggagaugcuggcgcacgccgaggagacgcgcaagcugaugcccgucugcguggagaccaaggccaucguguccaccauccagcggaaguacaagggcaucaagauccaggagggggucguggacuacggcgcccgcuucuacuucuacaccagcaagacgaccguggccucccugaucaacauccucaacgaccugaacgagacccuggucaccaugccgcucggguacgugacgcacggccugaaccuggaggaggcggcccgguacaugcgcagccucaaggugcccgccaccgucuccgugagcucccccgacgccgugaccgccuacaacggguaccugaccagcuccagcaagacgcccgaggagcacuucaucgagaccaucucccuggcgggcagcuacaaggacuggagcuacuccggccagagcacccagcucgggaucgaguuccugaagcggggcgacaaguccgucuacuacaccagcaacccgacgaccuuccaccuggacggggaggugaucaccuucgacaaccucaagacccugcugucccuccgcgaggugcggacgaucaaggucuucaccaccguggacaacaucaaccugcacacccagguggucgacaugagcaugacguacggccagcaguucggccccaccuaccuggacggggccgacgugaccaagaucaagccccacaacucccacgagggcaagaccuucuacgugcucccgaacgacgacacgcugcgcgucgaggccuucgaguacuaccacaccaccgaccccagcuuccuggggcgguacauguccgcccucaaccacaccaagaaguggaaguacccccaggugaacggccugacgagcaucaagugggccgacaacaacugcuaccuggcgaccgcccuccugacccugcagcagaucgagcucaaguucaaccccccggcccugcaggacgccuacuaccgcgcgcgggccggggaggccgccaacuucugcgcccugauccucgcguacugcaacaagaccgugggcgagcugggcgacguccgcgagacgauguccuaccuguuccagcacgccaaccucgacagcugcaagcgggugcugaacgucgugugcaagaccugcgggcagcagcagaccacccugaagggcguggaggccgucauguacauggggacccucuccuacgagcaguucaagaagggcgugcagauccccugcacgugcgggaagcaggccaccaaguaccuggugcagcaggagagccccuucgucaugauguccgcccccccggcgcaguacgagcugaagcacggcaccuucaccugcgccagcgaguacacgggcaacuaccagugcgggcacuacaagcacaucaccuccaaggagacccucuacugcaucgacggcgcccugcugaccaagagcagcgaguacaaggggcccaucacggacguguucuacaaggagaacuccuacaccaccaccaucaagcccgugacguacaagcucgacggcgucgugugcaccgagaucgaccccaagcuggacaacuacuacaagaaggacaacagcuacuucaccgagcagccgaucgaccuggugcccaaccagcccuaccccaacgccuccuucgacaacuucaaguucgucugcgacaacaucaaguucgccgacgaccucaaccagcugaccggguacaagaagccggcgagccgcgagcugaaggugacguucuuccccgaccucaacggcgacguggucgccaucgacuacaagcacuacacccccuccuucaagaagggcgccaagcugcugcacaagcccaucguguggcacgugaacaacgccaccaacaaggcgaccuacaagccgaacacguggugcauccggugccucuggagcaccaagcccgucgagaccuccaacagcuucgacgugcugaaguccgaggacgcccaggggauggacaaccuggccugcgaggaccucaagcccgugagcgaggaggucguggagaaccccaccauccagaaggacgugcuggagugcaacgucaagacgaccgagguggugggcgacaucauccugaagccggccaacaacucccucaagaucaccgaggaggucgggcacaccgaccugauggccgcguacguggacaacagcucccugacgaucaagaagcccaacgagcucagccgcgugcugggccugaagacccucgccacccacgggcuggccgccgucaacuccgugcccugggacaccaucgccaacuacgcgaagccguuccugaacaagguggucagcacgaccaccaacaucgugacccgcugccucaaccgggugugcacgaacuacaugcccuacuucuucacccugcugcuccagcugugcaccuucacccgcuccaccaacagccggaucaaggccuccaugcccacgaccaucgccaagaacaccgucaagagcgugggcaaguucugccuggaggccagcuucaacuaccucaagucccccaacuucagcaagcugaucaacaucaucaucugguuccugcuccuguccgugugccugggcagccucaucuacuccaccgccgcgcuggggguccugaugagcaaccucggcaugccguccuacugcacgggguaccgcgagggcuaccugaacagcaccaacgugaccaucgccaccuacugcacgggcuccauccccugcagcgugugccuguccgggcucgacagccuggacaccuaccccucccuggagaccauccagaucaccaucagcuccuucaagugggaccucacggccuucggccuggucgccgagugguuccuggccuacauccucuucacccgguucuucuacgugcuggggcuggcggccaucaugcagcucuucuucagcuacuucgccgugcacuucaucuccaacagcuggcugauguggcugaucaucaaccugguccagauggcccccaucuccgcgauggugcgcauguacaucuucuucgccagcuucuacuacguguggaagagcuacguccacgugguggacggcugcaacuccagcaccugcaugaugugcuacaagcggaaccgcgccacccgggucgagugcacgaccaucgugaacgggguccgccgguccuucuacguguacgccaacggcggcaagggguucugcaagcuccacaacuggaacugcgugaacugcgacaccuucugcgccggcagcaccuucaucuccgacgaggucgcgcgcgaccugagccugcaguucaagcggccgaucaaccccacggaccaguccagcuacaucguggacuccgugaccgucaagaacgggagcauccaccucuacuucgacaaggccggccagaagaccuacgagcgccacucccugagccacuucgugaaccuggacaaccuccgggccaacaacaccaaggggucccugcccaucaacgugaucgucuucgacggcaagagcaagugcgaggaguccagcgccaaguccgccagcguguacuacucccagcugaugugccagcccauccuccugcuggaccaggcgcucgugagcgacgucggcgacagcgccgagguggccgugaagauguucgacgccuacgucaacacguucuccagcaccuucaacgugccgauggagaagcugaagacccugguggccaccgcggaggccgagcucgccaagaacgucucccuggacaacgugcugagcacguucaucuccgccgcgcgccagggguucguggacagcgacgucgagaccaaggacgugguggagugccucaagcugucccaccagagcgacaucgaggucaccggcgacuccugcaacaacuacaugcugaccuacaacaagguggagaacaugacgccccgggaccucggggccugcaucgacugcagcgcccgccacaucaacgcccagguggccaagucccacaacaucgcgcugaucuggaacgucaaggacuucaugagccuguccgagcagcuccggaagcagauccgcagcgccgccaagaagaacaaccugcccuucaagcugaccugcgccaccacccgccagguggugaacgucgugacgaccaagaucgcccucaagggcgggugaggacuagucccuguucccagagcccacuuuuuuuucuuuuuuugaaauaaaauagccugucuuucagaucucaaaggcucuuuucagagccaccaaaaaaaaaaaaaaaaaaaaaaaaaaaaaaaaaaaaaaaaaaaaaaaaaaaaaaaaaaaaaaaaaaaaaaaaaaaaaaaaaaaaaaaaaaaaaaaaaaaaa

SEQ ID NO: 20131 - RNA, 6113 nt, Artificial Sequence
  SARS-CoV-2__MT358672.1__non-structural protein 3 (NSP3) mRNA gc
aggagagucccgcagucggcguccagcggcucugcuuguucgugugugugucguugcaggccuuauucaagcuuaccauggcccccaccaaggugaccuucggcgacgacacggucaucgaggugcagggguacaagagcgugaacaucaccuucgagcuggacgagcgcaucgacaagguccucaacgagaagugcuccgccuacaccguggagcugggcaccgaggugaacgaguucgcgugcgucguggccgacgccgugaucaagacgcugcagccggucagcgagcuccugaccccccuggggaucgaccucgacgagugguccauggccaccuacuaccuguucgacgagagcggcgaguucaagcuggccucccacauguacugcagcuucuacccccccgacgaggacgaggaggagggggacugcgaggaggaggaguucgagccguccacccaguacgaguacggcacggaggacgacuaccagggcaagccccucgaguucggggcgaccagcgccgcccugcagcccgaggaggagcaggaggaggacuggcuggacgacgacucccagcagaccgugggccagcaggacgggagcgaggacaaccagaccacgaccauccagaccaucguggagguccagccccagcucgagauggagcugaccccgguggugcagacgaucgaggucaacuccuucagcggcuaccugaagcucaccgacaacguguacaucaagaacgccgacaucguggaggaggcgaagaaggucaagcccaccgugguggucaacgccgccaacguguaccugaagcacgggggcggcguggccggggcccugaacaaggcgaccaacaacgccaugcaggucgaguccgacgacuacaucgccacgaacggcccccucaagguggggggcagcugcguccuguccggccacaaccuggccaagcacugccuccacgugguggggcccaacgucaacaagggcgaggacauccagcugcugaagagcgccuacgagaacuucaaccagcacgaggugcuccuggcgccgcugcucuccgccgggaucuucggcgccgaccccauccacagccugcgggugugcgucgacaccgugcgcaccaacguguaccuggccgucuucgacaagaaccucuacgacaagcugguguccagcuuccuggagaugaagagcgagaagcagguggagcagaagaucgccgagauccccaaggaggaggucaagcccuucaucaccgaguccaagccgagcguggagcagcggaagcaggacgacaagaagaucaaggcgugcguggaggaggucacgaccacccucgaggagaccaaguuccugacggagaaccugcuccuguacaucgacaucaacgggaaccugcaccccgacuccgccacccucgugagcgacaucgacaucaccuuccugaagaaggacgcccccuacaucgugggcgacgucgugcaggagggcgugcugaccgccgucgugauccccacgaagaaggccgggggcaccaccgagaugcucgcgaaggcccugcgcaaggugccgaccgacaacuacaucacgaccuaccccgggcagggccugaacggguacaccgucgaggaggccaagaccgugcucaagaagugcaaguccgccuucuacauccugcccagcaucaucuccaacgagaagcaggagauccugggcaccgugagcuggaaccuccgggagaugcuggcgcacgccgaggagacgcgcaagcugaugcccgucugcguggagaccaaggccaucguguccaccauccagcggaaguacaagggcaucaagauccaggagggggucguggacuacggcgcccgcuucuacuucuacaccagcaagacgaccguggccucccugaucaacacccucaacgaccugaacgagacccuggucacgaugccgcucggguacgugacccacggccugaaccuggaggaggcggcccgguacaugcgcagccucaaggugcccgccaccgucuccgugagcucccccgacgccgugaccgccuacaacggguaccugacgagcuccagcaagacccccgaggagcacuucaucgagaccaucucccuggcgggcagcuacaaggacuggagcuacuccggccagagcacccagcucgggaucgaguuccugaagcggggcgacaaguccgucuacuacacgagcaacccgaccaccuuccaccuggacggggaggugaucaccuucgacaaccucaagacgcugcugucccuccgcgaggugcggaccaucaaggucuucaccaccguggacaacaucaaccugcacacgcagguggucgacaugagcaugaccuacggccagcaguucggccccaccuaccuggacggggccgacgugaccaagaucaagccccacaacucccacgagggcaagacguucuacgugcucccgaacgacgacacccugcgcgucgaggccuucgagcacuaccacaccaccgaccccagcuuccuggggcgguacauguccgcccucaaccacacgaagaaguggaaguacccccaggugaacggccugaccagcaucaagugggccgacaacaacugcuaccuggcgaccgcccuccugacccugcagcagaucgagcucaaguucaaccccccggcccugcaggacgccuacuaccgcgcgcgggccggggaggccgccaacuucugcgcccugauccucgcguacugcaacaagacggugggcgagcugggcgacguccgcgagaccauguccuaccuguuccagcacgccaaccucgacagcugcaagcgggugcugaacgucgugugcaagaccugcgggcagcagcagaccacccugaagggcguggaggccgucauguacauggggacgcucuccuacgagcaguucaagaagggcgugcagauccccugcaccugcgggaagcaggccaccaaguaccuggugcagcaggagagccccuucgucaugauguccgcccccccggcgcaguacgagcugaagcacggcaccuucacgugcgccagcgaguacaccggcaacuaccagugcgggcacuacaagcacaucaccuccaaggagacccucuacugcaucgacggcgcccugcugacgaagagcagcgaguacaaggggcccaucaccgacguguucuacaaggagaacuccuacaccaccacgaucaagcccgugaccuacaagcucgacggcgucgugugcaccgagaucgaccccaagcuggacaacuacuacaagaaggacaacagcuacuucaccgagcagccgaucgaccuggugcccaaccagcccuaccccaacgccuccuucgacaacuucaaguucgucugcgacaacaucaaguucgccgacgaccucaaccagcugacgggguacaagaagccggcgagccgcgagcugaaggugaccuucuuccccgaccucaacggcgacguggucgccaucgacuacaagcacuacacccccuccuucaagaagggcgccaagcugcugcacaagcccaucguguggcacgugaacaacgccaccaacaaggcgacguacaagccgaacaccuggugcauccggugccucuggagcaccaagcccgucgagaccuccaacagcuucgacgugcugaaguccgaggacgcccaggggauggacaaccuggccugcgaggaccucaagcccgugagcgaggaggucguggagaaccccacgauccagaaggacgugcuggagugcaacgucaagaccaccgagguggugggcgacaucauccugaagccggccaacaacucccucaagaucaccgaggaggucgggcacacggaccugauggccgcguacguggacaacagcucccugaccaucaagaagcccaacgagcucagccgcgugcugggccugaagacccucgccacccacgggcuggccgccgucaacuccgugcccugggacacgaucgccaacuacgcgaagccguuccugaacaagguggucagcaccaccaccaacaucgugacgcgcugccucaaccgggugugcaccaacuacaugcccuacaucuucacccugcugcuccagcugugcaccuucacccgcuccacgaacagccggaucaaggccuccaugcccaccaccaucgccaagaacaccgucaagagcgugggcaaguucugccuggaggccagcuucaacuaccucaagucccccaacuucagcaagcugaucaacaucaucaucugguuccugcuccuguccgugugccugggcagccucaucuacuccacggccgcgcuggggguccugaugagcaaccucggcaugccguccuacugcaccggguaccgcgagggcuaccugaacagcaccaacgugaccaucgccacguacugcaccggcuccauccccugcagcgugugccuguccgggcucgacagccuggacaccuaccccucccuggagaccauccagaucacgaucagcuccuucaagugggaccucaccgccuucggccuggucgccgagugguuccuggccuacauccucuucacccgguucuucuacgugcuggggcuggcggccaucaugcagcucuucuucagcuacuucgccgugcacuucaucuccaacagcuggcugauguggcugaucaucaaccugguccagauggcccccaucuccgcgauggugcgcauguacaucuucuucgccagcuucuacuacguguggaagagcuacguccacgugguggacggcugcaacuccagcaccugcaugaugugcuacaagcggaaccgcgccacgcgggucgagugcaccaccaucgugaacgggguccgccgguccuucuacguguacgccaacggcggcaagggguucugcaagcuccacaacuggaacugcgugaacugcgacaccuucugcgccggcagcacguucaucuccgacgaggucgcgcgcgaccugagccugcaguucaagcggccgaucaaccccaccgaccaguccagcuacaucguggacuccgugaccgucaagaacgggagcauccaccucuacuucgacaaggccggccagaagaccuacgagcgccacucccugagccacuucgugaaccuggacaaccuccgggccaacaacacgaaggggucccugcccaucaacgugaucgucuucgacggcaagagcaagugcgaggaguccagcgccaaguccgccagcguguacuacucccagcugaugugccagcccauccuccugcuggaccaggcgcucgugagcgacgucggcgacagcgccgagguggccgugaagauguucgacgccuacgucaacaccuucuccagcaccuucaacgugccgauggagaagcugaagacccugguggccacggcggaggccgagcucgccaagaacgucucccuggacaacgugcugagcaccuucaucuccgccgcgcgccagggguucguggacagcgacgucgagaccaaggacgugguggagugccucaagcugucccaccagagcgacaucgaggucaccggcgacuccugcaacaacuacaugcugacguacaacaagguggagaacaugaccccccgggaccucggggccugcaucgacugcagcgcccgccacaucaacgcccagguggccaagucccacaacaucgcgcugaucuggaacgucaaggacuucaugagccuguccgagcagcuccggaagcagauccgcagcgccgccaagaagaacaaccugcccuucaagcugaccugcgccaccacgcgccagguggugaacgucgugaccaccaagaucgcccucaagggcgggugaggacuagucccuguucccagagcccacuuuuuuuucuuuuuuugaaauaaaauagccugucuuucagaucucaaaggcucuuuucagagccaccaaaaaaaaaaaaaaaaaaaaaaaaaaaaaaaaaaaaaaaaaaaaaaaaaaaaaaaaaaaaaaaaaaaaaaaaaaaaaaaaaaaaaaaaaaaaaaaaaaaaa

SEQ ID NO: 20132 - RNA, 6113 nt, Artificial Sequence
  SARS-CoV-2__MT358724.1__non-structural protein 3 (NSP3) mRNA gc
aggagagucccgcagucggcguccagcggcucugcuuguucgugugugugucguugcaggccuuauucaagcuuaccauggcccccaccaaggugaccuucggcgacgacacggucaucgaggugcagggguacaagagcgugaacaucaccuucgagcuggacgagcgcaucgacaagguccucaacgagaagugcuccgccuacaccguggagcugggcaccgaggugaacgaguucgcgugcgucguggccgacgccgugaucaagacgcugcagccggucagcgagcuccugaccccccuggggaucgaccucgacgagugguccauggccaccuacuaccuguucgacgagagcggcgaguucaagcuggccucccacauguacugcagcuucuacccccccgacgaggacgaggaggagggggacugcgaggaggaggaguucgagccguccacccaguacgaguacggcacggaggacgacuaccagggcaagccccucgaguucggggcgaccagcgccgcccugcagcccgaggaggagcaggaggaggacuggcuggacgacgacucccagcagaccgugggccagcaggacgggagcgaggacaaccagaccacgaccauccagaccaucguggagguccagccccagcucgagauggagcugaccccgguggugcagacgaucgaggucaacuccuucagcggcuaccugaagcucaccgacaacguguacaucaagaacgccgacaucguggaggaggcgaagaaggucaagcccaccgugguggucaacgccgccaacguguaccugaagcacgggggcggcguggccggggcccugaacaaggcgaccaacaacgccaugcaggucgaguccgacgacuacaucgccacgaacggcccccucaagguggggggcagcugcguccuguccggccacaaccuggccaagcacugccuccacgugguggggcccaacgucaacaagggcgaggacauccagcugcugaagagcgccuacgagaacuucaaccagcacgaggugcuccuggcgccgcugcucuccgccgggaucuucggcgccgaccccauccacagccugcgggugugcgucgacaccgugcgcaccaacguguaccuggccgucuucgacaagaaccucuacgacaagcugguguccagcuuccuggagaugaagagcgagaagcagguggagcagaagaucgccgagauccccaaggaggaggucaagcccuucaucaccgaguccaagccgagcguggagcagcggaagcaggacgacaagaagaucaaggcgugcguggaggaggucacgaccacccucgaggagaccaaguuccugacggagaaccugcuccuguacaucgacaucaacgggaaccugcaccccgacuccgccacccucgugagcgacaucgacaucaccuuccugaagaaggacgcccccuacaucgugggcgacgucgugcaggagggcgugcugaccgccgucgugauccccacgaagaaggccgggggcaccaccgagaugcucgcgaaggcccugcgcaaggugccgaccgacaacuacaucacgaccuaccccgggcagggccugaacggguacaccgucgaggaggccaagaccgugcucaagaagugcaaguccgccuucuacauccugcccagcaucaucuccaacgagaagcaggagauccugggcaccgugagcuggaaccuccgggagaugcuggcgcacgccgaggagacgcgcaagcugaugcccgucugcguggagaccaaggccaucguguccaccauccagcggaaguacaagggcaucaagauccaggagggggucguggacuacggcgcccgcuucuacuucuacaccagcaagacgaccguggccucccugaucaacacccucaacgaccugaacgagacccuggucacgaugccgcucggguacgugacccacggccugaaccuggaggaggcggcccgguacaugcgcagccucaaggugcccgccaccgucuccgugagcucccccgacgccgugaccgccuacaacggguaccugacgagcuccagcaagacccccgaggagcacuucaucgagaccaucucccuggcgggcagcuacaaggacuggagcuacuccggccagagcacccagcucgggaucgaguuccugaagcggggcgacaaguccgucuacuacacgagcaacccgaccaccuuccaccuggacggggaggugaucaccuucgacaaccucaagacgcugcugucccuccgcgaggugcggaccaucaaggucuucaccaccguggacaacaucaaccugcacacgcagguggucgacaugagcaugaccuacggccagcaguucggccccaccuaccuggacggggccgacgugaccaagaucaagccccacaacucccacgagggcaagacguucuacgugcucccgaacgacgacacccugcgcgucgaggccuucgaguacuaccacaccaccgaccccagcuuccuggggcgguacauguccgcccucaaccacacgaagaaguggaaguacccccaggugaacggccugaccagcaucaagugggccgacaacaacugcuaccuggcgaccgcccuccugacccugcagcagaucgagcucaaguucaaccccccggcccugcaggacgccuacuaccgcgcgcgggccggggaggccgccaacuucugcgcccugauccucgcguacugcaacaagacggugggcgagcugggcgacguccgcgagaccauguccuaccuguuccagcacgccaaccucgacagcugcaagcgggugcugaacgucgugugcaagaccugcgggcagcagcagaccacccugaagggcguggaggccgucauguacauggggacgcucuccuacgagcaguucaagaagggcgugcagauccccugcaccugcgggaagcaggccaccaaguaccuggugcagcaggagagccccuucgucaugauguccgcccccccggcgcaguacgagcugaagcacggcaccuucacgugcgccagcgaguacaccggcaacuaccagugcgggcacuacaagcacaucaccuccaaggagacccucuacugcaucgacggcgcccugcugacgaagagcagcgaguacaaggggcccaucaccgacguguucuacaaggagaacuccuacaccaccacgaucaagcccgugaccuacaagcucgacggcgucgugugcaccgagaucgaccccaagcuggacaacuacuacaagaaggacaacagcuacuucaccgagcagccgaucgaccuggugcccaaccagcccuaccccaacgccuccuucgacaacuucaaguucgucugcgacaacaucaaguucgccgacgaccucaaccagcugacgggguacaagaagccggcgagccgcgagcugaaggugaccuucuuccccgaccucaacggcgacguggucgccaucgacuacaagcacuacacccccuccuucaagaagggcgccaagcugcugcacaagcccaucguguggcacgugaacaacgccaccaacaaggcgacguacaagccgaacaccuggugcauccggugccucuggagcaccaagcccgucgagaccuccaacagcuucgacgugcugaaguccgaggacgcccaggggauggacaaccuggccugcgaggaccucaagcccgugagcgaggaggucauggagaaccccacgauccagaaggacgugcuggagugcaacgugaagaccaccgaggucgugggcgacaucauccugaagccggccaacaacucccucaagaucaccgaggagguggggcacacggaccugauggccgcguacgucgacaacagcucccugaccaucaagaagcccaacgagcucagccgcgugcugggccugaagacccucgccacccacgggcuggccgccgugaacuccguccccugggacacgaucgccaacuacgcgaagccguuccugaacaagguggugagcaccaccaccaacaucgucacgcgcugccucaaccgggugugcaccaacuacaugcccuacuucuucacccugcugcuccagcugugcaccuucacccgcuccacgaacagccggaucaaggccuccaugcccaccaccaucgccaagaacaccgugaagagcgucggcaaguucugccuggaggccagcuucaacuaccucaagucccccaacuucagcaagcugaucaacaucaucaucugguuccugcuccuguccgugugccugggcagccucaucuacuccacggccgcgcugggggugcugaugagcaaccucggcaugccguccuacugcaccggguaccgcgagggcuaccugaacagcaccaacgucaccaucgccacguacugcaccggcuccauccccugcagcgugugccuguccgggcucgacagccuggacaccuaccccucccuggagaccauccagaucacgaucagcuccuucaagugggaccucaccgccuucggccugguggccgagugguuccuggccuacauccucuucacccgguucuucuacguccuggggcuggcggccaucaugcagcucuucuucagcuacuucgccgugcacuucaucuccaacagcuggcugauguggcugaucaucaaccuggugcagauggcccccaucuccgcgaugguccgcauguacaucuucuucgccagcuucuacuacguguggaagagcuacgugcacgucguggacggcugcaacuccagcaccugcaugaugugcuacaagcggaaccgcgccacgcggguggagugcaccaccaucgucaacggggugcgccgguccuucuacgucuacgccaacggcggcaagggguucugcaagcuccacaacuggaacugcgugaacugcgacaccuucugcgccggcagcacguucaucuccgacgagguggcgcgcgaccugagccugcaguucaagcggccgaucaaccccaccgaccaguccagcuacaucgucgacuccgugaccgugaagaacgggagcauccaccucuacuucgacaaggccggccagaagaccuacgagcgccacucccugagccacuucgucaaccuggacaaccuccgggccaacaacacgaaggggucccugcccaucaacgugaucguguucgacggcaagagcaagugcgaggaguccagcgccaaguccgccagcgucuacuacucccagcugaugugccagcccauccuccugcuggaccaggcgcucgugagcgacgugggcgacagcgccgaggucgccgugaagauguucgacgccuacgugaacaccuucuccagcaccuucaacgucccgauggagaagcugaagacccugguggccacggcggaggccgagcucgccaagaacgugucccuggacaacguccugagcaccuucaucuccgccgcgcgccagggguucguggacagcgacguggagaccaaggacgucguggagugccucaagcugucccaccagagcgacaucgaggugaccggcgacuccugcaacaacuacaugcugacguacaacaaggucgagaacaugaccccccgggaccucggggccugcaucgacugcagcgcccgccacaucaacgcccagguggccaagucccacaacaucgcgcugaucuggaacgugaaggacuucaugagccuguccgagcagcuccggaagcagauccgcagcgccgccaagaagaacaaccugcccuucaagcugaccugcgccaccacgcgccaggucgugaacguggucaccaccaagaucgcccucaagggcgggugaggacuagucccuguucccagagcccacuuuuuuuucuuuuuuugaaauaaaauagccugucuuucagaucucaaaggcucuuuucagagccaccaaaaaaaaaaaaaaaaaaaaaaaaaaaaaaaaaaaaaaaaaaaaaaaaaaaaaaaaaaaaaaaaaaaaaaaaaaaaaaaaaaaaaaaaaaaaaaaaaaaaa

SEQ ID NO: 20133 - RNA, 6113 nt, Artificial Sequence
  SARS-CoV-2__MT114416.1__non-structural protein 3 (NSP3) mRNA gc
aggagagucccgcagucggcguccagcggcucugcuuguucgugugugugucguugcaggccuuauucaagcuuaccauggcccccaccaaggugaccuucggcgacgacacggucaucgaggugcagggguacaagagcgugaacaucaccuucgagcuggacgagcgcaucgacaagguccucaacgagaagugcuccgccuacaccguggagcugggcaccgaggugaacgaguucgcgugcgucguggccgacgccgugaucaagacgcugcagccggucagcgagcuccugaccccccuggggaucgaccucgacgagugguccauggccaccuacuaccuguucgacgagagcggcgaguucaagcuggccucccacauguacugcagcuucuacccccccgacgaggacgaggaggagggggacugcgaggaggaggaguucgagccguccacccaguacgaguacggcacggaggacgacuaccagggcaagccccucgaguucggggcgaccagcgccgcccugcagcccgaggaggagcaggaggaggacuggcuggacgacgacucccagcagaccgugggccagcaggacgggagcgaggacaaccagaccacgaccauccagaccaucguggagguccagccccagcucgagauggagcugaccccgguggugcagacgaucgaggucaacuccuucagcggcuaccugaagcucaccgacaacguguacaucaagaacgccgacaucguggaggaggcgaagaaggucaagcccaccgugguggucaacgccgccaacguguaccugaagcacgggggcggcguggccggggcccugaacaaggcgaccaacaacgccaugcaggucgaguccgacgacuacaucgccacgaacggcccccucaagguggggggcagcugcguccuguccggccacaaccuggccaagcacugccuccacgugguggggcccaacgucaacaagggcgaggacauccagcugcugaagagcgccuacgagaacuucaaccagcacgaggugcuccuggcgccgcugcucuccgccgggaucuucggcgccgaccccauccacagccugcgggugugcgucgacaccgugcgcaccaacguguaccuggccgucuucgacaagaaccucuacgacaagcugguguccagcuuccuggagaugaagagcgagaagcagguggagcagaagaucgccgagauccccaaggaggaggucaagcccuucaucaccgaguccaagccgagcguggagcagcggaagcaggacgacaagaagaucaaggcgugcguggaggaggucacgaccacccucgaggagaccaaguuccugacggagaaccugcuccuguacaucgacaucaacgggaaccugcaccccgacuccgccacccucgugagcgacaucgacaucaccuuccugaagaaggacgcccccuacaucgugggcgacgucgugcaggagggcgugcugaccgccgucgugauccccacgaagaaggccgggggcaccaccgagaugcucgcgaaggcccugcgcaaggugccgaccgacaacuacaucacgaccuaccccgggcagggccugaacggguacaccgucgaggaggccaagaccgugcucaagaagugcaaguccgccuucuacauccugcccagcaucaucuccaacgagaagcaggagauccugggcaccgugagcuggaaccuccgggagaugcuggcgcacgccgaggagacgcgcaagcugaugcccgucugcguggagaccaaggccaucguguccaccauccagcggaaguacaagggcaucaagauccaggagggggucguggacuacggcgcccgcuucuacuucuacaccagcaagacgaccguggccucccugaucaacacccucaacgaccugaacgagacccuggucacgaugccgcucggguacgugacccacggccugaaccuggaggaggcggcccgguacaugcgcagccucaaggugcccgccaccgucuccgugagcucccccgacgccgugaccgccuacaacggguaccugacgagcuccagcaagacccccgaggagcacuucaucgagaccaucucccuggcgggcagcuacaaggacuggagcuacuccggccagagcacccagcucgggaucgaguuccugaagcggggcgacaaguccgucuacuacacgagcaacccgaccaccuuccaccuggacggggaggugaucaccuucgacaaccucaagacgcugcugucccuccgcgaggugcggaccaucaaggucuucaccaccguggacaacaucaaccugcacacgcagguggucgacaugagcaugaccuacggccagcaguucggccccaccuaccuggacggggccgacgugaccaagaucaagccccacaacucccacgagggcaagacguucuacgugcucccgaacgacgacacccugcgcgucgaggccuucgaguacuaccacaccaccgaccccagcuuccuggggcgguacauguccgcccucaaccacacgaagaaguggaaguacccccaggugaacggccugaccagcaucaagugggccgacaacaacugcuaccuggcgaccgcccuccugacccugcagcagaucgagcucaaguucaaccccccggcccugcaggacgccuacuaccgcgcgcgggccggggaggccgccaacuucugcgcccugauccucgcguacugcaacaagacggugggcgagcugggcgacguccgcgagaccauguccuaccuguuccagcacgccaaccucgacagcugcaagcgggugcugaacgucgugugcaagaccugcgggcagcagcagaccacccugaagggcguggaggccgucauguacauggggacgcucuccuacgagcaguucaagaagggcgugcagauccccugcaccugcgggaagcaggccaccaaguaccuggugcagcaggagagccccuucgucaugauguccgcccccccggcgcaguacgagcugaagcacggcaccuucacgugcgccagcgaguacaccggcaacuaccagugcgggcacuacaagcacaucaccuccaaggagacccucuacugcaucgacggcgcccugcugacgaagagcagcgaguacaaggggcccaucaccgacguguucuacaaggagaacuccuacaccaccacgaucaagcccgugaccuacaagcucgacggcgucgugugcaccgagaucgaccccaagcuggacaacuacuacaagaaggacaacagcuacuucaccgagcagccgaucgaccuggugcccaaccagcccuaccccaacgccuccuucgacaacuucaaguucgucugcgacaacaucaaguucgccgacgaccucaaccagcugacgggguacaagaagccggcgagccgcgagcugaaggugaccuucuuccccgaccucaacggcgacguggucgccaucgacuacaagcacuacacccccuccuucaagaagggcgccaagcugcugcacaagcccaucguguggcacgugaacaacgccaccaacaaggcgacguacaagccgaacaccuggugcauccggugccucuggagcaccaagcccgucgagaccuccaacagcuucgacgugcugaaguccgaggacgcccaggggauggacaaccuggccugcgaggaccucaagcccgugagcgaggaggucguggagaaccccacgauccagaaggacgugcuggagugcaacgucaagaccaccgagguggugggcgacaucauccugaagcucgccaacaacucccugaagaucaccgaggaggucgggcacacggaccugauggccgcguacguggacaacagcucccucaccaucaagaagccgaacgagcugagccgcgugcugggccucaagacccuggccacccacgggcuggccgccgucaacuccgugcccugggacacgaucgccaacuacgcgaagcccuuccucaacaagguggucagcaccaccaccaacaucgugacgcgcugccugaaccgggugugcaccaacuacaugccguacuucuucacccugcuccugcagcugugcaccuucacccgcuccacgaacagccggaucaaggccuccaugcccaccaccaucgccaagaacaccgucaagagcgugggcaaguucugccucgaggccagcuucaacuaccugaagucccccaacuucagcaagcugaucaacaucaucaucugguuccuccugcuguccgugugccucggcagccugaucuacuccacggccgcgcuggggguccucaugagcaaccugggcaugcccuccuacugcaccggguaccgcgagggcuaccugaacagcaccaacgugaccaucgccacguacugcaccggcuccaucccgugcagcgugugccucuccgggcuggacagccuggacaccuaccccucccucgagaccauccagaucacgaucagcuccuucaagugggaccugaccgccuucggccuggucgccgagugguuccucgccuacauccuguucacccgguucuucuacgugcuggggcucgcggccaucaugcagcuguucuucagcuacuucgccgugcacuucaucuccaacagcuggcugauguggcugaucaucaaccucguccagauggcccccaucuccgcgauggugcgcauguacaucuucuucgccagcuucuacuacguguggaagagcuacguccacgugguggacggcugcaacuccagcaccugcaugaugugcuacaagcggaaccgcgccacgcgggucgagugcaccaccaucgugaacgggguccgccgguccuucuacguguacgccaacggcggcaagggguucugcaagcugcacaacuggaacugcgugaacugcgacaccuucugcgccggcagcacguucaucuccgacgaggucgcgcgcgaccugagccuccaguucaagcggcccaucaacccgaccgaccaguccagcuacaucguggacuccgugaccgucaagaacgggagcauccaccuguacuucgacaaggccggccagaagaccuacgagcgccacucccugagccacuucgugaaccucgacaaccugcgggccaacaacacgaaggggucccugcccaucaacgugaucgucuucgacggcaagagcaagugcgaggaguccagcgccaaguccgccagcguguacuacucccagcucaugugccagcccauccugcugcucgaccaggcgcuggugagcgacgucggcgacagcgccgagguggccgugaagauguucgacgccuacgucaacaccuucuccagcaccuucaacgugcccauggagaagcugaagacccucguggccacggcggaggccgagcuggccaagaacgucucccuggacaacgugcucagcaccuucaucuccgccgcgcgccagggguucguggacagcgacgucgagaccaaggacgugguggagugccugaagcugucccaccagagcgacaucgaggucaccggcgacuccugcaacaacuacaugcucacguacaacaagguggagaacaugaccccgcgggaccugggggccugcaucgacugcagcgcccgccacaucaacgcccagguggccaagucccacaacaucgcgcugaucuggaacgucaaggacuucaugagccucuccgagcagcugcggaagcagauccgcagcgccgccaagaagaacaaccugcccuucaagcucaccugcgccaccacgcgccagguggugaacgucgugaccaccaagaucgcccugaagggcgggugaggacuagucccuguucccagagcccacuuuuuuuucuuuuuuugaaauaaaauagccugucuuucagaucucaaaggcucuuuucagagccaccaaaaaaaaaaaaaaaaaaaaaaaaaaaaaaaaaaaaaaaaaaaaaaaaaaaaaaaaaaaaaaaaaaaaaaaaaaaaaaaaaaaaaaaaaaaaaaaaaaaaa

SEQ ID NO: 20134 - RNA, 6113 nt, Artificial Sequence
  SARS-CoV-2__MT350247.1__non-structural protein 3 (NSP3) mRNA gc
aggagagucccgcagucggcguccagcggcucugcuuguucgugugugugucguugcaggccuuauucaagcuuaccauggcccccaccaaggugaccuucggcgacgacacggucaucgaggugcagggguacaagagcgugaacaucaccuucgagcuggacgagcgcaucgacaagguccucaacgagaagugcuccgccuacaccguggagcugggcaccgaggugaacgaguucgcgugcgucguggccgacgccgugaucaagacgcugcagccggucagcgagcuccugaccccccuggggaucgaccucgacgagugguccauggccaccuacuaccuguucgacgagagcggcgaguucaagcuggccucccacauguacugcagcuucuacccccccgacgaggacgaggaggagggggacugcgaggaggaggaguucgagccguccacccaguacgaguacggcacggaggacgacuaccagggcaagccccucgaguucggggcgaccagcgccgcccugcagcccgaggaggagcaggaggaggacuggcuggacgacgacucccagcagaccgugggccagcaggacgggagcgaggacaaccagaccacgaccauccagaccaucguggagguccagccccagcucgagauggagcugaccccgguggugcagacgaucgaggucaacuccuucagcggcuaccugaagcucaccgacaacguguacaucaagaacgccgacaucguggaggaggcgaagaaggucaagcccaccgugguggucaacgccgccaacguguaccugaagcacgggggcggcguggccggggcccugaacaaggcgaccaacaacgccaugcaggucgaguccgacgacuacaucgccacgaacggcccccucaagguggggggcagcugcguccuguccggccacaaccuggccaagcacugccuccacgugguggggcccaacgucaacaagggcgaggacauccagcugcugaagagcgccuacgagaacuucaaccagcacgaggugcuccuggcgccgcugcucuccgccgggaucuucggcgccgaccccauccacagccugcgggugugcgucgacaccgugcgcaccaacguguaccuggccgucuucgacaagaaccucuacgacaagcugguguccagcuuccuggagaugaagagcgagaagcagguggagcagaagaucgccgagauccccaaggaggaggucaagcccuucaucaccgaguccaagagcuccguggagcagcggaagcaggacgacaagaagaucaaggcgugcguggaggaggucacgaccacccucgaggagaccaaguuccugacggagaaccugcuccuguacaucgacaucaacgggaaccugcacccggacagcgccacccucguguccgacaucgacaucaccuuccugaagaaggacgcccccuacaucgugggcgacgucgugcaggagggcgugcugaccgccgucgugauccccacgaagaaggccgggggcaccaccgagaugcucgcgaaggcccugcgcaaggugcccaccgacaacuacaucacgaccuacccggggcagggccugaacggguacaccgucgaggaggccaagaccgugcucaagaagugcaagagcgccuucuacauccugcccuccaucaucagcaacgagaagcaggagauccugggcaccguguccuggaaccuccgggagaugcuggcgcacgccgaggagacgcgcaagcugaugcccgucugcguggagaccaaggccaucgugagcaccauccagcggaaguacaagggcaucaagauccaggagggggucguggacuacggcacccgcuucuacuucuacacguccaagaccaccguggccagccugaucaacacccucaacgaccugaacgagacgcuggucaccaugccccucggguacgugacccacggccugaaccuggaggaggccgcgcgguacaugcgcucccucaaggugccggccaccgucagcguguccagccccgacgccgugacggccuacaacggguaccugaccuccagcuccaagacccccgaggagcacuucaucgagaccaucagccuggccggcagcuacaaggacugguccuacagcggccaguccacgcagcucgggaucgaguuccugaagcggggcgacaagagcgucuacuacaccuccaaccccaccaccuuccaccuggacggggaggugaucacguucgacaaccucaagacccugcugagccuccgcgaggugcggaccaucaaggucuucaccacgguggacaacaucaaccugcacacccagguggucgacauguccaugaccuacggccagcaguucggcccgaccuaccuggacggggcggacgugacgaagaucaagccccacaacagccacgagggcaagaccuucuacgugcuccccaacgacgacacccugcgcgucgaggccuucgaguacuaccacaccacggacccguccuuccuggggcgguacaugagcgcccucaaccacaccaagaaguggaaguacccccaggugaacggccugaccuccaucaagugggccgacaacaacugcuaccuggccaccgcgcuccugacgcugcagcagaucgagcucaaguucaacccccccgcccugcaggacgccuacuaccgcgcccgggcgggggaggccgccaacuucugcgcccugauccucgccuacugcaacaagaccgugggcgagcugggcgacguccgcgagaccaugagcuaccuguuccagcacgcgaaccucgacuccugcaagcgggugcugaacgucgugugcaagaccugcgggcagcagcagaccacgcugaagggcguggaggccgucauguacauggggacccucagcuacgagcaguucaagaagggcgugcagaucccgugcaccugcgggaagcaggccaccaaguaccuggugcagcaggagucccccuucgucaugaugagcgccccccccgcccaguacgagcugaagcacggcacguucaccugcgcguccgaguacaccggcaacuaccagugcgggcacuacaagcacaucaccagcaaggagacgcucuacugcaucgacggcgcccugcugaccaagagcuccgaguacaaggggccgaucaccgacguguucuacaaggagaacagcuacaccacgaccaucaagcccgugaccuacaagcucgacggcgucgugugcaccgagaucgaccccaagcuggacaacuacuacaagaaggacaacuccuacuucacggagcagcccaucgaccuggugccgaaccagcccuaccccaacgccagcuucgacaacuucaaguucgucugcgacaacaucaaguucgccgacgaccucaaccagcugaccggguacaagaagcccgccucccgcgagcugaaggugaccuucuucccggaccucaacggcgacguggucgcgaucgacuacaagcacuacacccccagcuucaagaagggcgccaagcugcugcacaagcccaucguguggcacgugaacaacgccacgaacaaggccaccuacaagcccaacaccuggugcauccggugccucugguccaccaagccggucgagacgagcaacuccuucgacgugcugaagagcgaggacgcgcaggggauggacaaccuggccugcgaggaccucaagcccguguccgaggaggucguggagaaccccaccauccagaaggacgugcuggagugcaacgucaagaccaccgagguggugggcgacaucauccugaagcccgccaacaacagccucaagaucacggaggaggucgggcacaccgaccugauggccgccuacguggacaacuccagccugaccaucaagaagccgaacgagcucucccgcgugcugggccugaagacccucgcgacgcacgggcuggccgccgucaacagcgugcccugggacaccaucgccaacuacgccaagcccuuccugaacaagguggucuccaccaccacgaacaucgugacccgcugccucaaccgggugugcaccaacuacaugccguacuucuucacccugcugcuccagcugugcaccuucacgcgcagcaccaacucccggaucaaggcgagcaugcccaccaccaucgccaagaacacggucaagagcgugggcaaguucugccuggaggccuccuucaacuaccucaagagccccaacuucuccaagcugaucaacaucaucaucugguuccugcuccugagcgugugccugggcucccucaucuacagcaccgccgcccuggggguccugauguccaaccucggcaugcccagcuacugcaccggguaccgcgagggcuaccugaacuccaccaacgugacgaucgcgaccuacugcaccggcagcaucccgugcuccgugugccugagcgggcucgacucccuggacaccuaccccagccuggagacgauccagaucaccaucuccagcuucaagugggaccucaccgccuucggccuggucgccgagugguuccuggccuacauccucuucacccgguucuucuacgugcuggggcuggccgcgaucaugcagcucuucuucuccuacuucgccgugcacuucaucagcaacuccuggcugauguggcugaucaucaaccugguccagauggcccccaucagcgccauggugcgcauguacaucuucuucgcgagcuucuacuacguguggaaguccuacguccacgugguggacggcugcaacagcuccacgugcaugaugugcuacaagcggaaccgcgccacccgggucgagugcaccaccaucgugaacgggguccgccggagcuucuacguguacgccaacggcggcaagggguucugcaagcuccacaacuggaacugcgugaacugcgacacguucugcgccggcuccaccuucaucagcgacgaggucgcccgcgaccugucccugcaguucaagcggcccaucaacccgaccgaccagagcuccuacaucguggacagcgugaccgucaagaacggguccauccaccucuacuucgacaaggcgggccagaagacguacgagcgccacagccugucccacuucgugaaccuggacaaccuccgggccaacaacaccaaggggagccugcccaucaacgugaucgucuucgacggcaaguccaagugcgaggagagcuccgccaagagcgccuccguguacuacagccagcugaugugccagcccauccuccugcuggaccaggcccucgugagcgacgucggcgacuccgcggagguggccgugaagauguucgacgccuacgucaacaccuucagcuccaccuucaacgugcccauggagaagcugaagacgcugguggccaccgccgaggcggagcucgccaagaacgucagccuggacaacgugcuguccaccuucaucagcgccgcccgccagggguucguggacuccgacgucgagaccaaggacgugguggagugccucaagcugagccaccaguccgacaucgaggucacgggcgacagcugcaacaacuacaugcugaccuacaacaagguggagaacaugaccccgcgggaccucggggcgugcaucgacugcuccgcccgccacaucaacgcccagguggccaagagccacaacaucgcccugaucuggaacgucaaggacuucaugucccugagcgagcagcuccggaagcagauccgcuccgcggccaagaagaacaaccugcccuucaagcugaccugcgccacgacccgccagguggugaacgucgugaccaccaagaucgcccucaagggcgggugaggacuagucccuguucccagagcccacuuuuuuuucuuuuuuugaaauaaaauagccugucuuucagaucucaaaggcucuuuucagagccaccaaaaaaaaaaaaaaaaaaaaaaaaaaaaaaaaaaaaaaaaaaaaaaaaaaaaaaaaaaaaaaaaaaaaaaaaaaaaaaaaaaaaaaaaaaaaaaaaaaaaa

SEQ ID NO: 20135 - RNA, 6113 nt, Artificial Sequence
  SARS-CoV-2__MT345816.1__non-structural protein 3 (NSP3) mRNA gc
aggagagucccgcagucggcguccagcggcucugcuuguucgugugugugucguugcaggccuuauucaagcuuaccauggcccccaccaaggugaccuucggcgacgacacggucaucgaggugcagggguacaagagcgugaacaucaccuucgagcuggacgagcgcaucgacaagguccucaacgagaagugcuccgccuacaccguggagcugggcaccgaggugaacgaguucgcgugcgucguggccgacgccgugaucaagacgcugcagccggucagcgagcuccugaccccccuggggaucgaccucgacgagugguccauggccaccuacuaccuguucgacgagagcggcgaguucaagcuggccucccacauguacugcagcuucuacccccccgacgaggacgaggaggagggggacugcgaggaggaggaguucgagccguccacccaguacgaguacggcacggaggacgacuaccagggcaagccccucgaguucggggcgaccagcgccgcccugcagcccgaggaggagcaggaggaggacuggcuggacgacgacucccagcagaccgugggccagcaggacgggagcgaggacaaccagaccacgaccauccagaccaucguggagguccagccccagcucgagauggagccgacccccguggugcagacgaucgaggucaacuccuucagcggcuaccugaagcugaccgacaacguguacaucaagaacgccgacaucguggaggaggcgaagaaggucaagcccaccgugguggucaacgccgccaacguguaccucaagcacgggggcggcguggccggggcccugaacaaggcgaccaacaacgccaugcaggucgaguccgacgacuacaucgccacgaacggcccccugaagguggggggcagcugcguccucuccggccacaaccuggccaagcacugccugcacgugguggggccgaacgucaacaagggcgaggacauccagcuccugaagagcgccuacgagaacuucaaccagcacgaggugcugcucgcgccccugcuguccgccgggaucuucggcgccgaccccauccacagccuccgggugugcgucgacaccgugcgcaccaacguguaccuggccgucuucgacaagaaccuguacgacaagcucguguccagcuuccuggagaugaagagcgagaagcagguggagcagaagaucgccgagauccccaaggaggaggucaagccguucaucaccgaguccaagcccagcguggagcagcggaagcaggacgacaagaagaucaaggcgugcguggaggaggucacgaccacccuggaggagaccaaguuccucacggagaaccugcugcucuacaucgacaucaacgggaaccugcaccccgacuccgccacccuggugagcgacaucgacaucaccuuccucaagaaggacgcccccuacaucgugggcgacgucgugcaggagggcgugcugaccgccgucgugaucccgacgaagaaggccgggggcaccaccgagaugcuggcgaaggcccuccgcaaggugcccaccgacaacuacaucacgaccuaccccgggcagggccugaacggguacaccgucgaggaggccaagaccgugcugaagaagugcaaguccgccuucuacauccuccccagcaucaucuccaacgagaagcaggagauccugggcaccgugagcuggaaccugcgggagaugcucgcgcacgccgaggagacgcgcaagcugaugccggucugcguggagaccaaggccaucguguccaccauccagcggaaguacaagggcaucaagauccaggagggggucguggacuacggcgcccgcuucuacuucuacaccagcaagacgaccguggccucccugaucaacacccugaacgaccucaacgagacccuggucacgaugccccugggguacgugacccacggccucaaccuggaggaggcggcccgguacaugcgcagccugaaggugcccgccaccgucuccgugagcucccccgacgccgugaccgccuacaacggguaccucacgagcuccagcaagaccccggaggagcacuucaucgagaccaucucccuggcgggcagcuacaaggacuggagcuacuccggccagagcacccagcuggggaucgaguuccucaagcggggcgacaaguccgucuacuacacgagcaaccccaccaccuuccaccuggacggggaggugaucaccuucgacaaccugaagacgcuccugucccugcgcgaggugcggaccaucaaggucuucaccaccguggacaacaucaaccuccacacgcagguggucgacaugagcaugaccuacggccagcaguucggccccaccuaccuggacggggccgacgugaccaagaucaagccgcacaacucccacgagggcaagacguucuacgugcugcccaacgacgacacccuccgcgucgaggccuucgaguacuaccacaccaccgaccccagcuuccuggggcgguacauguccgcccugaaccacacgaagaaguggaaguacccccaggugaacggccucaccagcaucaagugggccgacaacaacugcuaccuggcgaccgcccugcucacccugcagcagaucgagcugaaguucaacccgcccgcccuccaggacgccuacuaccgcgcgcgggccggggaggccgccaacuucugcgcccugauccuggcguacugcaacaagacggugggcgagcucggcgacguccgcgagaccauguccuaccuguuccagcacgccaaccuggacagcugcaagcgggugcucaacgucgugugcaagaccugcgggcagcagcagaccacccugaagggcguggaggccgucauguacauggggacgcuguccuacgagcaguucaagaagggcgugcagauccccugcaccugcgggaagcaggccaccaaguaccucgugcagcaggagagccccuucgucaugauguccgccccgcccgcgcaguacgagcugaagcacggcaccuucacgugcgccagcgaguacaccggcaacuaccagugcgggcacuacaagcacaucaccuccaaggagacccuguacugcaucgacggcgcccuccugacgaagagcagcgaguacaaggggcccaucaccgacguguucuacaaggagaacuccuacaccaccacgaucaagcccgugaccuacaagcuggacggcgucgugugcaccgagaucgacccgaagcucgacaacuacuacaagaaggacaacagcuacuucaccgagcagcccaucgaccuggugcccaaccagcccuacccgaacgccuccuucgacaacuucaaguucgucugcgacaacaucaaguucgccgacgaccugaaccagcucacgggguacaagaagcccgcgagccgcgagcugaaggugaccuucuuccccgaccugaacggcgacguggucgccaucgacuacaagcacuacacccccuccuucaagaagggcgccaagcuccugcacaagccgaucguguggcacgugaacaacgccaccaacaaggcgacguacaagcccaacaccuggugcauccggugccuguggagcaccaagcccgucgagaccuccaacagcuucgacgugcucaaguccgaggacgcccaggggauggacaaccuggccugcgaggaccugaagcccgugagcgaggaggucguggagaacccgacgauccagaaggacgugcucgagugcaacgucaagaccaccgagguggugggcgacaucauccugaagcccgccaacaacucccugaagaucaccgaggaggucgggcacacggaccucauggccgcguacguggacaacagcucccugaccaucaagaagcccaacgagcugagccgcgugcucggccugaagacccuggccacccacgggcucgccgccgucaacuccgugccgugggacacgaucgccaacuacgcgaagcccuuccugaacaagguggucagcaccaccaccaacaucgugacgcgcugccugaaccgggugugcaccaacuacaugcccuacuucuucacccuccugcugcagcucugcaccuucacccgcuccacgaacagccggaucaaggccuccaugcccaccaccaucgccaagaacaccgucaagagcgugggcaaguucugccuggaggccagcuucaacuaccugaaguccccgaacuucagcaagcucaucaacaucaucaucugguuccugcugcucuccgugugccugggcagccugaucuacuccacggccgcgcucgggguccugaugagcaaccugggcaugcccuccuacugcaccggguaccgcgagggcuaccucaacagcaccaacgugaccaucgccacguacugcaccggcuccauccccugcagcgugugccuguccgggcuggacagccucgacaccuaccccucccuggagaccauccagaucacgaucagcuccuucaagugggaccugaccgccuucggccucgucgccgagugguuccuggccuacauccuguucacccgguucuucuacgugcucgggcuggcggccaucaugcagcuguucuucagcuacuucgccgugcacuucaucuccaacagcuggcucauguggcugaucaucaaccugguccagauggccccgaucuccgcgauggugcgcauguacaucuucuucgccagcuucuacuacguguggaagagcuacguccacgugguggacggcugcaacuccagcaccugcaugaugugcuacaagcggaaccgcgccacgcgggucgagugcaccaccaucgugaacgggguccgccgguccuucuacguguacgccaacggcggcaagggguucugcaagcugcacaacuggaacugcgugaacugcgacaccuucugcgccggcagcacguucaucuccgacgaggucgcgcgcgaccucagccugcaguucaagcggcccaucaaccccaccgaccaguccagcuacaucguggacuccgugaccgucaagaacgggagcauccaccuguacuucgacaaggccggccagaagaccuacgagcgccacucccucagccacuucgugaaccuggacaaccugcgggccaacaacacgaaggggucccuccccaucaacgugaucgucuucgacggcaagagcaagugcgaggaguccagcgccaaguccgccagcguguacuacucccagcugaugugccagccgauccugcuccuggaccaggcgcuggugagcgacgucggcgacagcgccgagguggccgugaagauguucgacgccuacgucaacaccuucuccagcaccuucaacgugcccauggagaagcucaagacccugguggccacggcggaggccgagcuggccaagaacgucucccucgacaacgugcugagcaccuucaucuccgccgcgcgccagggguucguggacagcgacgucgagaccaaggacgugguggagugccugaagcucucccaccagagcgacaucgaggucaccggcgacuccugcaacaacuacaugcugacguacaacaagguggagaacaugaccccccgggaccugggggccugcaucgacugcagcgcccgccacaucaacgcccagguggccaagucccacaacaucgcgcucaucuggaacgucaaggacuucaugagccuguccgagcagcugcggaagcagauccgcagcgccgccaagaagaacaaccuccccuucaagcugaccugcgccaccacgcgccagguggugaacgucgugaccaccaagaucgcccugaagggcgggugaggacuagucccuguucccagagcccacuuuuuuuucuuuuuuugaaauaaaauagccugucuuucagaucucaaaggcucuuuucagagccaccaaaaaaaaaaaaaaaaaaaaaaaaaaaaaaaaaaaaaaaaaaaaaaaaaaaaaaaaaaaaaaaaaaaaaaaaaaaaaaaaaaaaaaaaaaaaaaaaaaaaa

SEQ ID NO: 20136 - RNA, 6113 nt, Artificial Sequence
  SARS-CoV-2__MT345832.1__non-structural protein 3 (NSP3) mRNA gc
aggagagucccgcagucggcguccagcggcucugcuuguucgugugugugucguugcaggccuuauucaagcuuaccauggcccccaccaaggugaccuucggcgacgacacggucaucgaggugcagggguacaagagcgugaacaucaccuucgagcuggacgagcgcaucgacaagguccucaacgagaagugcuccgccuacaccguggagcugggcaccgaggugaacgaguucgcgugcgucguggccgacgccgugaucaagacgcugcagccggucagcgagcuccugaccccccuggggaucgaccucgacgagugguccauggccaccuacuaccuguucgacgagagcggcgaguucaagcuggccucccacauguacugcagcuucuacccccccgacgaggacgaggaggagggggacugcgaggaggaggaguucgagccguccacccaguacgaguacggcacggaggacgacuaccagggcaagccccucgaguucggggcgaccagcgccgcccugcagcccgaggaggagcaggaggaggacuggcuggacgacgacucccagcagaccgugggccagcaggacgggagcgaggacaaccagaccacgaccauccagaccaucguggagguccagccccagcucgagauggagcugaccccgguggugcagacgaucgaggucaacuccuucagcggcuaccugaagcucaccgacaacguguacaucaagaacgccgacaucguggaggaggcgaagaaggucaagcccaccgugguggucaacgccgccaacguguaccugaagcacgggggcggcguggccggggcccugaacaaggcgaccaacaacgccaugcaggucgaguccgacgacuacaucgccacgaacggcccccucaagguggggggcagcugcguccuguccggccacaaccuggccaagcacugccuccacgugguggggcccaacgucaacaagggcgaggacauccagcugcugaagagcgccuacgagaacuucaaccagcacgaggugcuccuggcgccgcugcucuccgccgggaucuucggcgccgaccccauccacagccugcgggugugcgucgacaccgugcgcaccaacguguaccuggccgucuucgacaagaaccucuacgacaagcugguguccagcuuccuggagaugaagagcgagaagcagguggagcagaagaucgccgagauccccaaggaggaggucaagcccuucaucaccgaguccaagccgagcguggagcagcggaagcaggacgacaagaagaucaaggcgugcguggaggaggucacgaccacccucgaggagaccaaguuccugacggagaaccugcuccuguacaucgacaucaacgggaaccugcaccccgacuccgccacccucgugagcgacaucgacaucaccuuccugaagaaggacgcccccuacaucgugggcgacgucgugcaggagggcgugcugaccgccgucgugauccccacgaagaaggccgggggcaccaccgagaugcucgcgaaggcccugcgcaaggugccgaccgacuccuacaucacgaccuaccccgggcagggccugaacggguacaccgucgaggaggccaagaccgugcucaagaagugcaagagcgccuucuacauccugcccuccaucaucagcaacgagaagcaggagauccugggcaccguguccuggaaccuccgggagaugcuggcgcacgccgaggagacgcgcaagcugaugcccgucugcguggagaccaaggccaucgugagcaccauccagcggaaguacaagggcaucaagauccaggagggggucguggacuacggcgcccgcuucuacuucuacaccuccaagacgaccguggccagccugaucaacacccucaacgaccugaacgagacccuggucacgaugccgcucggguacgugacccacggccugaaccuggaggaggcggcccgguacaugcgcucccucaaggugcccgccaccgucagcguguccagccccgacgccgugaccgccuacaacggguaccugacguccagcuccaagacccccgaggagcacuucaucgagaccaucagccuggcgggcagcuacaaggacugguccuacagcggccaguccacccagcucgggaucgaguuccugaagcggggcgacaagagcgucuacuacacguccaacccgaccaccuuccaccuggacggggaggugaucaccuucgacaaccucaagacgcugcugagccuccgcgaggugcggaccaucaaggucuucaccaccguggacaacaucaaccugcacacgcagguggucgacauguccaugaccuacggccagcaguucggccccaccuaccuggacggggccgacgugaccaagaucaagccccacaacagccacgagggcaagacguucuacgugcucccgaacgacgacacccugcgcgucgaggccuucgaguacuaccacaccaccgaccccuccuuccuggggcgguacaugagcgcccucaaccacacgaagaaguggaaguacccccaggugaacggccugaccuccaucaagugggccgacaacaacugcuaccuggcgaccgcccuccugacccugcagcagaucgagcucaaguucaaccccccggcccugcaggacgccuacuaccgcgcgcgggccggggaggccgccaacuucugcgcccugauccucgcguacugcaacaagacggugggcgagcugggcgacguccgcgagaccaugagcuaccuguuccagcacgccaaccucgacuccugcaagcgggugcugaacgucgugugcaagaccugcgggcagcagcagaccacccugaagggcguggaggccgucauguacauggggacgcucagcuacgagcaguucaagaagggcgugcagauccccugcaccugcgggaagcaggccaccaaguaccuggugcagcaggagucccccuucgucaugaugagcgcccccccggcgcaguacgagcugaagcacggcaccuucacgugcgccuccgaguacaccggcaacuaccagugcgggcacuacaagcacaucaccagcaaggagacccucuacugcaucgacggcgcccugcugacgaagagcuccgaguacaaggggcccaucaccgacguguucuacaaggagaacagcuacaccaccacgaucaagcccgugaccuacaagcucgacggcgucgugugcaccgagaucgaccccaagcuggacaacuacuacaagaaggacaacuccuacuucaccgagcagccgaucgaccuggugcccaaccagcccuaccccaacgccagcuucgacaacuucaaguucgucugcgacaacaucaaguucgccgacgaccucaaccagcugacgggguacaagaagccggcgucccgcgagcugaaggugaccuucuuccccgaccucaacggcgacguggucgccaucgacuacaagcacuacacccccagcuucaagaagggcgccaagcugcugcacaagcccaucguguggcacgugaacaacgccaccaacaaggcgacguacaagccgaacaccuggugcauccggugccucugguccaccaagcccgucgagaccagcaacuccuucgacgugcugaagagcgaggacgcccaggggauggacaaccuggccugcgaggaccucaagcccguguccgaggaggucguggagaaccccacgauccagaaggacgugcuggagugcaacgucaagaccaccgagguggugggcgacaucauccugaagccggccaacaacagccucaagaucaccgaggaggucgggcacacggaccugauggccgcguacguggacaacuccagccugaccaucaagaagcccaacgagcucucccgcgugcugggccugaagacccucgccacccacgggcuggccgccgucaacagcgugcccugggacacgaucgccaacuacgcgaagccguuccugaacaagguggucuccaccaccaccaacaucgugacgcgcugccucaaccgggugugcaccaacuacaugcccuacuucuucacccugcugcuccagcugugcaccuucacccgcagcacgaacucccggaucaaggccagcaugcccaccaccaucgccaagaacaccgucaagagcgugggcaaguucugccuggaggccuccuucaacuaccucaagagccccaacuucuccaagcugaucaacaucaucaucugguuccugcuccugagcgugugccugggcucccucaucuacagcacggccgcgcuggggguccugauguccaaccucggcaugccgagcuacugcaccggguaccgcgagggcuaccugaacuccaccaacgugaccaucgccacguacugcaccggcagcauccccugcuccgugugccugagcgggcucgacucccuggacaccuaccccagccuggagaccauccagaucacgaucuccagcuucaagugggaccucaccgccuucggccuggucgccgagugguuccuggccuacauccucuucacccgguucuucuacgugcuggggcuggcggccaucaugcagcucuucuucuccuacuucgccgugcacuucaucagcaacuccuggcugauguggcugaucaucaaccugguccagauggcccccaucagcgcgauggugcgcauguacaucuucuucgccagcuucuacuacguguggaaguccuacguccacgugguggacggcugcaacagcuccaccugcaugaugugcuacaagcggaaccgcgccacgcgggucgagugcaccaccaucgugaacgggguccgccggagcuucuacguguacgccaacggcggcaagggguucugcaagcuccacaacuggaacugcgugaacugcgacaccuucugcgccggcuccacguucaucagcgacgaggucgcgcgcgaccugucccugcaguucaagcggccgaucaaccccaccgaccagagcuccuacaucguggacagcgugaccgucaagaacggguccauccaccucuacuucgacaaggccggccagaagaccuacgagcgccacagccugucccacuucgugaaccuggacaaccuccgggccaacaacacgaaggggagccugcccaucaacgugaucgucuucgacggcaaguccaagugcgaggagagcuccgccaagagcgccuccguguacuacagccagcugaugugccagcccauccuccugcuggaccaggcgcucgugagcgacgucggcgacuccgccgagguggccgugcgcauguucgacgccuacgucaacaccuucagcuccaccuucaacgugccgauggagaagcugaagacccugguggccacggcggaggccgagcucgccaagaacgucagccuggacaacgugcuguccaccuucaucagcgccgcgcggcagggguucguggacuccgacgucgagaccaaggacgugguggagugccucaagcugagccaccaguccgacaucgaggucaccggcgacagcugcaacaacuacaugcugacguacaacaagguggagaacaugaccccccgcgaccucggggccugcaucgacugcuccgcccggcacaucaacgcccagguggccaagagccacaacaucgcgcugaucuggaacgucaaggacuucaugucccugagcgagcagcuccgcaagcagauccgcuccgccgccaagaagaacaaccugcccuucaagcugaccugcgccaccacgcggcagguggugaacgucgugaccaccaagaucgcccucaagggcgggugaggacuagucccuguucccagagcccacuuuuuuuucuuuuuuugaaauaaaauagccugucuuucagaucucaaaggcucuuuucagagccaccaaaaaaaaaaaaaaaaaaaaaaaaaaaaaaaaaaaaaaaaaaaaaaaaaaaaaaaaaaaaaaaaaaaaaaaaaaaaaaaaaaaaaaaaaaaaaaaaaaaaa

SEQ ID NO: 20137 - RNA, 6113 nt, Artificial Sequence
  SARS-CoV-2__MT345848.1__non-structural protein 3 (NSP3) mRNA gc
aggagagucccgcagucggcguccagcggcucugcuuguucgugugugugucguugcaggccuuauucaagcuuaccauggcccccaccaaggugaccuucggcgacgacacggucaucgaggugcagggguacaagagcgugaacaucaccuucgagcuggacgagcgcaucgacaagguccucaacgagaagugcuccgccuacaccguggagcugggcaccgaggugaacgaguucgcgugcgucguggccgacgccgugaucaagacgcugcagccggucagcgagcuccugaccccccuggggaucgaccucgacgagugguccauggccaccuacuaccuguucgacgagagcggcgaguucaagcuggccucccacauguacugcagcuucuacccccccgacgaggacgaggaggagggggacugcgaggaggaggaguucgagccguccacccaguacgaguacggcacggaggacgacuaccagggcaagccccucgaguucggggcgaccagcgccgcccugcagcccgaggaggagcaggaggaggacuggcuggacgacgacucccagcagaccgugggccagcaggacgggagcgaggacaaccagaccacgaccauccagaccaucguggagguccagccccagcucgagauggagcugaccccgguggugcagacgaucgaggucaacuccuucagcggcuaccugaagcucaccgacaacguguacaucaagaacgccgacaucguggaggagaccaagaaggucaagcccaccgugguggucaacgcggccaacguguaccugaagcacgggggcggcguggccggggcccugaacaaggccacgaacaacgcgaugcaggucgaguccgacgacuacaucgccaccaacggcccccucaagguggggggcagcugcguccuguccggccacaaccuggccaagcacugccuccacgugguggggcccaacgucaacaagggcgaggacauccagcugcugaagagcgccuacgagaacuucaaccagcacgaggugcuccuggccccgcugcucuccgcggggaucuucggcgccgaccccauccacagccugcgggugugcgucgacaccgugcgcaccaacguguaccuggccgucuucgacaagaaccucuacgacaagcugguguccagcuuccuggagaugaagagcgagaagcagguggagcagaagaucgccgagauccccaaggaggaggucaagcccuucaucacggaguccaagccgagcguggagcagcggaagcaggacgacaagaagaucaaggccugcguggaggaggucaccaccacccucgaggagacgaaguuccugaccgagaaccugcuccuguacaucgacaucaacgggaaccugcaccccgacuccgcgacccucgugagcgacaucgacaucaccuuccugaagaaggacgcccccuacaucgugggcgacgucgugcaggagggcgugcugacggccgucgugauccccaccaagaaggccgggggcaccaccgagaugcucgccaaggcgcugcgcaaggugccgacggacaacuacaucaccaccuaccccgggcagggccugaacggguacaccgucgaggaggccaagaccgugcucaagaagugcaaguccgccuucuacauccugcccagcaucaucuccaacgagaagcaggagauccugggcacggugagcuggaaccuccgggagaugcuggcccacgcggaggagacccgcaagcugaugcccgucugcguggagaccaaggccaucguguccaccauccagcggaaguacaagggcaucaagauccaggagggggucguggacuacggcgcccgcuucuacuucuacacgagcaagaccaccguggccucccugaucaacacccucaacgaccugaacgagacgcuggucaccaugccgcucggguacgugacccacggccugaaccuggaggaggccgcgcgguacaugcgcagccucaaggugcccgccaccgucuccgugagcucccccgacgccgugacggccuacaacggguaccugaccagcuccagcaagacccccgaggagcacuucaucgagaccaucucccuggccggcagcuacaaggacuggagcuacuccggccagagcacgcagcucgggaucgaguuccugaagcggggcgacaaguccgucuacuacaccagcaacccgaccaccuuccaccuggacggggaggugaucacguucgacaaccucaagacccugcugucccuccgcgaggugcggaccaucaaggucuucaccacgguggacaacaucaaccugcacacccagguggucgacaugagcaugaccuacggccagcaguucggccccaccuaccuggacggggcggacgugacgaagaucaagccccacaacucccacgagggcaagaccuucuacgugcucccgaacgacgacacccugcgcgucgaggccuucgaguacuaccacaccacggaccccagcuuccuggggcgguacauguccgcccucaaccacaccaagaaguggaaguacccccaggugaacggccugaccagcaucaagugggccgacaacaacugcuaccuggccaccgcgcuccugacgcugcagcagaucgagcucaaguucaaccccccggcccugcaggacgccuacuaccgcgcccgggcgggggaggccgccaacuucugcgcccugauccucgccuacugcaacaagaccgugggcgagcugggcgacguccgcgagaccauguccuaccuguuccagcacgcgaaccucgacagcugcaagcgggugcugaacgucgugugcaagaccugcgggcagcagcagaccacgcugaagggcguggaggccgucauguacauggggacccucuccuacgagcaguucaagaagggcgugcagauccccugcaccugcgggaagcaggccaccaaguaccuggugcagcaggagagccccuucgucaugauguccgcccccccggcccaguacgagcugaagcacggcacguucaccugcgcgagcgaguacaccggcaacuaccagugcgggcacuacaagcacaucaccuccaaggagacgcucuacugcaucgacggcgcccugcugaccaagagcagcgaguacaaggggcccaucaccgacguguucuacaaggagaacuccuacaccacgaccaucaagcccgugaccuacaagcucgacggcgucgugugcaccgagaucgaccccaagcuggacaacuacuacaagaaggacaacagcuacuucacggagcagccgaucgaccuggugcccaaccagcccuaccccaacgccuccuucgacaacuucaaguucgucugcgacaacaucaaguucgccgacgaccucaaccagcugaccggguacaagaagccggccagccgcgagcugaaggugaccuucuuccccgaccucaacggcgacguggucgcgaucgacuacaagcacuacacccccuccuucaagaagggcgccaagcugcugcacaagcccaucguguggcacgugaacaacgccacgaacaaggccaccuacaagccgaacaccuggugcauccggugccucuggagcaccaagcccgucgagacguccaacagcuucgacgugcugaaguccgaggacgcgcaggggauggacaaccuggccugcgaggaccucaagcccgugagcgaggaggucguggagaaccccaccauccagaaggacgugcuggagugcaacgucaagaccaccgagguggugggcgacaucauccugaagccggccaacaacucccucaagaucacggaggaggucgggcacaccgaccugauggccgccuacguggacaacagcucccugaccaucaagaagcccaacgagcucagccgcgugcugggccugaagacccucgcgacgcacgggcuggccgccgucaacuccgugcccugggacaccaucgccaacuacgccaagccguuccugaacaagguggucagcaccaccacgaacaucgugacccgcugccucaaccgggugugcaccaacuacaugcccuacuucuucacccugcugcuccagcugugcaccuucacgcgcuccaccaacagccggaucaaggcguccaugcccaccaccaucgccaagaacacggucaagagcgugggcaaguucugccuggaggccagcuucaacuaccucaagucccccaacuucagcaagcugaucaacaucaucaucugguuccugcuccuguccgugugccugggcagccucaucuacuccaccgccgcccuggggguccugaugagcaaccucggcaugccguccuacugcaccggguaccgcgagggcuaccugaacagcaccaacgugacgaucgcgaccuacugcaccggcuccauccccugcagcgugugccuguccgggcucgacagccuggacaccuaccccucccuggagacgauccagaucaccaucagcuccuucaagugggaccucaccgccuucggccuggucgccgagugguuccuggccuacauccucuucacccgguucuucuacgugcuggggcuggccgcgaucaugcagcucuucuucagcuacuucgccgugcacuucaucuccaacagcuggcugauguggcugaucaucaaccugguccagauggcccccaucuccgccauggugcgcauguacaucuucuucgcgagcuucuacuacguguggaagagcuacguccacgugguggacggcugcaacuccagcacgugcaugaugugcuacaagcggaaccgcgccacccgggucgagugcaccaccaucgugaacgggguccgccgguccuucuacguguacgccaacggcggcaagggguucugcaagcuccacaacuggaacugcgugaacugcgacacguucugcgccggcagcaccuucaucuccgacgaggucgcccgcgaccugagccugcaguucaagcggccgaucaaccccaccgaccaguccagcuacaucguggacuccgugaccgucaagaacgggagcauccaccucuacuucgacaaggcgggccagaagacguacgagcgccacucccugagccacuucgugaaccuggacaaccuccgggccaacaacaccaaggggucccugcccaucaacgugaucgucuucgacggcaagagcaagugcgaggaguccagcgccaaguccgccagcguguacuacucccagcugaugugccagcccauccuccugcuggaccaggcccucgugagcgacgucggcgacagcgcggagguggccgugaagauguucgacgccuacgucaacaccuucuccagcaccuucaacgugccgauggagaagcugaagacgcugguggccaccgccgaggcggagcucgccaagaacgucucccuggacaacgugcugagcaccuucaucuccgccgcccgccagggguucguggacagcgacgucgagaccaaggacgugguggagugccucaagcugucccaccagagcgacaucgaggucacgggcgacuccugcaacaacuacaugcugaccuacaacaagguggagaacaugaccccccgggaccucggggcgugcaucgacugcagcgcccgccacaucaacgcccagguggccaagucccacaacaucgcccugaucuggaacgucaaggacuucaugagccuguccgagcagcuccggaagcagauccgcagcgcggccaagaagaacaaccugcccuucaagcugaccugcgccacgacccgccagguggugaacgucgugaccaccaagaucgcccucaagggcgggugaggacuagucccuguucccagagcccacuuuuuuuucuuuuuuugaaauaaaauagccugucuuucagaucucaaaggcucuuuucagagccaccaaaaaaaaaaaaaaaaaaaaaaaaaaaaaaaaaaaaaaaaaaaaaaaaaaaaaaaaaaaaaaaaaaaaaaaaaaaaaaaaaaaaaaaaaaaaaaaaaaaaa

SEQ ID NO: 20138 - RNA, 6113 nt, Artificial Sequence
  SARS-CoV-2__MT345861.1__non-structural protein 3 (NSP3) mRNA gc
aggagagucccgcagucggcguccagcggcucugcuuguucgugugugugucguugcaggccuuauucaagcuuaccauggcccccaccaaggugaccuucggcgacgacacggucaucgaggugcagggguacaagagcgugaacaucaccuucgagcuggacgagcgcaucgacaagguccucaacgagaagugcuccgccuacaccguggagcugggcaccgaggugaacgaguucgcgugcgucguggccgacgccgugaucaagacgcugcagccggucagcgagcuccugaccccccuggggaucgaccucgacgagugguccauggccaccuacuaccuguucgacgagagcggcgaguucaagcuggccucccacauguacugcagcuucuacccccccgacgaggacgaggaggagggggacugcgaggaggaggaguucgagccguccacccaguacgaguacggcacggaggacgacuaccagggcaagccccucgaguucggggcgaccagcgccgcccugcagcccgaggaggagcaggaggaggacuggcuggacgacgacucccagcagaccgugggccagcaggacgggagcgaggacaaccagaccacgaccauccagaccaucguggagguccagccccagcucgagauggagcugaccccgguggugcagacgaucgaggucaacuccuucagcggcuaccugaagcucaccgacaacguguacaucaagaacgccgacaucguggaggaggcgaagaaggucaagcccaccgugguggucaacgccgccaacguguaccugaagcacgggggcggcguggccggggcccugaacaaggcgaccaacaacgccaugcaggucgaguccgacgacuacaucgccacgaacggcccccucaagguggggggcagcugcguccuguccggccacaaccuggccaagcacugccuccacgugguggggcccaacgucaacaagggcgaggacauccagcugcugaagagcgccuacgagaacuucaaccagcacgaggugcucaucgcgccgcugcuguccgccgggaucuucggcgccgaccccauccacagccuccgggugugcgucgacaccgugcgcaccaacguguaccuggccgucuucgacaagaaccuguacgacaagcucguguccagcuuccuggagaugaagagcgagaagcagguggagcagaagaucgccgagauccccaaggaggaggucaagcccuucaucaccgaguccaagccgagcguggagcagcggaagcaggacgacaagaagaucaaggcgugcguggaggaggucacgaccacccuggaggagaccaaguuccucacggagaaccugcugcucuacaucgacaucaacgggaaccugcaccccgacuccgccacccuggugagcgacaucgacaucaccuuccucaagaaggacgcccccuacaucgugggcgacgucgugcaggagggcgugcugaccgccgucgugauccccacgaagaaggccgggggcaccaccgagaugcuggcgaaggcccuccgcaaggugccgaccgacaacuacaucacgaccuaccccgggcagggccugaacggguacaccgucgaggaggccaagaccgugcugaagaagugcaaguccgccuucuacauccuccccagcaucaucuccaacgagaagcaggagauccugggcaccgugagcuggaaccugcgggagaugcucgcgcacgccgaggagacgcgcaagcugaugcccgucugcguggagaccaaggccaucguguccaccauccagcggaaguacaagggcaucaagauccaggagggggucguggacuacggcgcccgcuucuacuucuacaccagcaagacgaccguggccucccugaucaacacccugaacgaccucaacgagacccuggucacgaugccgcugggguacgugacccacggccucaaccuggaggaggcggcccgguacaugcgcagccugaaggugcccgccaccgucuccgugagcucccccgacgccgugaccgccuacaacggguaccucacgagcuccagcaagacccccgaggagcacuucaucgagaccaucucccuggcgggcagcuacaaggacuggagcuacuccggccagagcacccagcuggggaucgaguuccucaagcggggcgacaaguccgucuacuacacgagcaacccgaccaccuuccaccuggacggggaggugaucaccuucgacaaccugaagacgcuccugucccugcgcgaggugcggaccaucaaggucuucaccaccguggacaacaucaaccuccacacgcagguggucgacaugagcaugaccuacggccagcaguucggccccaccuaccuggacggggccgacgugaccaagaucaagccccacaacucccacgagggcaagacguucuacgugcugccgaacgacgacacccuccgcgucgaggccuucgaguacuaccacaccaccgaccccagcuuccuggggcgguacauguccgcccugaaccacacgaagaaguggaaguacccccaggugaacggccucaccagcaucaagugggccgacaacaacugcuaccuggcgaccgcccugcucacccugcagcagaucgagcugaaguucaaccccccggcccuccaggacgccuacuaccgcgcgcgggccggggaggccgccaacuucugcgcccugauccuggcguacugcaacaagacggugggcgagcucggcgacguccgcgagaccauguccuaccuguuccagcacgccaaccuggacagcugcaagcgggugcucaacgucgugugcaagaccugcgggcagcagcagaccacccugaagggcguggaggccgucauguacauggggacgcuguccuacgagcaguucaagaagggcgugcagauccccugcaccugcgggaagcaggccaccaaguaccucgugcagcaggagagccccuucgucaugauguccgcccccccggcgcaguacgagcugaagcacggcaccuucacgugcgccagcgaguacaccggcaacuaccagugcgggcacuacaagcacaucaccuccaaggagacccuguacugcaucgacggcgcccuccugacgaagagcagcgaguacaaggggcccaucaccgacguguucuacaaggagaacuccuacaccaccacgaucaagcccgugaccuacaagcuggacggcgucgugugcaccgagaucgaccccaagcucgacaacuacuacaagaaggacaacagcuacuucaccgagcagccgaucgaccuggugcccaaccagcccuaccccaacgccuccuucgacaacuucaaguucgucugcgacaacaucaaguucgccgacgaccugaaccagcucacgggguacaagaagccggcgagccgcgagcugaaggugaccuucuuccccgaccugaacggcgacguggucgccaucgacuacaagcacuacacccccuccuucaagaagggcgccaagcuccugcacaagcccaucguguggcacgugaacaacgccaccaacaaggcgacguacaagccgaacaccuggugcauccggugccuguggagcaccaagcccgucgagaccuccaacagcuucgacgugcucaaguccgaggacgcccaggggauggacaaccuggccugcgaggaccugaagcccgugagcgaggaggucguggagaaccccacgauccagaaggacgugcucgagugcaacgucaagaccaccgagguggugggcgacaucauccugaagccggccaacaacucccugaagaucaccgaggaggucgggcacacggaccucauggccgcguacguggacaacagcucccugaccaucaagaagcccaacgagcugagccgcgugcucggccugaagacccuggccacccacgggcucgccgccgucaacuccgugcccugggacacgaucgccaacuacgcgaagccguuccugaacaagguggucagcaccaccaccaacaucgugacgcgcugccugaaccgggugugcaccaacuacaugcccuacuucuucacccuccugcugcagcucugcaccuucacccgcuccacgaacagccggaucaaggccuccaugcccaccaccaucgccaagaacaccgucaagagcgugggcaaguucugccuggaggccagcuucaacuaccugaagucccccaacuucagcaagcucaucaacaucaucaucugguuccugcugcucuccgugugccugggcagccugaucuacuccacggccgcgcucgggguccugaugagcaaccugggcaugccguccuacugcaccggguaccgcgagggcuaccucaacagcaccaacgugaccaucgccacguacugcaccggcuccauccccugcagcgugugccuguccgggcuggacagccucgacaccuaccccucccuggagaccauccagaucacgaucagcuccuucaagugggaccugaccgccuucggccucgucgccgagugguuccuggccuacauccuguucacccgguucuucuacgugcucgggcuggcggccaucaugcagcuguucuucagcuacuucgccgugcacuucaucuccaacagcuggcucauguggcugaucaucaaccugguccagauggcccccaucuccgcgauggugcgcauguacaucuucuucgccagcuucuacuacguguggaagagcuacguccacgugguggacggcugcaacuccagcaccugcaugaugugcuacaagcggaaccgcgccacgcgggucgagugcaccaccaucgugaacgggguccgccgguccuucuacguguacgccaacggcggcaagggguucugcaagcugcacaacuggaacugcgugaacugcgacaccuucugcgccggcagcacguucaucuccgacgaggucgcgcgcgaccucagccugcaguucaagcggccgaucaaccccaccgaccaguccagcuacaucguggacuccgugaccgucaagaacgggagcauccaccuguacuucgacaaggccggccagaagaccuacgagcgccacucccucagccacuucgugaaccuggacaaccugcgggccaacaacacgaaggggucccuccccaucaacgugaucgucuucgacggcaagagcaagugcgaggaguccagcgccaaguccgccagcguguacuacucccagcugaugugccagcccauccugcuccuggaccaggcgcuggugagcgacgucggcgacagcgccgagguggccgugaagauguucgacgccuacgucaacaccuucuccagcaccuucaacgugccgauggagaagcucaagacccugguggccacggcggaggccgagcuggccaagaacgucucccucgacaacgugcugagcaccuucaucuccgccgcgcgccagggguucguggacagcgacgucgagaccaaggacgugguggagugccugaagcucucccaccagagcgacaucgaggucaccggcgacuccugcaacaacuacaugcugacguacaacaagguggagaacaugaccccccgggaccugggggccugcaucgacugcagcgcccgccacaucaacgcccagguggccaagucccacaacaucgcgcucaucuggaacgucaaggacuucaugagccuguccgagcagcugcggaagcagauccgcagcgccgccaagaagaacaaccuccccuucaagcugaccugcgccaccacgcgccagguggugaacgucgugaccaccaagaucgcccugaagggcgggugaggacuagucccuguucccagagcccacuuuuuuuucuuuuuuugaaauaaaauagccugucuuucagaucucaaaggcucuuuucagagccaccaaaaaaaaaaaaaaaaaaaaaaaaaaaaaaaaaaaaaaaaaaaaaaaaaaaaaaaaaaaaaaaaaaaaaaaaaaaaaaaaaaaaaaaaaaaaaaaaaaaaa

SEQ ID NO: 20139 - RNA, 6113 nt, Artificial Sequence
  SARS-CoV-2__MT345869.1__non-structural protein 3 (NSP3) mRNA gc
aggagagucccgcagucggcguccagcggcucugcuuguucgugugugugucguugcaggccuuauucaagcuuaccauggcccccaccaaggugaccuucggcgacgacacggucaucgaggugcagggguacaagagcgugaacaucaccuucgagcuggacgagcgcaucgacaagguccucaacgagaagugcuccgccuacaccguggagcugggcaccgaggugaacgaguucgcgugcgucguggccgacgccgugaucaagacgcugcagccggucagcgagcuccugaccccccuggggaucgaccucgacgagugguccauggccaccuacuaccuguucgacgagagcggcgaguucaagcuggccucccacauguacugcagcuucuacccccccgacgaggacgaggaggagggggacugcgaggaggaggaguucgagccguccacccaguacgaguacggcacggaggacgacuaccagggcaagagccucgaguucggggcgaccuccgccgcccugcagcccgaggaggagcaggaggaggacuggcuggacgacgacagccagcagaccgugggccagcaggacggguccgaggacaaccagaccacgaccauccagaccaucguggagguccagccccagcucgagauggagcugacccccguggugcagacgaucgaggucaacagcuucuccggcuaccugaagcucaccgacaacguguacaucaagaacgccgacaucguggaggaggcgaagaaggucaagccgaccgugguggucaacgccgccaacguguaccugaagcacgggggcggcguggccggggcccugaacaaggcgaccaacaacgccaugcaggucgagagcgacgacuacaucgccacgaacggcccccucaagguggggggcuccugcguccugagcggccacaaccuggccaagcacugccuccacgugguggggcccaacgucaacaagggcgaggacauccagcugcugaaguccgccuacgagaacuucaaccagcacgaggugcuccuggcgccccugcucagcgccgggaucuucggcgccgacccgauccacucccugcgggugugcgucgacaccgugcgcaccaacguguaccuggccgucuucgacaagaaccucuacgacaagcuggugagcagcuuccuggagaugaaguccgagaagcagguggagcagaagaucgccgagauccccaaggaggaggucaagcccuucaucaccgagagcaagcccuccguggagcagcggaagcaggacgacaagaagaucaaggcgugcguggaggaggucacgaccacccucgaggagaccaaguuccugacggagaaccugcuccuguacaucgacaucaacgggaaccugcacccggacagcgccacccucguguccgacaucgacaucaccuuccugaagaaggacgcccccuacaucgugggcgacgucgugcaggagggcgugcugaccgccgucgugauccccacgaagaaggccgggggcaccaccgagaugcucgcgaaggcccugcgcaaggugcccaccgacaacuacaucacgaccuacccggggcagggccugaacggguacaccgucgaggaggccaagaccgugcucaagaagugcaagagcgccuucuacauccugcccuccaucaucagcaacgagaagcaggagauccugggcaccguguccuggaaccuccgggagaugcuggcgcacgccgaggagacgcgcaagcugaugcccgucugcguggagaccaaggccaucgugagcaccauccagcggaaguacaagggcaucaagauccaggagggggucguggacuacggcgcccgcuucuacuucuacaccuccaagacgaccguggccagccugaucaacacccucaacgaccugaacgagacccuggucacgaugccccucggguacgugacccacggccugaaccuggaggaggcggcccgguacaugcgcucccucaaggugccggccaccgucagcguguccagccccgacgccgugaccgccuacaacggguaccugacguccagcuccaagacccccgaggagcacuucaucgagaccaucagccuggcgggcagcuacaaggacugguccuacagcggccaguccacccagcucgggaucgaguuccugaagcggggcgacaagagcgucuacuacacguccaaccccaccaccuuccaccuggacggggaggugaucaccuucgacaaccucaagacgcugcugagccuccgcgaggugcggaccaucaaggucuucaccaccguggacaacaucaaccugcacacgcagguggucgacauguccaugaccuacggccagcaguucggcccgaccuaccuggacggggccgacgugaccaagaucaagccccacaacagccacgagggcaagacguucuacgugcuccccaacgacgacacccugcgcgucgaggccuucgaguacuaccacaccaccgacccguccuuccuggggcgguacaugagcgcccucaaccacacgaagaaguggaaguacccccaggugaacggccugaccuccaucaagugggccgacaacaacugcuaccuggcgaccgcccuccugacccugcagcagaucgagcucaaguucaacccccccgcccugcaggacgccuacuaccgcgcgcgggccggggaggccgccaacuucugcgcccugauccucgcguacugcaacaagacggugggcgagcugggcgacguccgcgagaccaugagcuaccuguuccagcacgccaaccucgacuccugcaagcgggugcugaacgucgugugcaagaccugcgggcagcagcagaccacccugaagggcguggaggccgucauguacauggggacgcucagcuacgagcaguucaagaagggcgugcagaucccgugcaccugcgggaagcaggccaccaaguaccuggugcagcaggagucccccuucgucaugaugagcgccccccccgcgcaguacgagcugaagcacggcaccuucacgugcgccuccgaguacaccggcaacuaccagugcgggcacuacaagcacaucaccagcaaggagacccucuacugcaucgacggcgcccugcugacgaagagcuccgaguacaaggggccgaucaccgacguguucuacaaggagaacagcuacaccaccacgaucaagcccgugaccuacaagcucgacggcgucgugugcaccgagaucgaccccaagcuggacaacuacuacaagaaggacaacuccuacuucaccgagcagcccaucgaccuggugccgaaccagcccuaccccaacgccagcuucgacaacuucaaguucgucugcgacaacaucaaguucgccgacgaccucaaccagcugacgggguacaagaagcccgcgucccgcgagcugaaggugaccuucuucccggaccucaacggcgacguggucgccaucgacuacaagcacuacacccccagcuucaagaagggcgccaagcugcugcacaagcccaucguguggcacgugaacaacgccaccaacaaggcgacguacaagcccaacaccuggugcauccggugccucugguccaccaagccggucgagaccagcaacuccuucgacgugcugaagagcgaggacgcccaggggauggacaaccuggccugcgaggaccucaagcccguguccgaggaggucguggagaaccccacgauccagaaggacgugcuggagugcaacgucaagaccaccgagguggugggcgacaucauccugaagcccgccaacaacagccucaagaucaccgaggaggucgggcacacggaccugauggccgcguacguggacaacuccagccugaccaucaagaagccgaacgagcucucccgcgugcugggccugaagacccucgccacccacgggcuggccgccgucaacagcgugcccugggacacgaucgccaacuacgcgaagcccuuccugaacaagguggucuccaccaccaccaacaucgugacgcgcugccucaaccgggugugcaccaacuacaugccguacuucuucacccugcugcuccagcugugcaccuucacccgcagcacgaacucccggaucaaggccagcaugcccaccaccaucgccaagaacaccgucaagagcgugggcaaguucugccuggaggccuccuucaacuaccucaagagccccaacuucuccaagcugaucaacaucaucaucugguuccugcuccugagcgugugccugggcucccucaucuacagcacggccgcgcuggggguccugauguccaaccucggcaugcccagcuacugcaccggguaccgcgagggcuaccugaacuccaccaacgugaccaucgccacguacugcaccggcagcaucccgugcuccgugugccugagcgggcucgacucccuggacaccuaccccagccuggagaccauccagaucacgaucuccagcuucaagugggaccucaccgccuucggccuggucgccgagugguuccuggccuacauccucuucacccgguucuucuacgugcuggggcuggcggccaucaugcagcucuucuucuccuacuucgccgugcacuucaucagcaacuccuggcugauguggcugaucaucaaccugguccagauggcccccaucagcgcgauggugcgcauguacaucuucuucgccagcuucuacuacguguggaaguccuacguccacgugguggacggcugcaacagcuccaccugcaugaugugcuacaagcggaaccgcgccacgcgggucgagugcaccaccaucgugaacgggguccgccggagcuucuacguguacgccaacggcggcaagggguucugcaagcuccacaacuggaacugcgugaacugcgacaccuucugcgccggcuccacguucaucagcgacgaggucgcgcgcgaccugucccugcaguucaagcggcccaucaacccgaccgaccagagcuccuacaucguggacagcgugaccgucaagaacggguccauccaccucuacuucgacaaggccggccagaagaccuacgagcgccacagccugucccacuucgugaaccuggacaaccuccgggccaacaacacgaaggggagccugcccaucaacgugaucgucuucgacggcaaguccaagugcgaggagagcuccgccaagagcgccuccguguacuacagccagcugaugugccagcccauccuccugcuggaccaggcgcucgugagcgacgucggcgacuccgccgagguggccgugaagauguucgacgccuacgucaacaccuucagcuccaccuucaacgugcccauggagaagcugaagacccugguggccacggcggaggccgagcucgccaagaacgucagccuggacaacgugcuguccaccuucaucagcgccgcgcgccagggguucguggacuccgacgucgagaccaaggacgugguggagugccucaagcugagccaccaguccgacaucgaggucaccggcgacagcugcaacaacuacaugcugacguacaacaagguggagaacaugaccccgcgggaccucggggccugcaucgacugcuccgcccgccacaucaacgcccagguggccaagagccacaacaucgcgcugaucuggaacgucaaggacuucaugucccugagcgagcagcuccggaagcagauccgcuccgccgccaagaagaacaaccugcccuucaagcugaccugcgccaccacgcgccagguggugaacgucgugaccaccaagaucgcccucaagggcgggugaggacuagucccuguucccagagcccacuuuuuuuucuuuuuuugaaauaaaauagccugucuuucagaucucaaaggcucuuuucagagccaccaaaaaaaaaaaaaaaaaaaaaaaaaaaaaaaaaaaaaaaaaaaaaaaaaaaaaaaaaaaaaaaaaaaaaaaaaaaaaaaaaaaaaaaaaaaaaaaaaaaaa

SEQ ID NO: 20140 - RNA, 6113 nt, Artificial Sequence
  SARS-CoV-2__MT345871.1__non-structural protein 3 (NSP3) mRNA gc
aggagagucccgcagucggcguccagcggcucugcuuguucgugugugugucguugcaggccuuauucaagcuuaccauggcccccaccaaggugaccuucggcgacgacacggucaucgaggugcagggguacaagagcgugaacaucaccuucgagcuggacgagcgcaucgacaagguccucaacgagaagugcuccgccuacaccguggagcugggcaccgaggugaacgaguucgcgugcgucguggccgacgccgugaucaagacgcugcagccggucagcgagcuccugaccccccuggggaucgaccucgacgagugguccauggccaccuacuaccuguucgacgagagcggcgaguucaagcuggccucccacauguacugcagcuucuacccccccgacgaggacgaggaggagggggacugcgaggaggaggaguucgagccguccacccaguacgaguacggcacggaggacgacuaccagggcaagccccucgaguucggggcgaccagcgccgcccugcagcccgaggaggagcaggaggaggacuggcuggacgacgacucccagcagaccgugggccagcaggacgggagcgaggacaaccagaccacgaccauccagaccaucguggagguccagccccagcucgagauggagcugaccccgguggugcagacgaucgaggucaacuccuucagcggcuaccugaagcucaccgacaacguguacaucaagaacgccgacaucguggaggaggcgaagaaggucaagcccaccgugguggucaacgccgccaacguguaccugaagcacgggggcggcguggccggggcccugaacaaggcgaccaacaacgccaugcaggucgaguccgacgacuacaucgccacgaacggcccccucaagguggggggcagcugcguccuguccggccacaaccuggccaagcacugccuccacgugguggggcccaacgucaacaagggcgaggacauccagcugcugaagagcgccuacgagaacuucaaccagcacgaggugcuccuggcgccgcugcucuccgccgggaucuucggcgccgaccccauccacagccugcgggugugcgucgacaccgugcgcaccaacguguaccuggccgucuucgacaagaaccucuacgacaagcugguguccagcuuccuggagaugaagagcgagaagcagguggagcagaagaucgccgagauccccaaggaggaggucaagcccuucaucaccgaguccaagccgagcguggagcagcggaagcaggacgacaagaagaucaaggcgugcguggaggaggucacgaccacccucgaggagaccaaguuccugacggagaaccugcuccuguacaucgacaucaacgggaaccugcaccccgacuccgccacccucgugagcgacaucgacaucaccuuccugaagaaggacgcccccuacaucgugggcgacgucgugcaggagggcgugcugaccgccgucgugauccccacgaagaaggccgggggcaccaccgagaugcucgcgaaggcccugcgcaaggugccgaccgacaacuacaucacgaccuaccccgggcagggccugaacggguacaccgucgaggaggccaagaccgugcucaagaagugcaaguccgccuucuacauccugcccagcaucaucuccaacgagaagcaggagauccugggcaccgugagcuggaaccuccgggagaugcuggcgcacgccgaggagacgcgcaagcugaugcccgucugcguggagaccaaggccaucguguccaccauccagcggaaguacaagggcaucaagauccaggagggggucguggacuacggcgcccgcuucuacuucuacaccagcaagacgaccguggccucccugaucaacacccucaacgaccugaacgagacccuggucacgaugccgcucggguacgugacccacggccugaaccuggaggaggcggcccgguacaugcgcagccucaaggugcccgccaccgucuccgugagcucccccgacgccgugaccgccuacaacggguaccugacgagcuccagcaagacccccgaggagcacuucaucgagaccaucucccuggcgggcagcuacaaggacuggagcuacuccggccagagcacccagcucgggaucgaguuccugaagcggggcgacaaguccgucuacuacacgagcaacccgaccaccuuccaccuggacggggaggugaucaccuucgacaaccucaagacgcugcugucccuccgcgaggugcggaccaucaaggucuucaccaccguggacaacaucaaccugcacacgcagguggucgacaugagcaugaccuacggccagcaguucggccccaccuaccuggacggggccgacgugaccaagaucaagccccacaacucccacgagggcaagacguucuacgugcucccgaacgacgacacccugcgcgucgaggccuucgaguacuaccacaccaccgaccccagcuuccuggggcgguacauguccgcccucaaccacacgaagaaguggaaguacccccaggugaacggccugaccagcaucaagugggccgacaacaacugcuaccuggcgaccgcccuccugacccugcagcagaucgagcucaaguucaaccccccggcccugcaggacgccuacuaccgcgcgcgggccggggaggccgccaacuucugcgcccugauccucgcguacugcaacaagacggugggcgagcugggcgacguccgcgagaccauguccuaccuguuccagcacgccaaccucgacagcugcaagcgggugcugaacgucgugugcaagaccugcgggcagcagcagaccacccugaagggcguggaggccgucauguacauggggacgcucuccuacgagcaguucaagaagggcgugcagauccccugcaccugcgggaagcaggccaccaaguaccuggugcagcaggagagccccuucgucaugauguccgcccccccggcgcaguacgagcugaagcacggcaccuucacgugcgccagcgaguacaccggcaacuaccagugcgggcacuacaagcacaucaccuccaaggagacccucuacugcaucgacggcgcccugcugacgaagagcagcgaguacaaggggcccaucaccgacguguucuacaaggagaacuccuacaccaccacgaucaagcccgugaccuacaagcucgacggcgucgugugcaccgagaucgaccccaagcuggacaacuacuacaagaaggacaacagcuacuucaccgagcagccgaucgaccuggugcccaaccagcccuaccccaacgccuccuucgacaacuucaaguucgucugcgacaacaucaaguucgccgacgaccucaaccagcugacgggguacaagaagccggcgagccgcgagcugaaggugaccuucuuccccgaccucaacggcgacguggucgccaucgacuacaagcacuacacccccuccuucaagaagggcgccaagcugcugcacaagcccaucguguggcacgugaacaacgccaccaacaaggcgacguacaagccgaacaccuggugcauccggugccucuggagcaccaagcccgucgagaccuccaacagcuucgacgugcugaagcuggaggacgcccaggggauggacaaccucgccugcgaggaccugaagcccguguccgaggaggucguggagaaccccacgauccagaaggacgugcuggagugcaacgucaagaccaccgagguggugggcgacaucauccucaagccggccaacaacagccugaagaucaccgaggaggucgggcacacggaccugauggccgcguacguggacaacuccagccucaccaucaagaagcccaacgagcugucccgcgugcugggccucaagacccuggccacccacgggcuggccgccgucaacagcgugcccugggacacgaucgccaacuacgcgaagccguuccucaacaagguggucuccaccaccaccaacaucgugacgcgcugccugaaccgggugugcaccaacuacaugcccuacuucuucacccugcuccugcagcugugcaccuucacccgcagcacgaacucccggaucaaggccagcaugcccaccaccaucgccaagaacaccgucaaguccgugggcaaguucugccucgaggccagcuucaacuaccugaagagccccaacuucuccaagcugaucaacaucaucaucugguuccuccugcugagcgugugccucggcucccugaucuacagcacggccgcgcuggggguccucauguccaaccugggcaugccgagcuacugcaccggguaccgcgagggcuaccugaacuccaccaacgugaccaucgccacguacugcaccggcagcauccccugcuccgugugccucagcgggcuggacucccuggacaccuaccccagccucgagaccauccagaucacgaucuccagcuucaagugggaccugaccgccuucggccuggucgccgagugguuccucgccuacauccuguucacccgguucuucuacgugcuggggcucgcggccaucaugcagcuguucuucuccuacuucgccgugcacuucaucagcaacuccuggcugauguggcugaucaucaaccucguccagauggcccccaucagcgcgauggugcgcauguacaucuucuucgccuccuucuacuacguguggaagagcuacguccacgugguggacggcugcaacagcuccaccugcaugaugugcuacaagcggaaccgcgccacgcgggucgagugcaccaccaucgugaacgggguccgccggagcuucuacguguacgccaacggcggcaagggguucugcaagcugcacaacuggaacugcgugaacugcgacaccuucugcgccggcuccacguucaucagcgacgaggucgcgcgcgaccugucccuccaguucaagcggccgaucaaccccaccgaccagagcuccuacaucguggacagcgugaccgucaagaacggguccauccaccuguacuucgacaaggccggccagaagaccuacgagcgccacagccugucccacuucgugaaccucgacaaccugcgggccaacaacacgaaggggagccugcccaucaacgugaucgucuucgacggcaaguccaagugcgaggagagcuccgccaagagcgccuccguguacuacagccagcucaugugccagcccauccugcugcucgaccaggcgcugguguccgacgucggcgacagcgccgagguggccgugaagauguucgacgccuacgucaacaccuucagcuccaccuucaacgugccgauggagaagcugaagacccucguggccacggcggaggccgagcuggccaagaacgucagccuggacaacgugcucuccaccuucaucagcgccgcgcgccagggguucguggacuccgacgucgagaccaaggacgugguggagugccugaagcugagccaccaguccgacaucgaggucaccggcgacagcugcaacaacuacaugcucacguacaacaagguggagaacaugaccccccgggaccugggggccugcaucgacugcuccgcccgccacaucaacgcccagguggccaagagccacaacaucgcgcugaucuggaacgucaaggacuucaugucccucagcgagcagcugcggaagcagauccgcuccgccgccaagaagaacaaccugcccuucaagcucaccugcgccaccacgcgccagguggugaacgucgugaccaccaagaucgcccugaagggcgggugaggacuagucccuguucccagagcccacuuuuuuuucuuuuuuugaaauaaaauagccugucuuucagaucucaaaggcucuuuucagagccaccaaaaaaaaaaaaaaaaaaaaaaaaaaaaaaaaaaaaaaaaaaaaaaaaaaaaaaaaaaaaaaaaaaaaaaaaaaaaaaaaaaaaaaaaaaaaaaaaaaaaa

SEQ ID NO: 20141 - RNA, 6113 nt, Artificial Sequence
  SARS-CoV-2__MT345879.1__non-structural protein 3 (NSP3) mRNA gc
aggagagucccgcagucggcguccagcggcucugcuuguucgugugugugucguugcaggccuuauucaagcuuaccauggcccccaccaaggugaccuucggcgacgacacggucaucgaggugcagggguacaagagcgugaacaucaccuucgagcuggacgagcgcaucgacaagguccucaacgagaagugcuccgccuacaccguggagcugggcaccgaggugaacgaguucgcgugcgucguggccgacgccgugaucaagacgcugcagccggucagcgagcuccugaccccccuggggaucgaccucgacgagugguccauggccaccuacuaccuguucgacgagagcggcgaguucaagcuggccucccacauguacugcagcuucuacccccccgacgaggacgaggaggagggggacugcgaggaggaggaguucgagccguccacccaguacgaguacggcacggaggacgacuaccagggcaagccccucgaguucggggcgaccagcgccgcccugcagcccgaggaggagcaggaggaggacuggcuggacgacgacucccagcagaccgugggccagcaggacgggagcgaggacaaccagaccacgaccauccagaccaucguggagguccagccccagcucgagauggagcugaccccgguggugcagacgaucgaggucaacuccuucagcggcuaccugaagcucaccgacaacguguacaucaagaacgccgacaucguggaggaggcgaagaaggucaagcccaccgugguggucaacgccgccaacguguaccugaagcacgggggcggcguggccggggcccugaacaaggcgaccaacaacgccaugcaggucgaguccgacgacuacaucgccacgaacggcccccucaagguggggggcagcugcguccuguccggccacaaccuggccaagcacugccuccacgugguggggcccaacgucaacaagggcgaggacauccagcugcugaagagcgccuacgagaacuucaaccagcacgaggugcuccuggcgccgcugcucuccgccgggaucuucggcgccgaccccauccacagccugcgggugugcgucgacaccgugcgcaccaacguguaccuggccgucuucgacaagaaccucuacgacaagcugguguccagcuuccuggagaugaagagcgagaagcagguggagcagaagaucgccgagauccccaaggaggaggucaagcccuucaucaccgaguccaagccgagcguggagcagcggaagcaggacgacaagaagaucaaggcgugcguggaggaggucacgaccacccucgaggagaccaaguuccugacggagaaccugcuccuguacaucgacaucaacgggaaccugcaccccgacuccgccacccucgugagcgacaucgacaucaccuuccugaagaaggacgcccccuacaucgugggcgacgucgugcaggagggcgugcugaccgccgucgugauccccacgaagaaggccgggggcaccaccgagaugcucgcgaaggcccugcgcaaggugccgaccgacaacuacaucacgaccuaccccgggcagggccugaacggguacaccgucgaggaggccaagaccgugcucaagaagugcaaguccgccuucuacauccugcccagcaucaucuccaacgagaagcaggagauccugggcaccgugagcuggaaccuccgggagaugcuggcgcacgccgaggagacgcgcaagcugaugcccgucugcguggagaccaaggccaucguguccaccauccagcggaaguacaagggcaucaagauccaggagggggucguggacuacggcgcccgcuucuacuucuacaccagcaagacgaccguggccucccugaucaacacccucaacgaccugaacgagacccuggucacgaugccgcucggguacgugacccacggccugaaccuggaggaggcggcccgguacaugcgcagccucaaggugcccgccaccgucuccgugagcucccccgacgccgugaccgccuacaacggguaccugacgagcuccagcaagacccccgaggagcacuucaucgagaccaucucccuggcgggcagcuacaaggacuggagcuacuccggccagagcacccagcucgggaucgaguuccugaagcggggcgacaaguccgucuacuacacgagcaacccgaccaccuuccaccuggacggggaggugaucaccuucgacaaccucaagacgcugcugucccuccgcgaggugcggaccaucaaggucuucaccaccguggacaacaucaaccugcacacgcagguggucgacaugagcaugaccuacggccagcaguucggccccaccuaccuggacggggccgacgugaccaagaucaagccccacaacucccacgagggcaagacguucuacgugcucccgaacgacgacacccugcgcgucgaggccuucgaguacuaccacaccaccgaccccagcuuccuggggcgguacauguccgcccucaaccacacgaagaaguggaaguacccccaggugaacggccugaccagcaucaaguggaccgacaacaacugcuaccuggccaccgcgcuccugacgcugcagcagaucgagcucaaguucaaccccccggcccugcaggacgccuacuaccgcgcccgggcgggggaggccgccaacuucugcgcccugauccucgccuacugcaacaagaccgugggcgagcugggcgacguccgcgagaccauguccuaccuguuccagcacgcgaaccucgacagcugcaagcgggugcugaacgucgugugcaagaccugcgggcagcagcagaccacgcugaagggcguggaggccgucauguacauggggacccucuccuacgagcaguucaagaagggcgugcagauccccugcaccugcgggaagcaggccaccaaguaccuggugcagcaggagagccccuucgucaugauguccgcccccccggcccaguacgagcugaagcacggcacguucaccugcgcgagcgaguacaccggcaacuaccagugcgggcacuacaagcacaucaccuccaaggagacgcucuacugcaucgacggcgcccugcugaccaagagcagcgaguacaaggggcccaucaccgacguguucuacaaggagaacuccuacaccacgaccaucaagcccgugaccuacaagcucgacggcgucgugugcaccgagaucgaccccaagcuggacaacuacuacaagaaggacaacagcuacuucacggagcagccgaucgaccuggugcccaaccagcccuaccccaacgccuccuucgacaacuucaaguucgucugcgacaacaucaaguucgccgacgaccucaaccagcugaccggguacaagaagccggccagccgcgagcugaaggugaccuucuuccccgaccucaacggcgacguggucgcgaucgacuacaagcacuacacccccuccuucaagaagggcgccaagcugcugcacaagcccaucguguggcacgugaacaacgccacgaacaaggccaccuacaagccgaacaccuggugcauccggugccucuggagcaccaagcccgucgagacguccaacagcuucgacgugcugaaguccgaggacgcgcaggggauggacaaccuggccugcgaggaccucaagcccgugagcgaggaggucguggagaaccccaccauccagaaggacgugcuggagugcaacgucaagaccaccgagguggugggcgacaucauccugaagccggccaacaacucccucaagaucacggaggaggucgggcacaccgaccugauggccgccuacguggacaacagcucccugaccaucaagaagcccaacgagcucagccgcgugcugggccugaagacccucgcgacgcacgggcuggccgccgucaacuccgugcccugggacaccaucgccaacuacgccaagccguuccugaacaagguggucagcaccaccacgaacaucgugacccgcugccucaaccgggugugcaccaacuacaugcccuacuucuucacccugcugcuccagcugugcaccuucacgcgcuccaccaacagccggaucaaggcguccaugcccaccaccaucgccaagaacacggucaagagcgugggcaaguucugccuggaggccagcuucaacuaccucaagucccccaacuucagcaagcugaucaacaucaucaucugguuccugcuccuguccgugugccugggcagccucaucuacuccaccgccgcccuggggguccugaugagcaaccucggcaugccguccuacugcaccggguaccgcgagggcuaccugaacagcaccaacgugacgaucgcgaccuacugcaccggcuccauccccugcagcgugugccuguccgggcucgacagccuggacaccuaccccucccuggagacgauccagaucaccaucagcuccuucaagugggaccucaccgccuucggccuggucgccgagugguuccuggccuacauccucuucacccgguucuucuacgugcuggggcuggccgcgaucaugcagcucuucuucagcuacuucgccgugcacuucaucuccaacagcuggcugauguggcugaucaucaaccugguccagauggcccccaucuccgccauggugcgcauguacaucuucuucgcgagcuucuacuacguguggaagagcuacguccacgugguggacggcugcaacuccagcacgugcaugaugugcuacaagcggaaccgcgccacccgggucgagugcaccaccaucgugaacgggguccgccgguccuucuacguguacgccaacggcggcaagggguucugcaagcuccacaacuggaacugcgugaacugcgacacguucugcgccggcagcaccuucaucuccgacgaggucgcccgcgaccugagccugcaguucaagcggccgaucaaccccaccgaccaguccagcuacaucguggacuccgugaccgucaagaacgggagcauccaccucuacuucgacaaggcgggccagaagacguacgagcgccacucccugagccacuucgugaaccuggacaaccuccgggccaacaacaccaaggggucccugcccaucaacgugaucgucuucgacggcaagagcaagugcgaggaguccagcgccaaguccgccagcguguacuacucccagcugaugugccagcccauccuccugcuggaccaggcccucgugagcgacgucggcgacagcgcggagguggccgugaagauguucgacgccuacgucaacaccuucuccagcaccuucaacgugccgauggagaagcugaagacgcugguggccaccgccgaggcggagcucgccaagaacgucucccuggacaacgugcugagcaccuucaucuccgccgcccgccagggguucguggacagcgacgucgagaccaaggacgugguggagugccucaagcugucccaccagagcgacaucgaggucacgggcgacuccugcaacaacuacaugcugaccuacaacaagguggagaacaugaccccccgggaccucggggcgugcaucgacugcagcgcccgccacaucaacgcccagguggccaagucccacaacaucgcccugaucuggaacgucaaggacuucaugagccuguccgagcagcuccggaagcagauccgcagcgcggccaagaagaacaaccugcccuucaagcugaccugcgccacgacccgccagguggugaacgucgugaccaccaagaucgcccucaagggcgggugaggacuagucccuguucccagagcccacuuuuuuuucuuuuuuugaaauaaaauagccugucuuucagaucucaaaggcucuuuucagagccaccaaaaaaaaaaaaaaaaaaaaaaaaaaaaaaaaaaaaaaaaaaaaaaaaaaaaaaaaaaaaaaaaaaaaaaaaaaaaaaaaaaaaaaaaaaaaaaaaaaaaa

SEQ ID NO: 20142 - RNA, 6113 nt, Artificial Sequence
  SARS-CoV-2__MT345887.1__non-structural protein 3 (NSP3) mRNA gc
aggagagucccgcagucggcguccagcggcucugcuuguucgugugugugucguugcaggccuuauucaagcuuaccauggcccccaccaaggugaccuucggcgacgacacggucaucgaggugcagggguacaagagcgugaacaucaccuucgagcuggacgagcgcaucgacaagguccucaacgagaagugcuccgccuacaccguggagcugggcaccgaggugaacgaguucgcgugcgucguggccgacgccgugaucaagacgcugcagccggucagcgagcuccugaccccccuggggaucgaccucgacgagugguccauggccaccuacuaccuguucgacgagagcggcgaguucaagcuggccucccacauguacugcagcuucuacccccccgacgaggacgaggaggagggggacugcgaggaggaggaguucgagccguccacccaguacgaguacggcacggaggacgacuaccagggcaagccccucgaguucggggcgaccagcgccgcccugcagcccgaggaggagcaggaggaggacuggcuggacgacgacucccagcagaccgugggccagcaggacgggagcgaggacaaccagaccacgaccauccagaccaucguggagguccagccccagcucgagauggagcugaccccgguggugcagacgaucgaggucaacuccuucagcggcuaccugaagcucaccgacaacguguacaucaagaacgccgacaucguggaggaggcgaagaaggucaagcccaccgugguggucaacgccgccaacguguaccugaagcacgggggcggcguggccggggcccugaacaaggcgaccaacaacgccaugcaggucgaguccgacgacuacaucgccacgaacggcccccucaagguggggggcagcugcguccuguccggccacaaccuggccaagcacugccuccacgugguggggcccaacgucaacaagggcgaggacauccagcugcugaagagcgccuacgagaacuucaaccagcacgaggugcuccuggcgccgcugcucuccgccgggaucuucggcgccgaccccauccacagccugcgggugugcgucgacaccgugcgcaccaacguguaccuggccgucuucgacaagaaccucuacgacaagcugguguccagcuuccuggagaugaagagcgagaagcagguggagcagaagaucgccgagauccccaaggaggaggucaagcccuucaucaccgaguccaagccgagcguggagcagcggaagcaggacgacaagaagaucaaggcgugcguggaggaggucacgaccacccucgaggagaccaaguuccugacggagaaccugcuccuguacaucgacaucaacgggaaccugcaccccgacuccgccacccucgugagcgacaucgacaucaccuuccugaagaaggacgcccccuacaucgugggcgacgucgugcaggagggcgugcugaccgccgucgugauccccacgaagaaggccgggggcaccaccgagaugcucgcgaaggcccugcgcaaggugccgaccgacaacuacaucacgaccuaccccgggcagggccugaacggguacaccgucgaggaggccaagaccgugcucaagaagugcaaguccgccuucuacauccugcccagcaucaucuccaacgagaagcaggagauccugggcaccgugagcuggaaccuccgggagaugcuggcgcacgccgaggagacgcgcaagcugaugcccgucugcguggagaccaaggccaucguguccaccauccagcggaaguacaagggcaucaagauccaggagggggucguggacuacggcgcccgcuucuacuucuacaccagcaagacgaccguggccucccugaucaacacccucaacgaccugaacgagacccuggucacgaugccgcucggguacgugacccacggccugaaccuggaggaggcggcccgguacaugcgcagccucaaggugcccgccaccgucuccgugagcucccccgacgccgugaccgccuacaacggguaccugacgagcuccagcaagacccccgaggagcacuucaucgagaccaucucccuggcgggcagcuacaaggacuggagcuacuccggccagagcacccagcucgggaucgaguuccugaagcggggcgacaaguccgucuacuacacgagcaacccgaccaccuuccaccuggacggggaggugaucaccuucgacaaccucaagacgcugcugucccuccgcgaggugcggaccaucaaggucuucaccaccguggacaacaucaaccugcacacgcagguggucgacaugagcaugaccuacggccagcaguucggccccaccuaccuggacggggccgacgugaccaagaucaagccccacaacucccacgagggcaagacguucuacgugcucccgaacgacgacacccugcgcgucgaggccuucgaguacuaccacaccaccgaccccagcuuccuggggcgguacauguccgcccucaaccacacgaagaaguggaaguacccccaggugaacggccugaccagcaucaagugggccgacaacaacugcuaccuggcgaccgcccuccugacccugcagcagaucgagcucaaguucaaccccccggcccugcaggacgccuacuaccgcgcgcgggccggggaggccgccaacuucugcgcccugauccucgcguacugcaacaagacggugggcgagcugggcgacguccgcgagaccauguccuaccuguuccagcacgccaaccucgacagcugcaagcgggugcugaacgucgugugcaagaccugcgggcagcagcagaccacccugaagggcguggaggccgucauguacauggggacgcucuccuacgagcaguucaagaagggcgugcagauccccugcaccugcgggaagcaggccaccaaguaccuggugcagcaggagagccccuucgucaugauguccgcccccccggcgcaguacgagcugaagcacggcaccuucacgugcgccagcgaguacaccggcaacuaccagugcgggcacuacaagcacaucaccuccaaggagacccucuacugcaucgacggcgcccugcugacgaagagcagcgaguacaaggggcccaucaccgacguguucuacaaggagaacuccuacaccaccacgaucaagcccgugaccuacaagcucgacggcgucgugugcaucgagaucgaccccaagcuggacaacuacuacaagaaggacaacagcuacuucaccgagcagccgaucgaccuggugcccaaccagcccuaccccaacgccuccuucgacaacuucaaguucgucugcgacaacaucaaguucgccgacgaccucaaccagcugaccggguacaagaagccggcgagccgcgagcugaaggugacguucuuccccgaccucaacggcgacguggucgccaucgacuacaagcacuacacccccuccuucaagaagggcgccaagcugcugcacaagcccaucguguggcacgugaacaacgccaccaacaaggcgaccuacaagccgaacacguggugcauccggugccucuggagcaccaagcccgucgagaccuccaacagcuucgacgugcugaaguccgaggacgcccaggggauggacaaccuggccugcgaggaccucaagcccgugagcgaggaggucguggagaaccccaccauccagaaggacgugcuggagugcaacgucaagacgaccgagguggugggcgacaucauccugaagccggccaacaacucccucaagaucaccgaggaggucgggcacaccgaccugauggccgcguacguggacaacagcucccugacgaucaagaagcccaacgagcucagccgcgugcugggccugaagacccucgccacccacgggcuggccgccgucaacuccgugcccugggacaccaucgccaacuacgcgaagccguuccugaacaagguggucagcacgaccaccaacaucgugacccgcugccucaaccgggugugcacgaacuacaugcccuacuucuucacccugcugcuccagcugugcaccuucacccgcuccaccaacagccggaucaaggccuccaugcccacgaccaucgccaagaacaccgucaagagcgugggcaaguucugccuggaggccagcuucaacuaccucaagucccccaacuucagcaagcugaucaacaucaucaucugguuccugcuccuguccgugugccugggcagccucaucuacuccaccgccgcgcuggggguccugaugagcaaccucggcaugccguccuacugcacgggguaccgcgagggcuaccugaacagcaccaacgugaccaucgccaccuacugcacgggcuccauccccugcagcgugugccuguccgggcucgacagccuggacaccuaccccucccuggagaccauccagaucaccaucagcuccuucaagugggaccucacggccuucggccuggucgccgagugguuccuggccuacauccucuucacccgguucuucuacgugcuggggcuggcggccaucaugcagcucuucuucagcuacuucgccgugcacuucaucuccaacagcuggcugauguggcugaucaucaaccugguccagauggcccccaucuccgcgauggugcgcauguacaucuucuucgccagcuucuacuacguguggaagagcuacguccacgugguggacggcugcaacuccagcaccugcaugaugugcuacaagcggaaccgcgccacccgggucgagugcacgaccaucgugaacgggguccgccgguccuucuacguguacgccaacggcggcaagggguucugcaagcuccacaacuggaacugcgugaacugcgacaccuucugcgccggcagcaccuucaucuccgacgaggucgcgcgcgaccugagccugcaguucaagcggccgaucaaccccacggaccaguccagcuacaucguggacuccgugaccgucaagaacgggagcauccaccucuacuucgacaaggccggccagaagaccuacgagcgccacucccugagccacuucgugaaccuggacaaccuccgggccaacaacaccaaggggucccugcccaucaacgugaucgucuucgacggcaagagcaagugcgaggaguccagcgccaaguccgccagcguguacuacucccagcugaugugccagcccauccuccugcuggaccaggcgcucgugagcgacgucggcgacagcgccgagguggccgugaagauguucgacgccuacgucaacacguucuccagcaccuucaacgugccgauggagaagcugaagacccugguggccaccgcggaggccgagcucgccaagaacgucucccuggacaacgugcugagcacguucaucuccgccgcgcgccagggguucguggacagcgacgucgagaccaaggacgugguggagugccucaagcugucccaccagagcgacaucgaggucaccggcgacuccugcaacaacuacaugcugaccuacaacaagguggagaacaugacgccccgggaccucggggccugcaucgacugcagcgcccgccacaucaacgcccagguggccaagucccacaacaucgcgcugaucuggaacgucaaggacuucaugagccuguccgagcagcuccggaagcagauccgcagcgccgccaagaagaacaaccugcccuucaagcugaccugcgccaccacccgccagguggugaacgucgugacgaccaagaucgcccucaagggcgggugaggacuagucccuguucccagagcccacuuuuuuuucuuuuuuugaaauaaaauagccugucuuucagaucucaaaggcucuuuucagagccaccaaaaaaaaaaaaaaaaaaaaaaaaaaaaaaaaaaaaaaaaaaaaaaaaaaaaaaaaaaaaaaaaaaaaaaaaaaaaaaaaaaaaaaaaaaaaaaaaaaaaa

SEQ ID NO: 20143 - RNA, 6113 nt, Artificial Sequence
  SARS-CoV-2__MT326054.1__non-structural protein 3 (NSP3) mRNA gc
aggagagucccgcagucggcguccagcggcucugcuuguucgugugugugucguugcaggccuuauucaagcuuaccauggcccccaccaaggugaccuucggcgacgacacggucaucgaggugcagggguacaagagcgugaacaucaccuucgagcuggacgagcgcaucgacaagguccucaacgagaagugcuccgccuacaccguggagcugggcaccgaggugaacgaguucgcgugcgucguggccgacgccgugaucaagacgcugcagccggucagcgagcuccugaccccccuggggaucgaccucgacgagugguccauggccaccuacuaccuguucgacgagagcggcgaguucaagcuggccucccacauguacugcagcuucuacccccccgacgaggacgaggaggagggggacugcgaggaggaggaguucgagccguccacccaguacgaguacggcacggaggacgacuaccagggcaagccccucgaguucggggcgaccagcgccgcccugcagcccgaggaggagcaggaggaggacuggcuggacgacgacucccagcagaccgugggccagcaggacgggagcgaggacaaccagaccacgaccauccagaccaucguggagguccagccccagcucgagauggagcugaccccgguggugcagacgaucgaggucaacuccuucagcggcuaccugaagcucaccgacaacguguacaucaagaacgccgacaucguggaggaggcgaagaaggucaagcccaccgugguggucaacgccgccaacguguaccugaagcacgggggcggcguggccggggcccugaacaaggcgaccaacaacgccaugcaggucgaguccgacgacuacaucgccacgaacggcccccucaagguggggggcagcugcguccuguccggccacaaccuggccaagcacugccuccacgugguggggcccaacgucaacaagggcgaggacauccagcugcugaagagcgccuacgagaacuucaaccagcacgaggugcuccuggcgccgcugcucuccgccgggaucuucggcgccgaccccauccacagccugcgggugugcgucgacaccgugcgcaccaacguguaccuggccgucuucgacaagaaccucuacgacaagcugguguccagcuuccuggagaugaagagcgagaagcagguggagcagaagaucgccgagauccccaaggaggaggucaagcccuucaucaccgaguccaagccgagcguggagcagcggaagcaguacgacaagaagaucaaggcgugcguggaggaggucacgaccacccucgaggagaccaaguuccugacggagaaccugcuccuguacaucgacaucaacgggaaccugcaccccgacuccgccacccucgugagcgacaucgacaucaccuuccugaagaaggacgcccccuacaucgugggcgacgucgugcaggagggcgugcugaccgccgucgugauccccacgaagaaggccgggggcaccaccgagaugcucgcgaaggcccugcgcaaggugccgaccgacaacuacaucacgaccuaccccgggcagggccugaacggguacaccgucgaggaggccaagaccgugcucaagaagugcaaguccgccuucuacauccugcccagcaucaucuccaacgagaagcaggagauccugggcaccgugagcuggaaccuccgggagaugcuggcgcacgccgaggagacgcgcaagcugaugcccgucugcguggagaccaaggccaucguguccaccauccagcggaaguacaagggcaucaagauccaggagggggucguggacuacggcgcccgcuucuacuucuacaccagcaagacgaccguggccucccugaucaacacccucaacgaccugaacgagacccuggucacgaugccgcucggguacgugacccacggccugaaccuggaggaggcggcccgguacaugcgcagccucaaggugcccgccaccgucuccgugagcucccccgacgccgugaccgccuacaacggguaccugacgagcuccagcaagacccccgaggagcacuucaucgagaccaucucccuggcgggcagcuacaaggacuggagcuacuccggccagagcacccagcucgggaucgaguuccugaagcggggcgacaaguccgucuacuacacgagcaacccgaccaccuuccaccuggacggggaggugaucaccuucgacaaccucaagacgcugcugucccuccgcgaggugcggaccaucaaggucuucaccaccguggacaacaucaaccugcacacgcagguggucgacaugagcaugaccuacggccagcaguucggccccaccuaccuggacggggccgacgugaccaagaucaagccccacaacucccacgagggcaagacguucuacgugcucccgaacgacgacacccugcgcgucgaggccuucgaguacuaccacaccaccgaccccagcuuccuggggcgguacauguccgcccucaaccacacgaagaaguggaaguacccccaggugaacggccugaccagcaucaagugggccgacaacaacugcuaccuggcgaccgcccuccugacccugcagcagaucgagcucaaguucaaccccccggcccugcaggacgccuacuaccgcgcgcgggccggggaggccgccaacuucugcgcccugauccucgcguacugcaacaagacggugggcgagcugggcgacguccgcgagaccauguccuaccuguuccagcacgccaaccucgacagcugcaagcgggugcugaacgucgugugcaagaccugcgggcagcagcagaccacccugaagggcguggaggccgucauguacauggggacgcucuccuacgagcaguucaagaagggcgugcagauccccugcaccugcgggaagcaggccaccaaguaccuggugcagcaggagagccccuucgucaugauguccgcccccccggcgcaguacgagcugaagcacggcaccuucacgugcgccagcgaguacaccggcaacuaccagugcgggcacuacaagcacaucaccuccaaggagacccucuacugcaucgacggcgcccugcugacgaagagcagcgaguacaaggggcccaucaccgacguguucuacaaggagaacuccuacaccaccacgaucaagcccgugaccuacaagcucgacggcgucgugugcaccgagaucgaccccaagcuggacaacuacuacaagaaggacaacagcuacuucaccgagcagccgaucgaccuggugcccaaccagcccuaccccaacgccuccuucgacaacuucaaguucgucugcgacaacaucaaguucgccgacgaccucaaccagcugacgggguacaagaagccggcgagccgcgagcugaaggugaccuucuuccccgaccucaacggcgacguggucgccaucgacuacaagcacuacacccccuccuucaagaagggcgccaagcugcugcacaagcccaucguguggcacgugaacaacgccaccaacaaggcgacguacaagccgaacaccuggugcauccggugccucuggagcaccaagcccgucgagaccuccaacagcuucgacgugcugaaguccgaggacgcccaggggauggacaaccuggccugcgaggaccucaagcccgugagcgaggaggucguggagaaccccacgauccagaaggacgugcuggagugcaacgucaagaccaccgagguggugggcgacaucauccugaagccggccaacaacucccucaagaucaccgaggaggucgggcacacggaccugauggccgcguacguggacaacagcucccugaccaucaagaagcccaacgagcucagccgcgugcugggccugaagacccucgccacccacgggcuggccgccgucaacuccgugcccugggacacgaucgccaacuacgcgaagccguuccugaacaagguggucagcaccaccaccaacaucgugacgcgcugccucaaccgggugugcaccaacuacaugcccuacuucuucacccugcugcuccagcugugcaccuucacccgcuccacgaacagccggaucaaggccuccaugcccaccaccaucgccaagaacaccgucaagagcgugggcaaguucugccuggaggccagcuucaacuaccucaagucccccaacuucagcaagcugaucaacaucaucaucugguuccugcuccuguccgugugccugggcagccucaucuacuccacggccgcgcuggggguccugaugagcaaccucggcaugccguccuacugcaccggguaccgcgagggcuaccugaacagcaccaacgugaccaucgccacguacugcaccggcuccauccccugcagcgugugccuguccgggcucgacagccuggacaccuaccccucccuggagaccauccagaucacgaucagcuccuucaagugggaccucaccgccuucggccuggucgccgagugguuccuggccuacauccucuucacccgguucuucuacgugcuggggcuggcggccaucaugcagcucuucuucagcuacuucgccgugcacuucaucuccaacagcuggcugauguggcugaucaucaaccugguccagauggcccccaucuccgcgauggugcgcauguacaucuucuucgccagcuucuacuacguguggaagagcuacguccacgugguggacggcugcaacuccagcaccugcaugaugugcuacaagcggaaccgcgccacgcgggucgagugcaccaccaucgugaacgggguccgccgguccuucuacguguacgccaacggcggcaagggguucugcaagcuccacaacuggaacugcgugaacugcgacaccuucugcgccggcagcacguucaucuccgacgaggucgcgcgcgaccugagccugcaguucaagcggccgaucaaccccaccgaccaguccagcuacaucguggacuccgugaccgucaagaacgggagcauccaccucuacuucgacaaggccggccagaagaccuacgagcgccacucccugagccacuucgugaaccuggacaaccuccgggccaacaacacgaaggggucccugcccaucaacgugaucgucuucgacggcaagagcaagugcgaggaguccagcgccaaguccgccagcguguacuacucccagcugaugugccagcccauccuccugcuggaccaggcgcucgugagcgacgucggcgacagcgccgagguggccgugaagauguucgacgccuacgucaacaccuucuccagcaccuucaacgugccgauggagaagcugaagacccugguggccacggcggaggccgagcucgccaagaacgucucccuggacaacgugcugagcaccuucaucuccgccgcgcgccagggguucguggacagcgacgucgagaccaaggacgugguggagugccucaagcugucccaccagagcgacaucgaggucaccggcgacuccugcaacaacuacaugcugacguacaacaagguggagaacaugaccccccgggaccucggggccugcaucgacugcagcgcccgccacaucaacgcccagguggccaagucccacaacaucgcgcugaucuggaacgucaaggacuucaugagccuguccgagcagcuccggaagcagauccgcagcgccgccaagaagaacaaccugcccuucaagcugaccugcgccaccacgcgccagguggugaacgucgugaccaccaagaucgcccucaagggcgggugaggacuagucccuguucccagagcccacuuuuuuuucuuuuuuugaaauaaaauagccugucuuucagaucucaaaggcucuuuucagagccaccaaaaaaaaaaaaaaaaaaaaaaaaaaaaaaaaaaaaaaaaaaaaaaaaaaaaaaaaaaaaaaaaaaaaaaaaaaaaaaaaaaaaaaaaaaaaaaaaaaaaa

SEQ ID NO: 20144 - RNA, 6113 nt, Artificial Sequence
  SARS-CoV-2__MT326086.1__non-structural protein 3 (NSP3) mRNA gc
aggagagucccgcagucggcguccagcggcucugcuuguucgugugugugucguugcaggccuuauucaagcuuaccauggcccccaccaaggugaccuucggcgacgacacggucaucgaggugcagggguacaagagcgugaacaucaccuucgagcuggacgagcgcaucgacaagguccucaacgagaagugcuccgccuacaccguggagcugggcaccgaggugaacgaguucgcgugcgucguggccgacgccgugaucaagacgcugcagccggucagcgagcuccugaccccccuggggaucgaccucgacgagugguccauggccaccuacuaccuguucgacgagagcggcgaguucaagcuggccucccacauguacugcagcuucuacccccccgacgaggacgaggaggagggggacugcgaggaggaggaguucgagccguccacccaguacgaguacggcacggaggacgacuaccagggcaagccccucgaguucggggcgaccagcgccgcccugcagcccgaggaggagcaggaggaggacuggcuggacgacgacucccagcagaccgugggccagcaggacgggagcgaggacaaccagaccacgaccauccagaccaucguggagguccagccccagcucgagauggagcugaccccgguggugcagacgaucgaggucaacuccuucagcggcuaccugaagcucaccgacaacguguacaucaagaacgccgacaucguggaggaggcgaagaaggucaagcccaccgugguggucaacgccgccaacguguaccugaagcacgggggcggcguggccggggcccugaacaaggcgaccaacaacgccaugcaggucgaguccgacgacuacaucgccacgaacggcccccucaagguggggggcagcugcguccuguccggccacaaccuggccaagcacugccuccacgugguggggcccaacgucaacaagggcgaggacauccagcugcugaagagcgccuacgagaacuucaaccagcacgaggugcuccuggcgccgcugcucuccgccgggaucuucggcgccgaccccauccacagccugcgggugugcgucgacaccgugcgcaccaacguguaccuggccgucuucgacaagaaccucuacgacaagcugguguccagcuuccuggagaugaagagcgagaagcagguggagcagaagaucgccgagauccccaaggaggaggucaagcccuucaucaccgaguccaagccgagcguggagcagcggaagcaggacgacaagaagaucaaggcgugcguggaggaggucacgaccacccucgaggagaccaaguuccugacggagaaccugcuccuguacaucgacaucaacgggaaccugcaccccgacuccgccacccucgugagcgacaucgacaucaccuuccugaagaaggacgcccccuacaucgugggcgacgucgugcaggagggcgugcugaccgccgucgugauccccacgaagaaggccgggggcaccaccgagaugcucgcgaaggcccugcgcaaggugccgaccgacaacuacaucacgaccuaccccgggcagggccugaacggguacaccgucgaggaggccaagaccgugcucaagaagugcaaguccgccuucuacauccugcccagcaucaucuccaacgagaagcaggagauccugggcaccgugagcuggaaccuccgggagaugcuggcgcacgccgaggagacgcgcaagcugaugcccgucugcguggagaccaaggccaucguguccaccauccagcggaaguacaagggcaucaagauccaggagggggucguggacuacggcgcccgcuucuacuucuacaccagcaagacgaccguggccucccugaucaacacccucaacgaccugaacgagacccuggucacgaugccgcucggguacgugacccacggccugaaccuggaggaggcggcccgguacaugcgcagccucaaggugcccgccaccgucuccgugagcucccccgacgccgugaccgccuacaacggguaccugacgagcuccagcaagacccccgaggagcacuucaucgagaccaucucccuggcgggcagcuacaaggacuggagcuacuccggccagagcacccagcucgggaucgaguuccugaagcggggcgacaaguccgucuacuacacgagcaacccgaccaccuuccaccuggacggggaggugaucaccuucgacaaccucaagacgcugcugucccuccgcgaggugcggaccaucaaggucuucaccaccguggacaacaucaaccugcacacgcagguggucgacaugagcaugaccuacggccagcaguucggccccaccuaccuggacggggccgacgugaccaagaucaagccccacaacucccacgagggcaagacguucuacgugcucccgaacgacgacacccugcgcgucgaggccuucgaguacuaccacaccaccgaccccagcuuccuggggcgguacauguccgcccucaaccacacgaagaaguggaaguacccccaggugaacggccugaccagcaucaagugggccgacaacaacugcuaccuggcgaccgcccuccugacccugcagcagaucgagcucaaguucaaccccccggcccugcaggacgccuacuaccgcgcgcgggccggggaggccgccaacuucugcgcccugauccucgcguacugcaacaagacggugggcgagcugggcgacguccgcgagaccauguccuaccuguuccagcacgccaaccucgacagcugcaagcgggugcugaacgucgugugcaagaccugcgggcagcagcagaccacccugaagggcguggaggccgucauguacauggggacgcucuccuacgagcaguucaagaagggcgugcagauccccugcaccugcgggaagcaggccaccaaguaccuggugcagcaggagagccccuucgucaugauguccgcccccccggcgcaguacgagcugaagcacggcaccuucacgugcgccagcgaguacaccggcaacuaccagugcgggcacuacaagcacaucaccuccaaggagacccucuacugcaucgacggcgcccugcugacgaagagcagcgaguacaaggggcccaucaccgacguguucuacaaggagaacuccuacaccaccacgaucaagcccgugaccuacaagcucgacggcgucgugugcaccgagaucgaccccaagcuggacaacuacuacaagaaggacaacagcuacuucaccgagcagccgaucgaccuggugcccaaccagcccuaccccaacgccuccuucgacaacuucaaguucgucugcgacaacaucaaguucgccgacgaccucaaccagcugacgggguacaagaagccggcgagccgcgagcugaaggugaccuucuuccccgaccucaacggcgacguggucgccaucgacuacaagcacuacacccccuccuucaagaagggcgccaagcugcugcacaagcccaucguguggcacgugaacaacgccaccaacaaggcgacguacaagccgaacaccuggugcauccggugccucuggagcaccaagcccgucgagaccuccaacagcuucgacgugcugaaguccgaggacgcccaggggauggacaaccuggccugcgaggaccucaagcccgugagcgaggaggucguggagaaccccacgauccagaaggacgugcuggagugcaacgucaagaccaccgagguggugggcgacaucauccugaagccggccaacaacucccucaagaucaccgaggaggucgggcacacggaccugauggccgcguacguggacaacagcucccugaccaucaagaagcccaacgagcucagccgcgugcugggccugaagacccucgccacccacgggcuggccgccgucaacuccgugcccugggacacgaucgccaacuacgcgaagccguuccugaacaagguggucagcaccaccaccaacaucgugacgcgcugccucaaccgggugugcaccaacuacaugcccuacuucuucacccugcugcuccagcugugcaccuucacccgcuccgccaacagccggaucaaggccuccaugcccacgaccaucgccaagaacaccgucaagagcgugggcaaguucugccuggaggccagcuucaacuaccucaagucccccaacuucagcaagcugaucaacaucaucaucugguuccugcuccuguccgugugccugggcagccucaucuacuccaccgcggcccuggggguccugaugagcaaccucggcaugccguccuacugcacgggguaccgcgagggcuaccugaacagcaccaacgugaccaucgccaccuacugcacgggcuccauccccugcagcgugugccuguccgggcucgacagccuggacaccuaccccucccuggagaccauccagaucaccaucagcuccuucaagugggaccucacggccuucggccuggucgccgagugguuccuggcguacauccucuucacccgguucuucuacgugcuggggcuggccgccaucaugcagcucuucuucagcuacuucgccgugcacuucaucuccaacagcuggcugauguggcugaucaucaaccugguccagauggcgcccaucuccgccauggugcgcauguacaucuucuucgccagcuucuacuacguguggaagagcuacguccacgugguggacggcugcaacuccagcaccugcaugaugugcuacaagcggaaccgcgccacccgggucgagugcacgaccaucgugaacgggguccgccgguccuucuacguguacgccaacggcggcaagggguucugcaagcuccacaacuggaacugcgugaacugcgacaccuucugcgcgggcagcaccuucaucuccgacgaggucgcccgcgaccugagccugcaguucaagcggccgaucaaccccacggaccaguccagcuacaucguggacuccgugaccgucaagaacgggagcauccaccucuacuucgacaaggccggccagaagaccuacgagcgccacucccugagccacuucgugaaccuggacaaccuccgggccaacaacaccaaggggucccugcccaucaacgugaucgucuucgacggcaagagcaagugcgaggaguccagcgccaaguccgcgagcguguacuacucccagcugaugugccagcccauccuccugcuggaccaggcccucgugagcgacgucggcgacagcgccgagguggccgugaagauguucgacgccuacgucaacacguucuccagcaccuucaacgugccgauggagaagcugaagacccugguggcgaccgccgaggccgagcucgccaagaacgucucccuggacaacgugcugagcacguucaucuccgcggcccgccagggguucguggacagcgacgucgagaccaaggacgugguggagugccucaagcugucccaccagagcgacaucgaggucaccggcgacuccugcaacaacuacaugcugaccuacaacaagguggagaacaugacgccccgggaccucggggccugcaucgacugcagcgcccgccacaucaacgcccagguggcgaagucccacaacaucgcccugaucuggaacgucaaggacuucaugagccuguccgagcagcuccggaagcagauccgcagcgccgccaagaagaacaaccugcccuucaagcugaccugcgccaccacccgccagguggugaacgucgugacgaccaagaucgcgcucaagggcgggugaggacuagucccuguucccagagcccacuuuuuuuucuuuuuuugaaauaaaauagccugucuuucagaucucaaaggcucuuuucagagccaccaaaaaaaaaaaaaaaaaaaaaaaaaaaaaaaaaaaaaaaaaaaaaaaaaaaaaaaaaaaaaaaaaaaaaaaaaaaaaaaaaaaaaaaaaaaaaaaaaaaaa

SEQ ID NO: 20145 - RNA, 6113 nt, Artificial Sequence
  SARS-CoV-2__MT326091.1__non-structural protein 3 (NSP3) mRNA gc
aggagagucccgcagucggcguccagcggcucugcuuguucgugugugugucguugcaggccuuauucaagcuuaccauggcccccaccaaggugaccuucggcgacgacacggucaucgaggugcagggguacaagagcgugaacaucaccuucgagcuggacgagcgcaucgacaagguccucaacgagaagugcuccgccuacaccguggagcugggcaccgaggugaacgaguucgcgugcgucguggccgacgccgugaucaagacgcugcagccggucagcgagcuccugaccccccuggggaucggcuucuacgagugguccauggccaccuacuaccucuucgacgagagcggggaguucaagcuggccucccacauguacugcagcuucuacccccccgacgaggacgaggaggagggcgacugcgaggaggaggaguucgagccguccacccaguacgaguacggcacggaggacgacuaccaggggaagccccuggaguucggcgcgaccagcgccgcccuccagcccgaggaggagcaggaggaggacuggcuggacgacgacucccagcagaccguggggcagcaggacggcagcgaggacaaccagaccacgaccauccagaccaucguggagguccagccccagcuggagauggagcucaccccgguggugcagacgaucgaggucaacuccuucagcggguaccugaagcugaccgacaacguguacaucaagaacgccgacaucguggaggaggcgaagaaggucaagcccaccgugguggucaacgccgccaacguguaccucaagcacggcggcgggguggccggcgcccugaacaaggcgaccaacaacgccaugcaggucgaguccgacgacuacaucgccacgaacgggccccugaaggugggcggcagcugcguccucuccgggcacaaccuggccaagcacugccugcacguggugggccccaacgucaacaagggggaggacauccagcuccugaagagcgccuacgagaacuucaaccagcacgaggugcugcucgcgccgcugcuguccgccggcaucuucggggccgaccccauccacagccuccgggugugcgucgacaccgugcgcaccaacguguaccuggccgucuucgacaagaaccuguacgacaagcucguguccagcuuccuggagaugaagagcgagaagcagguggagcagaagaucgccgagauccccaaggaggaggucaagcccuucaucaccgaguccaagccgagcguggagcagcggaagcaggacgacaagaagaucaaggcgugcguggaggaggucacgaccacccuggaggagaccaaguuccucacggagaaccugcugcucuacaucgacaucaacggcaaccugcaccccgacuccgccacccuggugagcgacaucgacaucaccuuccucaagaaggacgcccccuacaucgugggcgacgucgugcaggagggggugcugaccgccgucgugauccccacgaagaaggccggcgggaccaccgagaugcuggcgaaggcccuccgcaaggugccgaccgacuccuacaucacgaccuaccccggccaggggcugaacggcuacaccgucgaggaggccaagaccgugcugaagaagugcaagagcgccuucuacauccuccccuccaucaucagcaacgagaagcaggagauccugggcaccguguccuggaaccugcgggagaugcucgcgcacgccgaggagacgcgcaagcugaugcccgucugcguggagaccaaggccaucgugagcaccauccagcggaaguacaaggggaucaagauccaggagggcgucguggacuacggggcccgcuucuacuucuacaccuccaagacgaccguggccagccugaucaacacccugaacgaccucaacgagacccuggucacgaugccgcugggcuacgugacccacgggcucaaccuggaggaggcggcccgguacaugcgcucccugaaggugcccgccaccgucagcguguccagccccgacgccgugaccgccuacaacggcuaccucacguccagcuccaagacccccgaggagcacuucaucgagaccaucagccuggcgggcagcuacaaggacugguccuacagcgggcaguccacccagcugggcaucgaguuccucaagcggggggacaagagcgucuacuacacguccaacccgaccaccuuccaccuggacggcgaggugaucaccuucgacaaccugaagacgcuccugagccugcgcgaggugcggaccaucaaggucuucaccaccguggacaacaucaaccuccacacgcagguggucgacauguccaugaccuacggccagcaguucgggcccaccuaccuggacggcgccgacgugaccaagaucaagccccacaacagccacgaggggaagacguucuacgugcugccgaacgacgacacccuccgcgucgaggccuucgaguacuaccacaccaccgaccccuccuuccugggccgguacaugagcgcccugaaccacacgaagaaguggaaguacccccaggugaacgggcucaccuccaucaagugggccgacaacaacugcuaccuggcgaccgcccugcucacccugcagcagaucgagcugaaguucaaccccccggcccuccaggacgccuacuaccgcgcgcgggccggcgaggccgccaacuucugcgcccugauccuggcguacugcaacaagacggugggcgagcucggggacguccgcgagaccaugagcuaccuguuccagcacgccaaccuggacuccugcaagcgggugcucaacgucgugugcaagaccugcggccagcagcagaccacccugaaggggguggaggccgucauguacaugggcacgcugagcuacgagcaguucaagaagggggugcagauccccugcaccugcggcaagcaggccaccaaguaccucgugcagcaggagucccccuucgucaugaugagcgcccccccggcgcaguacgagcugaagcacggcaccuucacgugcgccuccgaguacaccgggaacuaccagugcggccacuacaagcacaucaccagcaaggagacccuguacugcaucgacggggcccuccugacgaagagcuccgaguacaagggccccaucaccgacguguucuacaaggagaacagcuacaccaccacgaucaagcccgugaccuacaagcuggacggggucgugugcaccgagaucgaccccaagcucgacaacuacuacaagaaggacaacuccuacuucaccgagcagccgaucgaccuggugcccaaccagcccuaccccaacgccagcuucgacaacuucaaguucgucugcgacaacaucaaguucgccgacgaccugaaccagcucacgggcuacaagaagccggcgucccgcgagcugaaggugaccuucuuccccgaccugaacggcgacguggucgccaucgacuacaagcacuacacccccagcuucaagaagggggccaagcuccugcacaagcccaucguguggcacgugaacaacgccaccaacaaggcgacguacaagccgaacaccuggugcauccggugccugugguccaccaagcccgucgagaccagcaacuccuucgacgugcucaagagcgaggacgcccagggcauggacaaccuggccugcgaggaccugaagcccguguccgaggaggucguggagaaccccacgauccagaaggacgugcucgagugcaacgucaagaccaccgagguggugggggacaucauccugaagccggccaacaacagccugaagaucaccgaggaggucggccacacggaccucauggccgcguacguggacaacuccagccugaccaucaagaagcccaacgagcugucccgcgugcucgggcugaagacccuggccacccacggccucgccgccgucaacagcgugcccugggacacgaucgccaacuacgcgaagccguuccugaacaagguggucuccaccaccaccaacaucgugacgcgcugccugaaccgggugugcaccaacuacaugcccuacuucuucacccuccugcugcagcucugcaccuucacccgcagcacgaacucccggaucaaggccagcaugcccaccaccaucgccaagaacaccgucaagagcgugggcaaguucugccuggaggccuccuucaacuaccugaagagccccaacuucuccaagcucaucaacaucaucaucugguuccugcugcucagcgugugccuggggucccugaucuacagcacggccgcgcucggcguccugauguccaaccuggggaugccgagcuacugcaccggcuaccgcgagggcuaccucaacuccaccaacgugaccaucgccacguacugcaccgggagcauccccugcuccgugugccugagcggccuggacucccucgacaccuaccccagccuggagaccauccagaucacgaucuccagcuucaagugggaccugaccgccuucgggcucgucgccgagugguuccuggccuacauccuguucacccgguucuucuacgugcucggccuggcggccaucaugcagcuguucuucuccuacuucgccgugcacuucaucagcaacuccuggcucauguggcugaucaucaaccugguccagauggcccccaucagcgcgauggugcgcauguacaucuucuucgccagcuucuacuacguguggaaguccuacguccacgugguggacgggugcaacagcuccaccugcaugaugugcuacaagcggaaccgcgccacgcgggucgagugcaccaccaucgugaacggcguccgccggagcuucuacguguacgccaacggcgggaagggcuucugcaagcugcacaacuggaacugcgugaacugcgacaccuucugcgccggguccacguucaucagcgacgaggucgcgcgcgaccucucccugcaguucaagcggccgaucaaccccaccgaccagagcuccuacaucguggacagcgugaccgucaagaacggcuccauccaccuguacuucgacaaggccgggcagaagaccuacgagcgccacagccucucccacuucgugaaccuggacaaccugcgggccaacaacacgaagggcagccuccccaucaacgugaucgucuucgacggcaaguccaagugcgaggagagcuccgccaagagcgccuccguguacuacagccagcugaugugccagcccauccugcuccuggaccaggcgcuggugagcgacgucggggacuccgccgagguggccgugaagauguucgacgccuacgucaacaccuucagcuccaccuucaacgugccgauggagaagcucaagacccugguggccacggcggaggccgagcuggccaagaacgucagccucgacaacgugcuguccaccuucaucagcgccgcgcgccagggcuucguggacuccgacgucgagaccaaggacgugguggagugccugaagcucagccaccaguccgacaucgaggucaccggggacagcugcaacaacuacaugcugacguacaacaagguggagaacaugaccccccgggaccugggcgccugcaucgacugcuccgcccgccacaucaacgcccagguggccaagagccacaacaucgcgcucaucuggaacgucaaggacuucaugucccugagcgagcagcugcggaagcagauccgcuccgccgccaagaagaacaaccuccccuucaagcugaccugcgccaccacgcgccagguggugaacgucgugaccaccaagaucgcccugaaggggggcugaggacuagucccuguucccagagcccacuuuuuuuucuuuuuuugaaauaaaauagccugucuuucagaucucaaaggcucuuuucagagccaccaaaaaaaaaaaaaaaaaaaaaaaaaaaaaaaaaaaaaaaaaaaaaaaaaaaaaaaaaaaaaaaaaaaaaaaaaaaaaaaaaaaaaaaaaaaaaaaaaaaaa

SEQ ID NO: 20146 - RNA, 6113 nt, Artificial Sequence
  SARS-CoV-2__MT326135.1__non-structural protein 3 (NSP3) mRNA gc
aggagagucccgcagucggcguccagcggcucugcuuguucgugugugugucguugcaggccuuauucaagcuuaccauggcccccaccaaggugaccuucggcgacgacacggucaucgaggugcagggguacaagagcgugaacaucaccuucgagcuggacgagcgcaucgacaagguccucaacgagaagugcuccgccuacaccguggagcugggcaccgaggugaacgaguucgcgugcgucguggccgacgccgugaucaagacgcugcagccggucagcgagcuccugaccccccuggggaucgaccucgacgagugguccauggccaccuacuaccuguucgacgagagcggcgaguucaagcuggccucccacauguacugcagcuucuacccccccgacgaggacgaggaggagggggacugcgaggaggaggaguucgagccguccacccaguacgaguacggcacggaggacgacuaccagggcaagccccucgaguucggggcgaccagcgccgcccugcagcccgaggaggagcaggaggaggacuggcuggacgacgacucccagcagaccgugggccagcaggacgggagcgaggacaaccagaccacgaccauccagaccaucguggagguccagccccagcucgagauggagcugaccccgguggugcagacgaucgaggucaacuccuucagcggcuaccugaagcucaccgacaacguguacaucaagaacgccgacaucguggaggaggcgaagaaggucaagcccaccgugguggucaacgccgccaacguguaccugaagcacgggggcggcguggccggggcccugaacaaggcgaccaacaacgccaugcaggucgaguccgacgacuacaucgccacgaacggcccccucaagguggggggcagcugcguccuguccggccacaaccuggccaagcacugccuccacgugguggggcccaacgucaacaagggcgaggacauccagcugcugaagagcgccuacgagaacuucaaccagcacgaggugcuccuggcgccgcugcucuccgccgggaucuucggcgccgaccccauccacagccugcgggugugcgucgacaccgugcgcaccaacguguaccuggccgucuucgacaagaaccucuacgacaagcugguguccagcuuccuggagaugaagagcgagaagcagguggagcagaagaucgccgagauccccaaggaggaggucaagcccuucaucaccgaguccaagccgagcguggagcagcggaagcaggacgacaagaagaucaaggcgugcguggaggaggucacgaccacccucgaggagaccaaguuccugacggagaaccugcuccuguacaucgacaucaacgggaaccugcaccccgacuccgccacccucgugagcgacaucgacaucaccuuccugaagaaggacgcccccuacaucgugggcgacgucgugcaggagggcgugcugaccgccgucgugauccccacgaagaaggccgggggcaccaccgagaugcucgcgaaggcccugcgcaaggugccgaccgacaacuacaucacgaccuaccccgggcagggccugaacggguacaccgucgaggaggccaagaccgugcucaagaagugcaaguccgccuucuacauccugcccagcaucaucuccaacgagaagcaggagauccugggcaccgugagcuggaaccuccgggagaugcuggcgcacgccgaggagacgcgcaagcugaugcccgucugcguggagaccaaggccaucguguccaccauccagcggaaguacaagggcaucaagauccaggagggggucguggacuacggcgcccgcuucuacuucuacaccagcaagacgaccguggccucccugaucaacacccucaacgaccugaacgagacccuggucacgaugccgcucggguacgugacccacggccugaaccuggaggaggcggcccgguacaugcgcagccucaaggugcccgccaccgucuccgugagcucccccgacgccgugaccgccuacaacggguaccugacgagcuccagcaagacccccgaggagcacuucaucgagaccaucucccuggcgggcagcuacaaggacuggagcuacuccggccagagcacccagcucgggaucgaguuccugaagcggggcgacaaguccgucuacuacacgagcaacccgaccaccuuccaccuggacggggaggugaucaccuucgacaaccucaagacgcugcugucccuccgcgaggugcggaccaucaaggucuucaccaccguggacaacaucaaccugcacacgcagguggucgacaugagcaugaccuacggccagcaguucggccccaccuaccuggacggggccgacgugaccaagaucaagccccacaacucccacgagggcaagacguucuacgugcucccgaacgacgacacccugcgcgucgaggccuucgaguacuaccacaccaccgaccccagcuuccuggggcgguacauguccgcccucaaccacacgaagaaguggaaguacccccaggugaacggccugaccagcaucaagugggccgacaacaacugcuaccuggcgaccgcccuccugacccugcagcagaucgagcucaaguucaaccccccggcccugcaggacgccuacuaccgcgcgcgggccggggaggccgccaacuucugcgcccugauccucgcguacugcaacaagacggugggcgagcugggcgacguccgcgagaccauguccuaccuguuccagcacgccaaccucgacagcugcaagcgggugcugaacgucgugugcaagaccugcgggcagcagcagaccacccugaagggcguggaggccgucauguacauggggacgcucuccuacgagcaguucaagaagggcgugcagauccccugcaccugcgggaagcaggccaccaaguaccuggugcagcaggagagccccuucgucaugauguccgcccccccggcgcaguacgagcugaagcacggcaccuucacgugcgccagcgaguacaccggcaacuaccagugcgggcacuacaagcacaucaccuccaaggagacccucuacugcaucgacggcgcccugcugacgaagagcagcgaguacaaggggcccaucaccgacguguucuacaaggagaacuccuacaccaccacgaucaagcccgugaccuacaagcucgacggcgucgugugcaccgagaucgaccccaagcuggacaacuacuacaagaaggacaacagcuacuucaccgagcagccgaucgaccuggugcccaaccagcccuaccccaacgccuccuucgacaacuucaaguucgucugcgacaacaucaaguucgccgacgaccucaaccagcugacgggguacaagaagccggcgagccgcgagcugaaggugaccuucuuccccgaccucaacggcgacguggucgccaucgacuacaagcacuacacccccuccuucaagaagggcgccaagcugcugcacaagcccaucguguggcacgugaacaacgccaccaacaaggcgacguacaagccgaacaccuggugcauccggugccucuggagcaccaagcccgucgagaccuccaacagcuucgacgcccugaaguccgaggacgcccaggggauggacaaccuggccugcgaggaccucaagcccgugagcgaggagguggucgagaaccccacgauccagaaggacgugcuggagugcaacgugaagaccaccgaggucgugggcgacaucauccugaagccggccaacaacucccucaagaucaccgaggagguggggcacacggaccugauggcggccuacgucgacaacagcucccugaccaucaagaagcccaacgagcucagccgcgugcugggccugaagacccucgccacccacgggcuggccgccgugaacuccguccccugggacacgaucgcgaacuacgccaagccguuccugaacaagguggugagcaccaccaccaacaucgucacgcgcugccucaaccgggugugcaccaacuacaugcccuacuucuucacccugcugcuccagcugugcaccuucacccgcuccacgaacagccggaucaaggccuccaugcccaccaccaucgccaagaacaccgugaagagcgucggcaaguucugccuggaggccagcuucaacuaccucaagucccccaacuucagcaagcugaucaacaucaucaucugguuccugcuccuguccgugugccugggcagccucaucuacuccacggcggcccugggggugcugaugagcaaccucggcaugccguccuacugcaccggguaccgcgagggcuaccugaacagcaccaacgucaccaucgccacguacugcaccggcuccauccccugcagcgugugccuguccgggcucgacagccuggacaccuaccccucccuggagaccauccagaucacgaucagcuccuucaagugggaccucaccgccuucggccugguggccgagugguuccuggcguacauccucuucacccgguucuucuacguccuggggcuggccgccaucaugcagcucuucuucagcuacuucgccgugcacuucaucuccaacagcuggcugauguggcugaucaucaaccuggugcagauggcgcccaucuccgccaugguccgcauguacaucuucuucgccagcuucuacuacguguggaagagcuacgugcacgucguggacggcugcaacuccagcaccugcaugaugugcuacaagcggaaccgcgccacgcggguggagugcaccaccaucgucaacggggugcgccgguccuucuacgucuacgccaacggcggcaagggguucugcaagcuccacaacuggaacugcgugaacugcgacaccuucugcgcgggcagcacguucaucuccgacgagguggcccgcgaccugagccugcaguucaagcggccgaucaaccccaccgaccaguccagcuacaucgucgacuccgugaccgugaagaacgggagcauccaccucuacuucgacaaggccggccagaagaccuacgagcgccacucccugagccacuucgucaaccuggacaaccuccgggccaacaacacgaaggggucccugcccaucaacgugaucguguucgacggcaagagcaagugcgaggaguccagcgccaaguccgcgagcgucuacuacucccagcugaugugccagcccauccuccugcuggaccaggcccucgugagcgacgugggcgacagcgccgaggucgccgugaagauguucgacgccuacgugaacaccuucuccagcaccuucaacgucccgauggagaagcugaagacccugguggcgacggccgaggccgagcucgccaagaacgugucccuggacaacguccugagcaccuucaucuccgcggcccgccagggguucguggacagcgacguggagaccaaggacgucguggagugccucaagcugucccaccagagcgacaucgaggugaccggcgacuccugcaacaacuacaugcugacguacaacaaggucgagaacaugaccccccgggaccucggggccugcaucgacugcagcgcccgccacaucaacgcccagguggcgaagucccacaacaucgcccugaucuggaacgugaaggacuucaugagccuguccgagcagcuccggaagcagauccgcagcgccgccaagaagaacaaccugcccuucaagcugaccugcgccaccacgcgccaggucgugaacguggucaccaccaagaucgcgcucaagggcgggugaggacuagucccuguucccagagcccacuuuuuuuucuuuuuuugaaauaaaauagccugucuuucagaucucaaaggcucuuuucagagccaccaaaaaaaaaaaaaaaaaaaaaaaaaaaaaaaaaaaaaaaaaaaaaaaaaaaaaaaaaaaaaaaaaaaaaaaaaaaaaaaaaaaaaaaaaaaaaaaaaaaaa

SEQ ID NO: 20147 - RNA, 6113 nt, Artificial Sequence
  SARS-CoV-2__MT326160.1__non-structural protein 3 (NSP3) mRNA gc
aggagagucccgcagucggcguccagcggcucugcuuguucgugugugugucguugcaggccuuauucaagcuuaccauggcccccaccaaggugaccuucggcgacgacacggucaucgaggugcagggguacaagagcgugaacaucaccuucgagcuggacgagcgcaucgacaagguccucaacgagaagugcuccgccuacaccguggagcugggcaccgaggugaacgaguucgcgugcgucguggccgacgccgugaucaagacgcugcagccggucagcgagcuccugaccccccuggggaucgaccucgacgagugguccauggccaccuacuaccuguucgacgagagcggcgaguucaagcuggccucccacauguacugcagcuucuacccccccgacgaggacgaggaggagggggacugcgaggaggaggaguucgagccguccacccaguacgaguacggcacggaggacgacuaccagggcaagccccucgaguucggggcgaccagcgccgcccugcagcccgaggaggagcaggaggaggacuggcuggacgacgacucccagcagaccgugggccagcaggacgggagcgaggacaaccagaccacgaccauccagaccaucguggagguccagccccagcucgagauggagcugaccccgguggugcagacgaucgaggucaacuccuucagcggcuaccugaagcucaccgacaacguguacaucaagaacgccgacaucguggaggaggcgaagaaggucaagcccaccgugguggucaacgccgccaacguguaccugaagcacgggggcggcguggccggggcccugaacaaggcgaccaacaacgccaugcaggucgaguccgacgacuacaucgccacgaacggcccccucaagguggggggcagcugcguccuguccggccacaaccuggccaagcacugccuccacgugguggggcccaacgucaacaagggcgaggacauccagcugcugaagagcgccuacgagaacuucaaccagcacgaggugcuccuggcgccgcugcucuccgccgggaucuucggcgccgaccccauccacagccugcgggugugcgucgacaccgugcgcaccaacguguaccuggccgucuucgacaagaaccucuacgacaagcugguguccagcuuccuggagaugaagagcgagaagcagguggagcagaagaucgccgagauccccaaggaggaggucaagcccuucaucaccgaguccaagccgagcguggagcagcggaagcaggacgacaagaagaucaaggcgugcguggaggaggucacgaccacccucgaggagaccaaguuccugacggagaaccugcuccuguacaucgacaucaacgggaaccugcaccccgacuccgccacccucgugagcgacaucgacaucaccuuccugaagaaggacgcccccuacaucgugggcgacgucgugcaggagggcgugcugaccgccgucgugauccccacgaagaaggccgggggcaccaccgagaugcucgcgaaggcccugcgcaaggugccgaccgacaacuacaucacgaccuaccccgggcagggccugaacggguacaccgucgaggaggccaagaccgugcucaagaagugcaaguccgccuucuacauccugcccagcaucaucuccaacgagaagcaggagauccugggcaccgugagcuggaaccuccgggagaugcuggcgcacgccgaggagacgcgcaagcugaugcccgucugcguggagaccaaggccaucguguccaccauccagcggaaguacaagggcaucaagauccaggagggggucguggacuacggcgcccgcuucuacuucuacaccagcaagacgaccguggccucccugaucaacacccucaacgaccugaacgagacccuggucacgaugccgcucggguacgugacccacggccugaaccuggaggaggcggcccgguacaugcgcagccucaaggugcccgccaccgucuccgugagcucccccgacgccgugaccgccuacaacggguaccugacgagcuccagcaagacccccgaggagcacuucaucgagaccaucucccuggcgggcagcuacaaggacuggagcuacuccggccagagcacccagcucgggaucgaguuccugaagcggggcgacaaguccgucuacuacacgagcaacccgaccaccuuccaccuggacggggaggugaucaccuucgacaaccucaagacgcugcugucccuccgcgaggugcggaccaucaaggucuucaccaccguggacaacaucaaccugcacacgcagguggucgacaugagcaugaccuacggccagcaguucggccccaccuaccuggacggggccgacgugaccaagaucaagccccacaacucccacgagggcaagacguucuacgugcucccgaacgacgacacccugcgcgucgaggccuucgaguacuaccacaccaccgaccccagcuuccuggggcgguacauguccgcccucaaccacacgaagaaguggaaguacccccaggugaacggccugaccagcaucaagugggccgacaacaacugcuaccuggcgaccgcccuccugacccugcagcagaucgagcucaaguucaaccccccggcccugcaggacgccuacuaccgcgcgcgggccggggaggccgccaacuucugcgcccugauccucgcguacugcaacaagacggugggcgagcugggcgacguccgcgagaccauguccuaccuguuccagcacgccaaccucgacagcugcaagcgggugcugaacgucgugugcaagaccugcgggcagcagcagaccacccugaagggcguggaggccgucauguacauggggacgcucuccuacgagcaguucaagaagggcgugcagauccccugcaccugcgggaagcaggccaccaaguaccuggugcagcaggagagccccuucgucaugauguccgcccccccggcgcaguacgagcugaagcacggcaccuucacgugcgccagcgaguacaccggcaacuaccagugcgggcacuacaagcacaucaccuccaaggagacccucuacugcaucgacggcgcccugcugacgaagagcagcgaguacaaggggcccaucaccgacguguucuacaaggagaacuccuacaccaccacgaucaagcccgugaccuacaagcucgacggcgucgugugcaccgagaucgaccccaagcuggacaacuacuacaagaaggacaacagcuacuucaccgagcagccgaucgaccuggugcccaaccagcccuaccccaacgccuccuucgacaacuucaaguucgucugcgacaacaucaaguucgccgacgaccucaaccagcugacgggguacaagaagccggcgagccgcgagcugaaggugaccuucuuccccgaccucaacggcgacguggucgccaucgacuacaagcacuacacccccuccuucaagaagggcgccaagcugcugcacaagcccaucguguggcacgugaacaacgccaccaacaaggcgacguacaagccgaacaccuggugcauccggugccucuggagcaccaagcccgucgagaccuccaacagcuucgacgugcugaaguccgaggacgcccaggggauggacaaccuggccugcgaggaccucaagcccgugagcgaggaggucguggagaaccccacgauccagaaggacgugcuggagugcaacgucaagaccaccgagguggugggcgacaucauccugaagccggccaacaacucccucaagaucaccgaggaggucgggcacacggaccugauggccgcguacguggacaacagcucccugaccaucaagaagcccaacgagcucagccgcgugcugggccugaagacccucgccacccacgggcuggccgccaucaacuccguccccugggacacgaucgccaacuacgcgaagccguuccugaacaagguggugagcaccaccaccaacaucgucacgcgcugccucaaccgggugugcaccaacuacaugcccuacuucuucacccugcugcuccagcugugcaccuucacccgcuccacgaacagccggaucaaggccuccaugcccaccaccaucgccaagaacaccgugaagagcgucggcaaguucugccuggaggccagcuucaacuaccucaagucccccaacuucagcaagcugaucaacaucaucaucugguuccugcuccuguccgugugccugggcagccucaucuacuccacggccgcgcugggggugcugaugagcaaccucggcaugccguccuacugcaccggguaccgcgagggcuaccugaacagcaccaacgucaccaucgccacguacugcaccggcuccauccccugcagcgugugccuguccgggcucgacagccuggacaccuaccccucccuggagaccauccagaucacgaucagcuccuucaagugggaccucaccgccuucggccugguggccgagugguuccuggccuacauccucuucacccgguucuucuacguccuggggcuggcggccaucaugcagcucuucuucagcuacuucgccgugcacuucaucuccaacagcuggcugauguggcugaucaucaaccuggugcagauggcccccaucuccgcgaugguccgcauguacaucuucuucgccagcuucuacuacguguggaagagcuacgugcacgucguggacggcugcaacuccagcaccugcaugaugugcuacaagcggaaccgcgccacgcggguggagugcaccaccaucgucaacggggugcgccgguccuucuacgucuacgccaacggcggcaagggguucugcaagcuccacaacuggaacugcgugaacugcgacaccuucugcgccggcagcacguucaucuccgacgagguggcgcgcgaccugagccugcaguucaagcggccgaucaaccccaccgaccaguccagcuacaucgucgacuccgugaccgugaagaacgggagcauccaccucuacuucgacaaggccggccagaagaccuacgagcgccacucccugagccacuucgucaaccuggacaaccuccgggccaacaacacgaaggggucccugcccaucaacgugaucguguucgacggcaagagcaagugcgaggaguccagcgccaaguccgccagcgucuacuacucccagcugaugugccagcccauccuccugcuggaccaggcgcucgugagcgacgugggcgacagcgccgaggucgccgugaagauguucgacgccuacgugaacaccuucuccagcaccuucaacgucccgauggagaagcugaagacccugguggccacggcggaggccgagcucgccaagaacgugucccuggacaacguccugagcaccuucaucuccgccgcgcgccagggguucguggacagcgacguggagaccaaggacgucguggagugccucaagcugucccaccagagcgacaucgaggugaccggcgacuccugcaacaacuacaugcugacguacaacaaggucgagaacaugaccccccgggaccucggggccugcaucgacugcagcgcccgccacaucaacgcccagguggccaagucccacaacaucgcgcugaucuggaacgugaaggacuucaugagccuguccgagcagcuccggaagcagauccgcagcgccgccaagaagaacaaccugcccuucaagcugaccugcgccaccacgcgccaggucgugaacguggucaccaccaagaucgcccucaagggcgggugaggacuagucccuguucccagagcccacuuuuuuuucuuuuuuugaaauaaaauagccugucuuucagaucucaaaggcucuuuucagagccaccaaaaaaaaaaaaaaaaaaaaaaaaaaaaaaaaaaaaaaaaaaaaaaaaaaaaaaaaaaaaaaaaaaaaaaaaaaaaaaaaaaaaaaaaaaaaaaaaaaaaa

SEQ ID NO: 20148 - RNA, 6113 nt, Artificial Sequence
  SARS-CoV-2__MT325594.1__non-structural protein 3 (NSP3) mRNA gc
aggagagucccgcagucggcguccagcggcucugcuuguucgugugugugucguugcaggccuuauucaagcuuaccauggcccccaccaaggugaccuucggcgacgacacggucaucgaggugcagggguacaagagcgugaacaucaccuucgagcuggacgagcgcaucgacaagguccucaacgagaagugcuccgccuacaccguggagcugggcaccgaggugaacgaguucgcgugcgucguggccgacgccgugaucaagacgcugcagccggucagcgagcuccugaccccccuggggaucgaccucgacgagugguccauggccaccuacuaccuguucgacgagagcggcgaguucaagcuggccucccacauguacugcagcuucuacccccccgacgaggacgaggaggagggggacugcgaggaggaggaguucgagccguccacccaguacgaguacggcacggaggacgacuaccagggcaagccccucgaguucggggcgaccagcgccgcccugcagcccgaggaggagcaggaggaggacuggcuggacgacgacucccagcagaccgugggccagcaggacgggagcgaggacaaccagaccacgaccauccagaccaucguggagguccagccccagcucgagauggagcugaccccgguggugcagacgaucgaggucaacuccuucagcggcuaccugaagcucaccgacaacguguacaucaagaacgccgacaucguggaggaggcgaagaaggucaagcccaccgugguggucaacgccgccaacguguaccugaagcacgggggcggcguggccggggcccugaacaaggcgaccaacaacgccaugcaggucgaguccgacgacuacaucgccacgaacggcccccucaagguggggggcagcugcguccuguccggccacaaccuggccaagcacugccuccacgugguggggcccaacgucaacaagggcgaggacauccagcugcugaagagcgccuacgagaacuucaaccagcacgaggugcuccuggcgccgcugcucuccgccgggaucuucggcgccgaccccauccacagccugcgggugugcgucgacaccgugcgcaccaacguguaccuggccgucuucgacaagaaccucuacgacaagcugguguccagcuuccuggagaugaagagcgagaagcagguggagcagaagaucgccgagauccccaaggaggaggucaagcccuucaucaccgaguccaagccgagcguggagcagcggaagcaggacgacaagaagaucaaggcgugcguggaggaggucacgaccacccucgaggagaccaaguuccugacggagaaccugcuccuguacaucgacaucaacgggaaccugcaccccgacuccgccacccucgugagcgacaucgacaucaccuuccugaagaaggacgcccccuacaucgugggcgacgucgugcaggagggcgugcugaccgccgucgugauccccacgaagaaggccgggggcaccaccgagaugcucgcgaaggcccugcgcaaggugccgaccgacaacuacaucacgaccuaccccgggcagggccugaacggguacaccgucgaggaggccaagaccgugcucaagaagugcaaguccgccuucuacauccugcccagcaucaucuccaacgagaagcaggagauccugggcaccgugagcuggaaccuccgggagaugcuggcgcacgccgaggagacgcgcaagcugaugcccgucugcguggagaccaaggccaucguguccaccauccagcggaaguacaagggcaucaagauccaggagggggucguggacuacggcgcccgcuucuacuucuacaccagcaagacgaccguggccucccugaucaacacccucaacgaccugaacgagacccuggucacgaugccgcucggguacgugacccacggccugaaccuggaggaggcggcccgguacaugcgcagccucaaggugcccgccaccgucuccgugagcucccccgacgccgugaccgccuacaacggguaccugacgagcuccagcaagacccccgaggagcacuucaucgagaccaucucccuggcgggcagcuacaaggacuggagcuacuccggccagagcacccagcucgggaucgaguuccugaagcggggcgacaaguccgucuacuacacgagcaacccgaccaccuuccaccuggacggggaggugaucaccuucgacaaccucaagacgcugcugucccuccgcgaggugcggaccaucaaggucuucaccaccguggacaacaucaaccugcacaugcagguggucgacaugagcaugacguacggccagcaguucggccccaccuaccuggacggggccgacgugaccaagaucaagccccacaacucccacgagggcaagaccuucuacgugcucccgaacgacgacacgcugcgcgucgaggccuucgaguacuaccacaccaccgaccccagcuuccuggggcgguacauguccgcccucaaccacaccaagaaguggaaguacccccaggugaacggccugacgagcaucaagugggccgacaacaacugcuaccuggcgaccgcccuccugacccugcagcagaucgagcucaaguucaaccccccggcccugcaggacgccuacuaccgcgcgcgggccggggaggccgccaacuucugcgcccugauccucgcguacugcaacaagaccgugggcgagcugggcgacguccgcgagacgauguccuaccuguuccagcacgccaaccucgacagcugcaagcgggugcugaacgucgugugcaagaccugcgggcagcagcagaccacccugaagggcguggaggccgucauguacauggggacccucuccuacgagcaguucaagaagggcgugcagauccccugcacgugcgggaagcaggccaccaaguaccuggugcagcaggagagccccuucgucaugauguccgcccccccggcgcaguacgagcugaagcacggcaccuucaccugcgccagcgaguacacgggcaacuaccagugcgggcacuacaagcacaucaccuccaaggagacccucuacugcaucgacggcgcccugcugaccaagagcagcgaguacaaggggcccaucacggacguguucuacaaggagaacuccuacaccaccaccaucaagcccgugacguacaagcucgacggcgucgugugcaccgagaucgaccccaagcuggacaacuacuacaagaaggacaacagcuacuucaccgagcagccgaucgaccuggugcccaaccagcccuaccccaacgccuccuucgacaacuucaaguucgucugcgacaacaucaaguucgccgacgaccucaaccagcugaccggguacaagaagccggcgagccgcgagcugaaggugacguucuuccccgaccucaacggcgacguggucgccaucgacuacaagcacuacacccccuccuucaagaagggcgccaagcugcugcacaagcccaucguguggcacgugaacaacgccaccaacaaggcgaccuacaagccgaacacguggugcauccggugccucuggagcaccaagcccgucgagaccuccaacagcuucgacgugcugaaguccgaggacgcccaggggauggacaaccuggccugcgaggaccucaagcccgugagcgaggaggucguggagaaccccaccauccagaaggacgugcuggagugcaacgucaagacgaccgagguggugggcgacaucauccugaagccggccaacaacucccucaagaucaccgaggaggucgggcacaccgaccugauggccgcguacguggacaacagcucccugacgaucaagaagcccaacgagcucagccgcgugcugggccugaagacccucgccacccacgggcuggccgccgucaacuccgugcccugggacaccaucgccaacuacgcgaagccguuccugaacaagguggucagcacgaccaccaacaucgugacccgcugccucaaccgggugugcacgaacuacaugcccuacuucuucacccugcugcuccagcugugcaccuucacccgcuccaccaacagccggaucaaggccuccaugcccacgaccaucgccaagaacaccgucaagagcgugggcaaguucugccuggaggccagcuucaacuaccucaagucccccaacuucagcaagcugaucaacaucaucaucugguuccugcuccuguccgugugccugggcagccucaucuacuccaccgccgcgcuggggguccugaugagcaaccucggcaugccguccuacugcacgggguaccgcgagggcuaccugaacagcaccaacgugaccaucgccaccuacugcacgggcuccauccccugcagcgugugccuguccgggcucgacagccuggacaccuaccccucccuggagaccauccagaucaccaucagcuccuucaagugggaccucacggccuucggccuggucgccgagugguuccuggccuacauccucuucacccgguucuucuacgugcuggggcuggcggccaucaugcagcucuucuucagcuacuucgccgugcacuucaucuccaacagcuggcugauguggcugaucaucaaccugguccagauggcccccaucuccgcgauggugcgcauguacaucuucuucgccagcuucuacuacguguggaagagcuacguccacgugguggacggcugcaacuccagcaccugcaugaugugcuacaagcggaaccgcgccacccgggucgagugcacgaccaucgugaacgggguccgccgguccuucuacguguacgccaacggcggcaagggguucugcaagcuccacaacuggaacugcgugaacugcgacaccuucugcgccggcagcaccuucaucuccgacgaggucgcgcgcgaccugagccugcaguucaagcggccgaucaaccccacggaccaguccagcuacaucguggacuccgugaccgucaagaacgggagcauccaccucuacuucgacaaggccggccagaagaccuacgagcgccacucccugagccacuucgugaaccuggacaaccuccgggccaacaacaccaaggggucccugcccaucaacgugaucgucuucgacggcaagagcaagugcgaggaguccagcgccaaguccgccagcguguacuacucccagcugaugugccagcccauccuccugcuggaccaggcgcucgugagcgacgucggcgacagcgccgagguggccgugaagauguucgacgccuacgucaacacguucuccagcaccuucaacgugccgauggagaagcugaagacccugguggccaccgcggaggccgagcucgccaagaacgucucccuggacaacgugcugagcacguucaucuccgccgcgcgccagggguucguggacagcgacgucgagaccaaggacgugguggagugccucaagcugucccaccagagcgacaucgaggucaccggcgacuccugcaacaacuacaugcugaccuacaacaagguggagaacaugacgccccgggaccucggggccugcaucgacugcagcgcccgccacaucaacgcccagguggccaagucccacaacaucgcgcugaucuggaacgucaaggacuucaugagccuguccgagcagcuccggaagcagauccgcagcgccgccaagaagaacaaccugcccuucaagcugaccugcgccaccacccgccagguggugaacgucgugacgaccaagaucgcccucaagggcgggugaggacuagucccuguucccagagcccacuuuuuuuucuuuuuuugaaauaaaauagccugucuuucagaucucaaaggcucuuuucagagccaccaaaaaaaaaaaaaaaaaaaaaaaaaaaaaaaaaaaaaaaaaaaaaaaaaaaaaaaaaaaaaaaaaaaaaaaaaaaaaaaaaaaaaaaaaaaaaaaaaaaaa

SEQ ID NO: 20149 - RNA, 6113 nt, Artificial Sequence
  SARS-CoV-2__MT293211.1__non-structural protein 3 (NSP3) mRNA gc
aggagagucccgcagucggcguccagcggcucugcuuguucgugugugugucguugcaggccuuauucaagcuuaccauggcccccaccaaggugaccuucggcgacgacacggucaucgaggugcagggguacaagagcgugaacaucaccuucgagcuggacgagcgcaucgacaagguccucaacgagaagugcuccgccuacaccguggagcugggcaccgaggugaacgaguucgcgugcgucguggccgacgccgugaucaagacgcugcagccggucagcgagcuccugaccccccuggggaucgaccucgacgagugguccauggccaccuacuaccuguucgacgagagcggcgaguucaagcuggccucccacauguacugcagcuucuacccccccgacgaggacgaggaggagggggacugcgaggaggaggaguucgagccguccacccaguacgaguacggcacggaggacgacuaccagggcaagccccucgaguucggggcgaccagcgccgcccugcagcccgaggaggagcaggaggaggacuggcuggacgacgacucccagcagaccgugggccagcaggacgggagcgaggacaaccagaccacgaccauccagaccaucguggagguccagccccagcucgagauggagcugaccccgguggugcagacgaucgaggucaacuccuucagcggcuaccugaagcucaccgacaacguguacaucaagaacgccgacaucguggaggaggcgaagaaggucaagcccaccgugguggucaacgccgccaacguguaccugaagcacgggggcggcguggccggggcccugaacaaggcgaccaacaacgccaugcaggucgaguccgacgacuacaucgccacgaacggcccccucaagguggggggcagcugcguccuguccggccacaaccuggccaagcacugccuccacgugguggggcccaacgucaacaagggcgaggacauccagcugcugaagagcgccuacgagaacuucaaccagcacgaggugcuccuggcgccgcugcucuccgccgggaucuucggcgccgaccccauccacagccugcgggugugcgucgacaccgugcgcaccaacguguaccuggccgucuucgacaagaaccucuacgacaagcugguguccagcuuccuggagaugaagagcgagaagcagguggagcagaagaucgccgagauccccaaggaggaggucaagcccuucaucaccgaguccaagccgagcguggagcagcggaagcaggacgacaagaagaucaaggcgugcguggaggaggucacgaccacccucgaggagaccaaguuccugacggagaaccugcuccuguacaucgacaucaacgggaaccugcaccccgacuccgccacccucgugagcgacaucgacaucaccuuccugaagaaggacgcccccuacaucgugggcgacgucgugcaggagggcgugcugaccgccgucgugauccccacgaagaaggccgggggcaccaccgagaugcucgcgaaggcccugcgcaaggugccgaccgacaacuacaucacgaccuaccccgggcagggccugaacggguacaccgucgaggaggccaagaccgugcucaagaagugcaaguccgccuucuacauccugcccagcaucaucuccaacgagaagcaggagauccugggcaccgugagcuggaaccuccgggagaugcuggcgcacgccgaggagacgcgcaagcugaugcccgucugcguggagaccaaggccaucguguccaccauccagcggaaguacaagggcaucaagauccaggagggggucguggacuacggcgcccgcuucuacuucuacaccagcaagacgaccguggccucccugaucaacacccucaacgaccugaacgagacccuggucacgaugccgcucggguacgugacccacggccugaaccuggaggaggcggcccgguacaugcgcagccucaaggugcccgccaccgucuccgugagcucccccgacgccgugaccgccuacaacggguaccugacgagcuccagcaagacccccgaggagcacuucaucgagaccaucucccuggcgggcagcuacaaggacuggagcuacuccggccagagcacccagcucgggaucgaguuccugaagcggggcgacaaguccgucuacuacacgagcaacccgaccaccuuccaccuggacggggaggugaucaccuucgacaaccucaagacgcugcugucccuccgcgaggugcggaccaucaaggucuucaccaccguggacaacaucaaccugcacacgcagguggucgacaugagcaugaccuacggccagcaguucggccccaccuaccuggacggggccgacgugaccaagaucaagccccacaacucccacgagggcaagacguucuacgugcucccgaacgacgacacccugcgcgucgaggccuucgaguacuaccacaccaccgaccccagcuuccuggggcgguacauguccgcccucaaccacacgaagaaguggaaguacccccaggugaacggccugaccagcaucaagugggccgacaacaacugcuaccuggcgaccgcccuccugacccugcagcagaucgagcucaaguucaaccccccggcccugcaggacgccuacuaccgcgcgcgggccggggaggccgccaacuucugcgcccugauccucgcguacugcaacaagacggugggcgagcugggcgacguccgcgagaccauguccuaccuguuccagcacgccaaccucgacagcugcaagcgggugcugaacgucgugugcaagaccugcgggcagcagcagaccacccugaagggcguggaggccgucauguacauggggacgcucuccuacgagcaguucaagaagggcgugcagauccccugcaccugcgggaagcaggccaccaaguaccuggugcagcaggagagccccuucgucaugauguccgcccccccggcgcaguacgagcugaagcacggcaccuucacgugcgccagcgaguacaccggcaacuaccagugcgggcacuacaagcacaucaucuccaaggagacccucuacugcaucgacggcgcccugcugaccaagagcagcgaguacaaggggcccaucacggacguguucuacaaggagaacuccuacaccaccaccaucaagcccgugacguacaagcucgacggcgucgugugcaccgagaucgaccccaagcuggacaacuacuacaagaaggacaacagcuacuucaccgagcagccgaucgaccuggugcccaaccagcccuaccccaacgccuccuucgacaacuucaaguucgucugcgacaacaucaaguucgccgacgaccucaaccagcugaccggguacaagaagccggcgagccgcgagcugaaggugacguucuuccccgaccucaacggcgacguggucgccaucgacuacaagcacuacacccccuccuucaagaagggcgccaagcugcugcacaagcccaucguguggcacgugaacaacgccaccaacaaggcgaccuacaagccgaacacguggugcauccggugccucuggagcaccaagcccgucgagaccuccaacagcuucgacgugcugaaguccgaggacgcccaggggauggacaaccuggccugcgaggaccucaagcccgugagcgaggaggucguggagaaccccaccauccagaaggacgugcuggagugcaacgucaagacgaccgagguggugggcgacaucauccugaagccggccaacaacucccucaagaucaccgaggaggucgggcacaccgaccugauggccgcguacguggacaacagcucccugacgaucaagaagcccaacgagcucagccgcgugcugggccugaagacccucgccacccacgggcuggccgccgucaacuccgugcccugggacaccaucgccaacuacgcgaagccguuccugaacaagguggucagcacgaucaccaacaucgugacccgcugccucaaccgggugugcaccaacuacaugcccuacuucuucacgcugcugcuccagcugugcaccuucacccgcuccaccaacagccggaucaaggccuccaugcccaccacgaucgccaagaacaccgucaagagcgugggcaaguucugccuggaggccagcuucaacuaccucaagucccccaacuucagcaagcugaucaacaucaucaucugguuccugcuccuguccgugugccugggcagccucaucuacuccaccgccgcgcuggggguccugaugagcaaccucggcaugccguccuacugcaccggguaccgcgagggcuaccugaacagcacgaacgugaccaucgccaccuacugcaccggcuccauccccugcagcgugugccuguccgggcucgacagccuggacacguaccccucccuggagaccauccagaucaccaucagcuccuucaagugggaccucaccgccuucggccuggucgccgagugguuccuggccuacauccucuucacgcgguucuucuacgugcuggggcuggcggccaucaugcagcucuucuucagcuacuucgccgugcacuucaucuccaacagcuggcugauguggcugaucaucaaccugguccagauggcccccaucuccgcgauggugcgcauguacaucuucuucgccagcuucuacuacguguggaagagcuacguccacgugguggacggcugcaacuccagcaccugcaugaugugcuacaagcggaaccgcgccacccgggucgagugcaccacgaucgugaacgggguccgccgguccuucuacguguacgccaacggcggcaagggguucugcaagcuccacaacuggaacugcgugaacugcgacaccuucugcgccggcagcaccuucaucuccgacgaggucgcgcgcgaccugagccugcaguucaagcggccgaucaaccccaccgaccaguccagcuacaucguggacuccgugacggucaagaacgggagcauccaccucuacuucgacaaggccggccagaagaccuacgagcgccacucccugagccacuucgugaaccuggacaaccuccgggccaacaacaccaaggggucccugcccaucaacgugaucgucuucgacggcaagagcaagugcgaggaguccagcgccaaguccgccagcguguacuacucccagcugaugugccagcccauccuccugcuggaccaggcgcucgugagcgacgucggcgacagcgccgagguggccgugaagauguucgacgccuacgucaacaccuucuccagcacguucaacgugccgauggagaagcugaagacccugguggccaccgcggaggccgagcucgccaagaacgucucccuggacaacgugcugagcaccuucaucuccgccgcgcgccagggguucguggacagcgacgucgagacgaaggacgugguggagugccucaagcugucccaccagagcgacaucgaggucaccggcgacuccugcaacaacuacaugcugaccuacaacaagguggagaacaugaccccccgggaccucggggccugcaucgacugcagcgcccgccacaucaacgcccagguggccaagucccacaacaucgcgcugaucuggaacgucaaggacuucaugagccuguccgagcagcuccggaagcagauccgcagcgccgccaagaagaacaaccugcccuucaagcugacgugcgccaccacccgccagguggugaacgucgugaccacgaagaucgcccucaagggcgggugaggacuagucccuguucccagagcccacuuuuuuuucuuuuuuugaaauaaaauagccugucuuucagaucucaaaggcucuuuucagagccaccaaaaaaaaaaaaaaaaaaaaaaaaaaaaaaaaaaaaaaaaaaaaaaaaaaaaaaaaaaaaaaaaaaaaaaaaaaaaaaaaaaaaaaaaaaaaaaaaaaaaa

SEQ ID NO: 20150 - RNA, 6113 nt, Artificial Sequence
  SARS-CoV-2__MT291826.1__non-structural protein 3 (NSP3) mRNA gc
aggagagucccgcagucggcguccagcggcucugcuuguucgugugugugucguugcaggccuuauucaagcuuaccauggcccccaccaaggugaccuucggcgacgacacggucaucgaggugcagggguacaagagcgugaacaucaccuucgagcuggacgagcgcaucgacaagguccucaacgagaagugcuccgccuacaccguggagcugggcaccgaggugaacgaguucgcgugcgucguggccgacgccgugaucaagacgcugcagccggucagcgagcuccugaccccccuggggaucgaccucgacgagugguccauggccaccuacuaccuguucgacgagagcggcgaguucaagcuggccucccacauguacugcagcuucuacccccccgacgaggacgaggaggagggggacugcgaggaggaggaguucgagccguccacccaguacgaguacggcacggaggacgacuaccagggcaagccccucgaguucggggcgaccagcgccgcccugcagcccgaggaggagcaggaggaggacuggcuggacgacgacucccagcagaccgugggccagcaggacgggagcgaggacaaccagaccacgaccauccagaccaucguggagguccagccccagcucgagauggagcugaccccgguggugcagacgaucgaggucaacuccuucagcggcuaccugaagcucaccgacaacguguacaucaagaacgccgacaucguggaggaggcgaagaaggucaagcccaccgugguggucaacgccgccaacguguaccugaagcacgggggcggcguggccggggcccugaacaaggcgaccaacaacgccaugcaggucgaguccgacgacuacaucgccacgaacggcccccucaagguggggggcagcugcguccuguccggccacaaccuggccaagcacugccuccacgugguggggcccaacgucaacaagggcgaggacauccagcugcugaagagcgccuacgagaacuucaaccagcacgaggugcuccuggcgccgcugcucuccgccgggaucuucggcgccgaccccauccacagccugcgggugugcgucgacaccgugcgcaccaacguguaccuggccgucuucgacaagaaccucuacgacaagcugguguccagcuuccuggagaugaagagcgagaagcagguggagcagaagaucgccgagauccccaaggaggaggucaagcccuucaucaccgaguccaagccgagcguggagcagcggaagcaggacgacaagaagaucaaggcgugcguggaggaggucacgaccacccucgaggagaccaaguuccugacggagaaccugcuccuguacaucgacaucaacgggaaccugcaccccgacuccgccacccucgugagcgacaucgacaucaccuuccugaagaaggacgcccccuacaucgugggcgacgucgugcaggagggcgugcugaccgccgucgugauccccacgaagaaggccgggggcaccaccgagaugcucgcgaaggcccugcgcaaggugccgaccgacaacuacaucacgaccuaccccgggcagggccugaacggguacaccgucgaggaggccaagaccgugcucaagaagugcaaguccgccuucuacauccugcccagcaucaucuccaacgagaagcaggagauccugggcaccgugagcuggaaccuccgggagaugcuggcgcacgccgaggagacgcgcaagcugaugcccgucugcguggagaccaaggccaucguguccaccauccagcggaaguacaagggcaucaagauccaggagggggucguggacuacggcgcccgcuucuacuucuacaccagcaagacgaccguggccucccugaucaacacccucaacgaccugaacgagacccuggucacgaugccgcucggguacgugacccacggccugaaccuggaggaggcggcccgguacaugcgcagccucaaggugcccgccaccgucuccgugagcucccccgacgccgugaccgccuacaacggguaccugacgagcuccagcaagacccccgaggagcacuucaucgagaccaucucccuggcgggcagcuacaaggacuggagcuacuccggccagagcacccagcucgggaucgaguuccugaagcggggcgacaaguccgucuacuacacgagcaacccgaccaccuuccaccuggacggggaggugaucaccuucgacaaccucaagacgcugcugccccuccgcgaggugcggaccaucaaggucuucaccaccguggacaacaucaaccugcacacgcagguggucgacauguccaugaccuacggccagcaguucggccccaccuaccuggacggggccgacgugaccaagaucaagccgcacaacagccacgagggcaagacguucuacgugcuccccaacgacgacacccugcgcgucgaggccuucgaguacuaccacaccaccgaccccuccuuccuggggcgguacaugagcgcccucaaccacacgaagaaguggaaguacccccaggugaacggccugaccuccaucaagugggccgacaacaacugcuaccuggcgaccgcccuccugacccugcagcagaucgagcucaaguucaacccgcccgcccugcaggacgccuacuaccgcgcgcgggccggggaggccgccaacuucugcgcccugauccucgcguacugcaacaagacggugggcgagcugggcgacguccgcgagaccaugagcuaccuguuccagcacgccaaccucgacuccugcaagcgggugcugaacgucgugugcaagaccugcgggcagcagcagaccacccugaagggcguggaggccgucauguacauggggacgcucagcuacgagcaguucaagaagggcgugcagauccccugcaccugcgggaagcaggccaccaaguaccuggugcagcaggagucccccuucgucaugaugagcgccccgcccgcgcaguacgagcugaagcacggcaccuucacgugcgccuccgaguacaccggcaacuaccagugcgggcacuacaagcacaucaccagcaaggagacccucuacugcaucgacggcgcccugcugacgaaguccagcgaguacaaggggcccaucaccgacguguucuacaaggagaacagcuacaccaccacgaucaagcccgugaccuacaagcucgacggcgucgugugcaccgagaucgacccgaagcuggacaacuacuacaagaaggacaacuccuacuucaccgagcagcccaucgaccuggugcccaaccagcccuacccgaacgccagcuucgacaacuucaaguucgucugcgacaacaucaaguucgccgacgaccucaaccagcugacgggguacaagaagcccgcgucccgcgagcugaaggugaccuucuuccccgaccucaacggcgacguggucgccaucgacuacaagcacuacacccccagcuucaagaagggcgccaagcugcugcacaagccgaucguguggcacgugaacaacgccaccaacaaggcgacguacaagcccaacaccuggugcauccggugccucugguccaccaagcccgucgagaccagcaacuccuucgacgugcugaagagcgaggacgcccaggggauggacaaccuggccugcgaggaccucaagcccguguccgaggaggucguggagaacccgacgauccagaaggacgugcuggagugcaacgucaagaccaccgagguggugggcgacaucauccugaagcccgccaacaacagccucaagaucaccgaggaggucgggcacacggaccugauggccgcguacguggacaacuccagccugaccaucaagaagcccaacgagcucucccgcgugcugggccugaagacccucgccacccacgggcuggccgccgucaacagcgugccgugggacacgaucgccaacuacgcgaagcccuuccugaacaagguggucuccaccaccaccaacaucgugacgcgcugccucaaccgggugugcaccaacuacaugcccuacuucuucacccugcugcuccagcugugcaccuucacccgcagcacgaacucccggaucaaggccagcaugcccaccaccaucgccaagaacaccgucaaguccgugggcaaguucugccuggaggccagcuucaacuaccucaagagcccgaacuucuccaagcugaucaacaucaucaucugguuccugcuccugagcgugugccugggcucccucaucuacagcacggccgcgcuggggguccugauguccaaccucggcaugcccagcuacugcaccggguaccgcgagggcuaccugaacuccaccaacgugaccaucgccacguacugcaccggcagcauccccugcuccgugugccugagcgggcucgacucccuggacaccuaccccagccuggagaccauccagaucacgaucuccagcuucaagugggaccucaccgccuucggccuggucgccgagugguuccuggccuacauccucuucacccgguucuucuacgugcuggggcuggcggccaucaugcagcucuucuucuccuacuucgccgugcacuucaucagcaacuccuggcugauguggcugaucaucaaccugguccagauggccccgaucagcgcgauggugcgcauguacaucuucuucgccuccuucuacuacguguggaagagcuacguccacgugguggacggcugcaacagcuccaccugcaugaugugcuacaagcggaaccgcgccacgcgggucgagugcaccaccaucgugaacgggguccgccggagcuucuacguguacgccaacggcggcaagggguucugcaagcuccacaacuggaacugcgugaacugcgacaccuucugcgccggcuccacguucaucagcgacgaggucgcgcgcgaccugucccugcaguucaagcggcccaucaaccccaccgaccagagcuccuacaucguggacagcgugaccgucaagaacggguccauccaccucuacuucgacaaggccggccagaagaccuacgagcgccacagccugucccacuucgugaaccuggacaaccuccgggccaacaacacgaaggggagccugcccaucaacgugaucgucuucgacggcaaguccaagugcgaggagagcuccgccaagagcgccuccguguacuacagccagcugaugugccagccgauccuccugcuggaccaggcgcucguguccgacgucggcgacagcgccgagguggccgugaagauguucgacgccuacgucaacaccuucagcuccaccuucaacgugcccauggagaagcugaagacccugguggccacggcggaggccgagcucgccaagaacgucagccuggacaacgugcuguccaccuucaucagcgccgcgcgccagggguucguggacuccgacgucgagaccaaggacgugguggagugccucaagcugagccaccaguccgacaucgaggucaccggcgacagcugcaacaacuacaugcugacguacaacaagguggagaacaugaccccccgggaccucggggccugcaucgacugcuccgcccgccacaucaacgcccagguggccaagagccacaacaucgcgcugaucuggaacgucaaggacuucaugucccugagcgagcagcuccggaagcagauccgcuccgccgccaagaagaacaaccugcccuucaagcugaccugcgccaccacgcgccagguggugaacgucgugaccaccaagaucgcccucaagggcgggugaggacuagucccuguucccagagcccacuuuuuuuucuuuuuuugaaauaaaauagccugucuuucagaucucaaaggcucuuuucagagccaccaaaaaaaaaaaaaaaaaaaaaaaaaaaaaaaaaaaaaaaaaaaaaaaaaaaaaaaaaaaaaaaaaaaaaaaaaaaaaaaaaaaaaaaaaaaaaaaaaaaaa

SEQ ID NO: 20151 - RNA, 6113 nt, Artificial Sequence
  SARS-CoV-2__MT276325.2__non-structural protein 3 (NSP3) mRNA gc
aggagagucccgcagucggcguccagcggcucugcuuguucgugugugugucguugcaggccuuauucaagcuuaccauggcccccaccaaggugaccuucggcgacgacacggucaucgaggugcagggguacaagagcgugaacaucaccuucgagcuggacgagcgcaucgacaagguccucaacgagaagugcuccgccuacaccguggagcugggcaccgaggugaacgaguucgcgugcgucguggccgacgccgugaucaagacgcugcagccggucagcgagcuccugaccccccuggggaucgaccucgacgagugguccauggccaccuacuaccuguucgacgagagcggcgaguucaagcuggccucccacauguacugcagcuucuacccccccgacgaggacgaggaggagggggacugcgaggaggaggaguucgagccguccacccaguacgaguacggcacggaggacgacuaccagggcaagccccucgaguucggggcgaccagcgccgcccugcagcccgaggaggagcaggaggaggacuggcuggacgacgacucccagcagaccgugggccagcaggacgggagcgaggacaaccagaccacgaccauccagaccaucguggagguccagccccagcucgagauggagcugaccccgguggugcagacgaucgaggucaacuccuucagcggcuaccugaagcucaccgacaacguguacaucaagaacgccgacaucguggaggaggucaagaaggugaagcccaccguggucgugaacgcggccaacguguaccugaagcacgggggcggcgucgccggggcccugaacaaggccaccaacaacgcgaugcagguggaguccgacgacuacaucgccacgaacggcccccucaaggucgggggcagcugcgugcuguccggccacaaccuggccaagcacugccuccacguggucgggcccaacgugaacaagggcgaggacauccagcugcugaagagcgccuacgagaacuucaaccagcacgaggugcuccuggccccgcugcucuccgcggggaucuucggcgccgaccccauccacagccugcgggucugcguggacaccgugcgcaccaacgucuaccuggccguguucgacaagaaccucuacgacaagcugguguccagcuuccuggagaugaagagcgagaagcaggucgagcagaagaucgccgagauccccaaggaggaggugaagcccuucaucaccgaguccaagccgagcguggagcagcggaagcaggacgacaagaagaucaaggccugcgucgaggaggugacgaccacccucgaggagaccaaguuccugacggagaaccugcuccuguacaucgacaucaacgggaaccugcaccccgacuccgcgacccucgugagcgacaucgacaucaccuuccugaagaaggacgcccccuacaucgucggcgacguggugcaggagggcguccugaccgccguggugauccccacgaagaaggccgggggcaccaccgagaugcucgccaaggcgcugcgcaaggucccgaccgacaacuacaucacgaccuaccccgggcagggccugaacggguacaccguggaggaggccaagaccgugcucaagaagugcaaguccgccuucuacauccugcccagcaucaucuccaacgagaagcaggagauccugggcaccgucagcuggaaccuccgggagaugcuggcccacgcggaggagacgcgcaagcugaugcccgugugcguggagaccaaggccaucgucuccaccauccagcggaaguacaagggcaucaagauccaggagggggugguggacuacggcgcccgcuucuacuucuacaccagcaagacgaccgucgccucccugaucaacacccucaacgaccugaacgagacccuggugacgaugccgcucggguacgugacccacggccugaaccuggaggaggccgcgcgguacaugcgcagccucaagguccccgccaccguguccgugagcucccccgacgccgucaccgccuacaacggguaccugacgagcuccagcaagacccccgaggagcacuucaucgagaccaucucccuggccggcagcuacaaggacuggagcuacuccggccagagcacccagcucgggaucgaguuccugaagcggggcgacaaguccguguacuacacgagcaacccgaccaccuuccaccuggacggggaggugaucaccuucgacaaccucaagacgcugcugucccuccgcgagguccggaccaucaagguguucaccaccguggacaacaucaaccugcacacgcaggucguggacaugagcaugaccuacggccagcaguucggccccaccuaccuggacggggcggacgugaccaagaucaagccccacaacucccacgagggcaagacguucuacguccucccgaacgacgacacccugcgcguggaggccuucgaguacuaccacaccaccgaccccagcuuccuggggcgguacauguccgcccucaaccacacgaagaaguggaaguacccccaggugaacggccugaccagcaucaagugggccgacaacaacugcuaccuggccaccgcgcuccugacccugcagcagaucgagcucaaguucaaccccccggcccugcaggacgccuacuaccgcgcccgggcgggggaggccgccaacuucugcgcccugauccucgccuacugcaacaagacggucggcgagcugggcgacgugcgcgagaccauguccuaccuguuccagcacgcgaaccucgacagcugcaagcggguccugaacguggugugcaagaccugcgggcagcagcagaccacccugaagggcgucgaggccgugaucuacauggggacgcucuccuacgagcaguucaagaagggcgugcagauccccugcaccugcgggaagcaggccaccaaguaccugguccagcaggagagccccuucgugaugauguccgcccccccggcccaguacgagcugaagcacggcaccuucacgugcgcgagcgaguacaccggcaacuaccagugcgggcacuacaagcacaucaccuccaaggagacccucuacugcaucgacggcgcccugcugacgaagagcagcgaguacaaggggcccaucaccgacguguucuacaaggagaacuccuacaccaccacgaucaagcccgucaccuacaagcucgacggcguggugugcaccgagaucgaccccaagcuggacaacuacuacaagaaggacaacagcuacuucaccgagcagccgaucgaccugguccccaaccagcccuaccccaacgccuccuucgacaacuucaaguucgugugcgacaacaucaaguucgccgacgaccucaaccagcugacgggguacaagaagccggccagccgcgagcugaaggugaccuucuuccccgaccucaacggcgacgucguggcgaucgacuacaagcacuacacccccuccuucaagaagggcgccaagcugcugcacaagcccaucguguggcacgucaacaacgccaccaacaaggccacguacaagccgaacaccuggugcauccggugccucuggagcaccaagcccguggagaccuccaacagcuucgacgugcugaaguccgaggacgcgcaggggauggacaaccuggccugcgaggaccucaagcccgucagcgaggaggugguggagaaccccacgauccagaaggacguccuggagugcaacgugaagaccaccgagguggucggcgacaucauccugaagccggccaacaacucccucaagaucaccgaggagguggggcacacggaccugauggccgccuacguggacaacagcucccugaccaucaagaagcccaacgagcucagccgcguccugggccugaagacccucgcgacccacgggcuggccgccgugaacuccgugcccugggacacgaucgccaacuacgccaagccguuccugaacaaggucgugagcaccaccaccaacaucgugacgcgcugccucaaccgggucugcaccaacuacaugcccuacuucuucacccugcugcuccagcugugcaccuucacccgcuccacgaacagccggaucaaggcguccaugcccaccaccaucgccaagaacaccgugaagagcgugggcaaguucugccuggaggccagcuucaacuaccucaagucccccaacuucagcaagcugaucaacaucaucaucugguuccugcuccuguccgucugccugggcagccucaucuacuccacggccgcccugggggugcugaugagcaaccucggcaugccguccuacugcaccggguaccgcgagggcuaccugaacagcaccaacgugaccaucgcgacguacugcaccggcuccauccccugcagcgucugccuguccgggcucgacagccuggacaccuaccccucccuggagaccauccagaucacgaucagcuccuucaagugggaccucaccgccuucggccugguggccgagugguuccuggccuacauccucuucacccgguucuucuacgugcuggggcuggccgcgaucaugcagcucuucuucagcuacuucgccguccacuucaucuccaacagcuggcugauguggcugaucaucaaccuggugcagauggcccccaucuccgccauggugcgcauguacaucuucuucgcgagcuucuacuacgucuggaagagcuacgugcacguggucgacggcugcaacuccagcaccugcaugaugugcuacaagcggaaccgcgccacgcggguggagugcaccaccaucgucaacggggugcgccgguccuucuacguguacgccaacggcggcaagggguucugcaagcuccacaacuggaacugcgucaacugcgacaccuucugcgccggcagcacguucaucuccgacgagguggcccgcgaccugagccugcaguucaagcggccgaucaaccccaccgaccaguccagcuacaucguggacuccgucaccgugaagaacgggagcauccaccucuacuucgacaaggcgggccagaagaccuacgagcgccacucccugagccacuucgugaaccuggacaaccuccgggccaacaacacgaaggggucccugcccaucaacgucaucguguucgacggcaagagcaagugcgaggaguccagcgccaaguccgccagcguguacuacucccagcugaugugccagcccauccuccugcuggaccaggcccucgucagcgacgugggcgacagcgcggagguggccgucaagauguucgacgccuacgugaacaccuucuccagcaccuucaacgugccgauggagaagcugaagacccuggucgccacggccgaggcggagcucgccaagaacgugucccuggacaacgugcugagcaccuucaucuccgccgcccgccagggguucgucgacagcgacguggagaccaaggacguggucgagugccucaagcugucccaccagagcgacaucgaggugaccggcgacuccugcaacaacuacaugcugacguacaacaagguggagaacaugaccccccgggaccucggggcgugcaucgacugcagcgcccgccacaucaacgcccaggucgccaagucccacaacaucgcccugaucuggaacgugaaggacuucaugagccuguccgagcagcuccggaagcagauccgcagcgcggccaagaagaacaaccugcccuucaagcugaccugcgccaccacgcgccagguggucaacguggugaccaccaagaucgcccucaagggcgggugaggacuagucccuguucccagagcccacuuuuuuuucuuuuuuugaaauaaaauagccugucuuucagaucucaaaggcucuuuucagagccaccaaaaaaaaaaaaaaaaaaaaaaaaaaaaaaaaaaaaaaaaaaaaaaaaaaaaaaaaaaaaaaaaaaaaaaaaaaaaaaaaaaaaaaaaaaaaaaaaaaaaa

SEQ ID NO: 20152 - RNA, 6113 nt, Artificial Sequence
  SARS-CoV-2__MT263415.1__non-structural protein 3 (NSP3) mRNA gc
aggagagucccgcagucggcguccagcggcucugcuuguucgugugugugucguugcaggccuuauucaagcuuaccauggcccccaccaaggugaccuucggcgacgacacggucaucgaggugcagggguacaagagcgugaacaucaccuucgagcuggacgagcgcaucgacaagguccucaacgagaagugcuccgccuacaccguggagcugggcaccgaggugaacgaguucgcgugcgucguggccgacgccgugaucaagacgcugcagccggucagcgagcuccugaccccccuggggaucgaccucgacgagugguccauggccaccuacuaccuguucgacgagagcggcgaguucaagcuggccucccacauguacugcagcuucuacccccccgacgaggacgaggaggagggggacugcgaggaggaggaguucgagccguccacccaguacgaguacggcacggaggacgacuaccagggcaagccccucgaguucggggcgaccagcgccgcccugcagcccgaggaggagcaggaggaggacuggcuggacgacgacucccagcagaccgugggccagcaggacgggagcgaggacaaccagaccacgaccauccagaccaucguggagguccagccccagcucgagauggagcugaccccgguggugcagacgaucgaggucaacuccuucagcggcuaccugaagcucaccgacaacguguacaucaagaacgccgacaucguggaggaggcgaagaaggucaagcccaccgugguggucaacgccgccaacguguaccugaagcacgggggcggcguggccggggcccugaacaaggcgaccaacaacgccaugcaggucgaguccgacgacuacaucgccacgaacggcccccucaagguggggggcagcugcguccuguccggccacaaccuggccaagcacugccuccacgugguggggcccaacgucaacaagggcgaggacauccagcugcugaagagcgccuacgagaacuucaaccagcacgaggugcuccuggcgccgcugcucuccgccgggaucuucggcgccgaccccauccacagccugcgggugugcgucgacaccgugcgcaccaacguguaccuggccgucuucgacaagaaccucuacgacaagcugguguccagcuuccuggagaugaagagcgagaagcagguggagcagaagaucgccgagauccccaaggaggaggucaagcccuucaucaccgaguccaagccgagcguggagcagcggaagcaggacgacaagaagaucaaggcgugcguggaggaggucacgaccacccucgaggagaccaaguuccugacggagaaccugcuccuguacaucgacaucaacgggaaccugcaccccgacuccgccacccucgugagcgacaucgacaucaccuuccugaagaaggacgcccccuacaucgugggcgacgucgugcaggagggcgugcugaccgccgucgugauccccacgaagaaggccgggggcaccaccgagaugcucgcgaaggcccugcgcaaggugccgaccgacaacuacaucacgaccuaccccgggcagggccugaacggguacaccgucgaggaggccaagaccgugcucaagaagugcaaguccgccuucuacauccugcccagcaucaucuccaacgagaagcaggagauccugggcaccgugagcuggaaccuccgggagaugcuggcgcacgccgaggagacgcgcaagcugaugcccgucugcguggagaccaaggccaucguguccaccauccagcggaaguacaagggcaucaagauccaggagggggucguggacuacggcgcccgcuucuacuucuacaccagcaagacgaccguggccucccugaucaacacccucaacgaccugaacgagacccuggucacgaugccgcucggguacgugacccacggccugaaccuggaggaggcggcccgguacaugcgcagccucaaggugcccgucaccguguccgugagcucccccgacgccgucaccgccuacaacggguaccugacgagcuccagcaagacccccgaggagcacuucaucgagaccaucucccuggccggcagcuacaaggacuggagcuacuccggccagagcacccagcucgggaucgaguuccugaagcggggcgacaaguccguguacuacacgagcaacccgaccaccuuccaccuggacggggaggugaucaccuucgacaaccucaagacgcugcugucccuccgcgagguccggaccaucaagguguucaccaccguggacaacaucaaccugcacacgcaggucguggacaugagcaugaccuacggccagcaguucggccccaccuaccuggacggggcggacgugaccaagaucaagccccacaacucccacgagggcaagacguucuacguccucccgaacgacgacacccugcgcguggaggccuucgaguacuaccacaccaccgaccccagcuuccuggggcgguacauguccgcccucaaccacacgaagaaguggaaguacccccaggugaacggccugaccagcaucaagugggccgacaacaacugcuaccuggccaccgcgcuccugacccugcagcagaucgagcucaaguucaaccccccggcccugcaggacgccuacuaccgcgcccgggcgggggaggccgccaacuucugcgcccugauccucgccuacugcaacaagacggucggcgagcugggcgacgugcgcgagaccauguccuaccuguuccagcacgcgaaccucgacagcugcaagcggguccugaacguggugugcaagaccugcgggcagcagcagaccacccugaagggcgucgaggccgugauguacauggggacgcucuccuacgagcaguucaagaagggcgugcagauccccugcaccugcgggaagcaggccaccaaguaccugguccagcaggagagccccuucgugaugauguccgcccccccggcccaguacgagcugaagcacggcaccuucacgugcgcgagcgaguacaccggcaacuaccagugcgggcacuacaagcacaucaccuccaaggagacccucuacugcaucgacggcgcccugcugacgaagagcagcgaguacaaggggcccaucaccgacguguucuacaaggagaacuccuacaccaccacgaucaagcccgucaccuacaagcucgacggcguggugugcaccgagaucgaccccaagcuggacaacuacuacaagaaggacaacagcuacuucaccgagcagccgaucgaccugguccccaaccagcccuaccccaacgccuccuucgacaacuucaaguucgugugcgacaacaucaaguucgccgacgaccucaaccagcugacgggguacaagaagccggccagccgcgagcugaaggugaccuucuuccccgaccucaacggcgacgucguggcgaucgacuacaagcacuacacccccuccuucaagaagggcgccaagcugcugcacaagcccaucguguggcacgucaacaacgccaccaacaaggccacguacaagccgaacaccuggugcauccggugccucuggagcaccaagcccguggagaccuccaacagcuucgacgugcugaaguccgaggacgcgcaggggauggacaaccuggccugcgaggaccucaagcccgucagcgaggaggugguggagaaccccacgauccagaaggacguccuggagugcaacgugaagaccaccgagguggucggcgacaucauccugaagccggccaacaacucccucaagaucaccgaggagguggggcacacggaccugauggccgccuacguggacaacagcucccugaccaucaagaagcccaacgagcucagccgcguccugggccugaagacccucgcgacccacgggcuggccgccgugaacuccgugcccugggacacgaucgccaacuacgccaagccguuccugaacaaggucgugagcaccaccaccaacaucgugacgcgcugccucaaccgggucugcaccaacuacaugcccuacuucuucacccugcugcuccagcugugcaccuucacccgcuccacgaacagccggaucaaggcguccaugcccaccaccaucgccaagaacaccgugaagagcgugggcaaguucugccuggaggccagcuucaacuaccucaagucccccaacuucagcaagcugaucaacaucaucaucugguuccugcuccuguccgucugccugggcagccucaucuacuccacggccgcccugggggugcugaugagcaaccucggcaugccguccuacugcaccggguaccgcgagggcuaccugaacagcaccaacgugaccaucgcgacguacugcaccggcuccauccccugcagcgucugccuguccgggcucgacagccuggacaccuaccccucccuggagaccauccagaucacgaucagcuccuucaagugggaccucaccgccuucggccugguggccgagugguuccuggccuacauccucuucacccgguucuucuacgugcuggggcuggccgcgaucaugcagcucuucuucagcuacuucgccguccacuucaucuccaacagcuggcugauguggcugaucaucaaccuggugcagauggcccccaucuccgccauggugcgcauguacaucuucuucgcgagcuucuacuacgucuggaagagcuacgugcacguggucgacggcugcaacuccagcaccugcaugaugugcuacaagcggaaccgcgccacgcggguggagugcaccaccaucgucaacggggugcgccgguccuucuacguguacgccaacggcggcaagggguucugcaagcuccacaacuggaacugcgucaacugcgacaccuucugcgccggcagcacguucaucuccgacgagguggcccgcgaccugagccugcaguucaagcggccgaucaaccccaccgaccaguccagcuacaucguggacuccgucaccgugaagaacgggagcauccaccucuacuucgacaaggcgggccagaagaccuacgagcgccacucccugagccacuucgugaaccuggacaaccuccgggccaacaacacgaaggggucccugcccaucaacgucaucguguucgacggcaagagcaagugcgaggaguccagcgccaaguccgccagcguguacuacucccagcugaugugccagcccauccuccugcuggaccaggcccucgucagcgacgugggcgacagcgcggagguggccgucaagauguucgacgccuacgugaacaccuucuccagcaccuucaacgugccgauggagaagcugaagacccuggucgccacggccgaggcggagcucgccaagaacgugucccuggacaacgugcugagcaccuucaucuccgccgcccgccagggguucgucgacagcgacguggagaccaaggacguggucgagugccucaagcugucccaccagagcgacaucgaggugaccggcgacuccugcaacaacuacaugcugacguacaacaagguggagaacaugaccccccgggaccucggggcgugcaucgacugcagcgcccgccacaucaacgcccaggucgccaagucccacaacaucgcccugaucuggaacgugaaggacuucaugagccuguccgagcagcuccggaagcagauccgcagcgcggccaagaagaacaaccugcccuucaagcugaccugcgccaccacgcgccagguggucaacguggugaccaccaagaucgcccucaagggcgggugaggacuagucccuguucccagagcccacuuuuuuuucuuuuuuugaaauaaaauagccugucuuucagaucucaaaggcucuuuucagagccaccaaaaaaaaaaaaaaaaaaaaaaaaaaaaaaaaaaaaaaaaaaaaaaaaaaaaaaaaaaaaaaaaaaaaaaaaaaaaaaaaaaaaaaaaaaaaaaaaaaaaa

SEQ ID NO: 20153 - RNA, 6113 nt, Artificial Sequence
  SARS-CoV-2__MT263422.1__non-structural protein 3 (NSP3) mRNA gc
aggagagucccgcagucggcguccagcggcucugcuuguucgugugugugucguugcaggccuuauucaagcuuaccauggcccccaccaaggugaccuucggcgacgacacggucaucgaggugcagggguacaagagcgugaacaucaccuucgagcuggacgagcgcaucgacaagguccucaacgagaagugcuccgccuacaccguggagcugggcaccgaggugaacgaguucgcgugcgucguggccgacgccgugaucaagacgcugcagccggucagcgagcuccugaccccccuggggaucgaccucgacgagugguccauggccaccuacuaccuguucgacgagagcggcgaguucaagcuggccucccacauguacugcagcuucuacccccccgacgaggacgaggaggagggggacugcgaggaggaggaguucgagccguccacccaguacgaguacggcacggaggacgacuaccagggcaagccccucgaguucggggcgaccagcgccgcccugcagcccgaggaggagcaggaggaggacuggcuggacgacgacucccagcagaccgugggccagcaggacgggagcgaggacaaccagaccacgaccauccagaccaucguggagguccagccccagcucgagauggagcugaccccgguggugcagacgaucgaggucaacuccuucagcggcuaccugaagcucaccgacaacguguacaucaagaacgccgacaucguggaggaggcgaagaaggucaagcccaccgugguggucaacgccgccaacguguaccugaagcacgggggcggcguggccggggcccugaacaaggcgaccaacaacgccaugcaggucgaguccgacgacuacaucgccacgaacggcccccucaagguggggggcagcugcguccuguccggccacaaccuggccaagcacugccuccacgugguggggcccaacgucaacaagggcgaggacauccagcugcugaagagcgccuacgagaacuucaaccagcacgaggugcuccuggcgccgcugcucuccgccgggaucuucggcgccgaccccauccacagccugcgggugugcgucgacaccgugcgcaccaacguguaccuggccgucuucgacaagaaccucuacgacaagcugguguccagcuuccuggagaugaagagcgagaagcagguggagcagaagaucgccgagauccccaaggaggaggucaagcccuucaucaccgaguccaagccgagcguggagcagcggaagcaggacgacaagaagaucaaggcgugcguggaggaggucacgaccacccucgaggagaccaaguuccugacggagaaccugcuccuguacaucgacaucaacgggaaccugcaccccgacuccgccacccucgugagcgacaucgacaucaccuuccugaagaaggacgcccccuacaucgugggcgacgucgugcaggagggcgugcugaccgccgucgugauccccacgaagaaggccgggggcaccaccgagaugcucgcgaaggcccugcgcaaggugccgaccgacaacuacaucacgaccuaccccgggcagggccugaacggguacaccgucgaggaggccaagaccgugcucaagaagugcaaguccgccuucuacauccugcccagcaucaucuccaacgagaagcaggagauccugggcaccgugagcuggaaccuccgggagaugcuggcgcacgccgaggagacgcgcaagcugaugcccgucugcguggagaccaaggccaucguguccaccauccagcggaaguacaagggcaucaagauccaggagggggucguggacuacggcgcccgcuucuacuucuacaccagcaagacgaccguggccucccugaucaacacccucaacgaccugaacgagacccuggucacgaugccgcucggguacgugacccacggccugaaccuggaggaggcggcccgguacaugcgcagccucaaggugcccgccaccgucuccgugagcucccccgacgccgugaccgccuacaacggguaccugacgagcuccagcaagacccccgaggagcacuucaucgagaccaucucccuggcgggcagcuacaaggacuggagcuacuccggccagagcacccagcucgggaucgaguuccugaagcggggcgacaaguccgucuacuacacgagcaacccgaccaccuuccaccuggacggggaggugaucaccuucgacaaccucaagacgcugcugucccuccgcgaggugcggaccaucaaggucuucaccaccguggacaacaucaacuuccacacgcagguggucgacaugagcaugaccuacggccagcaguucggccccaccuaccuggacggggccgacgugaccaagaucaagccccacaacucccacgagggcaagacguucuacgugcugccgaacgacgacacccuccgcgucgaggccuucgaguacuaccacaccaccgaccccagcuuccuggggcgguacauguccgcccugaaccacacgaagaaguggaaguacccccaggugaacggccucaccagcaucaagugggccgacaacaacugcuaccuggcgaccgcccugcucacccugcagcagaucgagcugaaguucaaccccccggcccuccaggacgccuacuaccgcgcgcgggccggggaggccgccaacuucugcgcccugauccuggcguacugcaacaagacggugggcgagcucggcgacguccgcgagaccauguccuaccuguuccagcacgccaaccuggacagcugcaagcgggugcucaacgucgugugcaagaccugcgggcagcagcagaccacccugaagggcguggaggccgucauguacauggggacgcuguccuacgagcaguucaagaagggcgugcagauccccugcaccugcgggaagcaggccaccaaguaccucgugcagcaggagagccccuucgucaugauguccgcccccccggcgcaguacgagcugaagcacggcaccuucacgugcgccagcgaguacaccggcaacuaccagugcgggcacuacaagcacaucaccuccaaggagacccuguacugcaucgacggcgcccuccugacgaagagcagcgaguacaaggggcccaucaccgacguguucuacaaggagaacuccuacaccaccacgaucaagcccgugaccuacaagcuggacggcgucgugugcaccgagaucgaccccaagcucgacaacuacuacaagaaggacaacagcuacuucaccgagcagccgaucgaccuggugcccaaccagcccuaccccaacgccuccuucgacaacuucaaguucgucugcgacaacaucaaguucgccgacgaccugaaccagcucacgggguacaagaagccggcgagccgcgagcugaaggugaccuucuuccccgaccugaacggcgacguggucgccaucgacuacaagcacuacacccccuccuucaagaagggcgccaagcuccugcacaagcccaucguguggcacgugaacaacgccaccaacaaggcgacguacaagccgaacaccuggugcauccggugccuguggagcaccaagcccgucgagaccuccaacagcuucgacgugcucaaguccgaggacgcccaggggauggacaaccuggccugcgaggaccugaagcccgugagcgaggaggucguggagaaccccacgauccagaaggacgugcucgagugcaacgucaagaccaccgagguggugggcgacaucauccugaagccggccaacaacucccugaagaucaccgaggaggucgggcacacggaccucauggccgcguacguggacaacagcucccugaccaucaagaagcccaacgagcugagccgcgugcucggccugaagacccuggccacccacgggcucgccgccgucaacuccgugcccugggacacgaucgccaacuacgcgaagccguuccugaacaagguggucagcaccaccaccaacaucgugacgcgcugccugaaccgggugugcaccaacuacaugcccuacuucuucacccuccugcugcagcucugcaccuucacccgcuccacgaacagccggaucaaggccuccaugcccaccaccaucgccaagaacaccgucaagagcgugggcaaguucugccuggaggccagcuucaacuaccugaagucccccaacuucagcaagcucaucaacaucaucaucugguuccugcugcucuccgugugccugggcagccugaucuacuccacggccgcgcucgggguccugaugagcaaccugggcaugccguccuacugcaccggguaccgcgagggcuaccucaacagcaccaacgugaccaucgccacguacugcaccggcuccauccccugcagcgugugccuguccgggcuggacagccucgacaccuaccccucccuggagaccauccagaucacgaucagcuccuucaagugggaccugaccgccuucggccucgucgccgagugguuccuggccuacauccuguucacccgguucuucuacgugcucgggcuggcggccaucaugcagcuguucuucagcuacuucgccgugcacuucaucuccaacagcuggcucauguggcugaucaucaaccugguccagauggcccccaucuccgcgauggugcgcauguacaucuucuucgccagcuucuacuacguguggaagagcuacguccacgugguggacggcugcaacuccagcaccugcaugaugugcuacaagcggaaccgcgccacgcgggucgagugcaccaccaucgugaacgggguccgccgguccuucuacguguacgccaacggcggcaagggguucugcaagcugcacaacuggaacugcgugaacugcgacaccuucugcgccggcagcacguucaucuccgacgaggucgcgcgcgaccucagccugcaguucaagcggccgaucaaccccaccgaccaguccagcuacaucguggacuccgugaccgucaagaacgggagcauccaccuguacuucgacaaggccggccagaagaccuacgagcgccacucccucagccacuucgugaaccuggacaaccugcgggccaacaacacgaaggggucccuccccaucaacgugaucgucuucgacggcaagagcaagugcgaggaguccagcgccaaguccgccagcguguacuacucccagcugaugugccagcccauccugcuccuggaccaggcgcuggugagcgacgucggcgacagcgccgagguggccgugaagauguucgacgccuacgucaacaccuucuccagcaccuucaacgugccgauggagaagcucaagacccugguggccacggcggaggccgagcuggccaagaacgucucccucgacaacgugcugagcaccuucaucuccgccgcgcgccagggguucguggacagcgacgucgagaccaaggacgugguggagugccugaagcucucccaccagagcgacaucgaggucaccggcgacuccugcaacaacuacaugcugacguacaacaagguggagaacaugaccccccgggaccugggggccugcaucgacugcagcgcccgccacaucaacgcccagguggccaagucccacaacaucgcgcucaucuggaacgucaaggacuucaugagccuguccgagcagcugcggaagcagauccgcagcgccgccaagaagaacaaccuccccuucaagcugaccugcgccaccacgcgccagguggugaacgucgugaccaccaagaucgcccugaagggcgggugaggacuagucccuguucccagagcccacuuuuuuuucuuuuuuugaaauaaaauagccugucuuucagaucucaaaggcucuuuucagagccaccaaaaaaaaaaaaaaaaaaaaaaaaaaaaaaaaaaaaaaaaaaaaaaaaaaaaaaaaaaaaaaaaaaaaaaaaaaaaaaaaaaaaaaaaaaaaaaaaaaaaa

SEQ ID NO: 20154 - RNA, 6113 nt, Artificial Sequence
  SARS-CoV-2__MT263457.1__non-structural protein 3 (NSP3) mRNA gc
aggagagucccgcagucggcguccagcggcucugcuuguucgugugugugucguugcaggccuuauucaagcuuaccauggcccccaccaaggugaccuucggcgacgacacggucaucgaggugcagggguacaagagcgugaacaucaccuucgagcuggacgagcgcaucgacaagguccucaacgagaagugcuccgccuacaccguggagcugggcaccgaggugaacgaguucgcgugcgucguggccgacgccgugaucaagacgcugcagccggucagcgagcuccugaccccccuggggaucgaccucgacgagugguccauggccaccuacuaccuguucgacgagagcggcgaguucaagcuggccucccacauguacugcagcuucuacccccccgacgaggacgaggaggagggggacugcgaggaggaggaguucgagccguccacccaguacgaguacggcacggaggacgacuaccagggcaagccccucgaguucggggcgaccagcgccgcccugcagcccgaggaggagcaggaggaggacuggcuggacgacgacucccagcagaccgugggccagcaggacgggagcgaggacaaccagaccacgaccauccagaccaucguggagguccagccccagcucgagauggagcugaccccgguggugcagacgaucgaggucaacuccuucagcggcuaccugaagcucaccgacaacguguacaucaagaacgccgacaucguggaggaggcgaagaaggucaagcccaccgugguggucaacgccgccaacguguaccugaagcacgggggcggcguggccggggcccugaacaaggcgaccaacaacgccaugcaggucgaguccgacgacuacaucgccacgaacggcccccucaagguggggggcagcugcguccuguccggccacaaccuggccaagcacugccuccacgugguggggcccaacgucaacaagggcgaggacauccagcugcugaagagcgccuacgagaacuucaaccagcacgaggugcuccuggcgccgcugcucuccgccgggaucuucggcgccgaccccauccacagccugcgggugugcgucgacaccgugcgcaccaacguguaccuggccgucuucgacaagaaccucuacgacaagcugguguccagcuuccuggagaugaagagcgagaagcagguggagcagaagaucgccgagauccccaaggaggaggucaagcccuucaucaccgaguccaagccgagcguggagcagcggaagcaggacgacaagaagaucaaggcgugcguggaggaggucacgaccacccucgaggagaccaaguuccugacggagaaccugcuccuguacaucgacaucaacgggaaccugcaccccgacuccgccacccucgugagcgacaucgacaucaccuuccugaagaaggacgcccccuacaucgugggcgacgucgugcaggagggcgugcugaccgccgucgugauccccacgaagaaggccgggggcaccaccgagaugcucgcgaaggcccugcgcaaggugccgaccgacaacuacaucacgaccuaccccgggcagggccugaacggguacaccgucgaggaggccaagaccgugcucaagaagugcaaguccgccuucuacauccugcccagcaucaucuccaacgagaagcaggagauccugggcaccgugagcuggaaccuccgggagaugcuggcgcacgccgaggagacgcgcaagcugaugcccgucugcguggagaccaaggccaucguguccaccauccagcggaaguacaagggcaucaagauccaggagggggucguggacuacggcgcccgcuucuacuucuacaccagcaagacgaccguggccucccugaucaacacccucaacgaccugaacgagacccuggucacgaugccgcucggguacgugacccacggccugaaccuggaggaggcggcccgguacaugcgcagccucaaggugcccgccaccgucuccgugagcucccccgacgccgugaccgccuacaacggguaccugacgagcuccagcaagacccccgaggagcacuucaucgagaccaucucccuggcgggcagcuacaaggacuggagcuacuccggccagagcacccagcucgggaucgaguuccugaagcggggcgacaaguccgucuacuacacgagcaacccgaccaccuuccaccuggacggggaggugaucaccuucgacaaccucaagacgcugcugucccuccgcgaggugcggaccaucaaggucuucaccaccguggacaacaucaaccugcacacgcagguggucgacaugagcaugaccuacggccagcaguucggccccaccuaccuggacggggccgacgugaccaagaucaagccccacaacucccacgagggcaagacguucuacgugcucccgaacgacgacacccugcgcgucgaggccuucgaguacuaccacaccaccgaccccagcuuccuggggcgguacauguccgcccucaaccacacgaagaaguggaaguacccccaggugaacggccugaccagcaucaagugggccgacaacaacugcuaccuggcgaccgcccuccugacccugcagcagaucgagcucaaguucaaccccccggcccugcaggacgccuacuaccgcgcgcgggccggggaggccgccaacuucugcgcccugauccucgcguacugcaacaagacggugggcgagcugggcgacguccgcgagaccauguccuaccuguuccagcacgccaaccucgacagcugcaagcgggugcugaacgucgugugcaagaccugcgggcagcagcagaccacccugaagggcguggaggccgucauguacauggggacgcucuccuacgagcaguucaagaagggcgugcagauccccugcaccugcgggaagcaggccaccaaguaccuggugcagcaggagagccccuucgucaugauguccgcccccccggcgcaguacgagcugaagcacggcaccuucacgugcgccagcgaguacaccggcaacuaccagugcgggcacuacaagcacaucaccuccaaggagacccucuacugcaucgacggcgcccugcugacgaagagcagcgaguacaaggggcccaucaccgacguguucuacaaggagaacuccuacaccaccacgaucaagcccgugaccuacaagcucgacggcgucgugugcaccgagaucgaccccaagcuggacaacuacuacaagaaggacaacagcuacuucaccgagcagccgaucgaccuggugcccaaccagcccuaccccaacgccuccuucgacaacuucaaguucgucugcgacaacaucaaguucgccgacgaccucaaccagcugacgggguacaagaagccggcgagccgcgagcugaaggugaccuucuuccccgaccucaacggcgacguggucgccaucgacuacaagcacuacacccccuccuucaagaagggcgccaagcugcugcacaagcccaucguguggcacgugaacaacgccaccaacaaggcgacguacaagccgaacaccuggugcauccggugccucuggagcaccaagcccgucgagaccuccaacagcuucgacgugcugaaguccgaggacgcccaggggauggacaaccuggccugcgaggaccucaagcccgugagcgaggaggucguggagaaccccacgauccagaaggacgugcuggagugcaacgucaagaccaccgagguggugggcgacaucauccugaagccggccaacaacucccucaagaucaccgaggaggucgggcacacggaccugauggccgcguacguggacaacagcucccugaccaucaagaagcccaacgagcucagccgcgugcugggccugaagacccucgccacccacgggcuggccgccgucaacuccgugcccugggacacgaucgccaacuacgcgaagccguuccugaacaagguggucagcaccaccaccaacaucgugacgcgcugccucaaccgggugugcaccaacuacaugcccuacuucuucacccugcugcuccagcugugcaccuucacccgcuccacgaacagccggaucaaggccuccaugcccaccaccaucgccaagaacaccgucaagagcgugggcaaguucugccuggaggccagcuucaacuaccucaagucccccaacuucagcaagcugaucaacaucaucaucugguuccugcuccuguccgugugccugggcagccucaucuacuccacggccgcgcuggggguccugaugagcaaccucggcaugccguccuacugcaccggguaccgcgagggcuaccugaacagcaccaacgugaccaucgccacguacugcaccggcuccauccccugcagcgugugccuguccgggcucgacagccuggacaccuaccccucccuggagaccauccagaucacgaucagcuccuucaagugggaccucaccgccuucggccuggucgccgagugguuccuggccuacauccucuucacccgguucuucuacgugcuggggcuggcggccaucaugcagcucuucuucagcuacuucgccgugcacuucaucuccaacagcuggcugauguggcugaucaucaaccugguccagauggcccccaucuccgcgauggugcgcauguacaucuucuucgccagcuucuacuacguguggaagagcuacguccacgugguggacggcugcaacuccagcaccugcaugaugugcuacaagcggaaccgcgucacgcggguggagugcaccaccaucgucaacggggugcgccgguccuucuacguguacgccaacggcggcaagggguucugcaagcuccacaacuggaacugcgucaacugcgacaccuucugcgccggcagcacguucaucuccgacgagguggcccgcgaccugagccugcaguucaagcggccgaucaaccccaccgaccaguccagcuacaucguggacuccgucaccgugaagaacgggagcauccaccucuacuucgacaaggcgggccagaagaccuacgagcgccacucccugagccacuucgugaaccuggacaaccuccgggccaacaacacgaaggggucccugcccaucaacgucaucguguucgacggcaagagcaagugcgaggaguccagcgccaaguccgccagcguguacuacucccagcugaugugccagcccauccuccugcuggaccaggcccucgucagcgacgugggcgacagcgcggagguggccgucaagauguucgacgccuacgugaacaccuucuccagcaccuucaacgugccgauggagaagcugaagacccuggucgccacggccgaggcggagcucgccaagaacgugucccuggacaacgugcugagcaccuucaucuccgccgcccgccagggguucgucgacagcgacguggagaccaaggacguggucgagugccucaagcugucccaccagagcgacaucgaggugaccggcgacuccugcaacaacuacaugcugacguacaacaagguggagaacaugaccccccgggaccucggggcgugcaucgacugcagcgcccgccacaucaacgcccaggucgccaagucccacaacaucgcccugaucuggaacgugaaggacuucaugagccuguccgagcagcuccggaagcagauccgcagcgcggccaagaagaacaaccugcccuucaagcugaccugcgccaccacgcgccagguggucaacguggugaccaccaagaucgcccucaagggcgggugaggacuagucccuguucccagagcccacuuuuuuuucuuuuuuugaaauaaaauagccugucuuucagaucucaaaggcucuuuucagagccaccaaaaaaaaaaaaaaaaaaaaaaaaaaaaaaaaaaaaaaaaaaaaaaaaaaaaaaaaaaaaaaaaaaaaaaaaaaaaaaaaaaaaaaaaaaaaaaaaaaaaa

SEQ ID NO: 20155 - RNA, 6113 nt, Artificial Sequence
  SARS-CoV-2__MT163720.1__non-structural protein 3 (NSP3) mRNA gc
aggagagucccgcagucggcguccagcggcucugcuuguucgugugugugucguugcaggccuuauucaagcuuaccauggcccccaccaaggugaccuucggcgacgacacggucaucgaggugcagggguacaagagcgugaacaucaccuucgagcuggacgagcgcaucgacaagguccucaacgagaagugcuccgccuacaccguggagcugggcaccgaggugaacgaguucgcgugcgucguggccgacgccgugaucaagacgcugcagccggucagcgagcuccugaccccccuggggaucgaccucgacgagugguccauggccaccuacuaccuguucgacgagagcggcgaguucaagcuggccucccacauguacugcagcuucuacccccccgacgaggacgaggaggagggggacugcgaggaggaggaguucgagccguccacccaguacgaguacggcacggaggacgacuaccagggcaagccccucgaguucggggcgaccagcgccgcccugcagcccgaggaggagcaggaggaggacuggcuggacgacgacucccagcagaccgugggccagcaggacgggagcgaggacaaccagaccacgaccauccagaccaucguggagguccagccccagcucgagauggagcugaccccgguggugcagacgaucgaggucaacuccuucagcggcuaccugaagcucaccgacaacguguacaucaagaacgccgacaucguggacgaggcgaagaaggucaagcccaccgugguggucaacgccgccaacguguaccugaagcacgggggcggcguggccggggcccugaacaaggcgaccaacaacgccaugcaggucgaguccgacgacuacaucgccacgaacggcccccucaagguggggggcagcugcguccuguccggccacaaccuggccaagcacugccuccacgugguggggcccaacgucaacaagggcgaggacauccagcugcugaagagcgccuacgagaacuucaaccagcacgaggugcuccuggcgccgcugcucuccgccgggaucuucggcgccgaccccauccacagccugcgggugugcgucgacaccgugcgcaccaacguguaccuggccgucuucgacaagaaccucuacgacaagcugguguccagcuuccuggagaugaagagcgagaagcagguggagcagaagaucgccgagauccccaaggaggaggucaagcccuucaucaccgaguccaagccgagcguggagcagcggaagcaggacgacaagaagaucaaggcgugcguggaggaggucacgaccacccucgaggagaccaaguuccugacggagaaccugcuccuguacaucgacaucaacgggaaccugcaccccgacuccgccacccucgugagcgacaucgacaucaccuuccugaagaaggacgcccccuacaucgugggcgacgucgugcaggagggcgugcugaccgccgucgugauccccacgaagaaggccgggggcaccaccgagaugcucgcgaaggcccugcgcaaggugccgaccgacaacuacaucacgaccuaccccgggcagggccugaacggguacaccgucgaggaggccaagaccgugcucaagaagugcaaguccgccuucuacauccugcccagcaucaucuccaacgagaagcaggagauccugggcaccgugagcuggaaccuccgggagaugcuggcgcacgccgaggagacgcgcaagcugaugcccgucugcguggagaccaaggccaucguguccaccauccagcggaaguacaagggcaucaagauccaggagggggucguggacuacggcgcccgcuucuacuucuacaccagcaagacgaccguggccucccugaucaacacccucaacgaccugaacgagacccuggucacgaugccgcucggguacgugacccacggccugaaccuggaggaggcggcccgguacaugcgcagccucaaggugcccgccaccgucuccgugagcucccccgacgccgugaccgccuacaacggguaccugacgagcuccagcaagacccccgaggagcacuucaucgagaccaucucccuggcgggcagcuacaaggacuggagcuacuccggccagagcacccagcucgggaucgaguuccugaagcggggcgacaaguccgucuacuacacgagcaacccgaccaccuuccaccuggacggggaggugaucaccuucgacaaccucaagacgcugcugucccuccgcgaggugcggaccaucaaggucuucaccaccguggacaacaucaaccugcacacgcagguggucgacaugagcaugaccuacggccagcaguucggccccaccuaccuggacggggccgacgugaccaagaucaagccccacaacucccacgagggcaagacguucuacgugcucccgaacgacgacacccugcgcgucgaggccuucgaguacuaccacaccaccgaccccagcuuccuggggcgguacauguccgcccucaaccacacgaagaaguggaaguacccccaggugaacggccugaccagcaucaagugggccgacaacaacugcuaccuggcgaccgcccuccugacccugcagcagaucgagcucaaguucaaccccccggcccugcaggacgccuacuaccgcgcgcgggccggggaggccgccaacuucugcgcccugauccucgcguacugcaacaagacggugggcgagcugggcgacguccgcgagaccauguccuaccuguuccagcacgccaaccucgacagcugcaagcgggugcugaacgucgugugcaagaccugcgggcagcagcagaccacccugaagggcguggaggccgucauguacauggggacgcucuccuacgagcaguucaagaagggcgugcagauccccugcaccugcgggaagcaggccaccaaguaccuggugcagcaggagagccccuucgucaugauguccgcccccccggcgcaguacgagcugaagcacggcaccuucacgugcgccagcgaguacaccggcaacuaccagugcgggcacuacaagcacaucaucuccaaggagacccucuacugcaucgacggcgcccugcugaccaagagcagcgaguacaaggggcccaucacggacguguucuacaaggagaacuccuacaccaccaccaucaagcccgugacguacaagcucgacggcgucgugugcaccgagaucgaccccaagcuggacaacuacuacaagaaggacaacagcuacuucaccgagcagccgaucgaccuggugcccaaccagcccuaccccaacgccuccuucgacaacuucaaguucgucugcgacaacaucaaguucgccgacgaccucaaccagcugaccggguacaagaagccggcgagccgcgagcugaaggugacguucuuccccgaccucaacggcgacguggucgccaucgacuacaagcacuacacccccuccuucaagaagggcgccaagcugcugcacaagcccaucguguggcacgugaacaacgccaccaacaaggcgaccuacaagccgaacacguggugcauccggugccucuggagcaccaagcccgucgagaccuccaacagcuucgacgugcugaaguccgaggacgcccaggggauggacaaccuggccugcgaggaccucaagcccgugagcgaggaggucguggagaaccccaccauccagaaggacgugcuggagugcaacgucaagacgaccgagguggugggcgacaucauccugaagccggccaacaacucccucaagaucaccgaggaggucgggcacaccgaccugauggccgcguacguggacaacagcucccugacgaucaagaagcccaacgagcucagccgcgugcugggccugaagacccucgccacccacgggcuggccgccgucaacuccgugcccugggacaccaucgccaacuacgcgaagccguuccugaacaagguggucagcacgaccaccaacaucgugacccgcugccucaaccgggugugcacgaacuacaugcccuacuucuucacccugcugcuccagcugugcaccuucacccgcuccaccaacagccggaucaaggccuccaugcccacgaccaucgccaagaacaccgucaagagcgugggcaaguucugccuggaggccagcuucaacuaccucaagucccccaacuucagcaagcugaucaacaucaucaucugguuccugcuccuguccgugugccugggcagccucaucuacuccaccgccgcgcuggggguccugaugagcaaccucggcaugccguccuacugcacgggguaccgcgagggcuaccugaacagcaccaacgugaccaucgccaccuacugcacgggcuccauccccugcagcgugugccuguccgggcucgacagccuggacaccuaccccucccuggagaccauccagaucaccaucagcuccuucaagugggaccucacggccuucggccuggucgccgagugguuccuggccuacauccucuucacccgguucuucuacgugcuggggcuggcggccaucaugcagcucuucuucagcuacuucgccgugcacuucaucuccaacagcuggcugauguggcugaucaucaaccugguccagauggcccccaucuccgcgauggugcgcauguacaucuucuucgccagcuucuacuacguguggaagagcuacguccacgugguggacggcugcaacuccagcaccugcaugaugugcuacaagcggaaccgcgccacccgggucgagugcacgaccaucgugaacgggguccgccgguccuucuacguguacgccaacggcggcaagggguucugcaagcuccacaacuggaacugcgugaacugcgacaccuucugcgccggcagcaccuucaucuccgacgaggucgcgcgcgaccugagccugcaguucaagcggccgaucaaccccacggaccaguccagcuacaucguggacuccgugaccgucaagaacgggagcauccaccucuacuucgacaaggccggccagaagaccuacgagcgccacucccugagccacuucgugaaccuggacaaccuccgggccaacaacaccaaggggucccugcccaucaacgugaucgucuucgacggcaagagcaagugcgaggaguccagcgccaaguccgccagcguguacuacucccagcugaugugccagcccauccuccugcuggaccaggcgcucgugagcgacgucggcgacagcgccgagguggccgugaagauguucgacgccuacgucaacacguucuccagcaccuucaacgugccgauggagaagcugaagacccugguggccaccgcggaggccgagcucgccaagaacgucucccuggacaacgugcugagcacguucaucuccgccgcgcgccagggguucguggacagcgacgucgagaccaaggacgugguggagugccucaagcugucccaccagagcgacaucgaggucaccggcgacuccugcaacaacuacaugcugaccuacaacaagguggagaacaugacgccccgggaccucggggccugcaucgacugcagcgcccgccacaucaacgcccagguggccaagucccacaacaucgcgcugaucuggaacgucaaggacuucaugagccuguccgagcagcuccggaagcagauccgcagcgccgccaagaagaacaaccugcccuucaagcugaccugcgccaccacccgccagguggugaacgucgugacgaccaagaucgcccucaagggcgggugaggacuagucccuguucccagagcccacuuuuuuuucuuuuuuugaaauaaaauagccugucuuucagaucucaaaggcucuuuucagagccaccaaaaaaaaaaaaaaaaaaaaaaaaaaaaaaaaaaaaaaaaaaaaaaaaaaaaaaaaaaaaaaaaaaaaaaaaaaaaaaaaaaaaaaaaaaaaaaaaaaaaa

SEQ ID NO: 20156 - RNA, 1799 nt, Artificial Sequence
  MERS-CoV/MERS-CoV-Jeddah-human-1__KF958702.1__non-structural protein 4 (NSP4) mRNA gc
aggagagucccgcagucggcguccagcggcucugcuuguucgugugugugucguugcaggccuuauucaagcuuaccauggccagcaccugguucaacgcccugcgcgacuucacccucaagggcuacgugcuggcgacgaucaucgucuuccugugcgccgugcucauguaccugugccugcccaccuucuccauggugccggucgaguucuacgaggaccggauccucgacuucaaggugcuggacaacgggaucauccgcgacgugaaccccgacgacaagugcuucgccaacaagcaccggagcuucacccagugguaccacgagcacgucggcgggguguacgacaacuccaucacgugcccccugaccguggccgucaucgccggcguggcgggggcccgcauccccgacgugccgaccacccucgccugggucaacaaccagaucaucuucuucgugagccggguguucgccaacaccggcuccgucugcuacacgcccaucgacgagauccccuacaagagcuucuccgacagcggcugcauccugcccuccgagugcaccauguuccgcgacgcggaggggcggaugaccccguacugccacgaccccaccgugcugcccggcgccuucgccuacagccagaugcgcccccacgugcgguacgaccucuacgacgggaacauguucaucaaguucccggaggucguguucgaguccacgcugcgcaucacccggacccugagcacccaguacugccgcuucggcuccugcgaguacgcccaggagggggugugcaucacgaccaacggcagcugggccaucuucaacgaccaccaccucaaccggcccggcgucuacugcggguccgacuucaucgacaucgugcgccggcuggcggugagccuguuccagcccaucaccuacuuccagcucaccacgucccugguccugggcaucgggcucugcgccuuccugacccuccuguucuacuacaucaacaaggugaagcgcgccuucgccgacuacacccagugcgccgucaucgcggugguggccgccguccugaacagccugugcaucugcuucguggccuccaucccccucugcaucgugccguacaccgcccuguacuacuacgcgacguucuacuucaccaacgagcccgccuucaucaugcacgucagcugguacaucauguucggccccaucgugcccaucuggaugaccugcguguacaccgucgccaugugcuuccggcacuucuucugggugcuggccuacuucagcaagaagcacguggaggucuucacggacggcaagcucaacugcuccuuccaggacgccgcgagcaacaucuucgugaucaacaaggacaccuacgccgcccugcgcaacucccugaccaacgacgccuacagccgguuccucgggcuguucaacaaguacaaguacuucuccggcgcgauggagaccgccgccuaccgcgaggccgccgcgugccaccuggccaaggcccuccagacguacagcgagaccggguccgaccugcuguaccagccgcccaacugcagcaucaccuccggcgugcuccagugaggacuagucccuguucccagagcccacuuuuuuuucuuuuuuugaaauaaaauagccugucuuucagaucucaaaggcucuuuucagagccaccaaaaaaaaaaaaaaaaaaaaaaaaaaaaaaaaaaaaaaaaaaaaaaaaaaaaaaaaaaaaaaaaaaaaaaaaaaaaaaaaaaaaaaaaaaaaaaaaaaaaa

SEQ ID NO: 20157 - RNA, 1799 nt, Artificial Sequence
  MERS-CoV/Al-Hasa_4_2013__KF186564.1__non-structural protein 4 (NSP4) mRNA gc
aggagagucccgcagucggcguccagcggcucugcuuguucgugugugugucguugcaggccuuauucaagcuuaccauggcccccaccugguucaacgugcugcgcgacuucacccucaagggcuacguccuggccacgaucaucguguuccugugcgcggugcucauguaccugugccugcccaccuucagcaugguccccguggaguucuacgaggaccggauccucgacuucaaggugcuggacaacgggaucauccgcgacgucaaccccgacgacaagugcuucgccaacaagcaccgguccuucacccagugguaccacgagcacgugggcgggguguacgacaacagcaucacgugcccccugaccgucgccgugaucgccggcguggccggggcgcgcaucccggacguccccaccacccucgccugggugaacaaccagaucaucuucuucgugucccgggucuucgccaacaccggcagcgugugcuacacgcccaucgacgagauccccuacaaguccuucagcgacuccggcugcauccugccgagcgagugcaccauguuccgcgacgccgaggggcggaugacccccuacugccacgaccccaccgugcugcccggcgcguucgccuacucccagaugcgcccgcacguccgguacgaccucuacgacgggaacauguucaucaaguuccccgaggugguguucgagagcacgcugcgcaucacccggacccuguccacccaguacugccgcuucggcagcugcgaguacgcccaggagggggucugcaucacgaccaacggcuccugggccaucuucaacgaccaccaccucaaccggcccggcguguacugcgggagcgacuucaucgacaucgugcgccggcuggccgucucccuguuccagcccaucaccuacuuccagcucaccacgagccuggugcugggcaucgggcucugcgcguuccugacccuccuguucuacuacaucaacaaggucaagcgcgccuucgccgacuacacccagugcgccgugaucgccguggucgcggccgugcugaacucccugugcaucugcuucguggccagcaucccgcucugcaucguccccuacaccgcccuguacuacuacgccacguucuacuucaccaacgagcccgcguucaucaugcacguguccugguacaucauguucggccccaucgugccgaucuggaugaccugcgucuacaccguggccaugugcuuccggcacuucuucugggugcuggccuacuucagcaagaagcacgucgagguguucacggacggcaagcucaacugcagcuuccaggacgccgccuccaacaucuucgugaucaacaaggacaccuacgcggcccugcgcaacagccugaccaacgacgccuacucccgguuccucgggcuguucaacaaguacaaguacuucagcggcgccauggagaccgcggccuaccgcgaggccgccgccugccaccuggcgaaggcccuccagacguacuccgagaccgggagcgaccugcuguaccagccgcccaacugcuccaucaccagcggcguccuccagugaggacuagucccuguucccagagcccacuuuuuuuucuuuuuuugaaauaaaauagccugucuuucagaucucaaaggcucuuuucagagccaccaaaaaaaaaaaaaaaaaaaaaaaaaaaaaaaaaaaaaaaaaaaaaaaaaaaaaaaaaaaaaaaaaaaaaaaaaaaaaaaaaaaaaaaaaaaaaaaaaaaaa

SEQ ID NO: 20158 - RNA, 1799 nt, Artificial Sequence
  MERS-CoV/Riyadh_14_2013__KJ156934.1__non-structural protein 4 (NSP4) mRNA gc
aggagagucccgcagucggcguccagcggcucugcuuguucgugugugugucguugcaggccuuauucaagcuuaccauggcccccaccugguucaacgcccugcgcgacuucacccucaagggcuacgugcuggcgacgaucaucgucuuccugugcgccgugcucauguaccugugccugcccaccuucagcauggugcccgucgaguucuacgaggaccggauccucgacuucaaggugcuggacaacgggaucauccgcgacgugaaccccgacgacaagugcuucgccaacaagcaccgguccuucacccagugguaccacgagcacgucggcgggguguacgacaacagcaucacgugcccccugaccguggccgucaucgccggcguggcgggggcccgcaucccggacgugcccaccacccucgccugggucaacaaccagaucaucuucuucgugucccggguguucgccaacaccggcagcgucugcuacacgcccaucgacgagauccccuacaaguccuucagcgacuccggcugcauccugccgagcgagugcaccauguuccgcgacgcggaggggcggaugacccccuacugccacgaccccaccgugcugcccggcgccuucgccuacucccagaugcgcccgcacgugcgguacgaccucuacgacgggaacauguucaucaaguuccccgaggucguguucgagagcacgcugcgcaucacccggacccuguccacccaguacugccgcuucggcagcugcgaguacgcccaggagggggugugcaucacgaccaacggcuccugggccaucuucaacgaccaccaccucaaccggcccggcgucuacugcgggagcgacuucaucgacaucgugcgccggcuggcggugucccuguuccagcccaucaccuacuuccagcucaccacgagccugguccugggcaucgggcucugcgccuuccugacccuccuguucuacuacaucaacaaggugaagcgcgccuucgccgacuacacccagugcgccgucaucgcggugguggccgccguccugaacucccugugcaucugcuucguggccagcaucccgcucugcaucgugcccuacaccgcccuguacuacuacgcgacguucuacuucaccaacgagcccgccuucaucaugcacgucuccugguacaucauguucggccccaucgugccgaucuggaugaccugcguguacaccgucgccaugugcuuccggcacuucuucugggugcuggccuacuucagcaagaagcacguggaggucuucacggacggcaagcucaacugcagcuuccaggacgccgcguccaacaucuucgugaucaacaaggacaccuacgccgcccugcgcaacagccugaccaacgacgccuacucccgguuccucgggcuguucaacaaguacaaguacuucagcggcgcgauggagaccgccgccuaccgcgaggccgccgcgugccaccuggccaaggcccuccagacguacuccgagaccgggagcgaccugcuguaccagccgcccaacugcuccaucaccagcggcgugcuccagugaggacuagucccuguucccagagcccacuuuuuuuucuuuuuuugaaauaaaauagccugucuuucagaucucaaaggcucuuuucagagccaccaaaaaaaaaaaaaaaaaaaaaaaaaaaaaaaaaaaaaaaaaaaaaaaaaaaaaaaaaaaaaaaaaaaaaaaaaaaaaaaaaaaaaaaaaaaaaaaaaaaaa

SEQ ID NO: 20159 - RNA, 1799 nt, Artificial Sequence; identical to SEQ ID NO: 20158
  MERS-CoV/England 1__NC_038294.1__non-structural protein 4 (NSP4) mRNA gc

SEQ ID NO: 20160 - RNA, 1778 nt, Artificial Sequence
  SARS-CoV/Tor2__NC_004718.3__non-structural protein 4 (NSP4) mRNA gc
aggagagucccgcagucggcguccagcggcucugcuuguucgugugugugucguugcaggccuuauucaagcuuaccaugaagaucgugagcacgugcuucaagcugaugcucaaggccacccugcugugcguccucgccgcgcuggugugcuacaucgugaugcccguccacacccuguccauccacgacggcuacaccaacgagaucaucggguacaaggccauccaggacggcgugacccgcgacaucaucagcaccgacgacugcuucgccaacaagcacgccggguucgacgccugguucucccagcggggcgggagcuacaagaacgacaaguccugcccgguggucgcggccaucaucacgcgcgagaucggcuucaucgugcccggccuccccgggaccgugcugcgggccaucaacggcgacuuccugcacuuccucccccgcgucuucagcgccguggggaacaucugcuacaccccguccaagcugaucgaguacagcgacuucgcgaccuccgccugcgugcuggccgccgagugcacgaucuucaaggacgccaugggcaagcccguccccuacugcuacgacaccaaccuccuggaggggagcaucuccuacagcgagcugcggcccgacacccgcuacgugcucauggacggcuccaucauccaguucccgaacaccuaccuggagggcagcgugcgggucgugacgaccuucgacgcggaguacugccgccacgggaccugcgagcgguccgaggugggcaucugccugagcaccuccgggcgcuggguccucaacaacgagcacuaccgggcccugagcggcguguucugcggcguggacgccaugaaccugaucgccaacaucuucacgccccucguccagcccgugggggcccuggacguguccgcgagcgucguggccggcgggaucaucgccauccuggugaccugcgccgccuacuacuucaugaaguuccgccgggucuucggcgaguacaaccacguggucgcggccaacgcccuccuguuccugaugagcuucaccauccucugccuggugcccgccuacuccuuccugccggggguguacagcgucuucuaccucuaccugaccuucuacuucacgaacgacguguccuuccuggcccaccuccagugguucgcgauguucagccccaucgugcccuucuggaucaccgccaucuacgucuucugcaucucccugaagcacugccacugguucuucaacaacuaccugcgcaagcgggugauguucaacggcgugaccuucagcaccuucgaggaggccgcccucugcacguuccugcugaacaaggagauguaccucaagcugcgcuccgagacccugcucccccugacccaguacaaccgguaccuggcgcucuacaacaaguacaaguacuucagcggcgcccuggacaccacguccuaccgcgaggccgccugcugccaccuggccaaggcgcugaacgacuucagcaacuccggggccgacguccucuaccagccgccccagaccagcaucaccuccgccgugcugcagugaggacuagucccuguucccagagcccacuuuuuuuucuuuuuuugaaauaaaauagccugucuuucagaucucaaaggcucuuuucagagccaccaaaaaaaaaaaaaaaaaaaaaaaaaaaaaaaaaaaaaaaaaaaaaaaaaaaaaaaaaaaaaaaaaaaaaaaaaaaaaaaaaaaaaaaaaaaaaaaaaaaaa

SEQ ID NO: 20161 - RNA, 1766 nt, Artificial Sequence
  HCoV/OC43__NC_006213.1__non-structural protein 4 (NSP4) mRNA gc
aggagagucccgcagucggcguccagcggcucugcuuguucgugugugugucguugcaggccuuauucaagcuuaccauggccguguucagcuacuucgucuacgugugcuucgugcugucccucgucugcuucaucggccuguggugccugaugcccaccuacaccgugcacaagagcgacuuccagcuccccguguacgccuccuacaagguccuggacaacggggugauccgcgacgugagcgucgaggacgugugcuucgcgaacaaguucgagcaguucgaccagugguacgaguccacguucggccugagcuacuacuccaacagcauggccugccccaucguggucgccgugaucgaccaggacuucggguccaccguguucaacguccccaccaaggugcuccgguacggcuaccacgugcugcacuucaucacccacgcccugagcgccgacgggguccagugcuacacgccccacucccagaucagcuacuccaacuucuacgcgagcggcugcgugcucuccagcgccugcaccauguucaccauggccgacggcuccccgcagcccuacugcuacaccgaggggcugaugcagaacgccagccuguacuccagccucgugccccacguccgcuacaaccuggcgaacgccaagggcuucauccgguuccccgaggugcugcgcgaggggcucgugcggaucguccgcacgcggagcauguccuacugccgcgugggccugugcgaggaggccgacgaggggaucugcuucaacuucaacggcagcuggguccugaacaacgacuacuaccggucccucccgggcaccuucugcgggcgcgacguguucgaccugaucuaccagcuguucaagggccucgcccagcccguggacuuccuggcccugaccgcgagcuccaucgccggggccauccucgccgucaucguggugcuggucuucuacuaccugaucaagcucaagcgggccuucggcgacuacaccagcgugguguucgucaacgugaucguguggugcgucaacuucaugaugcuguucguguuccagguguaccccauccuguccugcgucuacgcgaucugcuacuucuacgccacgcucuacuuccccagcgagaucuccgugaucaugcaccuccaguggcuggugauguacggcaccaucaugccgcugugguucugccugcuguacaucgccgucguggugagcaaccacgccuucugggucuucuccuacugccgcaagcucgggaccagcgugcgguccgacggcaccuucgaggagauggcccugacgaccuucaugaucaccaaggacagcuacugcaagcugaagaacucccucagcgacguggcguucaaccgcuaccugucccuguacaacaaguaccgguacuacagcgggaagauggacaccgccgccuaccgcgaggccgccugcucccagcucgcgaaggccauggacacguucaccaacaacaacggcagcgacguccuguaccagccgcccaccgccagcguguccaccagcuuccugcagugaggacuagucccuguucccagagcccacuuuuuuuucuuuuuuugaaauaaaauagccugucuuucagaucucaaaggcucuuuucagagccaccaaaaaaaaaaaaaaaaaaaaaaaaaaaaaaaaaaaaaaaaaaaaaaaaaaaaaaaaaaaaaaaaaaaaaaaaaaaaaaaaaaaaaaaaaaaaaaaaaaaaa

SEQ ID NO: 20162 - RNA, 1766 nt, Artificial Sequence
  HCoV/HKU1__NC_006577.2__non-structural protein 4 (NSP4) mRNA gc
aggagagucccgcagucggcguccagcggcucugcuuguucgugugugugucguugcaggccuuauucaagcuuaccauggugguccugagcaaccuccuguacauccuguucuucgugucccucaucugcuucauccugcugugggcccuccugcccaccuacagcguguacaaguccgacauccaccuccccgccuacgcgagcuucaaggucaucgacaacggcguggugcgcgacaucuccgucaacgaccugugcuucgccaacaaguucuuccaguucgaccagugguacgagagcaccuucggguccguguacuaccacaacagcauggacugccccaucguggucgccgugauggacgaggacaucggcuccacgauguucaacgugcccaccaagguccugcggcacggguuccacgugcugcacuuccucaccuacgccuucgccagcgacuccgugcagugcuacacgccccacauccagaucagcuacaacgacuucuacgcguccggcugcguccugagcucccugugcaccauguucaagcgcggggacggcaccccgcaccccuacugcuacagcgacggcgugaugaagaacgccucccucuacaccagccuggugccccacacccgguacucccuggccaacagcaacggguucauccgcuuccccgacgucaucagcgagggcaucgugcggaucgugcgcacgcgguccaugaccuacugccgcgucggggccugcgaguacgcggaggagggcaucugcuucaacuucaacagcuccugggugcucaacaacgacuacuaccggagcaugccggggaccuucugcggccgcgaccuguucgaccuguucuaccaguucuucuccagccucauccggcccaucgacuucuucucccugaccgccagcuccaucuucggcgccauccuggccaucguggucgugcucgucuucuacuaccugaucaagcugaagcgcgccuucggggacuacacgagcgugguggucaucaacgugguggucuggugcaucaacuuccucaugcuguucguguuccagguguaccccaucugcgcgugcgucuacgccugcuucuacuucuacgugacccuguacuuccccuccgagaucagcgugaucaugcaccuccaguggaucgucauguacggcgccaucaugccguucugguucugcgugaccuacguggccauggucaucgccaaccacgugcuguggcuguucuccuacugccggaagaucggggugaacgucugcagcgacuccaccuucgaggagacgagccucaccaccuucaugaucaccaaggacuccuacugccgccugaagaacagcguguccgacguggcguacaaccgguaccugagccucuacaacaaguaccgcuacuacagcggcaagauggacacggccgccuaccgggaggccgccugcucccagcuggcgaaggccauggagaccuucaaccacaacaacggcaacgacguccuguaccagccgcccaccgccagcguguccaccagcuuccuccagugaggacuagucccuguucccagagcccacuuuuuuuucuuuuuuugaaauaaaauagccugucuuucagaucucaaaggcucuuuucagagccaccaaaaaaaaaaaaaaaaaaaaaaaaaaaaaaaaaaaaaaaaaaaaaaaaaaaaaaaaaaaaaaaaaaaaaaaaaaaaaaaaaaaaaaaaaaaaaaaaaaaaa

SEQ ID NO: 20163 - RNA, 1721 nt, Artificial Sequence
  HCoV/229E/BN1/GER/2015__KU291448.1__non-structural protein 4 (NSP4) mRNA gc
aggagagucccgcagucggcguccagcggcucugcuuguucgugugugugucguugcaggccuuauucaagcuuaccaugggcgacgccgggcacagccugaccuggcucuggcugcugugcggccucgugugccugauccaguucuaccugugcuucuucaugcccuacuucaugcacgacgucguguccagcuucgagggguacgacuucaaguacaucgagaacggccagcucaagaacuucgaggccccgcugaagugcgugcgcaacgucuucgagaacuucgaggacuggcacuacgcgaaguucggguucacgccccugaacaagcaguccugccccaucguggugggcgucagcgagaucgugaacacgguggccggcauccccuccaacgucuaccucguggggaagacccugaucuucacccugcaggccgccuucggcaacgccggggugugcuacgacaucuucggcgucaccacgccggagaagugcaucuucaccagcgcgugcacccggcucgaggggcugggcggcaacaacguguacugcuacaacaccgagcugauggaggggucccuccccuacagcuccauccaggccaacgccuacuacaaguacgacaacggcaacuucaucaagcugcccgaggugaucgcccagggguucggcuuccgcaccguccggaccaucgcgaccaaguacugccgcgugggcgagugcguggacagcaacgccggggucugcuucggcuucgacaagugguucgugaacgacgggcggguggccaacggcuacgucugcgggaccggccuguggaaccucguguucaacauccuguccauguucagcuccagcuucuccguggccgccaugagcggccagauccugcucaacugcgcgcugggggccuucgccaucuucugcugcuuccuggucacgaaguuccgccggauguucggcgaccucuccgugggggucugcaccgugguggucgccgugcugcugaacaacgugagcuacaucgucacccagaaccucgugaccaugaucgccuacgcgauccuguacuucuucgccacgcgcucccugcgguacgccuggaucuggugcgccgccuaccucaucgcguacaucagcuucgcccccugguggcugugcgccugguacuuccuggccaugcucaccggccugcugcccagccuccugaagcugaagguguccaccaaccucuucgagggggacaaguucgucggcaccuucgagagcgccgcggccggcacguucgugaucgacauccgcuccuacgagaagcuggccaacagcaucucccccgagaagcucaagagcuacgccgcguccuacaaccgguacaaguacuacagcgggaacgccaacgaggccgacuaccgcugcgccugcuacgccuaccuggcgaaggccaugcuggacuucucccgggaccacaacgacauccuguacaccccgcccaccgugagcuacggcuccacccuccagugaggacuagucccuguucccagagcccacuuuuuuuucuuuuuuugaaauaaaauagccugucuuucagaucucaaaggcucuuuucagagccaccaaaaaaaaaaaaaaaaaaaaaaaaaaaaaaaaaaaaaaaaaaaaaaaaaaaaaaaaaaaaaaaaaaaaaaaaaaaaaaaaaaaaaaaaaaaaaaaaaaaaa

SEQ ID NO: 20164 - RNA, 1709 nt, Artificial Sequence
  HCoV/NL63/RPTEC/2004__JX504050.1__non-structural protein 4 (NSP4) mRNA gc
aggagagucccgcagucggcguccagcggcucugcuuguucgugugugugucguugcaggccuuauucaagcuuaccaugggcuucaagcgcaccuacaacuuccugugguacgugugccucuucgucguggcccuguucaucggggugagcuucaucgacuacaccacgaccgucaccuccuuccacggcuacgacuucaaguacaucgagaacgggcagcugaagguguucgaggcgccccuccacugcgugcggaacgucuucgacaacuucaaccaguggcacgaggccaaguucggcguggugaccacgaacagcgacaagugccccaucgucguggggguguccgagcgcaucaacgucgugcccggcgugcccaccaacgucuaccuggugggcaagacccugguguucacccuccaggccgccuucgggaacacgggcgucugcuacgacuucgacggggugaccaccagcgacaagugcaucuucaacuccgccugcacccggcuggagggccucgggggcgacaacguguacugcuacaacacgggccucaucgaggggagcaagcccuacuccacccugcagccgaacgccuacuacaaguacgacgcgaagaacuacguccgcuuccccgagauccuggcccggggcuucgggcuccgcaccauccggacccuggccacgcgcuacugccgggugggcgagugccgcgacagccacaagggcgugugcuucggguucgacaagugguacgucaacgacggccggguggacgacggguacaucugcggcgacgggcugaucgaccuccuggucaacgugcuguccaucuucagcuccagcuucuccguggucgccaugagcggccacaugcuguucaacuuccuguucgcggccuucaucaccuuccugugcuuccucgugaccaaguucaagcgcguguucggcgaccuguccuacggggucuucaccguggugugcgccacgcugaucaacaacaucagcuacgucgugacccagaaccucuucuucaugcugcuguacgccauccucuacuucguguucacccggaccguccgcuacgccuggaucuggcacaucgcguacaucguggccuacuuccugcugauccccugguggcuccugacgugguucuccuucgccgccuuccuggagcuccugcccaacguguucaagcugaagaucagcacccagcuguucgagggcgacaaguucaucgggaccuucgaguccgccgcggccggcaccuucguccucgacaugcggagcuacgagcgccugaucaacacgaucagcccggagaagcucaagaacuacgccgccuccuacaacaaguacaaguacuacagcggguccgccagcgaggcggacuaccggugcgccugcuacgcccaccuggccaaggccaugcuggacuacgcgaaggaccacaacgacaugcucuacuccccgcccaccaucagcuacaacuccacccugcagugaggacuagucccuguucccagagcccacuuuuuuuucuuuuuuugaaauaaaauagccugucuuucagaucucaaaggcucuuuucagagccaccaaaaaaaaaaaaaaaaaaaaaaaaaaaaaaaaaaaaaaaaaaaaaaaaaaaaaaaaaaaaaaaaaaaaaaaaaaaaaaaaaaaaaaaaaaaaaaaaaaaaa

SEQ ID NO: 20165 - RNA, 1778 nt, Artificial Sequence
  Bat SARS-like CoV/WIV1__KF367457.1__non-structural protein 4 (NSP4) mRNA gc
aggagagucccgcagucggcguccagcggcucugcuuguucgugugugugucguugcaggccuuauucaagcuuaccaugaagaucgugagcaccugguucaagcugaugcucaaggccacccugcugugcgucaucgccacgcucgugugcuacaucgugaugcccguccacacccuguccgugcacgacggcuacaccaacgagaucaucggguacaaggcgauccaggacggcgugacccgcgacaucgucagcacggacgacugcuucgccaacaagcacgccggguucgacuccuggcugagccagcggggcggguccuacaagaacgacaagagcugccccgugguggccgccaucaucacccgcgagaucggcuucaucguccccggccuccccgggaccgugcugcgggcgaucaacggcgacuuccugcacuuccucccccgcguguucuccgccgucgggaacaucugcuacaccccgagcaagcugaucgaguacuccgacuucgccacgagcgccugcgugcuggcggccgagugcaccaucuucaaggacgccaugggcaagcccgugcccuacugcuacgacaccaaccuccuggagggguccaucagcuacuccgagcugcggcccgacacccgcuacguccucauggacggcagcaucauccaguucccgaacacguaccuggagggcuccgugcggguggucaccaccuucgacgccgaguacugccgccacgggaccugcgagcggagcgaggccggcaucugccuguccacgagcgggcgcugggugcucaacaacgagcacuaccgggcgcugcccggcguguucugcggcgucgacgccaugaaccugaucgccaacaucuucacgccccucgugcagcccgugggggcccuggacgucuccgccagcguggucgcgggcgggaucaucgccauccuggugaccugcgccgccuacuacuucaugaaguuccgccgggccuucggcgaguacaaccacguggucgcggccaacgcccuccuguuccugaugagcuucaccauccucugccuggccccggccuacuccuuccugcccgggguguacagcguguucuaccucuaccugaccuucuacuucaccaacgacgucuccuuccuggcgcaccuccagugguucgccauguucagccccaucgugcccuucuggaucaccgccaucuacguguucugcaucucccugaagcacugccacugguucuucaacaacuaccugcgcaagcgggucauguucaacggcgugaccuucagcacguucgaggaggccgcgcucugcaccuuccugcugaacaaggagauguaccucaagcugcgcuccgagacccugcucccgcugacccaguacaaccgguaccuggcccucuacaacaaguacaaguacuucagcggcgcccuggacacgaccuccuaccgcgaggccgccugcugccaccuggcgaaggcccugaacgacuucagcaacuccggggccgacgugcucuaccagccgccccagaccagcaucaccuccgccguccugcagugaggacuagucccuguucccagagcccacuuuuuuuucuuuuuuugaaauaaaauagccugucuuucagaucucaaaggcucuuuucagagccaccaaaaaaaaaaaaaaaaaaaaaaaaaaaaaaaaaaaaaaaaaaaaaaaaaaaaaaaaaaaaaaaaaaaaaaaaaaaaaaaaaaaaaaaaaaaaaaaaaaaaa

SEQ ID NO: 20166 - RNA, 1760 nt, Artificial Sequence
  BatCoV/HKU9-1 BF_005I__NC_009021.1__non-structural protein 4 (NSP4) mRNA gc
aggagagucccgcagucggcguccagcggcucugcuuguucgugugugugucguugcaggccuuauucaagcuuaccaugggccaccgccggaucgugagcuggcgccggguccugauccacguguucaugcuccuggugguccugaacccccagugguucaccccgugguacaucaugcgccccaucgaguacaacgugguggacuucaaggucaucgacaacgccgugauccgggacaucaccuccgccgaccagugcuucgcgaacaaguucagcgccuucgagaacugguacuccaaccgcuacgggagcuacgugaacucccggggcugccccauggucguggggguggucagcgacaucgugggcucccucgugcccgggcugccggcccgcuuccugcgggucggcacgacccuccugccccuggugaacuacggccucggggccgugggcagcgucugcuacaccccgcacuacgccaucaacuacgacguguucgacaccuccgcgugcgugcuggccgccacgugcacccuguucagcuccgccagcggggagcgcaugcccuacugcgcggacgccgcccucauccagaacgccucccgguacgacaugcugaagccccacgucauguaccccuucuacgagcacagcggcuacauccgcuuccccgaggugaucuccgccggggugcacaucguccggaccauggcgauggaguacugcaaggugggccgcugcgacgucagcgaggccggccugugcaugucccuccagccccgguggguggugaacaacgccuacuuccgccagcagagcggggucuacugcggcaccuccgccuucgaccuguucaugaacaugcugcucccgaucuucacgcccgugggggccguggacaucaccaccagcauccugaugggcgcgcugcucgccgucguggugagcaugucccuguacuaccugcuccgguuccgccgggccuucggcgacuacagcggggucaucuucaccaacauccuggccuucgugcugaacgugaucguccucugccuggagggccccuaccccaugcugccguccaucuacgccaugguguuccucuacgcgacgugcuacuucgggagcgacaucgccugcaugaugcacguguccuuccugaucauguucgccggcgucgugccccugugggugaccguccucuacaucguggugguccugagccgccacauccugugguucgccucccucugcaccaagcggaccguccaggugggggaccuggccuuccacagcuuccaggacgcggcccugcagacguucaugcucgacaaggagguguuccugcgccugaagcgcgagaucuccagcgacgccuacuucaaguaccucgccauguacaacaaguacaaguacuacuccggccccauggacaccgcggccuaccgggaggccgccugcagccaccuggugauggcccuggagaaguacuccaacggcgggggcgacaccaucuaccagcccccgcgcugcagcguggcguccgccgcccuccagugaggacuagucccuguucccagagcccacuuuuuuuucuuuuuuugaaauaaaauagccugucuuucagaucucaaaggcucuuuucagagccaccaaaaaaaaaaaaaaaaaaaaaaaaaaaaaaaaaaaaaaaaaaaaaaaaaaaaaaaaaaaaaaaaaaaaaaaaaaaaaaaaaaaaaaaaaaaaaaaaaaaaa

SEQ ID NO: 20167 - RNA, 1721 nt, Artificial Sequence
  PEDV/NPL-PEDv/2013/P10__KJ778616.1__non-structural protein 4 (NSP4) mRNA gc
aggagagucccgcagucggcguccagcggcucugcuuguucgugugugugucguugcaggccuuauucaagcuuaccauggccggccugcccagcuucuccaaggugaagaaguucuucugguuccucugccuguucaucgucgccguguucuucgcgcugagcuucuucgacuucuccacccaggugagcuccgacagcgacuacgacuucaaguacaucgaguccgggcagcucaagaccuucgacaacccgcugagcugcguccacaacguguucuccaacuucgaccaguggcacgacgccaaguucggcuucacgcccgugaacaaccccagcugccccaucgucguggggguguccgacgaggcccgcaccgucccgggcauccccgccgggguguaccuggccggcaagacccucguguucgcgaucaacaccaucuucggcacgagcgggcugugcuucgacgccuccggcgucgccgacaagggggccugcaucuucaacagcgcgugcaccacccuguccggccucgggggcaccgccguguacugcuacaagaacggccugguggagggggccaagcuguacagcgagcucgcgccccacuccuacuacaagauggucgacggcaacgccgugagccugcccgagaucaucucccggggguucggcauccgcacgauccggaccaaggccaugaccuacugccgcgugggccagugcguccagagcgccgagggggugugcuucggcgccgaccgguucuucguguacaacgccgagagcggguccgacuucgucugcggcaccgggcuguucacgcuccugaugaacgugaucagcguguucuccaagaccgucccggugaccguccugagcggccagauccucuucaacugcaucaucgccuucgcggccguggccgugugcuuccuguucaccaaguucaagcgcauguucggcgacauguccgucgggguguucacggugggcgccugcacccugcucaacaacgucagcuacaucgugacccagaacacccuggggaugcugggcuacgccacgcucuacuuccugugcaccaagggggugcgguacauguggaucuggcaccugggcuuccucaucuccuacauccugaucgcgcccugguggguccugaugguguacgccuucagcgccaucuucgaguucaugcccaaccucuucaagcugaagguguccacccagcuguucgagggcgacaaguucgucgggagcuucgagaacgccgccgcgggcaccuucgugcucgacaugcacgccuacgagcgccuggccaacuccaucagcacggagaagcugcggcaguacgccuccaccuacaacaaguacaaguacuacagcggguccgcgagcgaggccgacuaccgccucgccugcuucgcccaccuggccaaggcgaugauggacuacgccuccaaccacaacgacacccuguacacgcccccgaccgugagcuacaacuccacccuccagugaggacuagucccuguucccagagcccacuuuuuuuucuuuuuuugaaauaaaauagccugucuuucagaucucaaaggcucuuuucagagccaccaaaaaaaaaaaaaaaaaaaaaaaaaaaaaaaaaaaaaaaaaaaaaaaaaaaaaaaaaaaaaaaaaaaaaaaaaaaaaaaaaaaaaaaaaaaaaaaaaaaaa

SEQ ID NO: 20168 - RNA, 1766 nt, Artificial Sequence
  MHV/A59__NC_048217.1__non-structural protein 4 (NSP4) mRNA gc
aggagagucccgcagucggcguccagcggcucugcuuguucgugugugugucguugcaggccuuauucaagcuuaccauggccguguucagccgcaugcugcaguggcuguucgucgccaaccugaucugcuucaucgugcugugggcgcucaugcccaccuacgccgugcacaaguccgacaugcagcugccgcuguacgccagcuucaaggucaucgacaacggcgugcuccgggacguguccgucaccgacgccugcuucgccaacaaguucaaccaguucgaccagugguacgagagcacguucgggcuggcguacuaccgcaacuccaaggccugccccgugguggucgccgugaucgaccaggacaucggccacacccuguucaacgugcccaccaccguccuccgguacggguuccacgugcugcacuucaucacgcacgccuucgcgaccgacagcgugcagugcuacaccccgcacaugcagauccccuacgacaacuucuacgccuccggcugcguccugagcucccucugcaccaugcuggcccacgccgacgggacgccccaccccuacugcuacaccggcggcgugaugcacaacgccagccuguacuccagccucgcgccccacgugcgcuacaaccuggccuccagcaacggguacauccgguucccggaggucguguccgagggcaucgugcgcgucgugcggacccgcagcaugaccuacugccggguggggcugugcgaggaggccgaggagggcaucugcuucaacuucaaccgcuccuggguccucaacaaccccuacuaccgggccaugcccgggacguucugcggccgcaacgccuucgaccugauccaccaggugcugggcgggcucguccggcccaucgacuucuucgcgcugaccgccagcuccguggccggcgccauccuggccaucaucgugguccucgcguucuacuaccugaucaagcugaagcgcgccuucggggacuacaccagcgugguggucaucaacgugaucguguggugcaucaacuuccucaugcuguucgucuuccagguguacccgacccugagcugccucuacgccugcuucuacuucuacacgacccuguacuuccccuccgagaucagcguggucaugcaccuccaguggcucgugauguacggcgccaucaugccccugugguucugcaucaucuacguggccgucgugguguccaaccacgcgcuguggcuguucagcuacugccggaagaucggcaccgagguccgcuccgacgggaccuucgaggagauggcccucacgaccuucaugaucaccaaggagagcuacugcaagcugaagaacuccgugagcgacguggccuucaaccgguaccucucccuguacaacaaguaccgcuacuucagcggcaagauggacaccgccgcguaccgggaggccgccugcucccagcuggccaaggccauggagacguucaaccacaacaacgggaacgacguccucuaccagcccccgaccgcgagcgugaccaccuccuuccugcagugaggacuagucccuguucccagagcccacuuuuuuuucuuuuuuugaaauaaaauagccugucuuucagaucucaaaggcucuuuucagagccaccaaaaaaaaaaaaaaaaaaaaaaaaaaaaaaaaaaaaaaaaaaaaaaaaaaaaaaaaaaaaaaaaaaaaaaaaaaaaaaaaaaaaaaaaaaaaaaaaaaaaa

SEQ ID NO: 20169 - RNA, 1778 nt, Artificial Sequence
  SARS-CoV-2/Wuhan-Hu-1__NC_045512.2/MN908947.2/EPI_ISL_402128__non -structural protein 4 (NSP4) mRNA gc R9947
aggagagucccgcagucggcguccagcggcucugcuuguucgugugugugucguugcaggccuuauucaagcuuaccaugaagaucgugaacaacuggcugaagcagcucaucaaggucacccugguguuccuguucguggccgccaucuucuaccucaucacccccguccacgugaugagcaagcacacggacuucuccagcgagaucaucggcuacaaggcgaucgacgggggcgugacccgcgacaucgccuccaccgacacgugcuucgccaacaagcacgccgacuucgacaccugguucagccagcggggcggcuccuacaccaacgacaaggccugcccccugaucgcggccgucaucacccgcgaggugggguucgugguccccggccugcccggcaccauccuccggacgaccaacggggacuuccugcacuuccugccccgcguguucagcgccgugggcaacaucugcuacaccccguccaagcucaucgaguacaccgacuucgccacgagcgcgugcguccuggccgccgagugcaccaucuucaaggacgccuccgggaagcccgugcccuacugcuacgacaccaacgugcuggagggcagcgucgccuacgagucccuccggcccgacacccgcuacgugcugauggacgggagcaucauccaguucccgaacacguaccuggagggcuccgugcgggucgugaccaccuucgacagcgaguacugccgccacgggaccugcgagcgguccgaggcgggggugugcgucagcacguccggccgcugggugcucaacaacgacuacuaccggagccugcccgggguguucugcggcgucgacgccgugaaccugcucaccaacauguucacgccccugauccagcccaucggcgcccuggacaucuccgccagcaucgucgccgggggcaucguggcgaucguggugaccugccucgccuacuacuucaugcgcuuccggcgcgccuucggggaguacagccacgucguggccuucaacacccugcuguuccucauguccuucaccguccugugccugaccccgguguacagcuuccuccccggcguguacuccgucaucuaccuguaccugaccuucuaccucacgaacgacgugagcuuccuggcccacauccaguggauggugauguucacgccccugguccccuucuggaucaccaucgcguacaucaucugcaucuccaccaagcacuucuacugguucuucagcaacuaccucaagcggcgcgugguguucaacggggucuccuucagcaccuucgaggaggccgcccugugcaccuuccugcucaacaaggagauguaccugaagcugcgguccgacgugcuccugccgcugacccaguacaaccgcuaccucgcccuguacaacaaguacaaguacuucagcggcgccauggacaccacguccuaccgggaggcggccugcugccaccuggccaaggcccucaacgacuucagcaacuccggcagcgacgugcuguaccagccgccccagaccuccaucaccagcgcgguccugcagugaggacuagucccuguucccagagcccacuuuuuuuucuuuuuuugaaauaaaauagccugucuuucagaucucaaaggcucuuuucagagccaccaaaaaaaaaaaaaaaaaaaaaaaaaaaaaaaaaaaaaaaaaaaaaaaaaaaaaaaaaaaaaaaaaaaaaaaaaaaaaaaaaaaaaaaaaaaaaaaaaaaaa

SEQ ID NO: 20170 - RNA, 1778 nt, Artificial Sequence
  SARS-CoV-2__MT919775.1__non-structural protein 4 (NSP4) mRNA gc
aggagagucccgcagucggcguccagcggcucugcuuguucgugugugugucguugcaggccuuauucaagcuuaccaugaagaucgugaacaacuggcugaagcagcucaucaaggucacccugguguuccuguucguggccgccaucuucuaccucaucacccccguccacgugaugagcaagcacacggacuucuccagcgagaucaucggcuacaaggcgaucgacgggggcgugacccgcgacaucgccuccaccgacacgugcuucgccaacaagcacgccgacuucgacaccugguucagccagcggggcggcuccuacaccaacgacaaggccugcccccugaucgcggccgucaucacccgcgaggugggguucgugguccccggccugcccggcaccauccuccggacgaccaacggggacuuccugcacuuccugccccgcguguucagcgccgugggcaacaucugcuacaccccguccaagcucaucgaguacaccgacuucgccacgagcgcgugcguccuggccgccgagugcaccaucuucaaggacgccuccgggaagcccgugcccuacugcuacgacaccaacgugcuggagggcagcgucgccuacgagucccuccggcccgacacccgcuacgugcugauggacgggagcaucauccaguucccgaacacguaccuggagggcuccgugcgggucgugaccaccuucgacagcgaguacugccgccacgggaccugcgagcgguccgaggcgggggugugcgucagcacguccggccgcugggugcucaacaacgacuacuaccggagccugcccgggguguucugcggcgucgacgccgugaaccugcucaccaacauguucacgccccugauccagcccaucggcgcccuggacaucuccgccagcaucgucgccgggggcaucguggcgaucguggugaccugccucgccuacuacuucaugcgcuuccggcgcgucuucggggaguacagccacguggucgccuucaacacccugcuguuccucauguccuucaccgugcugugccugaccccgguguacagcuuccuccccggcgucuacuccgugaucuaccuguaccugaccuucuaccucacgaacgacgugagcuuccuggcccacauccaguggauggucauguucacgccccuggugcccuucuggaucaccaucgccuacaucaucugcaucuccaccaagcacuucuacugguucuucagcaacuaccucaagcggcgcguggucuucaacgggguguccuucagcaccuucgaggaggcggcccugugcaccuuccugcucaacaaggagauguaccugaagcugcgguccgacgugcuccugccgcugacccaguacaaccgcuaccucgcccuguacaacaaguacaaguacuucagcggcgccauggacaccacguccuaccgggaggccgcgugcugccaccuggccaaggcccucaacgacuucagcaacuccggcagcgacguccuguaccagccgccccagaccuccaucaccagcgccgugcugcagugaggacuagucccuguucccagagcccacuuuuuuuucuuuuuuugaaauaaaauagccugucuuucagaucucaaaggcucuuuucagagccaccaaaaaaaaaaaaaaaaaaaaaaaaaaaaaaaaaaaaaaaaaaaaaaaaaaaaaaaaaaaaaaaaaaaaaaaaaaaaaaaaaaaaaaaaaaaaaaaaaaaaa

SEQ ID NO: 20171 - RNA, 1778 nt, Artificial Sequence
  SARS-CoV-2__MT919788.1__non-structural protein 4 (NSP4) mRNA gc
aggagagucccgcagucggcguccagcggcucugcuuguucgugugugugucguugcaggccuuauucaagcuuaccaugaagaucgugaacaacuggcugaagcagcucaucaaggucacccugguguuccuguucguggccgccaucuucuaccucaucacccccguccacgugaugagcaagcacacggacuucuccagcgagaucaucggcuacaaggcgaucgacgggggcgugacccgcgacaucgccuccaccgacacgugcuucgccaacaagcacgccgacuucgacaccugguucagccagcggggcggcuccuacaccaacgacaaggccugcccccugaucgcggccgucaucacccgcgaggugggguucgugguccccggccugcccggcaccauccuccggacgaccaacggggacuuccugcacuuccugccccgcguguucagcgccgugggcaacaucugcuacaccccguccaagcucaucgaguacaccgacuucgccacgagcgcgugcguccuggccgccgagugcaccaucuucaaggacgccuccgggaagcccgugcccuacugcuacgacaccaacgugcuggagggcagcgucgccuacgagucccuccggcccgacacccgcuacgugcugauggacgggagcaucauccaguucccgaacacguaccuggagggcuccgugcgggucgugaccaccuucgacagcgaguacugccgccacgggaccugcgagcgguccgaggcgggggugugcgucagcacguccggccgcugggugcucaacaacgacuacuaccggagccugcccgggguguucugcggcgucgacgccgugaaccugcucaccaacauguucacgccccugauccagcccaucggcgcccuggacaucuccgccagcaucgucgccgggggcaucguggcgaucguggugaccugccucgccuacuacuucaugcgcuuccggcgcgccuucggggaguacagccacgucguggccuucaacacccugcuguuccucauguccuucaccguccugugccugaccccgguguacagcuuccuccccggcguguacuccgucaucuaccuguaccugaccuucuaccucacgaacgacgugagcuuccuggcccacauccaguggauggugauguucacgccccugguccccuucuggaucaccaucgcguacaucaucugcaucuccaccaagcacuucuacugguucuucagcaacuaccucaagcggcgcgugguguucaacggggucuccuucggcaccuucgaggaggccgcccugugcaccuuccugcucaacaaggagauguaccugaagcugcggagcgacgugcuccugccgcugacccaguacaaccgcuaccucgcccuguacaacaaguacaaguacuucuccggcgccauggacaccacgagcuaccgggaggcggccugcugccaccuggccaaggcccucaacgacuucuccaacagcggguccgacgugcuguaccagccgccccagaccagcaucaccuccgcgguccugcagugaggacuagucccuguucccagagcccacuuuuuuuucuuuuuuugaaauaaaauagccugucuuucagaucucaaaggcucuuuucagagccaccaaaaaaaaaaaaaaaaaaaaaaaaaaaaaaaaaaaaaaaaaaaaaaaaaaaaaaaaaaaaaaaaaaaaaaaaaaaaaaaaaaaaaaaaaaaaaaaaaaaaa

SEQ ID NO: 20172 - RNA, 1778 nt, Artificial Sequence
  SARS-CoV-2__MT920024.1__non-structural protein 4 (NSP4) mRNA gc
aggagagucccgcagucggcguccagcggcucugcuuguucgugugugugucguugcaggccuuauucaagcuuaccaugaagaucgugaacaacuggcugaagcagcucaucaaggucacccugguguuccuguucguggccgccaucuucuaccucaucacccccguccacgugaugagcaagcacacggacuucuccagcgagaucaucggcuacaaggcgaucgacgggggcgugacccgcgacaucgccuccaccgacacgugcuucgccaacaagcacgccgacuucgacaccugguucagccagcgggggugcuccuacaccaacgacaaggccugcccccugaucgcggccgucaucacccgcgaggugggcuucgugguccccgggcugcccggcaccauccuccggacgaccaacggcgacuuccugcacuuccugccccgcguguucagcgccguggggaacaucugcuacaccccguccaagcucaucgaguacaccgacuucgccacgagcgcgugcguccuggccgccgagugcaccaucuucaaggacgccuccggcaagcccgugcccuacugcuacgacaccaacgugcuggaggggagcgucgccuacgagucccuccggcccgacacccgcuacgugcugauggacggcagcaucauccaguucccgaacacguaccuggagggguccgugcgggucgugaccaccuucgacagcgaguacugccgccacgggaccugcgagcgguccgaggcgggcgugugcgucagcacguccggccgcugggugcucaacaacgacuacuaccggagccugcccggcguguucugcggggucgacgccgugaaccugcucaccaacauguucacgccccugauccagcccaucggcgcccuggacaucuccgccagcaucgucgccggcgggaucguggcgaucguggugaccugccucgccuacuacuucaugcgcuuccggcgcgccuucggcgaguacagccacgucguggccuucaacacccugcuguuccucauguccuucaccguccugugccugaccccgguguacagcuuccuccccgggguguacuccgucaucuaccuguaccugaccuucuaccucacgaacgacgugagcuuccuggcccacauccaguggauggugauguucacgccccugguccccuucuggaucaccaucgcguacaucaucugcaucuccaccaagcacuucuacugguucuucagcaacuaccucaagcggcgcgugguguucaacggcgucuccuucagcaccuucgaggaggccgcccugugcaccuuccugcucaacaaggagauguaccugaagcugcgguccgacgugcuccugccgcugacccaguacaaccgcuaccucgcccuguacaacaaguacaaguacuucagcggggccauggacaccacguccuaccgggaggcggccugcugccaccuggccaaggcccucaacgacuucagcaacuccggcagcgacgugcuguaccagccgccccagaccuccaucaccagcgcgguccugcagugaggacuagucccuguucccagagcccacuuuuuuuucuuuuuuugaaauaaaauagccugucuuucagaucucaaaggcucuuuucagagccaccaaaaaaaaaaaaaaaaaaaaaaaaaaaaaaaaaaaaaaaaaaaaaaaaaaaaaaaaaaaaaaaaaaaaaaaaaaaaaaaaaaaaaaaaaaaaaaaaaaaaa

SEQ ID NO: 20173 - RNA, 1778 nt, Artificial Sequence
  SARS-CoV-2__MT913038.1__non-structural protein 4 (NSP4) mRNA gc
aggagagucccgcagucggcguccagcggcucugcuuguucgugugugugucguugcaggccuuauucaagcuuaccaugaagaucgugaacaacuggcugaagcagcucaucaaggucacccugguguuccuguucguggccgccaucuucuaccucaucacccccguccacgugaugagcaagcacacggacuucuccagcgagaucaucggcuacaaggcgaucgacgggggcgugacccgcgacaucgccuccaccgacacgugcuucgccaacaagcacgccgacuucgacaccugguucagccagcggggcggcuccuacaccaacgacaaggccugcccccugaucgcggccgucaucacccgcgaggugggguucgugguccccggccugcccggcaccauccuccggaucacgaacggggacuuccugcacuuccugccccgcguguucagcgccgugggcaacaucugcuacaccccguccaagcucaucgaguacaccgacuucgccaccagcgcgugcguccuggccgccgagugcacgaucuucaaggacgccuccgggaagcccgugcccuacugcuacgacaccaacgugcuggagggcagcgucgccuacgagucccuccggcccgacacccgcuacgugcugauggacgggagcaucauccaguucccgaacaccuaccuggagggcuccgugcgggucgugacgaccuucgacagcgaguacugccgccacgggaccugcgagcgguccgaggcgggggugugcgucagcaccuccggccgcugggugcucaacaacgacuacuaccggagccugcccgggguguucugcggcgucgacgccgugaaccugcucacgaacauguucacgccccugauccagcccaucggcgcccuggacaucuccgccagcaucgucgccgggggcaucguggcgaucguggugaccugccucgccuacuacuucaugcgcuuccggcgcgccuucggggaguacagccacgucguggccuucaacacccugcuguuccucauguccuucaccguccugugccugaccccgguguacagcuuccuccccggcguguacuccgucaucuaccuguaccugaccuucuaccucaccaacgacgugagcuuccuggcccacauccaguggauggugauguucacgccccugguccccuucuggaucaccaucgcguacaucaucugcaucuccaccaagcacuucuacugguucuucagcaacuaccucaagcggcgcgugguguucaacggggucuccuucagcaccuucgaggaggccgcccugugcacguuccugcucaacaaggagauguaccugaagcugcgguccgacgugcuccugccgcugacccaguacaaccgcuaccucgcccuguacaacaaguacaaguacuucagcggcgccauggacaccaccuccuaccgggaggcggccugcugccaccuggccaaggcccucaacgacuucagcaacuccggcagcgacgugcuguaccagccgccccagacguccaucaccagcgcgguccugcagugaggacuagucccuguucccagagcccacuuuuuuuucuuuuuuugaaauaaaauagccugucuuucagaucucaaaggcucuuuucagagccaccaaaaaaaaaaaaaaaaaaaaaaaaaaaaaaaaaaaaaaaaaaaaaaaaaaaaaaaaaaaaaaaaaaaaaaaaaaaaaaaaaaaaaaaaaaaaaaaaaaaaa

SEQ ID NO: 20174 - RNA, 1778 nt, Artificial Sequence
  SARS-CoV-2__MT913046.1__non-structural protein 4 (NSP4) mRNA gc
aggagagucccgcagucggcguccagcggcucugcuuguucgugugugugucguugcaggccuuauucaagcuuaccaugaagaucgugaacaacuggcugaagcagcucaucaaggucacccugguguuccuguucguggccgccaucuucuaccucaucacccccguccacgugaugagcaagcacacggacuucuccagcgagaucaucggcuacaaggcgaucgacgggggcgugacccgcgacaucgccuccaccgacacgugcuucgccaacaagcacgccgacuucgacaccugguucagccagcggggcggcuccuacaccaacgacaaggccugcccccugaucgcggccgucaucacccgcgaggugggguucgugguccccggccugcccggcaccauccuccggacgaccaacggggacuuccugcacuuccugccccgcguguucagcgccgugggcaacaucugcuacaccccguccaagcucaucgaguacaccgacuucgccacgagcgcgugcguccuggccgccgagugcaccaucuucaaggacgccuccgggaagcccgugcccuacugcuacgacaccaacgugcuggagggcagcgucgccuacgagucccuccggcccgacacccgcuacgugcugauggacgggagcaucauccaguucccgaacacguaccuggagggcuccgugcgggucgugaccaccuucgacagcgaguacugccgccacgggaccugcgagcgguccgaggcgggggugugcgucagcacguccggccgcugggugcucaacaacgacuacuaccggagccugcccgggguguucugcggcgucgacgccgugaaccugcucaccaacauguucacgccccugauccagcccaucggcgcccuggacaucuccgccagcaucgucgccgggggcaucguggcgaucguggugaccugccucgccuacuacuucaugcgcuuccggcgcgccuucggggaguacagccacgucguggccuucaacacccugcugcuccugauguccuucaccguccugugccucaccccgguguacagcuuccugcccggcguguacuccgucaucuaccuguaccucaccuucuaccugacgaacgacgugagcuuccuggcccacauccaguggauggugauguucacgccccucguccccuucuggaucaccaucgcguacaucaucugcaucuccaccaagcacuucuacugguucuucagcaacuaccugaagcggcgcgugguguucaacggggucuccuucagcaccuucgaggaggccgcccugugcaccuuccuccugaacaaggagauguaccugaagcuccgguccgacgugcugcugccgcucacccaguacaaccgcuaccuggcccuguacaacaaguacaaguacuucagcggcgccauggacaccacguccuaccgggaggcggccugcugccaccucgccaaggcccugaacgacuucagcaacuccggcagcgacgugcuguaccagccgccccagaccuccaucaccagcgcgguccugcagugaggacuagucccuguucccagagcccacuuuuuuuucuuuuuuugaaauaaaauagccugucuuucagaucucaaaggcucuuuucagagccaccaaaaaaaaaaaaaaaaaaaaaaaaaaaaaaaaaaaaaaaaaaaaaaaaaaaaaaaaaaaaaaaaaaaaaaaaaaaaaaaaaaaaaaaaaaaaaaaaaaaaa

SEQ ID NO: 20175 - RNA, 1778 nt, Artificial Sequence
  SARS-CoV-2__MT913061.1__non-structural protein 4 (NSP4) mRNA gc
aggagagucccgcagucggcguccagcggcucugcuuguucgugugugugucguugcaggccuuauucaagcuuaccaugaagaucgugaacaacuggcugaagcagcucaucaaggucacccugguguuccuguucguggccgccaucuucuaccucaucacccccguccacgugaugagcaagcacacggacuucuccagcgagaucaucggcuacaaggcgaucgacgggggcgugacccgcgacaucgccuccaccgacacgugcuucgccaacaagcacgccgacuucgacaccugguucagccagcgcgggggcuccuacaccaacgacaaggccugcccccugaucaccgcggucaucacccgggaggugggguucgugguccccggccugcccggcacgauccuccggaccaccaacggggacuuccugcacuuccugccccgcguguucagcgccgugggcaacaucugcuacaccccguccaagcucaucgaguacacggacuucgccaccagcgccugcguccuggcggccgagugcaccaucuucaaggacgccuccgggaagcccgugcccuacugcuacgacaccaacgugcuggagggcagcgucgccuacgagucccuccggcccgacacgcgcuacgugcugauggacgggagcaucauccaguucccgaacaccuaccuggagggcuccgugcgggucgugaccaccuucgacagcgaguacugccgccacggcacgugcgagcgguccgaggccggggugugcgucagcaccuccggccgcugggugcucaacaacgacuacuaccggagccugcccgggguguucugcggcgucgacgcggugaaccugcucaccaacauguucaccccgcugauccagcccaucggcgcccuggacaucuccgccagcaucgucgccgggggcaucguggccaucguggucacgugccucgcguacuacuucaugcgcuuccggcgcgccuucggggaguacagccacgugguggccuucaacacccugcuguuccucauguccuucaccguccugugccugacccccguguacagcuuccuccccggcguguacuccgucaucuaccuguaccugacguucuaccucaccaacgacgugagcuuccuggcccacauccaguggauggugauguucacgccccugguccccuucuggaucaccaucgccuacaucaucugcaucuccaccaagcacuucuacugguucuucagcaacuaccucaagcggcgcgugguguucaacggggucuccuucagcaccuucgaggaggcggcccugugcaccuuccugcucaacaaggagauguaccugaagcugcgguccgacgugcuccugccgcugacccaguacaaccgcuaccucgcccuguacaacaaguacaaguacuucagcggcgccauggacacgaccuccuaccgggaggccgcgugcugccaccuggccaaggcccucaacgacuucagcaacuccggcagcgacgugcuguaccagccgccccagaccuccaucaccagcgccguccugcagugaggacuagucccuguucccagagcccacuuuuuuuucuuuuuuugaaauaaaauagccugucuuucagaucucaaaggcucuuuucagagccaccaaaaaaaaaaaaaaaaaaaaaaaaaaaaaaaaaaaaaaaaaaaaaaaaaaaaaaaaaaaaaaaaaaaaaaaaaaaaaaaaaaaaaaaaaaaaaaaaaaaaa

SEQ ID NO: 20176 - RNA, 1778 nt, Artificial Sequence
  SARS-CoV-2__MT913095.1__non-structural protein 4 (NSP4) mRNA gc
aggagagucccgcagucggcguccagcggcucugcuuguucgugugugugucguugcaggccuuauucaagcuuaccaugaagaucgugaacaacuggcugaagcagcucaucaaggucacccugguguuccuguucguggccgccaucuucuaccucaucacccccguccacgugaugagcaagcacacggacuucuccagcgagaucaucggcuacaaggcgaucgacgggggcgugacccgcgacaucgccuccaccgacacgugcuucgccaacaagcacgccgacuucgacaccugguucagccagcggggcggcuccuacaccaacgacaaggccugcccccugaucgcggccgucaucacccgcgaggugggguucgugguccccggccugcccggcaccauccuccggacgaccaacggggacuuccugcacuuccugccccgcguguucagcgccgugggcaacaucugcuacaccccguccaagcucaucgaguacaccgacuucgccacgagcgcgugcguccuggccgccgagugcaccaucuucaaggacgccuccgggaagcccgugcccuacugcuacgacaccaacgugcuggagggcagcgucgccuacgagucccuccggcccgacacccgcuacgugcugauggacgggagcaucauccaguucccgaacacguaccuggagggcuccgugcgggucgugaccaccuucgacagcgaguacugccgccacgggaccugcgagcgguccgaggcgggggugugcgucagcacguccggccgcugggugcucaacaacgacuacuaccggagccugcccgggguguucugcggcgucgacgccgugaaccugcucaccaacauguucacgccccugauccagcccaucggcgcccuggacaucuccgccagcaucgucgccgggggcaucguggcgaucguggugaccugccucgccuacuacuucaugcgcuuccggcgcgccuucggggaguacagccacgucguggccuucaacacccugcuguuccucauguccuucaccguccugugccugaccccgguguacagcuuccuccccggcguguacuccgucaucuaccuguaccugaccuucuaccucacgaacgacgugagcuuccuggcccacauccaguggauggugauguucacgccccugguccccuucuggaucaccaucgcguacaucaucugcaucuccaccaagcacuucuacugguucuucagcaacuaccucaagcggcgcgugguguucaacggggucuccuucagcaccuucgaggaggccgcccugugcaccuuccugcucaacaaggagauguaccugaagcugcgguccgacgugcuccugccgcugacccaguacaaccgcuaccucgccuucuacaacaaguacaaguacuucagcggcgccauggacaccacguccuaccgggaggcggccugcugccaccuggccaaggcccugaacgacuucagcaacuccggcagcgacgugcucuaccagccgccccagaccuccaucaccagcgcgguccugcagugaggacuagucccuguucccagagcccacuuuuuuuucuuuuuuugaaauaaaauagccugucuuucagaucucaaaggcucuuuucagagccaccaaaaaaaaaaaaaaaaaaaaaaaaaaaaaaaaaaaaaaaaaaaaaaaaaaaaaaaaaaaaaaaaaaaaaaaaaaaaaaaaaaaaaaaaaaaaaaaaaaaaa

SEQ ID NO: 20177 - RNA, 1778 nt, Artificial Sequence
  SARS-CoV-2__MT913100.1__non-structural protein 4 (NSP4) mRNA gc
aggagagucccgcagucggcguccagcggcucugcuuguucgugugugugucguugcaggccuuauucaagcuuaccaugaagaucgugaacaacuggcugaagcagcucaucaaggucacccugguguuccuguucguggccgccaucuucuaccucaucacccccguccacgugaugagcaagcacacggacuucuccagcgagaucaucggcuacaaggcgaucgacgggggcgugacccgcgacaucgccuccaccgacacgugcuucgccaacaagcacgccgacuucgacaccugguucagccagcggggcggcuccuacaccaacgacaaggccugcccccugaucgcggccgucaucacccgcgaggugggguucgugguccccggccugcccggcaccauccuccggacgaccaacggggacuuccugcacuuccugccccgcguguucagcgccgugggcaacaucugcuacaccccguccaagcucaucgaguacaccgacuucgccacgagcgcgugcguccuggccgccgagugcaccaucuucaaggacgccuccgggaagcccgugcccuacugcuacgacaccaacgugcuggagggcagcgucgccuacgagucccuccggcccgacacccgcuacgugcugauggacgggagcaucauccaguucccgaacacguaccuggagggcuccgugcgggucgugaccaccuucgacagcgaguacugccgccacgggaccugcgagcgguccgaggcgggggugugcgucagcacguccggccgcugggugcucaacaacgacuacuaccggagccugcccgggguguucugcggcgucgacgccgugaaccugcucaccaacauguucacgccccugauccagcccaucggcgcccuggacaucuccgccagcaucgucgccgggggcaucguggcgaucguggugaccugccucgccuacuacuucaugcgcuuccggcgcgccuucggggaguacagccacgucguggccuucaacacccugcuguuccucauguccuucaccguccugugccugaccccgguguacagcuuccuccccggcguguacuccgucaucuaccuguaccugaccuucuaccucacgaacgacgugagcuuccuggcccacauccaguggauggugauguucacgccccugguccccuucuggaucaccaucguguacaucaucugcaucuccaccaagcacuucuacugguucuucagcaacuaccucaagcggcgcguggucuucaacgggguguccuucagcaccuucgaggaggcggcccugugcaccuuccugcucaacaaggagauguaccugaagcugcgguccgacgugcuccugccgcugacccaguacaaccgcuaccucgcccuguacaacaaguacaaguacuucagcggcgccauggacaccacguccuaccgggaggccgcgugcugccaccuggccaaggcccucaacgacuucagcaacuccggcagcgacguccuguaccagccgccccagaccuccaucaccagcgccgugcugcagugaggacuagucccuguucccagagcccacuuuuuuuucuuuuuuugaaauaaaauagccugucuuucagaucucaaaggcucuuuucagagccaccaaaaaaaaaaaaaaaaaaaaaaaaaaaaaaaaaaaaaaaaaaaaaaaaaaaaaaaaaaaaaaaaaaaaaaaaaaaaaaaaaaaaaaaaaaaaaaaaaaaaa

SEQ ID NO: 20178 - RNA, 1778 nt, Artificial Sequence
  SARS-CoV-2__MT913141.1__non-structural protein 4 (NSP4) mRNA gc
aggagagucccgcagucggcguccagcggcucugcuuguucgugugugugucguugcaggccuuauucaagcuuaccaugaagaucgugaacaacuggcugaagcagcucaucaaggucacccugguguuccuguucguggccgccaucuucuaccucaucacccccguccacgugaugagcaagcacaacgacuucuccagcgagaucaucggcuacaaggcgaucgacgggggcgugacgcgcgacaucgccuccaccgacacgugcuucgccaacaagcacgccgacuucgacaccugguucagccagcggggcggcuccuacaccaacgacaaggccugcccccugaucgcggccgucaucacccgcgaggugggguucgugguccccggccugcccggcaccauccuccggaccacgaacggggacuuccugcacuuccugccccgcguguucagcgccgugggcaacaucugcuacaccccguccaagcucaucgaguacaccgacuucgccaccagcgcgugcguccuggccgccgagugcacgaucuucaaggacgccuccgggaagcccgugcccuacugcuacgacaccaacgugcuggagggcagcgucgccuacgagucccuccggcccgacacccgcuacgugcugauggacgggagcaucauccaguucccgaacaccuaccuggagggcuccgugcgggucgugacgaccuucgacagcgaguacugccgccacgggaccugcgagcgguccgaggcgggggugugcgucagcaccuccggccgcugggugcucaacaacgacuacuaccggagccugcccgggguguucugcggcgucgacgccgugaaccugcucacgaacauguucacgccccugauccagcccaucggcgcccuggacaucuccgccagcaucgucgccgggggcaucguggcgaucguggugaccugccucgccuacuacuucaugcgcuuccggcgcgccuucggggaguacagccacgucguggccuucaacacccugcuguuccucauguccuucaccguccugugccugaccccgguguacagcuuccuccccggcguguacuccgucaucuaccuguaccugaccuucuaccucaccaacgacgugagcuuccuggcccacauccaguggauggugauguucacgccccugguccccuucuggaucaccaucgcguacaucaucugcaucuccaccaagcacuucuacugguucuucagcaacuaccucaagcggcgcgugguguucaacggggucuccuucagcaccuucgaggaggccgcccugugcacguuccugcucaacaaggagauguaccugaagcugcgguccgacgugcuccugccgcugacccaguacaaccgcuaccucgcccuguacaacaaguacaaguacuucagcggcgccauggacaccaccuccuaccgggaggcggccugcugccaccuggccaaggcccucaacgacuucagcaacuccggcagcgacgugcuguaccagccgccccagacguccaucaccagcgcgguccugcagugaggacuagucccuguucccagagcccacuuuuuuuucuuuuuuugaaauaaaauagccugucuuucagaucucaaaggcucuuuucagagccaccaaaaaaaaaaaaaaaaaaaaaaaaaaaaaaaaaaaaaaaaaaaaaaaaaaaaaaaaaaaaaaaaaaaaaaaaaaaaaaaaaaaaaaaaaaaaaaaaaaaaa

SEQ ID NO: 20179 - RNA, 1778 nt, Artificial Sequence
  SARS-CoV-2__MT907515.1__non-structural protein 4 (NSP4) mRNA gc
aggagagucccgcagucggcguccagcggcucugcuuguucgugugugugucguugcaggccuuauucaagcuuaccaugaagaucgugaacaacuggcugaagcagcucaucaaggucacccugguguuccuguucguggccgccaucuucuaccucaucacccccguccacgugaugagcaagcacacggacuucuccagcgagaucaucggcuacaaggcgaucgacgggggcgugacccgcgacaucgccuccaccgacacgugcuucgccaacaagcacgccgacuucgacaccugguucagccagcggggcggcuccuacaccaacgacaaggccugcccccugaucgcggccgucaucacccgcgaggugggguucgugguccccggccugcccggcaccauccuccggacgaccaacggggacuuccugcacuuccugccccgcguguucagcgccgugggcaacaucugcuacaccccguccaagcucaucgaguacaccgacuucgccacgagcgcgugcguccuggccgccgagugcaccaucuucaaggacgccuccgggaagcccgugcccuacugcuacgacaccaacgugcuggagggcagcgucgccuacgagucccuccggcccgacacccgcuacgugcugauggacgggagcaucauccaguucccgaacacguaccuggagggcuccgugcgggucgugaccaccuucgacagcgaguacugccgccacgggaccugcgagcgguccgaggcgggggugugcgucagcacguccggccgcugggugcucaacaacgacuacuaccggagccugcccgggguguucugcggcgucgacgccgugaaccugcucaccaacauguucacgccccugauccagcccaucggcgcccuggacaucuccgccagcaucgucgccgggggcaucguggcgaucguggugaccugccucgccuacuacuucaugcgcuuccggcgcgccuacggggaguacagccacgucguggccuucaacacccugcuguuccucauguccuucaccguccugugccugaccccgguguacagcuuccuccccggcguguacuccgucaucuaccuguaccugaccuucuaccucacgaacgacgugagcuuccuggcccacauccaguggauggugauguucacgccccugguccccuucuggaucaccaucgcguacaucaucugcaucuccaccaagcacuucuacugguucuucagcaacuaccucaagcggcgcgugguguucaacggggucuccuucagcaccuucgaggaggccgcccugugcaccuuccugcucaacaaggagauguaccugaagcugcgguccgacgugcuccugccgcugacccaguacaaccgcuaccucgcccuguacaacaaguacaaguacuucagcggcgccauggacaccacguccuaccgggaggcggccugcugccaccuggccaaggcccucaacgacuucagcaacuccggcagcgacgugcuguaccagccgccccagaccuccaucaccagcgcgguccugcagugaggacuagucccuguucccagagcccacuuuuuuuucuuuuuuugaaauaaaauagccugucuuucagaucucaaaggcucuuuucagagccaccaaaaaaaaaaaaaaaaaaaaaaaaaaaaaaaaaaaaaaaaaaaaaaaaaaaaaaaaaaaaaaaaaaaaaaaaaaaaaaaaaaaaaaaaaaaaaaaaaaaaa

SEQ ID NO: 20180 - RNA, 1778 nt, Artificial Sequence
  SARS-CoV-2__MT907517.1__non-structural protein 4 (NSP4) mRNA gc
aggagagucccgcagucggcguccagcggcucugcuuguucgugugugugucguugcaggccuuauucaagcuuaccaugaagaucgugaacaacuggcugaagcagcucaucaaggucacccugguguuccuguucguggccgccaucuucuaccucaucacccccguccacgugaugagcaagcacacggacuucuccagcgagaucaucggcuacaaggcgaucgacgggggcgugacccgcgacaucgccuccaccgacacgugcuucgccaacaagcacgccgacuucgacaccugguucagccagcggggcggcuccuacaccaacgacaaggccugcccccugaucgcggccgucaucacccgcgaggugggguucgugguccccggccugcccggcaccauccuccggacgaccaacggggacuuccugcacuuccugccccgcguguucagcgccgugggcaacaucugcuacaccccguccaagcucaucgaguacaccgacuucgccacgagcgcgugcguccuggccgccgagugcaccaucuucaaggacgccuccgggaagcccgugcccuacugcuacgacaccaacgugcuggagggcagcgucgccuacgagucccuccggcccgacacccgcuacgugcugauggacgggagcaucauccaguucccgaacacguaccuggagggcuccgugcgggucgugaccaccuucgacagcgaguacugccgccacgggaccugcgagcgguccgaggcgggggugugcgucagcacguccggccgcugggugcucaacaacgacuacuaccggagccugcccgggguguucugcggcgucgacgccgugaaccugcucaccaacauguccacgccccugauccagcccaucggcgcccuggacaucagcgccagcaucgucgccgggggcaucguggcgaucguggugaccugccucgccuacuacuucaugcgcuuccggcgcgccuucggggaguacucccacgucguggccuucaacacccugcuguuccucaugagcuucaccguccugugccugaccccgguguacuccuuccuccccggcguguacagcgucaucuaccuguaccugaccuucuaccucacgaacgacguguccuuccuggcccacauccaguggauggugauguucacgccccugguccccuucuggaucaccaucgcguacaucaucugcaucagcaccaagcacuucuacugguucuucuccaacuaccucaagcggcgcgugguguucaacggggucagcuucuccaccuucgaggaggccgcccugugcaccuuccugcucaacaaggagauguaccugaagcugcggagcgacgugcuccugccgcugacccaguacaaccgcuaccucgcccuguacaacaaguacaaguacuucuccggcgccauggacaccacgagcuaccgggaggcggccugcugccaccuggccaaggcccucaacgacuucuccaacagcggcuccgacgugcuguaccagccgccccagaccagcaucaccuccgcgguccugcagugaggacuagucccuguucccagagcccacuuuuuuuucuuuuuuugaaauaaaauagccugucuuucagaucucaaaggcucuuuucagagccaccaaaaaaaaaaaaaaaaaaaaaaaaaaaaaaaaaaaaaaaaaaaaaaaaaaaaaaaaaaaaaaaaaaaaaaaaaaaaaaaaaaaaaaaaaaaaaaaaaaaaa

SEQ ID NO: 20181 - RNA, 1778 nt, Artificial Sequence
  SARS-CoV-2__MT890294.1__non-structural protein 4 (NSP4) mRNA gc
aggagagucccgcagucggcguccagcggcucugcuuguucgugugugugucguugcaggccuuauucaagcuuaccaugaagaucgugaacaacuggcugaagcagcucaucaaggucacccugguguuccuguucguggccgccaucuucuaccucaucacccccguccacgugaugagcaagcacacggacuucuccagcgagaucaucggcuacaaggcgaucgacgggggcgugacccgcgacaucgccuccaccgacacgugcuucgccaacaagcacgccgacuucgacaccugguucagccagcggggcggcuccuacaccaacgacaaggccugcccccugaucgcggccgucaucacccgcgaggugggguucgugguccccggccugcccggcaccauccuccggacgaccaacggggacuuccugcacuuccugccccgcguguucagcgccgugggcaacaucugcuacaccccguccaagcucaucgaguacaccgacuucgccacgagcgcgugcguccuggccgccgagugcaccaucuucaaggacgccuccgggaagcccgugcccuacugcuacgacaccaacgugcuggagggcagcgucgccuacgagucccuccggcccgacacccgcuacgugcugauggacgggagcaucauccaguucccgaacacgcaccuggagggcuccgugcgggucgugaccaccuucgacagcgaguacugccgccacgggaccugcgagcgguccgaggcgggggugugcgucagcacguccggccgcugggugcucaacaacgacuacuaccggagccugcccgggguguucugcggcgucgacgccgugaaccugcucaccaacauguucacgccccugauccagcccaucggcgcccuggacaucuccgccagcaucgucgccgggggcaucguggcgaucguggugaccugccucgccuacuacuucaugcgcuuccggcgcgccuucggggaguacagccacgucguggccuucaacacccugcuguuccucauguccuucaccguccugugccugaccccgguguacagcuuccuccccggcguguacuccgucaucuaccuguaccugaccuucuaccucacgaacgacgugagcuuccuggcccacauccaguggauggugauguucacgccccugguccccuucuggaucaccaucgcguacaucaucugcaucuccaccaagcacuucuacugguucuucagcaacuaccucaagcggcgcgugguguucaacggggucuccuucagcaccuucgaggaggccgcccugugcaccuuccugcucaacaaggagauguaccugaagcugcgguccgacgugcuccugccgcugacccaguacaaccgcuaccucgcccuguacaacaaguacaaguacuucagcggcgccauggacaccacguccuaccgggaggcggccugcugccaccuggccaaggcccucaacgacuucagcaacuccggcagcgacgugcuguaccagccgccccagaccuccaucaccagcgcgguccugcagugaggacuagucccuguucccagagcccacuuuuuuuucuuuuuuugaaauaaaauagccugucuuucagaucucaaaggcucuuuucagagccaccaaaaaaaaaaaaaaaaaaaaaaaaaaaaaaaaaaaaaaaaaaaaaaaaaaaaaaaaaaaaaaaaaaaaaaaaaaaaaaaaaaaaaaaaaaaaaaaaaaaaa

SEQ ID NO: 20182 - RNA, 1778 nt, Artificial Sequence
  SARS-CoV-2__MT893001.1__non-structural protein 4 (NSP4) mRNA gc
aggagagucccgcagucggcguccagcggcucugcuuguucgugugugugucguugcaggccuuauucaagcuuaccaugaagaucgugaacaacuggcugaagcagcucaucaaggucacccugguguuccuguucguggccgccaucuucuaccucaucacccccguccacgugaugagcaagcacacggacuucuccagcgagaucaucggcuacaaggcgaucgacgggggcgugacccgcgacaucgccuccaccgacacgugcuucgccaacaagcacgccgacuucgacaccugguucagccagcggggcggcuccuacaccaacgacaaggccugcccccugaucgcggccgucaucacccgcgaggugggguucgugguccccggccugcccggcaccauccuccggacgaccaacggggacuuccugcacuuccugccccgcguguucagcgccgugggcaacaucugcuacaccccguccaagcucaucgaguacaccgacuucgccacgagcgcgugcguccuggccgccgagugcaccaucuucaaggacgccuccgggaagcccgugcccuacugcuacgacaccaacgugcuggagggcagcgucgccuacgagucccuccggcccgacacccgcuacgugcugauggacgggagcaucauccaguucccgaacacguaccuggagggcuccgugcgggucgugaccaccuucgacagcgaguacugccgccacgggaccugcgagcgguccgaggcgggggugugcgucagcacguccggccgcugggugcucaacaacgacuacuaccggagccugcccgggguguucugcggcgucgacgccgugaaccugcucaccaacauguucacgccccugauccagcccaucggcgcccuggacaucuccgccagcaucgucgccgggggcaucguggcgaucguggugaccugccucgccuacuacuucaugcgcuuccggcgcgccuucggggaguacagccacgucguggccuucaacacccugcuguuccucauguccuucaccguccugugccugaccccgguguaccucuuccugcccggcguguacagcgucaucuaccuguaccucaccuucuacuucacgaacgacguguccuuccuggcccacauccaguggauggugauguucacgccccugguccccuucuggaucaccaucgcguacaucaucugcaucagcaccaagcacuucuacugguucuucuccaacuaccucaagcggcgcgugguguucaacggggucagcuucuccaccuucgaggaggccgcccugugcaccuuccugcucaacaaggagauguaccugaagcugcggagcgacgugcuccugccgcugacccaguacaaccgcuaccucgcccuguacaacaaguacaaguacuucuccggcgccauggacaccacgagcuaccgggaggcggccugcugccaccuggccaaggcccucaacgacuucuccaacagcggcuccgacgugcuguaccagccgccccagaccagcaucaccuccgcgguccugcagugaggacuagucccuguucccagagcccacuuuuuuuucuuuuuuugaaauaaaauagccugucuuucagaucucaaaggcucuuuucagagccaccaaaaaaaaaaaaaaaaaaaaaaaaaaaaaaaaaaaaaaaaaaaaaaaaaaaaaaaaaaaaaaaaaaaaaaaaaaaaaaaaaaaaaaaaaaaaaaaaaaaaa

SEQ ID NO: 20183 - RNA, 1778 nt, Artificial Sequence
  SARS-CoV-2__MT893008.1__non-structural protein 4 (NSP4) mRNA gc
aggagagucccgcagucggcguccagcggcucugcuuguucgugugugugucguugcaggccuuauucaagcuuaccaugaagaucgugaacaacuggcugaagcagcucaucaaggucacccugguguuccuguucguggccgccaucuucuaccucaucacccccguccacgugaugagcaagcacacggacuucuccaucgagaucaucggcuacaaggcgaucgacgggggcgugacccgcgacaucgccagcaccgacacgugcuucgccaacaagcacgccgacuucgacaccugguucucccagcggggcggcagcuacaccaacgacaaggccugcccccugaucgcggccgucaucacccgcgaggugggguucgugguccccggccugcccggcaccauccuccggacgaccaacggggacuuccugcacuuccugccccgcguguucuccgccgugggcaacaucugcuacaccccgagcaagcucaucgaguacaccgacuucgccacguccgcgugcguccuggccgccgagugcaccaucuucaaggacgccagcgggaagcccgugcccuacugcuacgacaccaacgugcuggagggcuccgucgccuacgagagccuccggcccgacacccgcuacgugcugauggacggguccaucauccaguucccgaacacguaccuggagggcagcgugcgggucgugaccaccuucgacuccgaguacugccgccacgggaccugcgagcggagcgaggcgggggugugcgucuccacgagcggccgcugggugcucaacaacgacuacuaccggucccugcccgggguguucugcggcgucgacgccgugaaccugcucaccaacauguucacgccccugauccagcccaucggcgcccuggacaucagcgccuccaucgucgccgggggcaucguggcgaucguggugaccugccucgccuacuacuucaugcgcuuccggcgcgccuucggggaguacagccacgucguggccuucaacacccugcuguuccucaugagcuucaccguccugugccugaccccgguguacuccuuccuccccggcguguacagcgucaucuaccuguaccugaccuucuaccucacgaacgacguguccuuccuggcccacauccaguggauggugauguucacgccccugguccccuucuggaucaccaucgcguacaucaucugcaucagcaccaagcacuucuacugguucuucuccaacuaccucaagcggcgcgugguguucaacggggucagcuucuccaccuucgaggaggccgcccugugcaccuuccugcucaacaaggagauguaccugaagcugcggagcgacgugcuccugccgcugacccaguacaaccgcuaccucgcccuguacaacaaguacaaguacuucuccggcgccauggacaccacgagcuaccgggaggcggccugcugccaccuggccaaggcccucaacgacuucuccaacagcggcuccgacgugcuguaccagccgccccagaccagcaucaccuccgcgguccugcagugaggacuagucccuguucccagagcccacuuuuuuuucuuuuuuugaaauaaaauagccugucuuucagaucucaaaggcucuuuucagagccaccaaaaaaaaaaaaaaaaaaaaaaaaaaaaaaaaaaaaaaaaaaaaaaaaaaaaaaaaaaaaaaaaaaaaaaaaaaaaaaaaaaaaaaaaaaaaaaaaaaaaa

SEQ ID NO: 20184 - RNA, 1778 nt, Artificial Sequence
  SARS-CoV-2__MT873055.1__non-structural protein 4 (NSP4) mRNA gc
aggagagucccgcagucggcguccagcggcucugcuuguucgugugugugucguugcaggccuuauucaagcuuaccaugaagaucgugaacaacuggcugaagcagcucaucaaggucacccugguguuccuguucguggccgccaucuucuaccucaucacccccguccacgugaugagcaagcacacggacuucuccagcgagaucaucggcuacaaggcgaucgacgggggcgugacccgcgacaucgccuccaccgacacgugcuucgccaacaagcacgccgacuucgacaccugguucagccagcggggcggcuccuacaccaacgacaaggccugcccccugaucgcggccgucaucacccgcgagguggggaucgugguccccggccugcccggcaccauccuccggacgaccaacggggacuuccugcacuuccugccccgcguguucagcgccgugggcaacaucugcuacaccccguccaagcucaucgaguacaccgacuucgccacgagcgcgugcguccuggccgccgagugcaccaucuucaaggacgccuccgggaagcccgugcccuacugcuacgacaccaacgugcuggagggcagcgucgccuacgagucccuccggcccgacacccgcuacgugcugauggacgggagcaucauccaguucccgaacacguaccuggagggcuccgugcgggucgugaccaccuucgacagcgaguacugccgccacgggaccugcgagcgguccgaggcgggggugugcgucagcacguccggccgcugggugcucaacaacgacuacuaccggagccugcccgggguguucugcggcgucgacgccgugaaccugcucaccaacauguucacgccccugauccagcccaucggcgcccuggacaucuccgccagcaucgucgccgggggcaucguggcgaucguggugaccugccucgccuacuacuucaugcgcuuccggcgcgccuucggggaguacagccacgucguggccuucaacacccugcuguuccucauguccuucaccguccugugccugaccccgguguacagcuuccuccccggcguguacuccgucaucuaccuguaccugaccuucuaccucacgaacgacgugagcuuccuggcccacauccaguggauggugauguucacgccccugguccccuucuggaucaccaucgcguacaucaucugcaucuccaccaagcacuucuacugguucuucagcaacuaccucaagcggcgcgugguguucaacggggucuccuucagcaccuucgaggaggccgcccugugcaccuuccugcucaacaaggagauguaccugaagcugcgguccgacgugcuccugccgcugacccaguacaaccgcuaccucgcccuguacaacaaguacaaguacuucagcggcgccauggacaccacguccuaccgggaggcggccugcugccaccuggccaaggcccucaacgacuucagcaacuccggcagcgacgugcuguaccagccgccccagaccuccaucaccagcgcgguccugcagugaggacuagucccuguucccagagcccacuuuuuuuucuuuuuuugaaauaaaauagccugucuuucagaucucaaaggcucuuuucagagccaccaaaaaaaaaaaaaaaaaaaaaaaaaaaaaaaaaaaaaaaaaaaaaaaaaaaaaaaaaaaaaaaaaaaaaaaaaaaaaaaaaaaaaaaaaaaaaaaaaaaaa

SEQ ID NO: 20185 - RNA, 1778 nt, Artificial Sequence
  SARS-CoV-2__MT873076.1__non-structural protein 4 (NSP4) mRNA gc
aggagagucccgcagucggcguccagcggcucugcuuguucgugugugugucguugcaggccuuauucaagcuuaccaugaagaucgugaacaacuggcugaagcagcucaucaaggucacccugguguuccuguucguggccgccaucuucuaccucaucacccccguccacgugaugagcaagcacacggacuucuccagcgagaucaucggcuacaaggcgaucgacgggggcgugacccgcgacaucgccuccaccgacacgugcuucgccaacaagcacgccgacuucgacaccugguucagccagcggggcggcuccuacaccaacgacaaggccugcccccugaucgcggccgucaucacccgcgaggugggguucgugguccccggccugcccggcaccauccuccggacgaccaacggggacuuccugcacuuccugccccgcguguucagcgccgugggcaacaucugcuacaccccguccaagcucaucgaguacaccgacuucgccacgagcgcgugcguccuggccgccgagugcaccaucuucaaggacgccuccgggaagcccgugcccuacugcuacgacaccaacgugcuggagggcagcgucgccuacgagucccuccggcccgacacccgcuacgugcugauggacgggagcaucauccaguucccgaacacguaccuggagggcuccgugcgggucgugaccaccuucgacagcgaguacugccgccacgggaccugcgagcgguccgaggcgggggugugcgucagcacguccggccgcugggugcucaacaacgacuacuaccggagccugcccgggguguucugcggcgucgacgccgugaaccugcucaccaacauguucacgccccugauccagcccaucggcgcccuggacaucuccgccagcaucgucgccgggggcaucguggcgaucguggucaucugccucgccuacuacuucaugcgcuuccggcgcgccuucggggaguacagccacgugguggccuucaacacccugcuguuccucauguccuucaccguccugugccugaccccgguguacagcuuccuccccggcguguacuccgucaucuaccuguaccugaccuucuaccucaccaacgacgugagcuuccuggcccacauccaguggauggugauguucacgccccugguccccuucuggaucaccaucgcguacaucaucugcaucuccaccaagcacuucuacugguucuucagcaacuaccucaagcggcgcgugguguucaacggggucuccuucagcaccuucgaggaggccgcccugugcacguuccugcucaacaaggagauguaccugaagcugcgguccgacgugcuccugccgcugacccaguacaaccgcuaccucgcccuguacaacaaguacaaguacuucagcggcgccauggacaccaccuccuaccgggaggcggccugcugccaccuggccaaggcccucaacgacuucagcaacuccggcagcgacgugcuguaccagccgccccagacguccaucaccagcgcgguccugcagugaggacuagucccuguucccagagcccacuuuuuuuucuuuuuuugaaauaaaauagccugucuuucagaucucaaaggcucuuuucagagccaccaaaaaaaaaaaaaaaaaaaaaaaaaaaaaaaaaaaaaaaaaaaaaaaaaaaaaaaaaaaaaaaaaaaaaaaaaaaaaaaaaaaaaaaaaaaaaaaaaaaaa

SEQ ID NO: 20186 - RNA, 1778 nt, Artificial Sequence
  SARS-CoV-2__MT873134.1__non-structural protein 4 (NSP4) mRNA gc
aggagagucccgcagucggcguccagcggcucugcuuguucgugugugugucguugcaggccuuauucaagcuuaccaugaagaucgugaacaacuggcugaagcagcucaucaaggucacccugguguuccuguucguggccgccaucuucuaccucaucacccccguccacgugaugagcaagcacacggacuucuccagcgagaucaucggcuacaaggcgaucgacgggggcgugacccgcgacaucgccuccaccgacacgugcuucgccaacaagcacgccgacuucgacaccugguucagccagcggggcggcuccuacaccaacgacaaggccugcccccugaucgcggccgucaucacccgcgaggugggguucgugguccccggccugcccggcaccauccuccggacgaccaacggggacuuccugcacuuccugccccgcguguucagcgccgugggcaacaucugcuacaccccguccaagcucaucgaguacaccgacuucgccacgagcgcgugcguccuggccgccgagugcaccaucuucaaggacgccuccgggaagcccgugcccuacugcuacgacaccaacgugcuggagggcagcgucgccuacgagucccuccggcccgacacccgcuacgugcugauggacgggagcaucauccaguucccgaacacguaccuggagggcuccgugcgggucgugaccaccuucgacagcgaguacugccgccacgggaccugcgagcgguccgaggcgggggugugcgucagcacguccggccgcugggugcucaacaacgacuacuaccggagccugcccgggguguucugcggcgucgacgccgugaaccugcucaccaacauguucacgccccugauccagcccaucggcgcccuggacaucuccgccagcaucgucgccgggggcaucguggcgaucguggugaccugccucgccuacuacuucaugcgcuuccggcgcgccuucggggucuacagccacguggucgccuucaacacccugcuguuccucauguccuucaccgugcugugccugaccccgguguacagcuuccuccccggcgucuacuccgugaucuaccuguaccugaccuucuaccucacgaacgacgugagcuuccuggcccacauccaguggauggucauguucacgccccuggugcccuucuggaucaccaucgcguacaucaucugcaucuccaccaagcacuucuacugguucuucagcaacuaccucaagcggcgcguggucuucaacgggguguccuucagcaccuucgaggaggccgcccugugcaccuuccugcucaacaaggagauguaccugaagcugcgguccgacgugcuccugccgcugacccaguacaaccgcuaccucgcccuguacaacaaguacaaguacuucagcggcgccauggacaccacguccuaccgggaggcggccugcugccaccuggccaaggcccucaacgacuucagcaacuccggcagcgacguccuguaccagccgccccagaccuccaucaccagcgcggugcugcagugaggacuagucccuguucccagagcccacuuuuuuuucuuuuuuugaaauaaaauagccugucuuucagaucucaaaggcucuuuucagagccaccaaaaaaaaaaaaaaaaaaaaaaaaaaaaaaaaaaaaaaaaaaaaaaaaaaaaaaaaaaaaaaaaaaaaaaaaaaaaaaaaaaaaaaaaaaaaaaaaaaaaa

SEQ ID NO: 20187 - RNA, 1778 nt, Artificial Sequence
  SARS-CoV-2__MT873140.1__non-structural protein 4 (NSP4) mRNA gc
aggagagucccgcagucggcguccagcggcucugcuuguucgugugugugucguugcaggccuuauucaagcuuaccaugaagaucgugaacaacuggcugaagcagcucaucaaggucacccugguguuccuguucguggccgccaucuucuaccucaucacccccguccacgugaugagcaagcacacggacuucuccagcgagaucaucggcuacaaggcgaucgacgggggcgugacccgcgacaucgccuccaccgacacgugcuucgccaacaagcacgccgacuucgacaccugguucagccagcggggcggcuccuacaccaacgacaaggccugcccccugaucgcggccgucaucacccgcgaggugggguucgugguccccggccugcccggcaccauccuccggacgaccaacggggacuuccugcacuuccugccccgcguguucagcgccgugggcaacaucugcuacaccccguccaagcucaucgaguacaccgacuucgccacgagcgcgugcguccuggccgccgagugcaccaucuucaaggacgccuccgggaagcccgugcccuacugcuacgacaccaacgugcuggagggcagcgucgccuacgagucccuccggcccgacacccgcuacgugcugauggacgggagcaucauccaguucccgaacacguaccuggagggcuccgugcgggucgugaccaccuucgacagcgaguacugccgccacgggaccugcgagcgguccgaggcgggggugugcgucagcacguccggccgcugggugcucaacaacgacuacuaccggagccugcccgggguguucugcggcgucgacgccgugaaccugcucaccaacauguucaccccgcugauccagcccaucggcgcccuggacaucuccgccagcaucgucgccgggggcaucguggcgaccguggucacgugccucgccuacuacuucaugcgcuuccggcgcgccuucggggaguacagccacgugguggccuucaacacccugcuguuccucauguccuucaccguccugugccugacccccguguacagcuuccuccccggcguguacuccgucaucuaccuguaccugacguucuaccucaccaacgacgugagcuuccuggcccacauccaguggauggugauguucacgccccugguccccuucuggaucaccaucgcguacaucaucugcaucuccaccaagcacuucuacugguucuucagcaacuaccucaagcggcgcgugguguucaacggggucuccuucagcaccuucgaggaggccgcccugugcaccuuccugcucaacaaggagauguaccugaagcugcgguccgacgugcuccugccgcugacccaguacaaccgcuaccucgcccuguacaacaaguacaaguacuucagcggcgccauggacacgaccuccuaccgggaggcggccugcugccaccuggccaaggcccucaacgacuucagcaacuccggcagcgacgugcuguaccagccgccccagaccuccaucaccagcgcgguccugcagugaggacuagucccuguucccagagcccacuuuuuuuucuuuuuuugaaauaaaauagccugucuuucagaucucaaaggcucuuuucagagccaccaaaaaaaaaaaaaaaaaaaaaaaaaaaaaaaaaaaaaaaaaaaaaaaaaaaaaaaaaaaaaaaaaaaaaaaaaaaaaaaaaaaaaaaaaaaaaaaaaaaaa

SEQ ID NO: 20188 - RNA, 1778 nt, Artificial Sequence
  SARS-CoV-2__MT873324.1__non-structural protein 4 (NSP4) mRNA gc
aggagagucccgcagucggcguccagcggcucugcuuguucgugugugugucguugcaggccuuauucaagcuuaccaugaagaucgugaacaacuggcugaagcagcucaucaaggucacccugguguuccuguucguggccgccaucuucuaccucaucacccccguccacgugaugagcaagcacacggacuucuccagcgagaucaucggcuacaaggcgaucgacgggggcgugacccgcgacaucgccuccaccgacacgugcuucgccaacaagcacgccgacuucgacaccugguucagccagcggggcggcuccuacaccaacgacaaggccugcccccugaucgcggccgucaucacccgcgaggugggguucgugguccccggccugcccggcaccauccuccggacgaccaacggggacuuccugcacuuccugccccgcguguucagcgccgugggcaacaucugcuacaccccguccaagcucaucgaguacaccgacuucgccacgagcgcgugcguccuggccgccgagugcaccaucuucaaggacgccuccgggaagcccgugcccuacugcuacgacaccaacgugcuggagggcagcgucgccuacgagucccuccggcccgacacccgcuacgugcugauggacgggagcaucauccaguucccgaacacguaccuggagggcuccgugcgggucgugaccaccuucgacagcgaguacugccgccacgggaccugcgagcgguccgaggcgggggugugcgucagcacguccggccgcugggugcucaacaacgacuacuaccggagccugcccgggguguucugcggcgucgacgccgugaaccugcucaccaacauguucacgccccugauccagcccaucggcgcccuggacaucuccgccagcaucgucgccgggggcaucguggcgaucguggugaccugccucgccuacuacuucaugcgcuuccggcgcgccuucggggaguacagccacgucguggccuucaacacccugcuguuccucauguccuucaccguccugugccugaccccgguguacagcuuccuccccggcguguacuccaucaucuaccuguaccugaccuucuaccucacgaacgacgucagcuuccuggcccacauccaguggauggugauguucacgccccuggugcccuucuggaucaccaucgcguacaucaucugcaucuccaccaagcacuucuacugguucuucagcaacuaccucaagcggcgcgucguguucaacgggguguccuucagcaccuucgaggaggccgcccugugcaccuuccugcucaacaaggagauguaccugaagcugcgguccgacguccuccugccgcugacccaguacaaccgcuaccucgcccuguacaacaaguacaaguacuucagcggcgccauggacaccacguccuaccgggaggcggccugcugccaccuggccaaggcccucaacgacuucagcaacuccggcagcgacgugcuguaccagccgccccagaccuccaucaccagcgcggugcugcagugaggacuagucccuguucccagagcccacuuuuuuuucuuuuuuugaaauaaaauagccugucuuucagaucucaaaggcucuuuucagagccaccaaaaaaaaaaaaaaaaaaaaaaaaaaaaaaaaaaaaaaaaaaaaaaaaaaaaaaaaaaaaaaaaaaaaaaaaaaaaaaaaaaaaaaaaaaaaaaaaaaaaa

SEQ ID NO: 20189 - RNA, 1778 nt, Artificial Sequence
  SARS-CoV-2__MT873454.1__non-structural protein 4 (NSP4) mRNA gc
aggagagucccgcagucggcguccagcggcucugcuuguucgugugugugucguugcaggccuuauucaagcuuaccaugaagaucgugaacaacuggcugaagcagcucaucaaggucacccugguguuccuguucguggccgccaucuucuaccucaucacccccguccacgugaugagcaagcacacggacuucuccagcgagaucaucggcuacaaggcgaucgacgggggcgugacccgcgacaucgccuccaccgacacgugcuucgccaacaagcacgccgacuucgacaccugguucagccagcggggcggcuccuacaccaacgacaaggccugcccccugaucgcggccgucaucacccgcgaggugggguucgugguccccggccugcccggcaccauccuccggacgaccaacggggacuuccugcacuuccugccccgcguguucagcgccgugggcaacaucugcuacaccccguccaagcucaucgaguacaccgacuucgccacgagcgcgugcguccuggccgccgagugcaccaucuucaaggacgccuccgggaagcccgugcccuacugcuacgacaccaacgugcuggagggcagcgucgccuacgagucccuccggcccgacacccgcuacgugcugauggacgggagcaucauccaguucccgaacacguaccuggagggcuccgugcgggucgugaccaccuucgacagcgaguacugccgccacgggaccugcgagcgguccgaggcgggggugugcgucagcacguccggccgcugggugcucaacaacgacuacuaccggagccugcccgggguguucugcggcgucgacgccgugaaccugcucaccaacauguucacgccccugauccagcccaucggcgcccuggacaucuccgccagcaucgucgccgggggcaucguggcgaucguggugaccugccucgccuacuacuucaugcgcuuccggcgcgccuucggggaguacagccacgucguggccuucaacacccugcuguuccucauguccuucaccguccugugccugaccccgguguacagcuuccuccccggcguguacuccgucaucuaccuguaccugaccuucuaccucacgaacgacgugagcuuccuggcccacauccaguggauggugauguucacgccccugguccccuucuggaucaccaucgcguacaucaucugcaucuccaccaagcacuucuacugguucuucagcaacuaccucaagcggcgcgugguguucaacggggucuccuucagcaccuucgaggaggccgcccugugcaccuuccugcucaacaaggagauguaccugaagcugcgguccgacgugcuccugccgcugacccaguacaaccgcuaccucgcccuguacaacaaguacaaguacuucagcggcgccauggacaccacguccuaccgggaggcggccugcugccaccuggugaaggcccucaacgacuucagcaacuccggcagcgacguccuguaccagccgccccagaccuccaucaccagcgccgugcugcagugaggacuagucccuguucccagagcccacuuuuuuuucuuuuuuugaaauaaaauagccugucuuucagaucucaaaggcucuuuucagagccaccaaaaaaaaaaaaaaaaaaaaaaaaaaaaaaaaaaaaaaaaaaaaaaaaaaaaaaaaaaaaaaaaaaaaaaaaaaaaaaaaaaaaaaaaaaaaaaaaaaaaa

SEQ ID NO: 20190 - RNA, 1778 nt, Artificial Sequence
  SARS-CoV-2__MT877304.1__non-structural protein 4 (NSP4) mRNA gc
aggagagucccgcagucggcguccagcggcucugcuuguucgugugugugucguugcaggccuuauucaagcuuaccaugaagaucgugaacaacuggcugaagcagcucaucaaggucacccugguguuccuguucguggccgucaucuucuaccucaucacccccgugcacgugaugagcaagcacacggacuucuccagcgagaucaucggcuacaaggccaucgacgggggcgucacccgcgacaucgcguccaccgacacgugcuucgccaacaagcacgccgacuucgacaccugguucagccagcggggcggcuccuacaccaacgacaaggccugcccccugaucgccgcggugaucacccgcgaggugggguucgucgugcccggccugcccggcaccauccuccggacgaccaacggggacuuccugcacuuccugccccgcguguucagcgccgucggcaacaucugcuacaccccguccaagcucaucgaguacaccgacuucgccacgagcgccugcgugcuggcggccgagugcaccaucuucaaggacgccuccgggaagcccgugcccuacugcuacgacaccaacguccuggagggcagcguggccuacgagucccuccggcccgacacccgcuacgugcugauggacgggagcaucauccaguucccgaacacguaccuggagggcuccguccggguggugaccaccuucgacagcgaguacugccgccacgggaccugcgagcgguccgaggccggggucugcgugagcacguccggccgcugggugcucaacaacgacuacuaccggagccugcccggggucuucugcggcguggacgcggucaaccugcucaccaacauguucacgccccugauccagcccaucggcgcccuggacaucuccgccagcaucguggccgggggcaucguggccaucgucgugaccugccucgcguacuacuucaugcgcuuccggcgcgccuucggggaguacagccacguggucgccuucaacacccugcuguuccucauguccuucaccgugcugugccugaccccgguguacagcuuccuccccggcgucuacuccgugaucuaccuguaccugaccuucuaccucacgaacgacgugagcuuccuggcccacauccaguggauggucauguucacgccccuggugcccuucuggaucaccaucgccuacaucaucugcaucuccaccaagcacuucuacugguucuucagcaacuaccucaagcggcgcguggucuucaacgggguguccuucagcaccuucgaggaggcggcccugugcaccuuccugcucaacaaggagauguaccugaagcugcgguccgacgugcuccugccgcugacccaguacaaccgcuaccucgcccuguacaacaaguacaaguacuucagcggcgccauggacaccacguccuaccgggaggccgcgugcugccaccuggccaaggcccucaacgacuucagcaacuccggcagcgacguccuguaccagccgccccagaccuccaucaccagcgccgugcugcagugaggacuagucccuguucccagagcccacuuuuuuuucuuuuuuugaaauaaaauagccugucuuucagaucucaaaggcucuuuucagagccaccaaaaaaaaaaaaaaaaaaaaaaaaaaaaaaaaaaaaaaaaaaaaaaaaaaaaaaaaaaaaaaaaaaaaaaaaaaaaaaaaaaaaaaaaaaaaaaaaaaaaa

SEQ ID NO: 20191 - RNA, 1778 nt, Artificial Sequence
  SARS-CoV-2__MT877329.1__non-structural protein 4 (NSP4) mRNA gc
aggagagucccgcagucggcguccagcggcucugcuuguucgugugugugucguugcaggccuuauucaagcuuaccaugaagaucgugaacaacuggcugaagcagcucaucaaggucacccugguguuccuguucguggccgccaucuucuaccucaucacccccguccacgugaugagcaagcacacggacuucuccagcgagaucaucggcuacaaggcgaucgacgggggcgugacccgcgacaucgccuccaccgacacgugcuucgccaacaagcacgccgacuucgacaccugguucagccagcggggcggcuccuacaccaacgacaaggccugcccccugaucgcggccgucaucacccgcgaggugggguucgugguccccggccugcccggcaccauccuccggacgaccaacggggacuuccugcacuuccugccccgcguguucagcgccgugggcaacaucugcuacaccccguccaagcucaucgaguacaccgacuucgccacgagcgcgugcguccuggccgccgagugcaccaucuucaaggacgccuccgggaagcccgugcccuacugcuacgacaccaacgugcuggagggcagcgucgccuacgagucccuccggcccaacacccgcuacgugcugauggacgggagcaucauccaguucccgaacacguaccuggagggcuccgugcgggucgugaccaccuucgacagcgaguacugccgccacgggaccugcgagcgguccgaggcgggggugugcgucagcacguccggccgcugggugcucaacaacgacuacuaccggagccugcccgggguguucugcggcgucgacgccgugaaccugcucaccaacauguucacgccccugauccagcccaucggcgcccuggacaucuccgccagcaucgucgccgggggcaucguggcgaucguggugaccugccucgccuacuacuucaugcgcuuccggcgcgccuucggggaguacagccacgucguggccuucaacacccugcuguuccucauguccuucaccguccugugccugaccccgguguacagcuuccuccccggcguguacuccgucaucuaccuguaccugaccuucuaccucacgaacgacgugagcuuccuggcccacauccaguggauggugauguucacgccccugguccccuucuggaucaccaucgcguacaucaucugcaucuccaccaagcacuucuacugguucuucagcaacuaccucaagcggcgcgugguguucaacggggucuccuucagcaccuucgaggaggccgcccugugcaccuuccugcucaacaaggagauguaccugaagcugcgguccgacgugcuccugccgcugacccaguacaaccgcuaccucgcccuguacaacaaguacaaguacuucagcggcgccauggacaccacguccuaccgggaggcggccugcugccaccuggccaaggcccucaacgacuucagcaacuccggcagcgacgugcuguaccagccgccccagaccuccaucaccagcgcgguccugcagugaggacuagucccuguucccagagcccacuuuuuuuucuuuuuuugaaauaaaauagccugucuuucagaucucaaaggcucuuuucagagccaccaaaaaaaaaaaaaaaaaaaaaaaaaaaaaaaaaaaaaaaaaaaaaaaaaaaaaaaaaaaaaaaaaaaaaaaaaaaaaaaaaaaaaaaaaaaaaaaaaaaaa

SEQ ID NO: 20192 - RNA, 1778 nt, Artificial Sequence
  SARS-CoV-2__MT856682.1__non-structural protein 4 (NSP4) mRNA gc
aggagagucccgcagucggcguccagcggcucugcuuguucgugugugugucguugcaggccuuauucaagcuuaccaugaagaucgugaacaacuggcugaagcagcucaucaaggucacccugguguuccuguucguggccgccaucuucuaccucaucacccccguccacgugaugagcaagcacacggacuucuccagcgagaucaucggcuacaaggcgaucgacgggggcgugacccgcgacaucgccuccaccgacacgugcuucgccaacaagcacgccgacuucgacaccugguucagccagcggggcggcuccuacaccaacgacaaggccugcccccugaucgcggccgucaucacccgcgaggugggguucgugguccccagccugcccggcaccauccuccggacgaccaacggcgacuuccugcacuuccugccccgcguguucuccgccguggggaacaucugcuacaccccgagcaagcucaucgaguacaccgacuucgccacguccgcgugcguccuggccgccgagugcaccaucuucaaggacgccagcggcaagcccgugcccuacugcuacgacaccaacgugcuggagggguccgucgccuacgagagccuccggcccgacacccgcuacgugcugauggacggcuccaucauccaguucccgaacacguaccuggaggggagcgugcgggucgugaccaccuucgacuccgaguacugccgccacgggaccugcgagcggagcgaggcgggcgugugcgucuccacgagcgggcgcugggugcucaacaacgacuacuaccggucccugcccggcguguucugcggggucgacgccgugaaccugcucaccaacauguucacgccccugauccagcccaucggcgcccuggacaucagcgccagcaucgucgccggcgggaucguggcgaucguggugaccugccucgccuacuacuucaugcgcuuccggcgcgccuucggcgaguacucccacgucguggccuucaacacccugcuguuccucaugagcuucaccguccugugccugaccccgguguacuccuuccuccccgggguguacagcgucaucuaccuguaccugaccuucuaccucacgaacgacguguccuuccuggcccacauccaguggauggugauguucacgccccugguccccuucuggaucaccaucgcguacaucaucugcaucagcaccaagcacuucuacugguucuucuccaacuaccucaagcggcgcgugguguucaacggcgucagcuucuccaccuucgaggaggccgcccugugcaccuuccugcucaacaaggagauguaccugaagcugcggagcgacgugcuccugccgcugacccaguacaaccgcuaccucgcccuguacaacaaguacaaguacuucuccggggccauggacaccacgagcuaccgggaggcggccugcugccaccuggccaaggcccucaacgacuucuccaacagcggcuccgacgugcuguaccagccgccccagaccagcaucaccuccgcgguccugcagugaggacuagucccuguucccagagcccacuuuuuuuucuuuuuuugaaauaaaauagccugucuuucagaucucaaaggcucuuuucagagccaccaaaaaaaaaaaaaaaaaaaaaaaaaaaaaaaaaaaaaaaaaaaaaaaaaaaaaaaaaaaaaaaaaaaaaaaaaaaaaaaaaaaaaaaaaaaaaaaaaaaaa

SEQ ID NO: 20193 - RNA, 1778 nt, Artificial Sequence
  SARS-CoV-2__MT846007.1__non-structural protein 4 (NSP4) mRNA gc
aggagagucccgcagucggcguccagcggcucugcuuguucgugugugugucguugcaggccuuauucaagcuuaccaugaagaucgugaacaacuggcugaagcagcucaucaaggucacccugguguuccuguucguggccgccaucuucuaccucaucacccccguccacgugaugagcaagcacacggacuucuccagcgagaucaucggcuacaaggcgaucgacgggggcgugacccgcaacaucgccuccaccgacacgugcuucgccaacaagcacgccgacuucgacaccugguucagccagcggggcggcuccuacaccaacgacaaggccugcccccugaucgcggccgucaucacccgcgaggugggguucgugguccccggccugcccggcaccauccuccggacgaccaacggggacuuccugcacuuccugccccgcguguucagcgccgugggcaacaucugcuacaccccguccaagcucaucgaguacaccgacuucgccacgagcgcgugcguccuggccgccgagugcaccaucuucaaggacgccuccgggaagcccgugcccuacugcuacgacaccaacgugcuggagggcagcgucgccuacgagucccuccggcccgacacccgcuacgugcugauggacgggagcaucauccaguucccgaacacguaccuggagggcuccgugcgggucgugaccaccuucgacagcgaguacugccgccacgggaccugcgagcgguccgaggcgggggugugcgucagcacguccggccgcugggugcucaacaacgacuacuaccggagccugcccgggguguucugcggcgucgacgccgugaaccugcucaccaacauguucacgccccugauccagcccaucggcgcccuggacaucuccgccagcaucgucgccgggggcaucguggcgaucguggugaccugccucgccuacuacuucaugcgcuuccggcgcgccuucggggaguacagccacgucguggccuucaacacccugcuguuccucauguccuucaccguccugugccugaccccgguguacagcuuccuccccggcguguacuccgucaucuaccuguaccugaccuucuaccucacgaacgacgugagcuuccuggcccacauccaguggauggugauguucacgccccugguccccuucuggaucaccaucgcguacaucaucugcaucuccaccaagcacuucuacugguucuucagcaacuaccucaagcggcgcgugguguucaacggggucuccuucagcaccuucgaggaggccgcccugugcaccuuccugcucaacaaggagauguaccugaagcugcgguccgacgugcuccugccgcugacccaguacaaccgcuaccucgcccuguacaacaaguacaaguacuucagcggcgccauggacaccacguccuaccgggaggcggccugcugccaccuggccaaggcccucaacgacuucagcaacuccggcagcgacgugcuguaccagccgccccagaccuccaucaccagcgcgguccugcagugaggacuagucccuguucccagagcccacuuuuuuuucuuuuuuugaaauaaaauagccugucuuucagaucucaaaggcucuuuucagagccaccaaaaaaaaaaaaaaaaaaaaaaaaaaaaaaaaaaaaaaaaaaaaaaaaaaaaaaaaaaaaaaaaaaaaaaaaaaaaaaaaaaaaaaaaaaaaaaaaaaaaa

SEQ ID NO: 20194 - RNA, 1778 nt, Artificial Sequence
  SARS-CoV-2__MT846519.1__non-structural protein 4 (NSP4) mRNA gc
aggagagucccgcagucggcguccagcggcucugcuuguucgugugugugucguugcaggccuuauucaagcuuaccaugaagaucgugaacaacuggcugaagcagcucaucaaggucacccugguguuccuguucguggccgccaucuucuaccucaucacccccguccacgugaugagcaagcacacggacuucuccagcgagaucaucggcuacaaggcgaucgacgggggcgugacccgcgacaucgccuccaccgacacgugcuucgccaacaagcacgccgacuucgacaccugguucagccagcggggcggcuccuacaccaacgacaaggccugcccccugaucgcggccgucaucacccgcgaggugggguucgugguccccggccugcccggcaccauccuccggacgaccaacggggacuuccugcacuuccugccccgcguguucagcgccgugggcaacaucugcuacaccccguccaagcucaucgaguacaccgacuucgccacgagcgcgugcguccuggccgccgagugcaccaucuucaaggacgccuccgggaagcccgugcccuacugcuacgacaccaacgugcuggagggcagcgucgccuacgagucccuccggcccgacacccgcuacgugcugauggacgggagcaucauccaguucccgaacacguaccuggagggcuccgugcgggucgugaccaccuucgacagcgaguacugccgccacgggaccugcgagcgguccgaggcgggggugugcgucagcacguccggccgcugggugcucaacaacgacuacuaccggagccugcccgggguguucugcggcgucgacgccgugaaccugcucaccaacauguucacgccccugauccagcccaucggcgcccuggacaucuccgccagcaucgucgccgggggcaucguggcgaucguggugaccugccucgccuacuacuucaugcgcuuccggcgcgccuucggggaguacagccacgucguggccuucaacacccugcuguuccucauguccuucaccguccugugccugaccccgguguacagcuuccuccccggcguguacuccgucaucuaccuguaccugaccuucuaccucacgaacgacgugagcuuccuggcccacauccaguggauggugauguucacgccccugguccccuucuggaucaccaucgcguacaucaucugcaucuccaccaagcacuucuacugguucuucagcaacuaccucgagcggcgcgugguguucaacggggucuccuucagcaccuucgaggaggccgcccugugcaccuuccugcucaacaaggagauguaccugaagcugcgguccgacgugcuccugccgcugacccaguacaaccgcuaccucgcccuguacaacaaguacaaguacuucagcggcgccauggacaccacguccuaccgggaggcggccugcugccaccuggccaaggcccucaacgacuucagcaacuccggcagcgacgugcuguaccagccgccccagaccuccaucaccagcgcgguccugcagugaggacuagucccuguucccagagcccacuuuuuuuucuuuuuuugaaauaaaauagccugucuuucagaucucaaaggcucuuuucagagccaccaaaaaaaaaaaaaaaaaaaaaaaaaaaaaaaaaaaaaaaaaaaaaaaaaaaaaaaaaaaaaaaaaaaaaaaaaaaaaaaaaaaaaaaaaaaaaaaaaaaaa

SEQ ID NO: 20195 - RNA, 1778 nt, Artificial Sequence
  SARS-CoV-2__MT846557.1__non-structural protein 4 (NSP4) mRNA gc
aggagagucccgcagucggcguccagcggcucugcuuguucgugugugugucguugcaggccuuauucaagcuuaccaugaagaucgugaacaacuggcugaagcagcucaucaaggucacccugguguuccuguucguggccgccaucuucuaccucaucacccccguccacgugaugagcaagcacacggacuucuccagcgagaucaucggcuacaaggcgaucgacgggggcgugacccgcgacaucgccuccaccgacacgugcuucgccaacaagcacgccgacuucgacaccugguucagccagcggggcggcuccuacaccaacgacaaggccugcccccugaucgcggccgucaucacccgcgaggugggguucgugguccccggccugcccggcaccauccuccggacgaccaacggggacuuccugcacuuccugccccgcguguucagcgccgugggcaacaucugcuacaccccguccaagcucaucgaguacaccgacuucgccacgagcgcgugcguccuggccgccgagugcaccaucuucaaggacgccuccgggaagcccgugcccuacugcuacgacaccaacgugcuggagggcagcgucgccuacgagucccuccggcccgacauccgcuacgugcugauggacgggagcaucauccaguucccgaacaccuaccuggagggcuccgugcgggucgugacgaccuucgacagcgaguacugccgccacgggaccugcgagcgguccgaggcgggggugugcgucagcaccuccggccgcugggugcucaacaacgacuacuaccggagccugcccgggguguucugcggcgucgacgccgugaaccugcucacgaacauguucacgccccugauccagcccaucggcgcccuggacaucuccgccagcaucgucgccgggggcaucguggcgaucguggugaccugccucgccuacuacuucaugcgcuuccggcgcgccuucggggaguacagccacgucguggccuucaacacccugcuguuccucauguccuucaccguccugugccugaccccgguguacagcuuccuccccggcguguacuccgucaucuaccuguaccugaccuucuaccucaccaacgacgugagcuuccuggcccacauccaguggauggugauguucacgccccugguccccuucuggaucaccaucgcguacaucaucugcaucuccaccaagcacuucuacugguucuucagcaacuaccucaagcggcgcgugguguucaacggggucuccuucagcaccuucgaggaggccgcccugugcacguuccugcucaacaaggagauguaccugaagcugcgguccgacgugcuccugccgcugacccaguacaaccgcuaccucgcccuguacaacaaguacaaguacuucagcggcgccauggacaccaccuccuaccgggaggcggccugcugccaccuggccaaggcccucaacgacuucagcaacuccggcagcgacgugcuguaccagccgccccagacguccaucaccagcgcgguccugcagugaggacuagucccuguucccagagcccacuuuuuuuucuuuuuuugaaauaaaauagccugucuuucagaucucaaaggcucuuuucagagccaccaaaaaaaaaaaaaaaaaaaaaaaaaaaaaaaaaaaaaaaaaaaaaaaaaaaaaaaaaaaaaaaaaaaaaaaaaaaaaaaaaaaaaaaaaaaaaaaaaaaaa

SEQ ID NO: 20196 - RNA, 1778 nt, Artificial Sequence
  SARS-CoV-2__MT846600.1__non-structural protein 4 (NSP4) mRNA gc
aggagagucccgcagucggcguccagcggcucugcuuguucgugugugugucguugcaggccuuauucaagcuuaccaugaagaucgugaacaacuggcugaagcagcucaucaaggucacccugguguuccuguucguggccgccaucuucuaccucaucacccccguccacgugaugagcaagcacacggacuucuccagcgagaucaucggcuacaaggcgaucgacgggggcgugacccgcgacaucgccuccaccgacacgugcuucgccaacaagcacgccgacuucgacaccugguucagccagcgcgggggcuccuacaccaacgacaaggccugcccgcugaucgcggccgucaucacccgggaggugggguucgugguccccggccugcccggcaccauccuccggacgaccaacggggacuuccugcacuuccugccccgcguguucagcgccgugggcaacaucugcuacaccccguccaagcucaucgaguacaccgacuucgccacgagcgcgugcguccuggccgccgagugcaccaucuucaaggacgccuccggcaagagcgugcccuacugcuacgacaccaacgugcuggagggcuccgucgccuacgagagccuccggcccgacacccgcuacgugcugauggacggguccaucauccaguuccccaacacguaccuggagggcagcgugcgggucgugaccaccuucgacuccgaguacugccgccacgggaccugcgagcggagcgaggcgggggugugcgucuccacgagcggccgcugggugcucaacaacgacuacuaccggucccugccggggguguucugcggcgucgacgccgugaaccugcucaccaacauguucacgccccugauccagcccaucggcgcccuggacaucagcgccagcaucgucgccgggggcaucguggcgaucguggugaccugccucgccuacuacuucaugcgcuuccggcgcgccuucggggaguacucccacgucguggccuucaacacccugcuguuccucaugagcuucaccguccugugccugacccccguguacuccuuccucccgggcguguacagcgucaucuaccuguaccugaccuucuaccucacgaacgacguguccuuccuggcccacauccaguggauggugauguucacgccccugguccccuucuggaucaccaucgcguacaucaucugcaucagcaccaagcacuucuacugguucuucuccaacuaccucaagcggcgcgugguguucaacggggucagcuucuccaccuucgaggaggccgcccugugcaccuuccugcucaacaaggagauguaccugaagcugcggagcgacgugcuccugccccugacccaguacaaccgcuaccucgcccuguacaacaaguacaaguacuucuccggcgccauggacaccacgagcuaccgggaggcggccugcugccaccuggccaaggcccucaacgacuucuccaacagcggcuccgacgugcuguaccagccgccccagaccagcaucaccuccgcgguccugcagugaggacuagucccuguucccagagcccacuuuuuuuucuuuuuuugaaauaaaauagccugucuuucagaucucaaaggcucuuuucagagccaccaaaaaaaaaaaaaaaaaaaaaaaaaaaaaaaaaaaaaaaaaaaaaaaaaaaaaaaaaaaaaaaaaaaaaaaaaaaaaaaaaaaaaaaaaaaaaaaaaaaaa

SEQ ID NO: 20197 - RNA, 1778 nt, Artificial Sequence
  SARS-CoV-2__MT846623.1__non-structural protein 4 (NSP4) mRNA gc
aggagagucccgcagucggcguccagcggcucugcuuguucgugugugugucguugcaggccuuauucaagcuuaccaugaagaucgugaacaacuggcugaagcagcucaucaaggucacccugguguuccuguucguggccgccaucuucuaccucaucacccccguccacgugaugagcaagcacacggacuucuccagcgagaucaucggcuacaaggcgaucgacgggggcgugacccgcgacaucgccuccaccgacacgugcuucgccaacaagcacgccgacuucgacaccugguucagccagcggggcggcuccuacaccaacgacaaggccugcccccugaucgcggccgucaucacccgcgaggugggguucgugguccccggccugcccggcaccauccuccggacgaccaacggggacuuccugcacuuccugccccgcguguucagcgccgugggcaacaucugcuacaccccguccaagcucaucgaguacaccgacuucgccacgagcgcgugcguccuggccgccgagugcaccaucuucaaggacgccuccgggaagcccgugcccuacugcuacgacaccaacgugcuggagggcagcgucgccuacgagucccuccggcccgacacccgcuacgugcugauggacgggagcaucauccaguucccgaacacguaccuggagggcuccgugcgggucgugaccaccuucgacagcgaguacugccgccacgggaccugcgagcgguccgaggcgggggugugcgucagcacguccggccgcugggugcucaacaacgacuacuaccggagccugcccgggguguucugcggcgucgacgccgugaaccugcucaccaacauguucacgccccugauccagcccaucggcgcccuggacaucuccgccagcaucgucgccgggggcaucguggcgaucguggugaccugccucgccuacuacuucaugcgcuuccggcgcgccuucggggaguacagccacgucguggccuucaacacccugcuguuccucauguccuucaccguccugugccugaccccgguguacagcuuccuccccggcguguacuccgucaucuaccuguaccugaccuucuaccucacgaacgacgugagcuuccuggcccacauccaguggauggugauguucacgccccugguccccuucuggaucaccaucgcguacaucaucugcaucuccaccaagcacuucuacugguucuucagcaacuaccucaagaagcgggugguguucaacggggucuccuucagcaccuucgaggaggccgcccugugcaccuuccugcucaacaaggagauguaccugaagcugcgcuccgacgugcuccugccgcugacccaguacaaccgguaccucgcccuguacaacaaguacaaguacuucagcggcgccauggacaccacguccuaccgcgaggcggccugcugccaccuggccaaggcccucaacgacuucagcaacuccggcagcgacgugcuguaccagccgccccagaccuccaucaccagcgcgguccugcagugaggacuagucccuguucccagagcccacuuuuuuuucuuuuuuugaaauaaaauagccugucuuucagaucucaaaggcucuuuucagagccaccaaaaaaaaaaaaaaaaaaaaaaaaaaaaaaaaaaaaaaaaaaaaaaaaaaaaaaaaaaaaaaaaaaaaaaaaaaaaaaaaaaaaaaaaaaaaaaaaaaaaa

SEQ ID NO: 20198 - RNA, 1778 nt, Artificial Sequence
  SARS-CoV-2__MT843311.1__non-structural protein 4 (NSP4) mRNA gc
aggagagucccgcagucggcguccagcggcucugcuuguucgugugugugucguugcaggccuuauucaagcuuaccaugaagaucgugaacaacuggcugaagcagcucaucaaggucacccuggccuuccuguucguggccgcgaucuucuaccucaucacccccgugcacgucaugagcaagcacacggacuucuccagcgagaucaucggcuacaaggccaucgacgggggcgugacccgcgacaucgccuccaccgacacgugcuucgccaacaagcacgccgacuucgacaccugguucagccagcggggcggcuccuacaccaacgacaaggcgugcccccugaucgccgccgugaucacccgcgaggucggguucguggugcccggccugcccggcaccauccuccggacgaccaacggggacuuccugcacuuccugccccgcgucuucagcgccgugggcaacaucugcuacaccccguccaagcucaucgaguacaccgacuucgcgacgagcgccugcgugcuggccgccgagugcaccaucuucaaggacgccuccgggaagcccguccccuacugcuacgacaccaacgugcuggagggcagcguggcguacgagucccuccggcccgacacccgcuacguccugauggacgggagcaucauccaguucccgaacacguaccuggagggcuccgugcggguggucaccaccuucgacagcgaguacugccgccacgggaccugcgagcgguccgaggccggggugugcgugagcacguccggccgcuggguccucaacaacgacuacuaccggagccugcccgggguguucugcggcguggacgccgucaaccugcucaccaacauguucacgccccugauccagcccaucggcgcccuggacaucuccgccagcaucguggccgggggcaucgucgcgaucguggugaccugccucgccuacuacuucaugcgcuuccggcgcgccuucggggaguacagccacgucguggccuucaacacccugcuguuccucauguccuucaccgugcugugccugaccccggucuacagcuuccuccccggcguguacuccgugaucuaccuguaccugaccuucuaccucacgaacgacgucagcuuccuggcgcacauccaguggauggugauguucacgccccuggugcccuucuggaucaccaucgccuacaucaucugcaucuccaccaagcacuucuacugguucuucagcaacuaccucaagcggcgcgucguguucaacgggguguccuucagcaccuucgaggaggccgcccugugcaccuuccugcucaacaaggagauguaccugaagcugcgguccgacguccuccugccgcugacccaguacaaccgcuaccucgcccuguacaacaaguacaaguacuucagcggcgcgauggacaccacguccuaccgggaggccgccugcugccaccuggccaaggcgcucaacgacuucagcaacuccggcagcgacgugcuguaccagccgccccagaccuccaucaccagcgccgugcugcagugaggacuagucccuguucccagagcccacuuuuuuuucuuuuuuugaaauaaaauagccugucuuucagaucucaaaggcucuuuucagagccaccaaaaaaaaaaaaaaaaaaaaaaaaaaaaaaaaaaaaaaaaaaaaaaaaaaaaaaaaaaaaaaaaaaaaaaaaaaaaaaaaaaaaaaaaaaaaaaaaaaaaa

SEQ ID NO: 20199 - RNA, 1778 nt, Artificial Sequence
  SARS-CoV-2__MT843318.1__non-structural protein 4 (NSP4) mRNA gc
aggagagucccgcagucggcguccagcggcucugcuuguucgugugugugucguugcaggccuuauucaagcuuaccaugaagaucgugaacaacuggcugaagcagcucaucaaggucacccugguguuccuguucguggccgccaucuucuaccucaucacccccguccacgugaugagcaagcacacggacuucuccagcgagaucaucggcuacaaggcgaucgacgggggcgugacccgcgacaucgccuccaccgacacgugcuucgccaacaagcacgccgacuucgacaccugguucagccagcggggcggcuccuacaccaacgacaaggccugcccccugaucgcggccgucaucacccgcgaggugggguucgugguccccggccugcccggcaccauccuccggacgaccaacggggacuuccugcacuuccugccccgcguguucagcgccgugggcaacaucugcuacaccccguccaagcucaucgaguacaccgacuucgccacgagcgcgugcguccuggccgccgagugcaccaucuucaaggacgccuccgggaagcccgugcccuacugcuacgacaccaacgugcuggagggcagcgucgccuacgagucccuccggcccgacacccgcuacgugcugauggacgggagcaucauccaguucccgaacacguaccuggagggcuccgugcgggucgugaccaccuucgacagcgaguacugccgccacgggaccugcgagcgguccgaggcgggggugugcgucagcacguccggccgcugggugcucaacaacgacuacuaccggagccugcccgggguguucugcggcgucgacgccgugaaccugcucaccaacauguucacgccccugauccagcccaucggcgcccuggacaucuccgccagcaucgucgccgggggcaucguggcgaucguggugaccugccucgccuacuacuucaugcgcuuccggcgcgccuucggggaguacagccacgucguggccuucaacacccugcuguuccucauguccuucaccguccugugccugaccccgguguacagcuuccuccccggcguguacuccgucaucuaccuguaccugaccuucuaccucacgaacgacgugagcuuccuggcccacauccaguggauggugauguucacgccccugguccccuucuggaucaccaucgcguacaucaucugcaucuccaccaagcacuucuacugguucuucagcaacuaccucaagcggcgcgugguguucaacggggucuccuucagcaccuucgaggaggccgcccugugcaccuuccugcucaacaaggagauguaccugaagcugcgguccgacgugcuccugccgcugacccaguacaaccgcuaccucgcccuguacaacaaguacaaguacuucagcggcgccaucgacaccacguccuaccgggaggcggccugcugccaccuggccaaggcccucaacgacuucagcaacuccggcagcgacgugcuguaccagccgccccagaccuccaucaccagcgcgguccugcagugaggacuagucccuguucccagagcccacuuuuuuuucuuuuuuugaaauaaaauagccugucuuucagaucucaaaggcucuuuucagagccaccaaaaaaaaaaaaaaaaaaaaaaaaaaaaaaaaaaaaaaaaaaaaaaaaaaaaaaaaaaaaaaaaaaaaaaaaaaaaaaaaaaaaaaaaaaaaaaaaaaaaa

SEQ ID NO: 20200 - RNA, 1778 nt, Artificial Sequence
  SARS-CoV-2__MT843757.1__non-structural protein 4 (NSP4) mRNA gc
aggagagucccgcagucggcguccagcggcucugcuuguucgugugugugucguugcaggccuuauucaagcuuaccaugaagaucgugaacaacuggcugaagcagcucaucaaggucacccugguguuccuguucguggccgccaucuucuaccucaucacccccguccacgugaugagcaagcacacggacuucuccagcgagaucaucggcuacaaggcgaucgacgggggcgugacccgcgacaucgccuccaccgacacgugcuucgccaacaagcacgccgacuucgacaccugguucagccagcggggcggcuccuacaccaacgacaaggccugcccccugaucgcggccgucaucacccgcgaggugggguucgugguccccggccugcccggcaccauccuccggacgaccagcgacuuccugcacuuccugccccgcguguucuccgccguggggaacaucugcuacaccccgagcaagcucaucgaguacaccgacuucgccacguccgcgugcguccuggccgccgagugcaccaucuucaaggacgccagcggcaagcccgugcccuacugcuacgacaccaacgugcuggagggguccgucgccuacgagagccuccggcccgacacccgcuacgugcugauggacggcuccaucauccaguucccgaacacguaccuggaggggagcgugcgggucgugaccaccuucgacuccgaguacugccgccacgggaccugcgagcggagcgaggcgggcgugugcgucuccacgagcgggcgcugggugcucaacaacgacuacuaccggucccugcccggcguguucugcggggucgacgccgugaaccugcucaccaacauguucacgccccugauccagcccaucggcgcccuggacaucagcgccagcaucgucgccggcgggaucguggcgaucguggugaccugccucgccuacuacuucaugcgcuuccggcgcgccuucggcgaguacucccacgucguggccuucaacacccugcuguuccucaugagcuucaccguccugugccugaccccgguguacuccuuccuccccgggguguacagcgucaucuaccuguaccugaccuucuaccucacgaacgacguguccuuccuggcccacauccaguggauggugauguucacgccccugguccccuucuggaucaccaucgcguacaucaucugcaucagcaccaagcacuucuacugguucuucuccaacuaccucaagcggcgcgugguguucaacggcgucagcuucuccaccuucgaggaggccgcccugugcaccuuccugcucaacaaggagauguaccugaagcugcggagcgacgugcuccugccgcugacccaguacaaccgcuaccucgcccuguacaacaaguacaaguacuucuccggggccauggacaccacgagcuaccgggaggcggccugcugccaccuggccaaggcccucaacgacuucuccaacagcggcuccgacgugcuguaccagccgccccagaccagcaucaccuccgcgguccugcagagcugaggacuagucccuguucccagagcccacuuuuuuuucuuuuuuugaaauaaaauagccugucuuucagaucucaaaggcucuuuucagagccaccaaaaaaaaaaaaaaaaaaaaaaaaaaaaaaaaaaaaaaaaaaaaaaaaaaaaaaaaaaaaaaaaaaaaaaaaaaaaaaaaaaaaaaaaaaaaaaaaaaaaa

SEQ ID NO: 20201 - RNA, 1778 nt, Artificial Sequence
  SARS-CoV-2__MT831125.1__non-structural protein 4 (NSP4) mRNA gc
aggagagucccgcagucggcguccagcggcucugcuuguucgugugugugucguugcaggccuuauucaagcuuaccaugaagaacaucaacaacuggcugaagcagcucaucaaggugacccuggucuuccuguucguggccgccaucuucuaccucaucacccccgugcacgucaugagcaagcacacggacuucuccagcgagaucaucggcuacaaggcgaucgacgggggcgugacccgcgacaucgccuccaccgacacgugcuucgccaacaagcacgccgacuucgacaccugguucagccagcggggcggcuccuacaccaacgacaaggccugcccccugaucgcggccgugaucacccgcgaggucggguucguggugcccggccugcccggcaccauccuccggacgaccaacggggacuuccugcacuuccugccccgcgucuucagcgccgugggcaacaucugcuacaccccguccaagcucaucgaguacaccgacuucgccacgagcgcgugcgugcuggccgccgagugcaccaucuucaaggacgccuccgggaagcccguccccuacugcuacgacaccaacgugcuggagggcagcguggccuacgagucccuccggcccgacacccgcuacguccugauggacgggagcaucauccaguucccgaacacguaccuggagggcuccgugcggguggucaccaccuucgacagcgaguacugccgccacgggaccugcgagcgguccgaggcgggggugugcgugagcacguccggccgcuggguccucaacaacgacuacuaccggagccugcccgggguguucugcggcguggacgccgucaaccugcucaccaacauguucacgccccugauccagcccaucggcgcccuggacaucuccgccagcaucguggccgggggcaucgucgcgaucguggugaccugccucgccuacuacuucaugcgcuuccggcgcgccuucggggaguacagccacgucguggccuucaacacccugcuguuccucauguccuucaccgugcugugccugaccccggucuacagcuuccuccccggcguguacuccgugaucuaccuguaccugaccuucuaccucacgaacgacgucagcuuccuggcccacauccaguggauggugauguucacgccccuggugcccuucuggaucaccaucgcguacaucaucugcaucuccaccaagcacuucuacugguucuucagcaacuaccucaagcggcgcgucguguucaacgggguguccuucagcaccuucgaggaggccgcccugugcaccuuccugcucaacaaggagauguaccugaagcugcgguccgacguccuccugccgcugacccaguacaaccgcuaccucgcccuguacaacaaguacaaguacuucagcggcgccauggacaccacguccuaccgggaggcggccugcugccaccuggccaaggcccucaacgacuucagcaacuccggcagcgacgugcuguaccagccgccccagaccuccaucaccagcgcggugcugcagugaggacuagucccuguucccagagcccacuuuuuuuucuuuuuuugaaauaaaauagccugucuuucagaucucaaaggcucuuuucagagccaccaaaaaaaaaaaaaaaaaaaaaaaaaaaaaaaaaaaaaaaaaaaaaaaaaaaaaaaaaaaaaaaaaaaaaaaaaaaaaaaaaaaaaaaaaaaaaaaaaaaaa

SEQ ID NO: 20202 - RNA, 1778 nt, Artificial Sequence
  SARS-CoV-2__MT831217.1__non-structural protein 4 (NSP4) mRNA gc
aggagagucccgcagucggcguccagcggcucugcuuguucgugugugugucguugcaggccuuauucaagcuuaccaugaagaucgugaacaacuggcugaagcagcucaucaaggucacccugguguuccuguucguggccgccaucuucuaccucaucacccccguccacgugaugagcaagcacacggacuucuccagcgagaucaucggcuacaaggcgaucgacgggggcgugacccgcgacaucgccuucaccgacacgugcuucgccaacaagcacgccgacuucgacaccugguucucccagcggggcggcagcuacaccaacgacaaggccugcccccugaucgcggccgucaucacccgcgaggugggguucgugguccccggccugcccggcaccauccuccggacgaccaacggggacuuccugcacuuccugccccgcguguucuccgccgugggcaacaucugcuacaccccgagcaagcucaucgaguacaccgacuucgccacguccgcgugcguccuggccgccgagugcaccaucuucaaggacgccagcgggaagcccgugcccuacugcuacgacaccaacgugcuggagggcuccgucgccuacgagagccuccggcccgacacccgcuacgugcugauggacggguccaucauccaguucccgaacacguaccuggagggcagcgugcgggucgugaccaccuucgacuccgaguacugccgccacgggaccugcgagcggagcgaggcgggggugugcgucuccacgagcggccgcugggugcucaacaacgacuacuaccggucccugcccgggguguucugcggcgucgacgccgugaaccugcucaccaacauguucacgccccugauccagcccaucggcgcccuggacaucagcgccuccaucgucgccgggggcaucguggcgaucguggugaccugccucgccuacuacuucaugcgcuuccggcgcgccuucggggaguacagccacgucguggccuucaacacccugcuguuccucaugagcuucaccguccugugccugaccccgguguacuccuuccuccccggcguguacagcgucaucuaccuguaccugaccuucuaccucacgaacgacguguccuuccuggcccacauccaguggauggugauguucacgccccugguccccuucuggaucaccaucgcguacaucaucugcaucagcaccaagcacuucuacugguucuucuccaacuaccucaagcggcgcgugguguucaacggggucagcuucuccaccuucgaggaggccgcccugugcaccuuccugcucaacaaggagauguaccugaagcugcggagcgacgugcuccugccgcugacccaguacaaccgcuaccucgcccuguacaacaaguacaaguacuucuccggcgccauggacaccacgagcuaccgggaggcggccugcugccaccuggccaaggcccucaacgacuucuccaacagcggcuccgacgugcuguaccagccgccccagaccagcaucaccuccgcgguccugcagugaggacuagucccuguucccagagcccacuuuuuuuucuuuuuuugaaauaaaauagccugucuuucagaucucaaaggcucuuuucagagccaccaaaaaaaaaaaaaaaaaaaaaaaaaaaaaaaaaaaaaaaaaaaaaaaaaaaaaaaaaaaaaaaaaaaaaaaaaaaaaaaaaaaaaaaaaaaaaaaaaaaaa

SEQ ID NO: 20203 - RNA, 1778 nt, Artificial Sequence
  SARS-CoV-2__MT831323.1__non-structural protein 4 (NSP4) mRNA gc
aggagagucccgcagucggcguccagcggcucugcuuguucgugugugugucguugcaggccuuauucaagcuuaccaugaagaucgugaacaacuggcugaagcagcucaucaaggucacccugguguuccuguucguggccgccaucuucuaccucaucacccccguccacgugaugagcaagcacacggacuucuccagcgagaucaucggcuacaaggcgaucgacgggggcgugacccgcgacaucaccuccaccgacacgugcuucgccaacaagcacgccgacuucgacaccugguucagccagcgcgggggcuccuacaccaacgacaaggccugcccccugaucgccgcggucaucacccgggaggugggguucgugguccccggccugcccggcacgauccuccggaccaccaacggggacuuccugcacuuccugccccgcguguucagcgccgugggcaacaucugcuacaccccguccaagcucaucgaguacacggacuucgccaccagcgccugcguccuggcggccgagugcaccaucuucaaggacgccuccgggaagcccgugcccuacugcuacgacaccaacgugcuggagggcagcgucgccuacgagucccuccggcccgacacgcgcuacgugcugauggacgggagcaucauccaguucccgaacaccuaccuggagggcuccgugcgggucgugaccaccuucgacagcgaguacugccgccacggcacgugcgagcgguccgaggccggggugugcgucagcaccuccggccgcugggugcucaacaacgacuacuaccggagccugcccgggguguucugcggcgucgacgcggugaaccugcucaccaacauguucaccccgcugauccagcccaucggcgcccuggacaucuccgccagcaucgucgccgggggcaucguggccaucguggucacgugccucgcguacuacuucaugcgcuuccggcgcgccuucggggaguacagccacgugguggccuucaacacccugcuguuccucauguccuucaccguccugugccugacccccguguacagcuuccuccccggcguguacuccgucaucuaccuguaccugacguucuaccucaccaacgacgugagcuuccuggcccacauccaguggauggugauguucacgccccugguccccuucuggaucaccaucgccuacaucaucugcaucuccaccaagcacuucuacugguucuucagcaacuaccucaagcggcgcgugguguucaacggggucuccuucagcaccuucgaggaggcggcccugugcaccuuccugcucaacaaggagauguaccugaagcugcgguccgacgugcuccugccgcugacccaguacaaccgcuaccucgcccuguacaacaaguacaaguacuucagcggcgccauggacacgaccuccuaccgggaggccgcgugcugccaccuggccaaggcccucaacgacuucagcaacuccggcagcgacgugcuguaccagccgccccagaccuccaucaccagcgccguccugcagugaggacuagucccuguucccagagcccacuuuuuuuucuuuuuuugaaauaaaauagccugucuuucagaucucaaaggcucuuuucagagccaccaaaaaaaaaaaaaaaaaaaaaaaaaaaaaaaaaaaaaaaaaaaaaaaaaaaaaaaaaaaaaaaaaaaaaaaaaaaaaaaaaaaaaaaaaaaaaaaaaaaaa

SEQ ID NO: 20204 - RNA, 1778 nt, Artificial Sequence
  SARS-CoV-2__MT831695.1__non-structural protein 4 (NSP4) mRNA gc
aggagagucccgcagucggcguccagcggcucugcuuguucgugugugugucguugcaggccuuauucaagcuuaccaugaagaucgugaacaacuggcugaagcagcucaucaaggucacccugguguuccuguucguggccgccaucuucuaccucaucacccccguccacgugaugagcaagcacacggacuucuccagcgagaucaucggcuacaaggcgaucgacgggggcgugacccgcgacaucgccuccaccgacacgugcuucgccaacaagcacgccgacuucgacaccugguucagccagcggggcggcuccuacaccaacgacaaggccugcccccugaucgcggccgucaucacccgcgaggugggguucgugguccccggccugcccggcaccauccuccggacgaccaacggggacuuccugcacuuccugccccgcguguucagcgccgugggcaacaucugcuacaccccguccaagcucaucgaguacaccgacuucgccacgagcgcgugcguccuggccgccgagugcaccaucuucaaggacgccuccgggaagcccgugcccuacugcuacgacaccaacgugcuggagggcagcgucgccuacgagucccuccggcccgacacccgcuacgugcugauggacgggagcaucauccaguucccgaacacguaccuggagggcuccgugcgggucgugaccaccuucgacagcgaguacugccgccacgggaccugcgagcgguccgaggcgggggugugcgucagcacguccggccgcugggugcucaacaacgacuacuaccggagccugcccgggguguucugcggcgucgacgccgugaaccugcucaccaacauguucacgccccugauccagcccaucggcgcccuggacaucuccgccagcaucgucgccgggggcaucguggcgaucguggugaccugcuucgccuacuacuucaugcgcuuccggcgcgccuucggggaguacagccacgucguggccuucaacacccuccuguuccugauguccuucaccguccucugccugaccccgguguacagcuuccugcccggcguguacuccgucaucuaccucuaccugaccuucuaccugacgaacgacgugagcuuccucgcccacauccaguggauggugauguucacgccccugguccccuucuggaucaccaucgcguacaucaucugcaucuccaccaagcacuucuacugguucuucagcaacuaccugaagcggcgcgugguguucaacggggucuccuucagcaccuucgaggaggccgcccucugcaccuuccugcugaacaaggagauguaccucaagcugcgguccgacgugcugcucccgcugacccaguacaaccgcuaccuggcccucuacaacaaguacaaguacuucagcggcgccauggacaccacguccuaccgggaggcggccugcugccaccuggccaaggcccugaacgacuucagcaacuccggcagcgacgugcucuaccagccgccccagaccuccaucaccagcgcgguccugcagugaggacuagucccuguucccagagcccacuuuuuuuucuuuuuuugaaauaaaauagccugucuuucagaucucaaaggcucuuuucagagccaccaaaaaaaaaaaaaaaaaaaaaaaaaaaaaaaaaaaaaaaaaaaaaaaaaaaaaaaaaaaaaaaaaaaaaaaaaaaaaaaaaaaaaaaaaaaaaaaaaaaaa

SEQ ID NO: 20205 - RNA, 1778 nt, Artificial Sequence
  SARS-CoV-2__MT831697.1__non-structural protein 4 (NSP4) mRNA gc
aggagagucccgcagucggcguccagcggcucugcuuguucgugugugugucguugcaggccuuauucaagcuuaccaugaagaucgugaacaacuggcugaagcagcucaucaaggucacccugguguuccuguucguggccgccaucuucuaccucaucacccccguccacgugaugagcaagcacacggacuucuccagcgagaucaucggcuacaaggcgaucgacgggggcgugacccgcgacaucgccuccaccgacacgugcuucgccaacaagcacgccgacuucgacaccugguucagccagcggggcggcuccuacaccaacgacaaggccugcccccugaucgcggccgucaucacccgcgaggugggguucgugguccccggccugcccggcaccauccuccggacgaccaacggggacuuccugcacuuccugccccgcguguucagcgccgugggcaacaucugcuacaccccguccaagcucaucgaguacaccgacuucgccacgagcgcgugcguccuggccgccgagugcaccaucuucaaggacgccuccgggaagcccgugcccuacugcuacgacaccaacgugcuggagggcagcgucgccuacgagucccuccggcccgacacccgcuacgugcugauggacgggagcaucauccaguucccgaacacguaccuggagggcuccgugcgggucgugaccaucuucgacagcgaguacugccgccacgggaccugcgagcgguccgaggcgggggugugcgucagcaccuccggccgcugggugcucaacaacgacuacuaccggagccugcccgggguguucugcggcgucgacgccgugaaccugcucacgaacauguucacgccccugauccagcccaucggcgcccuggacaucuccgccagcaucgucgccgggggcaucguggcgaucguggugaccugccucgccuacuacuucaugcgcuuccggcgcgccuucggggaguacagccacgucguggccuucaacacccugcuguuccucauguccuucaccguccugugccugaccccgguguacagcuuccuccccggcguguacuccgucaucuaccuguaccugaccuucuaccucaccaacgacgugagcuuccuggcccacauccaguggauggugauguucacgccccugguccccuucuggaucaccaucgcguacaucaucugcaucuccaccaagcacuucuacugguucuucagcaacuaccucaagcggcgcgugguguucaacggggucuccuucagcaccuucgaggaggccgcccugugcacguuccugcucaacaaggagauguaccugaagcugcgguccgacgugcuccugccgcugacccaguacaaccgcuaccucgcccuguacaacaaguacaaguacuucagcggcgccauggacaccaccuccuaccgggaggcggccugcugccaccuggccaaggcccucaacgacuucagcaacuccggcagcgacgugcuguaccagccgccccagacguccaucaccagcgcgguccugcagugaggacuagucccuguucccagagcccacuuuuuuuucuuuuuuugaaauaaaauagccugucuuucagaucucaaaggcucuuuucagagccaccaaaaaaaaaaaaaaaaaaaaaaaaaaaaaaaaaaaaaaaaaaaaaaaaaaaaaaaaaaaaaaaaaaaaaaaaaaaaaaaaaaaaaaaaaaaaaaaaaaaaa

SEQ ID NO: 20206 - RNA, 1778 nt, Artificial Sequence
  SARS-CoV-2__MT831724.1__non-structural protein 4 (NSP4) mRNA gc
aggagagucccgcagucggcguccagcggcucugcuuguucgugugugugucguugcaggccuuauucaagcuuaccaugaagaucgugaacaacuggcugaagcagcucaucaaggucacccugguguuccuguucguggccgccaucuucuaccucaucacccccguccacgugaugagcaagcacacggacuucuccagcgagaucaucggcuacaaggcgaucgacgggggcgugacccgcgacaucgccuccaccgacacgugcuucgccaacaagcacgccgacuucgacaccugguucagccagcggggcggcuccuacaccaacgacaaggccugcccccugaucgcggccgucaucacccgcgaggugggguucgugguccccggccugcccggcaccauccuccggacgaccaacggggacuuccugcacuuccugccccgcguguucagcgccgugggcaacaucugcuacaccccguccaagcucaucgaguacaccgacuucgccacgagcgcgugcguccuggccgccgagugcaccaucuucaaggacgccuccgggaagcccgugcccuacugcuacgacaccaacgugcuggagggcagcgucgccuacgagucccuccggcccgacacccgcuacgugcugauggacgggagcaucauccaguucccgaacacguaccuggagggcuccgugcgggucgugaccaccuucgacagcgaguacugccgccacgggaccugcgagcgguccgaggcgggggugugcgucagcacguccggccgcugggugcucaacaacgacuacuaccggagccugcccgggguguucugcggcgucgacgccgugaaccugcucaccaacauguucacgccccugauccagcccaucggcgcccuggacaucuccgccagcaucgucgccgggggcaucguggcgaucguggugaccugccucgccuacuacuucaugcgcuuccggcgcgccuucugcgaguacagccacgucguggccuucaacacccugcuguuccucauguccuucaccguccugugccugaccccgguguacagcuuccuccccgggguguacuccgucaucuaccuguaccugaccuucuaccucacgaacgacgugagcuuccuggcccacauccaguggauggugauguucacgccccugguccccuucuggaucaccaucgcguacaucaucugcaucuccaccaagcacuucuacugguucuucagcaacuaccucaagcggcgcgugguguucaacggcgucuccuucagcaccuucgaggaggccgcccugugcaccuuccugcucaacaaggagauguaccugaagcugcgguccgacgugcuccugccgcugacccaguacaaccgcuaccucgcccuguacaacaaguacaaguacuucagcggggccauggacaccacguccuaccgggaggcggccugcugccaccuggccaaggcccucaacgacuucagcaacuccggcagcgacgugcuguaccagccgccccagaccuccaucaccagcgcgguccugcagugaggacuagucccuguucccagagcccacuuuuuuuucuuuuuuugaaauaaaauagccugucuuucagaucucaaaggcucuuuucagagccaccaaaaaaaaaaaaaaaaaaaaaaaaaaaaaaaaaaaaaaaaaaaaaaaaaaaaaaaaaaaaaaaaaaaaaaaaaaaaaaaaaaaaaaaaaaaaaaaaaaaaa

SEQ ID NO: 20207 - RNA, 1778 nt, Artificial Sequence
  SARS-CoV-2__MT831729.1__non-structural protein 4 (NSP4) mRNA gc
aggagagucccgcagucggcguccagcggcucugcuuguucgugugugugucguugcaggccuuauucaagcuuaccaugaagaucgugaacaacuggcugaagcagcucaucaaggucacccugguguuccuguucguggccgccaucuucuaccucaucacccccguccacgugaugagcaagcacacggacuucuccagcgagaucaucggcuacaaggcgaucgacgggggcgugacccgcgacaucgccuccaccgacacgugcuucgccaacaagcacgccgacuucgacaccugguucagccagcggggcggcuccuacaccaacgacaaggccugcccccugaucgcggccgucaucacccgcgaggugggguucgugguccccggccugcccggcaccauccuccggacgaccaacggggacuuccugcacuuccugccccgcguguucagcgccgugggcaacaucugcuacaccccguccaagcucaucgaguacaccgacuucgccacgagcgcgugcguccuggccgccgagugcaccaucuucaaggacgccuccgggaagcccgugcccuacugcuacgacaccaacgugcuggagggcagcgucgccuacgagucccuccggcccgacacccgcuacgugcugauggacgggagcaucauccaguucccgaacacguaccuggagggcuccgugcgggucgugaccaccuucgacagcgaguacugccgccacgggaccugcgagcgguccgaggcgggggugugcgucagcacguccggccgcugggugcucaacaacgacuacuaccggagccugcccgggguguucugcggcgucgacgccgugaaccugcucaccaacauguucacgccccugauccagcccaucggcgcccuggacaucuccgccagcaucgucgccgggggcaucguggcgaucguggugaccugccucgccuacuacuucaugcgcuuccggcgcgccuucggggaguacagccacgucguggccuucaacacccugcuguuccucauguccuucaccguccugugccugaccccgguguacagcuuccuccccggcguguacuccgucaucuaccuguaccugaccuucuaccucacgaacgacgugagcuuccuggcccacauccaguggaugguggucuucacgccccuggugcccuucuggaucaccaucgcguacaucaucugcaucuccaccaagcacuucuacugguucuucagcaacuaccucaagcggcgcguggucuucaacgggguguccuucagcaccuucgaggaggccgcccugugcaccuuccugcucaacaaggagauguaccugaagcugcgguccgacgugcuccugccgcugacccaguacaaccgcuaccucgcccuguacaacaaguacaaguacuucagcggcgccauggacaccacguccuaccgggaggcggccugcugccaccuggccaaggcccucaacgacuucagcaacuccggcagcgacguccuguaccagccgccccagaccuccaucaccagcgcggugcugcagugaggacuagucccuguucccagagcccacuuuuuuuucuuuuuuugaaauaaaauagccugucuuucagaucucaaaggcucuuuucagagccaccaaaaaaaaaaaaaaaaaaaaaaaaaaaaaaaaaaaaaaaaaaaaaaaaaaaaaaaaaaaaaaaaaaaaaaaaaaaaaaaaaaaaaaaaaaaaaaaaaaaaa

SEQ ID NO: 20208 - RNA, 1778 nt, Artificial Sequence
  SARS-CoV-2__MT831811.1__non-structural protein 4 (NSP4) mRNA gc
aggagagucccgcagucggcguccagcggcucugcuuguucgugugugugucguugcaggccuuauucaagcuuaccaugaagaucgugaacaacuggcugaagcagcucaucaaggucacccugguguuccuguucguggccgccaucuucuaccucaucacccccguccacgugaugagcaagcacacggacuucuccagcgagaucaucggcuacaaggcgaucgacgggggcgugacccgcgacaucgccuccaccgacacgugcuucgccaacaagcacgccgacuucgacaccugguucagccagcggggcggcuccuacaccaacgacaaggccugcccccugaucgcggccgucaucacccgcgaggugggguucgugguccccggccugcccggcaccauccuccggacgaccaacggggacuuccugcacuuccugccccgcguguucagcgccgugggcaacaucugcuacaccccguccaagcucaucgaguacaccgacuucgccacgagcgcgugcguccuggccgccgagugcaccaucuucaaggacgccuccgggaagcccgugcccuacugcuacgacaccaacgugcuggagggcagcgucgccuacgagucccuccggcccgacacccgcuacgugcugauggacgggagcaucauccaguucccgaacacguaccuggagggcuccgugcgggucgugaccaccuucgacagcgaguacugccgccacgggaccugcgagcgguccgaggcgggggugugcgucagcacguccggccgcugggugcucaacaacgacuacuaccggagccugcccgggguguucugcggcgucgacgccgugaaccugcucaccaacauguucacgccccugauccagcccaucggcgcccuggacaucuccgccagcaucgucgccgggggcaucguggcgaucguggugaccugccucgccuacuacuucaugcgcuuccggcgcgccuucggggaguacagccacgucguggccuucaacacccugcuguuccucauguccuucaccguccugugccugaccccgguguacagcuuccuccccggcguguacuccgucaucuaccuguaccugaccuucuaccucacgaacgacgugagcuuccuggcccacauccaguggauggugauguucacgccccugguccccuucuggaucaccaucgcguacaucaucugcaucuccaccaagcacuucuacugguucuucagcaacugccucaagcggcgcgugguguucaacggggucuccuucagcaccuucgaggaggccgcccugugcaccuuccugcucaacaaggagauguaccugaagcugcgguccgacgugcuccugccgcugacccaguacaaccgcuaccucgcccuguacaacaaguacaaguacuucagcggcgccauggacaccacguccuaccgggaggcggccugcugccaccuggccaaggcccucaacgacuucagcaacuccggcagcgacgugcuguaccagccgccccagaccuccaucaccagcgcgguccugcagugaggacuagucccuguucccagagcccacuuuuuuuucuuuuuuugaaauaaaauagccugucuuucagaucucaaaggcucuuuucagagccaccaaaaaaaaaaaaaaaaaaaaaaaaaaaaaaaaaaaaaaaaaaaaaaaaaaaaaaaaaaaaaaaaaaaaaaaaaaaaaaaaaaaaaaaaaaaaaaaaaaaaa

SEQ ID NO: 20209 - RNA, 1778 nt, Artificial Sequence
  SARS-CoV-2__MT834038.1__non-structural protein 4 (NSP4) mRNA gc
aggagagucccgcagucggcguccagcggcucugcuuguucgugugugugucguugcaggccuuauucaagcuuaccaugaagaucgugaacaacuggcugaagcagcucaucaaggucacccugguguuccuguucguggccgccaucuucuaccucaucacccccguccacgugaugagcaagcacacggacuucuccagcgagaucaucggcuacaaggcgaucgacgggggcgugacccgcgacaucgccuccaccgacacgugcuucgccaacaagcacgccgacuucgacaccugguucagccagcggggcggcuccuacaccaacgacaaggccugcccccugaucgcggccgucaucacccgcgaggugggguucgugguccccggccugcccggcaccauccuccggacgaccaacggggacuuccugcacuuccugccccgcguguucagcgccgugggcaacaucugcuacaccccguccaagcucaucgaguacaccgacuucgccacgagcgcgugcguccuggccgccgagugcaccaucuucaaggacgccuccgggaagcccgugcccuacugcuacgacaccaacgugcuggagggcagcgucgccuacgagucccuccggcccgacacccgcuacgugcugauggacgggagcaucauccaguucccgaacacguaccuggagggcuccgugcgggucgugaccaccuucgacagcgaguacugccgccacgggaccugcgagcgguccgaggcgggggugugcgucagcacguccggccgcugggugcucaacaacgacuacuaccggagccugcccgggguguucugcggcgucgacgccgugaaccugcucaccaacauguucacgccccugauccagcccaucggcgcccuggacaucuccgccagcaucgucgccgggggcaucguggcgaucguggugaccugccucgccuacuacuucaugcgcuuccggcgcgccuucggggaguacagccacgucguggccuucaacacccugcuguuccucauguccuucaccguccugugccugaccccgguguacagcuuccuccccggcguguacuccgucaucuaccuguaccugaccuucuaccucacgaacgacgugagcuuccuggcccacauccaguggauggugauguucacgccccugguccccuucuggaucaccaucgcguacaucaucugcaucuccaccaagcacuucuacugguucuucagcaacuaccucaagcggcgcgugguguucaacggggucuccuucagcaccuucgaggaggccgcccugugcaccuuccugcucaacaaggagauguaccugaagcugcgguccgacgugcuccugccgcugacccaguacaaccgcuaccucgcccuguacaacaaguacaaguacuucagcggcgccauggacaccacguccuaccgggaggcggccugcugccaccuggccaaggcccucaacgacuucagcaaccugggcuccgacgugcuguaccagccgccccagaccagcaucaccuccgcgguccugcagugaggacuagucccuguucccagagcccacuuuuuuuucuuuuuuugaaauaaaauagccugucuuucagaucucaaaggcucuuuucagagccaccaaaaaaaaaaaaaaaaaaaaaaaaaaaaaaaaaaaaaaaaaaaaaaaaaaaaaaaaaaaaaaaaaaaaaaaaaaaaaaaaaaaaaaaaaaaaaaaaaaaaa

SEQ ID NO: 20210 - RNA, 1778 nt, Artificial Sequence
  SARS-CoV-2__MT834636.1__non-structural protein 4 (NSP4) mRNA gc
aggagagucccgcagucggcguccagcggcucugcuuguucgugugugugucguugcaggccuuauucaagcuuaccaugaagaucgugaacaacuggcugaagcagcucaucaaggucacccugguguuccuguucguggccgccaucuucuaccucaucacccccguccacgugaugagcaagcacacggacuucuccagcgagaucaucggcuacaaggcgaucgacgggggcgugacccgcgacaucgccuccaccgacacgugcuucgccaacaagcacgccgacuucgacaccugguucagccagcggggcggcuccuacaccaacgacaaggccugcccccugaucgcggccgucaucacccgcgaggugggguucgugguccccggccugcccggcaccauccuccggacgaccaacggggacuuccugcacuuccugccccgcguguucagcgccgugggcaacaucugcuacaccccguccaagcucaucgaguacaccgacuucgccacgagcgcgugcguccuggccgccgagugcaccaucuucaaggacgccuccgggaagcccgugcccuacugcuacgacaccaacgugcuggagggcagcgucgccuacgagucccuccggcccgacacccgcuacgugcugauggacgggagcaucauccaguucccgaacacguaccuggagggcuccgugcgggucgugaccaccuucgacagcgaguacugccgccacgggaccugcgagcgguccgaggcgggggugugcgucagcacguccggccgcugggugcucaacaacgacuacuaccggagccugcccgggguguucugcggcgucgacgccgugaaccugcucaccaacauguucacgccccugauccagcccaucggcgcccuggacaucuccgccagcaucgucgccgggggcaucguggcgaucguggugaccugccucgccuacuacuucaugcgcuuccggcgcgccuucggggaguacagccacgucguggccuucaacacccugcuguuccucauguccuucaccguccugugccugaccccgguguacagcuuccuccccggcguguacuccgucaucuaccuguaccugaccuucuaccucacgaacgacgugagcuuccuggcccacauccaguggauggugauguucacgccccugguccccuucuggaucaccaucgcguacaucaucugcaucuccaccaagcacuucuacugguucuucagcaacuaccucaagcggcgcgugguguucaacggggucuccuucagcaccuucgaggaggccgcccugugcaccuuccugcucaacaaggagauguaccugaagcugcgguccgacgugcuccugccgcugacccaguacaaccgcuaccucgcccuguacaacaaguacaaguacuucagcggcgugauggacaccacguccuaccgggaggccgcgugcugccaccuggccaaggcccucaacgacuucagcaacuccggcagcgacguccuguaccagccgccccagaccuccaucaccagcgccgugcugcagugaggacuagucccuguucccagagcccacuuuuuuuucuuuuuuugaaauaaaauagccugucuuucagaucucaaaggcucuuuucagagccaccaaaaaaaaaaaaaaaaaaaaaaaaaaaaaaaaaaaaaaaaaaaaaaaaaaaaaaaaaaaaaaaaaaaaaaaaaaaaaaaaaaaaaaaaaaaaaaaaaaaaa

SEQ ID NO: 20211 - RNA, 1778 nt, Artificial Sequence
  SARS-CoV-2__MT827203.1__non-structural protein 4 (NSP4) mRNA gc
aggagagucccgcagucggcguccagcggcucugcuuguucgugugugugucguugcaggccuuauucaagcuuaccaugaagaucgugaacaacuggcugaagcagcucaucaaggucacccugguguuccuguucguggccgccaucuucuaccucaucacccccguccacgugaugagcaagcacacggacuucuccagcgagaucaucggcuacaaggcgaucgacgggggcgugacccgcgacaucgccuccaccgacacgugcuucgccaacaagcacgccgacuucgacaccugguucagccagcggggcggcuccuacaccaacgacaaggccugcccccugaucgcggccgucaucacccgcgaggugggguucgugguccccggccugcccggcaccauccuccggacgaccaacggggacuuccugcacuuccugccccgcguguucagcgccgugggcaacaucugcuacaccccguccaagcucaucgaguacaccgacuucgccacgagcgcgugcguccuggccgccgagugcaccaucuucaaggacgccuccgggaagcccgugcccuacugcuacgacaccaacgugcuggagggcagcgucgccuacgagucccuccggcccgacacccgcuacgugcugauggacgggagcaucauccaguucccgaacacguaccuggagggcuccgugcgggucgugaccaccuucgacagcgaguacugccgccacgggaccugcgagcgguccgaggugggggucugcgugagcacguccggccgcugggugcucaacaacgacuacuaccggagccugcccggggucuucugcggcguggacgcggucaaccugcucaccaacauguucacgccccugauccagcccaucggcgcccuggacaucuccgccagcaucguggccgggggcaucguggccaucgucgugaccugccucgcguacuacuucaugcgcuuccggcgcgccuucggggaguacagccacguggucgccuucaacacccugcuguuccucauguccuucaccgugcugugccugaccccgguguacagcuuccuccccggcgucuacuccgugaucuaccuguaccugaccuucuaccucacgaacgacgugagcuuccuggcccacauccaguggauggucauguucacgccccuggugcccuucuggaucaccaucgccuacaucaucugcaucuccaccaagcacuucuacugguucuucagcaacuaccucaagcggcgcguggucuucaacgggguguccuucagcaccuucgaggaggcggcccugugcaccuuccugcucaacaaggagauguaccugaagcugcgguccgacgugcuccugccgcugacccaguacaaccgcuaccucgcccuguacaacaaguacaaguacuucagcggcgccauggacaccacguccuaccgggaggccgcgugcugccaccuggccaaggcccucaacgacuucagcaacuccggcagcgacguccuguaccagccgccccagaccuccaucaccagcgccgugcugcagugaggacuagucccuguucccagagcccacuuuuuuuucuuuuuuugaaauaaaauagccugucuuucagaucucaaaggcucuuuucagagccaccaaaaaaaaaaaaaaaaaaaaaaaaaaaaaaaaaaaaaaaaaaaaaaaaaaaaaaaaaaaaaaaaaaaaaaaaaaaaaaaaaaaaaaaaaaaaaaaaaaaaa

SEQ ID NO: 20212 - RNA, 1778 nt, Artificial Sequence
  SARS-CoV-2__MT825091.1__non-structural protein 4 (NSP4) mRNA gc
aggagagucccgcagucggcguccagcggcucugcuuguucgugugugugucguugcaggccuuauucaagcuuaccaugaagaucgugaacaacuggcugaagcagcucaucaaggucacccugguguuccuguucguggccgccaucuucuaccucaucacccccguccacgugaugagcaagcacacggacuucuccagcgagaucaucggcuacaaggacaucgacgggggcgugacccgcgacaucgcguccaccgacacgugcuucgccaacaagcacgccgacuucgacaucugguucagccagcggggcggcuccuacaccaacgacaaggccugcccccugaucgccgcggucaucacccgcgaggugggguucgugguccccggccugcccggcaccauccuccggaccacgaacggggacuuccugcacuuccugccccgcguguucagcgccgugggcaacaucugcuacaccccguccaagcucaucgaguacaccgacuucgccaccagcgccugcguccuggcggccgagugcacgaucuucaaggacgccuccgggaagcccgugcaguacugcuacgacaccaacgugcaggagggcagcgucgccuacgagucccugcggcccgacacccgcuacgugcucauggacgggagcaucauccaguuccccaacaccuaccuggagggcuccgugcgggucgugacgaccuucgacagcgaguacugccgccacgggaccugcgagcgguccgaggccggggugugcgucagcaccuccggccgcugggugccgaacaacgacuacuaccggagccugcccgggguguucugcggcgucgacgcggugaaccuccugacgaacauguucacgccccugauccagcucaucggcgcccuggacaucuccgccagcaucgucgccgggggcaucguggccaucguggugaccugccuggcguacuacuucaugcgcuuccggcgcgccuucggggaguacagccacgucguggccuucaacacccuccccuuccugauguccuucaccguccacugccugaccccgguguacagcuuccuccccggcguguacuccgucaucuaccuguaccugaccuucuaccucaccaacgacgugagcuuccuggcccacauccaguggauggugauguucacgccccugguccccuucuggaucaccaucgccuacaucaucugcaucuccaccaagcacuucuacugguucuucagcaacuaccucaagcggcgcgugguguucaacggggucuccuucagcaccuucgaggaggcggcccugugcacguuccugcucaacaaggagauguaccugaagcugcgguccgacgugcuccugccgcugacccaguacaaccgcuaccucgcccuguacaacaaguacaaguacuucagcggcgccauggacaccaccuccuaccgggaggccgcgugcugccaccuggccaaggcccucaacgacuucagcaacuccggcagcgacgugcuguaccugccgccccagacguccaucaccagcgccguccuccagugaggacuagucccuguucccagagcccacuuuuuuuucuuuuuuugaaauaaaauagccugucuuucagaucucaaaggcucuuuucagagccaccaaaaaaaaaaaaaaaaaaaaaaaaaaaaaaaaaaaaaaaaaaaaaaaaaaaaaaaaaaaaaaaaaaaaaaaaaaaaaaaaaaaaaaaaaaaaaaaaaaaaa

SEQ ID NO: 20213 - RNA, 1778 nt, Artificial Sequence
  SARS-CoV-2__MT821553.1__non-structural protein 4 (NSP4) mRNA gc
aggagagucccgcagucggcguccagcggcucugcuuguucgugugugugucguugcaggccuuauucaagcuuaccaugaagaucgugaacaacuggcugaagcagcucaucaaggucacccugguguuccuguucguggccgccaucuucuaccucaucacccccguccacgugaugagcaagcacacggacuucuccagcgagaucaucggcuacaaggcgaucgacgggggcgugacccgcgacaucgccuccaccgacacgugcuucgccaacaagcacgccgacuucgacaccugguucagccagcggggcggcuccuacaccaacgacaaggccugcccgcugaucgcggccgucaucacccgcgaggugggguucgugguccccggccugcccggcaccauccuccggacgaccaacggggacuuccugcacuuccugccccgcguguucagcgccgugggcaacaucugcuacaccccguccaagcucaucgaguacaccgacuucgccacgagcgcgugcguccuggccgccgagugcaccaucuucaaggacgccuccgggaagcccgugcccuacugcuacgacaccaacgugcuggagggcagcgucgccuacgagucccuccggcccgacacccgcuacgugcugauggacgggagcaucauccaguucccgaacacguaccuggagggcuccgugcgggucgugaccaccuucgacagcgaguacugccgccacgggaccugcgagcgguccgaggcgggggugugcgucagcacguccggccgcugggugcucaacaacgacuacuaccggagccugcccgggguguucugcggcgucgacgccgugaaccugcucaccaacauguucacgccccugauccagcccaucggcgcccuggacaucuccgccagcaucgucgccgggggcaucguggcgaucguggugaccugccucgccuacuacuucaugcgcuuccggcgcgccuucggggaguacagccacgucguggccuucaacacccugcuguuccucauguccuucaccguccugugccugaccccgguguacagcuuccuccccggcguguacuccgucaucuaccuguaccugaccuucuaccucacgaacgacgugagcuuccuggcccacauccaguggauggugauguucacgccccugguccccuucuggaucaccaucgcguacaucaucugcaucuccaccaagcacuucuacugguucuucagcaacuaccucaagcggcgcgugguguucaacggggucuccuucagcaccuucgaggaggccgcccugugcaccuuccugcucaacaaggagauguaccugaagcugcgguccgacgugcuccugagccugacccaguacaaccgcuaccucgcccuguacaacaaguacaaguacuucuccggcgccauggacaccacgagcuaccgggaggcggccugcugccaccuggccaaggcccucaacgacuucuccaacagcggcuccgacgugcuguaccagccgccccagaccagcaucaccuccgcgguccugcagugaggacuagucccuguucccagagcccacuuuuuuuucuuuuuuugaaauaaaauagccugucuuucagaucucaaaggcucuuuucagagccaccaaaaaaaaaaaaaaaaaaaaaaaaaaaaaaaaaaaaaaaaaaaaaaaaaaaaaaaaaaaaaaaaaaaaaaaaaaaaaaaaaaaaaaaaaaaaaaaaaaaaa

SEQ ID NO: 20214 - RNA, 1778 nt, Artificial Sequence
  SARS-CoV-2__MT821707.1__non-structural protein 4 (NSP4) mRNA gc
aggagagucccgcagucggcguccagcggcucugcuuguucgugugugugucguugcaggccuuauucaagcuuaccaugaagaucgugaacaacuggcugaagcagcucaucaaggucacccugguguuccuguucguggccgccaucuucuaccucaucacccccguccacgugaugagcaagcacacggacuucuccagcgagaucaucggcuacaaggcgaucgacgggggcgugacccgcgacaucgccuccaccgacacgugcuucgccaacaagcacgccgacuucgacaccugguucagccagcggggcggcuccuacaucaacgacaaggccugcccccugaucgcggccgucaucacccgcgaggugggguucgugguccccggccugcccggcaccauccuccggaccacgaacggggacuuccugcacuuccugccccgcguguucagcgccgugggcaacaucugcuacaccccguccaagcucaucgaguacaccgacuucgccaccagcgcgugcguccuggccgccgagugcacgaucuucaaggacgccuccgggaagcccgugcccuacugcuacgacaccaacgugcuggagggcagcgucgccuacgagucccuccggcccgacacccgcuacgugcugauggacgggagcaucauccaguucccgaacaccuaccuggagggcuccgugcgggucgugacgaccuucgacagcgaguacugccgccacgggaccugcgagcgguccgaggcgggggugugcgucagcaccuccggccgcugggugcucaacaacgacuacuaccggagccugcccgggguguucugcggcgucgacgccgugaaccugcucacgaacauguucacgccccugauccagcccaucggcgcccuggacaucuccgccagcaucgucgccgggggcaucguggcgaucguggugaccugccucgccuacuacuucaugcgcuuccggcgcgccuucggggaguacagccacgucguggccuucaacacccugcuguuccucauguccuucaccguccugugccugaccccgguguacagcuuccuccccggcguguacuccgucaucuaccuguaccugaccuucuaccucaccaacgacgugagcuuccuggcccacauccaguggauggugauguucacgccccugguccccuucuggaucaccaucgcguacaucaucugcaucuccaccaagcacuucuacugguucuucagcaacuaccucaagcggcgcgugguguucaacggggucuccuucagcaccuucgaggaggccgcccugugcacguuccugcucaacaaggagauguaccugaagcugcgguccgacgugcuccugccgcugacccaguacaaccgcuaccucgcccuguacaacaaguacaaguacuucagcggcgccauggacaccaccuccuaccgggaggcggccugcugccaccuggccaaggcccucaacgacuucagcaacuccggcagcgacgugcuguaccagccgccccagacguccaucaccagcgcgguccugcagugaggacuagucccuguucccagagcccacuuuuuuuucuuuuuuugaaauaaaauagccugucuuucagaucucaaaggcucuuuucagagccaccaaaaaaaaaaaaaaaaaaaaaaaaaaaaaaaaaaaaaaaaaaaaaaaaaaaaaaaaaaaaaaaaaaaaaaaaaaaaaaaaaaaaaaaaaaaaaaaaaaaaa

SEQ ID NO: 20215 - RNA, 1778 nt, Artificial Sequence
  SARS-CoV-2__MT820132.1__non-structural protein 4 (NSP4) mRNA gc
aggagagucccgcagucggcguccagcggcucugcuuguucgugugugugucguugcaggccuuauucaagcuuaccaugaagaucgugaacaacuggcugaagcagcucaucaaggucacccugguguuccuguucguggccgccaucuucuaccucaucacccccguccacgugaugagcaagcacacggacuucuccagcgagaucaucggcuacaaggcgaucgacgggggcgugacccgcgacaucgccuccaccgacacgugcuucgccaacaagcacgccgacuucgacaccugguucagccagcggggcggcuccuacaccaacgacaaggccugcccccugaucgcggccgucaucacccgcgaggugggguucgugguccccggccugcccggcaccauccuccggacgaccaacggggacuuccugcacuuccugccccgcguguucagcgccgugggcaacaucugcuacaccccguccaagcucaucgaguacaccgacuucgccacgagcgcgugcguccuggccgccgagugcaccaucuucaaggacgccuccgggaagcccgugcccuacugcuacgacaccaacgugcuggagggcagcgucgccuacgagucccuccggcccgacacccgcuacgugcugauggacgggagcaucauccaguucccgaacacguaccuggagggcuccgugcgggucgugaccaccuucgacagcgaguacugccgccacgggaccugcgagcgguccgaggcgggggugugcgucagcacguccggccgcugggugcucaacaacgacuacuaccggagccugcccgggguguucugcggcgucgacgccgugaaccugcucaccaacauguucacgccccugauccagcccaucggcgcccuggacaucuccgccagcaucgucgccgggggcaucguggcgaucguggugaccugccucgccuacuacuucaugcgcuuccggcgcgccuucggggaguacagccacgucguggccuucaacacccugcuguuccucauguccuucaccguccugugccugaccccgguguacagcuuccuccccggcguguacuccgucaucuaccuguaccugaccuucuaccucacgaacgacgugagcuuccuggcccacauccaguggauggugauguucacgccccugguccccuucuggaucaccaucgcguacaucaucugcaucuccaccaagcacuucuacugguucuucagcaacuaccucaagcggcgcgugguguucaacggggucuccuucagcaccuucgaggaggccgcccugugcaccuuccugcucaacaaggagauguaccugaagcugcgguccgacgugcucccgcugacccaguacaaccgcuaccuggcccucuacaacaaguacaaguacuucagcggcgccauggacaccacguccuaccgggaggcggccugcugccaccuggccaaggcccugaacgacuucagcaacuccggcagcgacgugcucuaccagccgccccagaccuccaucaccagcgcgguccugcaguccugaggacuagucccuguucccagagcccacuuuuuuuucuuuuuuugaaauaaaauagccugucuuucagaucucaaaggcucuuuucagagccaccaaaaaaaaaaaaaaaaaaaaaaaaaaaaaaaaaaaaaaaaaaaaaaaaaaaaaaaaaaaaaaaaaaaaaaaaaaaaaaaaaaaaaaaaaaaaaaaaaaaaa

SEQ ID NO: 20216 - RNA, 1778 nt, Artificial Sequence
  SARS-CoV-2__MT810483.1__non-structural protein 4 (NSP4) mRNA gc
aggagagucccgcagucggcguccagcggcucugcuuguucgugugugugucguugcaggccuuauucaagcuuaccaugaagaucgugaacaacuggcugaagcagcucaucaaggucacccugguguuccuguucguggccgccaucuucuaccucaucacccccguccacgugaucagcaagcacacggacuucuccagcgagaucaucggcuacaaggcgaucgacgggggcgugacccgcgacaucgccuccaccgacacgugcuucgccaacaagcacgccgacuucgacaccugguucagccagcggggcggcuccuacaccaacgacaaggccugcccccugaucgcggccgucaucacccgcgaggugggguucgugguccccggccugcccggcaccauccuccggacgaccaacggggacuuccugcacuuccugccccgcguguucagcgccgugggcaacaucugcuacaccccguccaagcucaucgaguacaccgacuucgccacgagcgcgugcguccuggccgccgagugcaccaucuucaaggacgccuccgggaagcccgugcccuacugcuacgacaccaacgugcuggagggcagcgucgccuacgagucccuccggcccgacacccgcuacgugcugauggacgggagcaucauccaguucccgaacacguaccuggagggcuccgugcgggucgugaccaccuucgacagcgaguacugccgccacgggaccugcgagcgguccgaggcgggggugugcgucagcacguccggccgcugggugcucaacaacgacuacuaccggagccugcccgggguguucugcggcgucgacgccgugaaccugcucaccaacauguucacgccccugauccagcccaucggcgcccuggacaucuccgccagcaucgucgccgggggcaucguggcgaucguggugaccugccucgccuacuacuucaugcgcuuccggcgcgccuucggggaguacagccacgucguggccuucaacacccugcuguuccucauguccuucaccguccugugccugaccccgguguacagcuuccuccccggcguguacuccgucaucuaccuguaccugaccuucuaccucacgaacgacgugagcuuccuggcccacauccaguggauggugauguucacgccccugguccccuucuggaucaccaucgcguacaucaucugcaucuccaccaagcacuucuacugguucuucagcaacuaccucaagcggcgcgugguguucaacggggucuccuucagcaccuucgaggaggccgcccugugcaccuuccugcucaacaaggagauguaccugaagcugcgguccgacgugcuccugccgcugacccaguacaaccgcuaccucgcccuguacaacaaguacaaguacuucagcggcgccauggacaccacguccuaccgggaggcggccugcugccaccuggccaaggcccucaacgacuucagcaacuccggcagcgacgugcuguaccagccgccccagaccuccaucaccagcgcgguccugcagugaggacuagucccuguucccagagcccacuuuuuuuucuuuuuuugaaauaaaauagccugucuuucagaucucaaaggcucuuuucagagccaccaaaaaaaaaaaaaaaaaaaaaaaaaaaaaaaaaaaaaaaaaaaaaaaaaaaaaaaaaaaaaaaaaaaaaaaaaaaaaaaaaaaaaaaaaaaaaaaaaaaaa

SEQ ID NO: 20217 - RNA, 1778 nt, Artificial Sequence
  SARS-CoV-2__MT810494.1__non-structural protein 4 (NSP4) mRNA gc
aggagagucccgcagucggcguccagcggcucugcuuguucgugugugugucguugcaggccuuauucaagcuuaccaugaagaucgugaacaacuggcugaagcagcucaucaaggucacccugguguuccuguucguggccgccaucuucuaccucaucacccccguccacgugaugagcaagcacacggacuucuccagcgagaucaucggcuacaaggcgaucgacgggggcgugacccgcgacaucgccuccaccgacacgugcuucgccaacaagcacgccgacuucgacaccugguucagccagcggggcggcuccuacaccaacgacaaggccugcccccugaucgcggccgucaucacccgcgaggugggguucgugguccccggccugcccggcaccauccuccggacgaccaacggggacuuccugcacuuccugccccgcguguucagcgccgugggcaacaucugcuacaccccguccaagcucaucgaguacaccgacuucgccacgagcgcgugcguccuggccgccgagugcaccaucuucaaggacgccuccgggaagcccgugcccuacugcuacgacaccaacgugcuggagggcagcgucguguacgagucccuccggcccgacacccgcuacgugcugauggacgggagcaucauccaguucccgaacacguaccuggagggcuccguccggguggugaccaccuucgacagcgaguacugccgccacgggaccugcgagcgguccgaggccggggucugcgugagcacguccggccgcugggugcucaacaacgacuacuaccggagccugcccggggucuucugcggcguggacgcggucaaccugcucaccaacauguucacgccccugauccagcccaucggcgcccuggacaucuccgccagcaucguggccgggggcaucguggccaucgucgugaccugccucgcguacuacuucaugcgcuuccggcgcgccuucggggaguacagccacguggucgccuucaacacccugcuguuccucauguccuucaccgugcugugccugaccccgguguacagcuuccuccccggcgucuacuccgugaucuaccuguaccugaccuucuaccucacgaacgacgugagcuuccuggcccacauccaguggauggucauguucacgccccuggugcccuucuggaucaccaucgccuacaucaucugcaucuccaccaagcacuucuacugguucuucagcaacuaccucaagcggcgcguggucuucaacgggguguccuucagcaccuucgaggaggcggcccugugcaccuuccugcucaacaaggagauguaccugaagcugcgguccgacgugcuccugccgcugacccaguacaaccgcuaccucgcccuguacaacaaguacaaguacuucagcggcgccauggacaccacguccuaccgggaggccgcgugcugccaccuggccaaggcccucaacgacuucagcaacuccggcagcgacguccuguaccagccgccccagaccuccaucaccagcgccgugcugcagugaggacuagucccuguucccagagcccacuuuuuuuucuuuuuuugaaauaaaauagccugucuuucagaucucaaaggcucuuuucagagccaccaaaaaaaaaaaaaaaaaaaaaaaaaaaaaaaaaaaaaaaaaaaaaaaaaaaaaaaaaaaaaaaaaaaaaaaaaaaaaaaaaaaaaaaaaaaaaaaaaaaaa

SEQ ID NO: 20218 - RNA, 1778 nt, Artificial Sequence
  SARS-CoV-2__MT810720.1__non-structural protein 4 (NSP4) mRNA gc
aggagagucccgcagucggcguccagcggcucugcuuguucgugugugugucguugcaggccuuauucaagcuuaccaugaagaucgugaacaacuggcugaagcagcucaucaaggucacccugguguuccuguucguggccgccaucuucuaccucaucacccccguccacgugaugagcaagcacacggacuucuccagcgagaucaucggcuacaaggcgaucgacgggggcgugacccgcgacaucgccuccaccgacacgugcuucgccaacaagcacgccgacuucgacgccugguucagccagcggggcggcuccuacaccaacgacaaggcgugcccccugaucgccgccgucaucacccgcgaggugggguucgugguccccggccugcccggcaccauccuccggaccacgaacggggacuuccugcacuuccugccccgcguguucagcgccgugggcaacaucugcuacaccccguccaagcucaucgaguacaccgacuucgcgaccagcgccugcguccuggccgccgagugcacgaucuucaaggacgccuccgggaagcccgugcccuacugcuacgacaccaacgugcuggagggcagcgucgcguacgagucccuccggcccgacacccgcuacgugcugauggacgggagcaucauccaguucccgaacaccuaccuggagggcuccgugcgggucgugacgaccuucgacagcgaguacugccgccacgggaccugcgagcgguccgaggccggggugugcgucagcaccuccggccgcugggugcucaacaacgacuacuaccggagccugcccgggguguucugcggcgucgacgccgugaaccugcucacgaacauguucacgccccugauccagcccaucggcgcccuggacaucuccgccagcaucgucgccgggggcaucguggcgaucguggugaccugccucgccuacuacuucaugcgcuuccggcgcgccuucggggaguacagccacgucguggccuucaacacccugcuguuccucauguccuucaccguccugugccugaccccgguguacagcuuccuccccggcguguacuccgucaucuaccuguaccugaccuucuaccucaccaacgacgugagcuuccuggcgcacauccaguggauggugauguucacgccccugguccccuucuggaucaccaucgccuacaucaucugcaucuccaccaagcacuucuacugguucuucagcaacuaccucaagcggcgcgugguguucaacggggucuccuucagcaccuucgaggaggccgcccugugcacguuccugcucaacaaggagauguaccugaagcugcgguccgacgugcuccugccgcugacccaguacaaccgcuaccucgcccuguacaacaaguacaaguacuucagcggcgcgauggacaccaccuccuaccgggaggccgccugcugccaccuggccaaggcgcucaacgacuucagcaacuccggcagcgacgugcuguaccagccgccccagacguccaucaccagcgccguccugcagugaggacuagucccuguucccagagcccacuuuuuuuucuuuuuuugaaauaaaauagccugucuuucagaucucaaaggcucuuuucagagccaccaaaaaaaaaaaaaaaaaaaaaaaaaaaaaaaaaaaaaaaaaaaaaaaaaaaaaaaaaaaaaaaaaaaaaaaaaaaaaaaaaaaaaaaaaaaaaaaaaaaaa

SEQ ID NO: 20219 - RNA, 1778 nt, Artificial Sequence
  SARS-CoV-2__MT810758.1__non-structural protein 4 (NSP4) mRNA gc
aggagagucccgcagucggcguccagcggcucugcuuguucgugugugugucguugcaggccuuauucaagcuuaccaugaagaucgugaacaacuggcugaagcagcucaucaaggucacccugguguuccuguucguggccgccaucuucuaccucaucacccccguccacgugaugagcaagcacacggacuucuccagcgagaucaucggcuacaaggcgaucgacgggggcgugacccgcgacaucgccuccaccgacacgugcuucgccaacaagcacgccgacuucgacaccugguucagccagcggggcggcuccuacaccaacgacaaggccugcccccugaucgcggccgucaucacccgcgaggugggguucgugguccccggccugcccggcaccauccuccggacgaccaacggggacuuccugcacuuccugccccgcguguucagcgccgugggcaacaucugcuacaccccguccaagcucaucgaguacaccgacuucgccacgagcgcgugcguccuggccgccgagugcaccaucuucaaggacgccuccgggaagcccgugcccuacugcuacgacaccaacgugcuggagggcagcgucgccuacgagucccuccggcccgacacccgcuacgugcugauggacgggagcaucauccaguucccgaacacguaccuggagggcuccgugcgggucgugaccaccuucgacagcgaguacugccgccacgggaccugcgagcgguccgaggcgggggugugcgucagcacguccggccgcugggugcucaacaacgacuacuaccggagccugcccgggguguucugcggcgucgacgccgugaaccugcucaccaacauguucacgccccugauccagcccaucggcgcccuggacaucuccgccagcaucgucgccgggggcaucguggcgaucguggugaccugccucgccuacuacuucaugcgcuuccggcgcgccuucggggaguacagccacgucguggccuucaacacccugcuguuccucauguccuucaccguccugugccugaccccgguguacagcuuccuccccggcguguacuccgucaucuaccuguaccugaccuucuaccucacgaacgacgugagcuuccuggcccacauccaguggauggugauguucacgccccugguccccuucuggaucaccaucgcguacaucaucugcaucuccaccaagaacuucuacugguucuucagcaacuaccucaagcggcgcgugguguucaacggggucuccuucagcaccuucgaggaggccgcccugugcaccuuccugcucaacaaggagauguaccugaagcugcgguccgacgugcuccugccgcugacccaguacaaccgcuaccucgcccuguacaacaaguacaaguacuucagcggcgccauggacaccacguccuaccgggaggcggccugcugccaccuggccaaggcccucaacgacuucagcaacuccggcagcgacgugcuguaccagccgccccagaccuccaucaccagcgcgguccugcagugaggacuagucccuguucccagagcccacuuuuuuuucuuuuuuugaaauaaaauagccugucuuucagaucucaaaggcucuuuucagagccaccaaaaaaaaaaaaaaaaaaaaaaaaaaaaaaaaaaaaaaaaaaaaaaaaaaaaaaaaaaaaaaaaaaaaaaaaaaaaaaaaaaaaaaaaaaaaaaaaaaaaa

SEQ ID NO: 20220 - RNA, 1778 nt, Artificial Sequence
  SARS-CoV-2__MT810765.1__non-structural protein 4 (NSP4) mRNA gc
aggagagucccgcagucggcguccagcggcucugcuuguucgugugugugucguugcaggccuuauucaagcuuaccaugaagaucgugaacaacuggcugaagcagcucaucaaggucacccugguguuccuguucguggccgccaucuucuaccucaucacccccguccacgugauguucaagcacacggacuucagcuccgagaucaucggcuacaaggcgaucgacgggggcgugacccgcgacaucgccagcaccgacacgugcuucgccaacaagcacgccgacuucgacaccugguucucccagcggggcggcagcuacaccaacgacaaggccugcccccugaucgcggccgucaucacccgcgaggugggguucgugguccccggccugcccggcaccauccuccggacgaccaacggggacuuccugcacuuccugccccgcguguucuccgccgugggcaacaucugcuacaccccgagcaagcucaucgaguacaccgacuucgccacguccgcgugcguccuggccgccgagugcaccaucuucaaggacgccagcgggaagcccgugcccuacugcuacgacaccaacgugcuggagggcuccgucgccuacgagagccuccggcccgacacccgcuacgugcugauggacggguccaucauccaguucccgaacacguaccuggagggcagcgugcgggucgugaccaccuucgacuccgaguacugccgccacgggaccugcgagcggagcgaggcgggggugugcgucuccacgagcggccgcugggugcucaacaacgacuacuaccggucccugcccgggguguucugcggcgucgacgccgugaaccugcucaccaacauguucacgccccugauccagcccaucggcgcccuggacaucagcgccuccaucgucgccgggggcaucguggcgaucguggugaccugccucgccuacuacuucaugcgcuuccggcgcgccuucggggaguacagccacgucguggccuucaacacccugcuguuccucaugagcuucaccguccugugccugaccccgguguacuccuuccuccccggcguguacagcgucaucuaccuguaccugaccuucuaccucacgaacgacguguccuuccuggcccacauccaguggauggugauguucacgccccugguccccuucuggaucaccaucgcguacaucaucugcaucagcaccaagcacuucuacugguucuucuccaacuaccucaagcggcgcgugguguucaacggggucagcuucuccaccuucgaggaggccgcccugugcaccuuccugcucaacaaggagauguaccugaagcugcggagcgacgugcuccugccgcugacccaguacaaccgcuaccucgcccuguacaacaaguacaaguacuucuccggcgccauggacaccacgagcuaccgggaggcggccugcugccaccuggccaaggcccucaacgacuucuccaacagcggcuccgacgugcuguaccagccgccccagaccagcaucaccuccgcgguccugcagugaggacuagucccuguucccagagcccacuuuuuuuucuuuuuuugaaauaaaauagccugucuuucagaucucaaaggcucuuuucagagccaccaaaaaaaaaaaaaaaaaaaaaaaaaaaaaaaaaaaaaaaaaaaaaaaaaaaaaaaaaaaaaaaaaaaaaaaaaaaaaaaaaaaaaaaaaaaaaaaaaaaaa

SEQ ID NO: 20221 - RNA, 1778 nt, Artificial Sequence
  SARS-CoV-2__MT810782.1__non-structural protein 4 (NSP4) mRNA gc
aggagagucccgcagucggcguccagcggcucugcuuguucgugugugugucguugcaggccuuauucaagcuuaccaugaagaucgugaacaacuggcugaagcagcucaucaaggucacccugguguuccuguucguggccgccaucuucuaccucaucacccccguccacgugaugagcaagcacacggacuucuccagcgagaucaucggcuacaaggcgaucgacgggggcgugacccgcgacaucgccuccaccgacacgugcuucgccaacaagcacgccgacuucgacaccugguucagccagcgcgggggcuccuacaccaccgacaaggccugcccccugaucgcggccgucaucacccgggaggugggguucgugguccccggccugcccggcacgauccuccggaccaccaacggggacuuccugcacuuccugccccgcguguucagcgccgugggcaacaucugcuacaccccguccaagcucaucgaguacacggacuucgccaccagcgcgugcguccuggccgccgagugcaccaucuucaaggacgccuccgggaagcccgugcccuacugcuacgacaccaacgugcuggagggcagcgucgccuacgagucccuccggcccgacacgcgcuacgugcugauggacgggagcaucauccaguucccgaacaccuaccuggagggcuccgugcgggucgugaccaccuucgacagcgaguacugccgccacggcacgugcgagcgguccgaggcgggggugugcgucagcaccuccggccgcugggugcucaacaacgacuacuaccggagccugcccgggguguucugcggcgucgacgccgugaaccugcucaccaacauguucaccccgcugauccagcccaucggcgcccuggacaucuccgccagcaucgucgccgggggcaucguggcgaucguggucacgugccucgccuacuacuucaugcgcuuccggcgcgccuucggggaguacagccacgugguggccuucaacacccugcuguuccucauguccuucaccguccugugccugacccccguguacagcuuccuccccggcguguacuccgucaucuaccuguaccugacguucuaccucaccaacgacgugagcuuccuggcccacauccaguggauggugauguucacgccccugguccccuucuggaucaccaucgcguacaucaucugcaucuccaccaagcacuucuacugguucuucagcaacuaccucaagcggcgcgugguguucaacggggucuccuucagcaccuucgaggaggccgcccugugcaccuuccugcucaacaaggagauguaccugaagcugcgguccgacgugcuccugccgcugacccaguacaaccgcuaccucgcccuguacaacaaguacaaguacuucagcggcgccauggacacgaccuccuaccgggaggcggccugcugccaccuggccaaggcccucaacgacuucagcaacuccggcagcgacgugcuguaccagccgccccagaccuccaucaccagcgcgguccugcagugaggacuagucccuguucccagagcccacuuuuuuuucuuuuuuugaaauaaaauagccugucuuucagaucucaaaggcucuuuucagagccaccaaaaaaaaaaaaaaaaaaaaaaaaaaaaaaaaaaaaaaaaaaaaaaaaaaaaaaaaaaaaaaaaaaaaaaaaaaaaaaaaaaaaaaaaaaaaaaaaaaaaa

SEQ ID NO: 20222 - RNA, 1778 nt, Artificial Sequence
  SARS-CoV-2__MT810814.1__non-structural protein 4 (NSP4) mRNA gc
aggagagucccgcagucggcguccagcggcucugcuuguucgugugugugucguugcaggccuuauucaagcuuaccaugaagaucgugaacaacuggcugaagcagcucaucaaggucacccugguguuccuguucguggccgccaucuucuaccucaucacccccguccacgugaugagcaagcacacggacuucuccagcgagaucaucggcuacaaggcgaucgacgggggcgugacccgcgacaucgccuccaccgacacgugcuucgccaacaagcacgccgacuucgacaccugguucagccagcggggcggcuccuacaccaacgacaaggccugcccccugaucgcggccgucaucacccgcgaggugggguucgugguccccggccugcccggcaccauccuccggacgaccaacggggacuuccugcacuuccugccccgcguguucagcgccgugggcaacaucugcuacaccccguccaagcucaucgaguacaccgacuucgccacgagcgcgugcguccuggccgccgagugcaccaucuucaaggacgccuccgggaagcccgugcccuacugcuacgacaccaacgugcuggagggcagcgucgccuacgagucccuccggcccgacacccgcuacgugcugauggacgggagcaucauccaguucccgaacacguaccuggagggcuccgugcgggucgugaccaccuucgacagcgaguacugccgccacgggaccugcgagcgguccgaggcgggggugugcgucagcacguccggccgcugggugcucaacaacgacuacuaccggagccugcccgggguguucugcggcgucgacgccgugaaccugcucaccaacauguucacgccccugauccagcccaucggcgcccuggacaucuccgccagcaucgucgccgggggcaucguggcgaucguggugaccugccucgccuacuacuucaugcgcuuccggcgcgccuucggggaguacagccacgucguggccuucaacacccugcuguuccucauguccuucaccguccugugccugaccccgguguacagcuuccuccccggcguguacuccgucaucuaccuguaccugaccuucuaccucacgaacgacgugagcuuccuggcccacauccaguggauggugauguucacgccccugguccccuucuggaucaccaucgcguacaucaucugcaucuccaccaagcacuucuacugguucuucagcaacuaccucaagcggcgcgugguguucaacggggucuccuucagcaccuucgaggaggccgcccugugcaccuuccugcucaacaaggagauguaccugaagcugcgguccgacgugcuccugccgcugacccaguacaaccgcuaccucgugcuguacaacaaguacaaguacuucagcggcgccauggacaccacguccuaccgggaggccgcgugcugccaccuggccaaggcccucaacgacuucagcaacuccggcagcgacguccuguaccagccgccccagaccuccaucaccagcgccgugcugcagugaggacuagucccuguucccagagcccacuuuuuuuucuuuuuuugaaauaaaauagccugucuuucagaucucaaaggcucuuuucagagccaccaaaaaaaaaaaaaaaaaaaaaaaaaaaaaaaaaaaaaaaaaaaaaaaaaaaaaaaaaaaaaaaaaaaaaaaaaaaaaaaaaaaaaaaaaaaaaaaaaaaaa

SEQ ID NO: 20223 - RNA, 1778 nt, Artificial Sequence
  SARS-CoV-2__MT810842.1__non-structural protein 4 (NSP4) mRNA gc
aggagagucccgcagucggcguccagcggcucugcuuguucgugugugugucguugcaggccuuauucaagcuuaccaugaagaucgugaacaacuggcugaagcagcucaucaaggucacccugguguuccuguucguggccgccaucuucuaccucaucacccccguccacgugaugagcaagcacacggacuucuccagcgagaucaucggcuacaaggcgaucgacgggggcgugacccgcgacaucgccuccaccgacacgugcuucgccaacaagcacgccgacuucgacaccugguucagccagcgcgggggcuccuacaccaacgacaaggccugcccccugaucgcggccgucaucacccgggaggugggguucgugguccccggccugcccggcaccauccuccggacgaccaacggggacuuccugcacuuccugccccgcguguucagcgccgugggcaacaucugcuacaccccguccaagcucaucgaguacaccgacuucgccacgagcgcgugcguccuggccgccgagugcaccaucuucaaggacgccuccgggaagcccgugcccuacugcuacgacaccaacgugcuggagggcagcgucgccuacgagucccuccggcccgacacccgcuacgugcugauggacgggagcaucauccaguucccgaacacguaccuggagggcuccgugcgggucgugaccaccuucgacagcgaguacugccgccacugcacgugcgagcgguccgaggcgggcgugugcgucagcaccuccgggcgcugggugcucaacaacgacuacuaccggagccugcccggcguguucugcggggucgacgccgugaaccugcucaccaacauguucacgccccugauccagcccaucggcgcccuggacaucuccgccagcaucgucgccggcgggaucguggcgaucguggugaccugccucgccuacuacuucaugcgcuuccggcgcgccuucggcgaguacagccacgucguggccuucaacacccugcuguuccucauguccuucaccguccugugccugaccccgguguacagcuuccuccccgggguguacuccgucaucuaccuguaccugaccuucuaccucacgaacgacgugagcuuccuggcccacauccaguggauggugauguucacgccccugguccccuucuggaucaccaucgcguacaucaucugcaucuccaccaagcacuucuacugguucuucagcaacuaccucaagcggcgcgugguguucaacggcgucuccuucagcaccuucgaggaggccgcccugugcaccuuccugcucaacaaggagauguaccugaagcugcgguccgacgugcuccugccgcugacccaguacaaccgcuaccucgcccuguacaacaaguacaaguacuucagcggggccauggacaccacguccuaccgggaggcggccugcugccaccuggccaaggcccucaacgacuucagcaacuccggcagcgacgugcuguaccagccgccccagaccuccaucaccagcgcgguccugcagugaggacuagucccuguucccagagcccacuuuuuuuucuuuuuuugaaauaaaauagccugucuuucagaucucaaaggcucuuuucagagccaccaaaaaaaaaaaaaaaaaaaaaaaaaaaaaaaaaaaaaaaaaaaaaaaaaaaaaaaaaaaaaaaaaaaaaaaaaaaaaaaaaaaaaaaaaaaaaaaaaaaaa

SEQ ID NO: 20224 - RNA, 1778 nt, Artificial Sequence
  SARS-CoV-2__MT810897.1__non-structural protein 4 (NSP4) mRNA gc
aggagagucccgcagucggcguccagcggcucugcuuguucgugugugugucguugcaggccuuauucaagcuuaccaugaagaucgugaacaacuggcugaagcagcucaucaaggucacccugguguuccuguucguggccgccaucuucuaccucaucacccccguccacgugaugagcaagcacacggacuucuccagcgagaucaucggcuacaaggcgaucgacgggggcgugacccgcgacaucgccuccaccgacacgugcuucgccaacaagcacgccgacuucgacaccugguucagccagcggggcggcuccuacaccaacgacaaggccugcccccugaucgcggccgucaucacccgcgaggugggguucgugguccccggccugcccggcaccauccuccggacgaccaacggggacuuccugcacuuccugccccgcguguucagcgccgugggcaacaucugcuacaccccguccaagcucaucgaguacaccgacuucgccacgagcgcgugcguccuggccgccgagugcaccaucuucaaggaggccuccgggaagcccgugcccuacugcuacgacaccaacgugcuggagggcagcgucgccuacgagucccuccggcccgacacccgcuacgugcugauggacgggagcaucauccaguucccgaacacguaccuggagggcuccgugcgggucgugaccaccuucgacagcgaguacugccgccacgggaccugcgagcgguccgaggcgggggugugcgucagcacguccggccgcugggugcucaacaacgacuacuaccggagccugcccgggguguucugcggcgucgacgccgugaaccugcucaccaacauguucacgccccugauccagcccaucggcgcccuggacaucuccgccagcaucgucgccgggggcaucguggcgaucguggugaccugccucgccuacuacuucaugcgcuuccggcgcgccuucggggaguacagccacgucguggccuucaacacccugcuguuccucauguccuucaccguccugugccugaccccgguguacagcuuccuccccggcguguacuccgucaucuaccuguaccugaccuucuaccucacgaacgacgugagcuuccuggcccacauccaguggauggugauguucacgccccugguccccuucuggaucaccaucgcguacaucaucugcaucuccaccaagcacuucuacugguucuucagcaacuaccucaagcggcgcgugguguucaacggggucuccuucagcaccuucgaggaggccgcccugugcaccuuccugcucaacaaggagauguaccugaagcugcgguccgacgugcuccugccgcugacccaguacaaccgcuaccucgcccuguacaacaaguacaaguacuucagcggcgccauggacaccacguccuaccgggaggcggccugcugccaccuggccaaggcccucaacgacuucagcaacuccggcagcgacgugcuguaccagccgccccagaccuccaucaccagcgcgguccugcagugaggacuagucccuguucccagagcccacuuuuuuuucuuuuuuugaaauaaaauagccugucuuucagaucucaaaggcucuuuucagagccaccaaaaaaaaaaaaaaaaaaaaaaaaaaaaaaaaaaaaaaaaaaaaaaaaaaaaaaaaaaaaaaaaaaaaaaaaaaaaaaaaaaaaaaaaaaaaaaaaaaaaa

SEQ ID NO: 20225 - RNA, 1778 nt, Artificial Sequence
  SARS-CoV-2__MT810946.1__non-structural protein 4 (NSP4) mRNA gc
aggagagucccgcagucggcguccagcggcucugcuuguucgugugugugucguugcaggccuuauucaagcuuaccaugaagaucgugaacaacuggcugaagcagcucaucaaggucacccugguguuccuguucguggccgccaucuucuaccucaucacccccguccacgugaugagcaagcacacggacuucuccagcgagaucaucggcuacaaggcgaucgacgggggcgugacccgcgacaucgccuccaccgacacgugcuucgccaacaagcacgccgacuucgacaccugguucagccagcggggcggcuccuacaccaacgacaaggccugcccccugaucgcggccgucaucacccgcgaggugggguucgugguccccggccugcccggcaccauccuccggacgaccaacggggacuuccugcacuuccugccccgcguguucagcgccgugggcaacaucugcuacaccccguccaagcucaucgaguacaccgacuucgccacgagcgcgugcguccuggccgccgagugcaccaucuucaaggacgccuccgggaagcccgugcccuacugcuacgacaccaacgugcuggagggcagcgucgccuacgagucccuccggcccgacacccgcuacgugcugauggacgggagcaucauccaguucccgaacacguaccuggagggcuccgugcgggucgugaccaccuucgacagcgaguacugccgccacgggaccugcgagcgguccgaggcgggggugugcgucagcacguccggccgcugggugcucaacaacgacuacuaccggagccugcccgggguguucugcggcgucgacgccgugaaccugcucaccaacauguucacgccccugauccagcccaucggcgcccuggacaucuccgccagcaucgucgccgggggcgugguggcgaucgucgugaccugccucgccuacuacuucaugcgcuuccggcgcgccuucggggaguacagccacguggucgccuucaacacccugcuguuccucauguccuucaccgugcugugccugaccccgguguacagcuuccuccccggcgucuacuccgugaucuaccuguaccugaccuucuaccucacgaacgacgugagcuuccuggcccacauccaguggauggucauguucacgccccuggugcccuucuggaucaccaucgcguacaucaucugcaucuccaccaagcacuucuacugguucuucagcaacuaccucaagcggcgcguggucuucaacgggguguccuucagcaccuucgaggaggccgcccugugcaccuuccugcucaacaaggagauguaccugaagcugcgguccgacgugcuccugccgcugacccaguacaaccgcuaccucgcccuguacaacaaguacaaguacuucagcggcgccauggacaccacguccuaccgggaggcggccugcugccaccuggccaaggcccucaacgacuucagcaacuccggcagcgacguccuguaccagccgccccagaccuccaucaccagcgcggugcugcagugaggacuagucccuguucccagagcccacuuuuuuuucuuuuuuugaaauaaaauagccugucuuucagaucucaaaggcucuuuucagagccaccaaaaaaaaaaaaaaaaaaaaaaaaaaaaaaaaaaaaaaaaaaaaaaaaaaaaaaaaaaaaaaaaaaaaaaaaaaaaaaaaaaaaaaaaaaaaaaaaaaaaa

SEQ ID NO: 20226 - RNA, 1778 nt, Artificial Sequence
  SARS-CoV-2__MT810982.1__non-structural protein 4 (NSP4) mRNA gc
aggagagucccgcagucggcguccagcggcucugcuuguucgugugugugucguugcaggccuuauucaagcuuaccaugaagaucgugaacaacuggcugaagcagcucaucaaggucacccugguguuccuguucguggccgccaucuucuaccucaucacccccguccacgugaugagcaagcacacggacuucuccagcgagaucaucggcuacaaggcgaucgacgggggcgugacccgcgacaucgccuccaccgacacgugcuucgccaacaagcacgccgacuucgacaccugguucagccagcgcgggggcuccuacaccaacgacaaggccugcccccugaucgcggccgucaucacccgggaggugggguucgugguccccggccugcccggcaccauccuccggacgaccaacggggacuuccugcacuuccugccccgcguguucagcgccgugggcaacaucugcuacaccccguccaagcucaucgaguacaccgacuucgccacgagcgcgugcguccuggccgccgagugcaccaucuucaaggacgccuccgggaagcccgugcccuacugcuacgacaccaacgugcuggagggcagcgucgccuacgagucccuccggcccgacacccgcuacgugcugauggacgggagcaucauccaguucccgaacacguaccuggagggcuccgugcgggucgugaccaccuucgacagcgaguacugccgccacggcaucugcgagcgguccgaggcgggggugugcgucagcaccuccggccgcugggugcucaacaacgacuacuaccggagccugcccgggguguucugcggcgucgacgccgugaaccugcucacgaacauguucacgccccugauccagcccaucggcgcccuggacaucuccgccagcaucgucgccgggggcaucguggcgaucguggugaccugccucgccuacuacuucaugcgcuuccggcgcgccuucggggaguacagccacgucguggccuucaacacccugcuguuccucauguccuucaccguccugugccugaccccgguguacagcuuccuccccggcguguacuccgucaucuaccuguaccugaccuucuaccucaccaacgacgugagcuuccuggcccacauccaguggauggugauguucacgccccugguccccuucuggaucaccaucgcguacaucaucugcaucuccaccaagcacuucuacugguucuucagcaacuaccucaagcggcgcgugguguucaacggggucuccuucagcaccuucgaggaggccgcccugugcacguuccugcucaacaaggagauguaccugaagcugcgguccgacgugcuccugccgcugacccaguacaaccgcuaccucgcccuguacaacaaguacaaguacuucagcggcgccauggacaccaccuccuaccgggaggcggccugcugccaccuggccaaggcccucaacgacuucagcaacuccggcagcgacgugcuguaccagccgccccagacguccaucaccagcgcgguccugcagugaggacuagucccuguucccagagcccacuuuuuuuucuuuuuuugaaauaaaauagccugucuuucagaucucaaaggcucuuuucagagccaccaaaaaaaaaaaaaaaaaaaaaaaaaaaaaaaaaaaaaaaaaaaaaaaaaaaaaaaaaaaaaaaaaaaaaaaaaaaaaaaaaaaaaaaaaaaaaaaaaaaaa

SEQ ID NO: 20227 - RNA, 1778 nt, Artificial Sequence
  SARS-CoV-2__MT811283.1__non-structural protein 4 (NSP4) mRNA gc
aggagagucccgcagucggcguccagcggcucugcuuguucgugugugugucguugcaggccuuauucaagcuuaccaugaagaucgugaacaacuggcugaagcagcucaucaaggucacccugguguuccuguucguggccgccaucuucuaccucaucacccccguccacgugaugagcaagcacacggacuucuccagcgagaucaucggcuacaaggcgaucgacgggggcgugacccgcgacaucgccuccaccgacacgugcuucgccaacaagcacgccgacuucgacaccugguucagccagcggggcggcuccuacaccaacgacaaggccugcccgcugaucgcggccgucaucacccgcgaggugggguucgugguccccggccugcccggcaccauccuccggacgaccaacggggacuuccugcacuuccugccccgcguguucagcgccgugggcaacaucugcuacaccccguccaagcucaucgaguacaccgacuucgccacgagcgcgugcguccuggccgccgagugcaccaucuucaaggacgccuccgggaagcccgugcccuacugcuacgacaccaacgugcuggagggcagcgucgccuacgagucccuccggcccgacacccgcuacgugcugauggacgggagcaucauccaguucccgaacacguaccuggagggcuccgugcgggucgugaccaccuucgacagcgaguacugccgccacgggaccugcgagcgguccgaggcgggggugugcgucagcacguccggccgcugggugcucaacaacgacuacuaccggagccugcccgggguguucugcggcgucgacgccgugaaccugcucaccaacauguucacgccccugauccagcccaucggcgcccuggacaucuccgccagcaucgucgccgggggcaucguggcgaucguggugaccugccucgccuacuacuucaugcgcuuccggcgcgccuucggggaguacagccacgucguggccuucaacacccugcuguuccucauguccuucaccguccugugccugaccccgguguacagcuuccuccccggcguguacuccgucaucuaccuguaccugaccuucuaccucacgaacgacgugagcuuccuggcccacauccaguggauggugauguucaccucccugguccccuucuggaucaccaucgcguacaucaucugcaucagcaccaagcacuucuacugguucuucuccaacuaccucaagcggcgcgugguguucaacggggucagcuucuccacguucgaggaggccgcccugugcaccuuccugcucaacaaggagauguaccugaagcugcggagcgacgugcuccugccccugacccaguacaaccgcuaccucgcccuguacaacaaguacaaguacuucuccggcgccauggacaccacgagcuaccgggaggcggccugcugccaccuggccaaggcccucaacgacuucuccaacagcggcuccgacgugcuguaccagccgccccagaccagcaucaccuccgcgguccugcagugaggacuagucccuguucccagagcccacuuuuuuuucuuuuuuugaaauaaaauagccugucuuucagaucucaaaggcucuuuucagagccaccaaaaaaaaaaaaaaaaaaaaaaaaaaaaaaaaaaaaaaaaaaaaaaaaaaaaaaaaaaaaaaaaaaaaaaaaaaaaaaaaaaaaaaaaaaaaaaaaaaaaa

SEQ ID NO: 20228 - RNA, 1778 nt, Artificial Sequence
  SARS-CoV-2__MT811437.1__non-structural protein 4 (NSP4) mRNA gc
aggagagucccgcagucggcguccagcggcucugcuuguucgugugugugucguugcaggccuuauucaagcuuaccaugaagaucgugaacaacuggcugaagcagcucaucaaggucacccugguguuccuguucguggccgccaucuucuaccucaucacccccguccacgugaugagcaagcacacggacuucuccagcgagaucaucggcuacaaggcgaucgacgggggcgugacccgcgacaucgccuccaccgacacgugcuucgccaacaagcacgccgacuucgacaccugguucagccagcggggcggcuccuacaccaacgacaaggccugcccccugaucgcggccgucaucacccgcgaggugggguucgugguccccggccugcccggcaccauccuccggacgaccaacggggacuuccugcacuuccugccccgcguguucagcgccgugggcaacaucugcuacaccccguccaagcucaucgaguacaccgacuucgccacgagcgcgugcguccuggccgccgagugcaccaucuucaaggacgccuccgggaagcccgugcccuacugcuacgacaccaacgugcuggagggcagcgucgccuacgagaaccuccggcccgacacccgcuacgugcugauggacggguccaucauccaguucccgaacacguaccuggagggcagcgugcgggucgugaccaccuucgacuccgaguacugccgccacgggaccugcgagcggagcgaggcgggggugugcgucuccacgagcggccgcugggugcucaacaacgacuacuaccggucccugcccgggguguucugcggcgucgacgccgugaaccugcucaccaacauguucacgccccugauccagcccaucggcgcccuggacaucagcgccuccaucgucgccgggggcaucguggcgaucguggugaccugccucgccuacuacuucaugcgcuuccggcgcgccuucggggaguacagccacgucguggccuucaacacccugcuguuccucaugagcuucaccguccugugccugaccccgguguacuccuuccuccccggcguguacagcgucaucuaccuguaccugaccuucuaccucacgaacgacguguccuuccuggcccacauccaguggauggugauguucacgccccugguccccuucuggaucaccaucgcguacaucaucugcaucagcaccaagcacuucuacugguucuucuccaacuaccucaagcggcgcgugguguucaacggggucagcuucuccaccuucgaggaggccgcccugugcaccuuccugcucaacaaggagauguaccugaagcugcggagcgacgugcuccugccgcugacccaguacaaccgcuaccucgcccuguacaacaaguacaaguacuucuccggcgccauggacaccacgagcuaccgggaggcggccugcugccaccuggccaaggcccucaacgacuucuccaacagcggcuccgacgugcuguaccagccgccccagaccagcaucaccuccgcgguccugcagugaggacuagucccuguucccagagcccacuuuuuuuucuuuuuuugaaauaaaauagccugucuuucagaucucaaaggcucuuuucagagccaccaaaaaaaaaaaaaaaaaaaaaaaaaaaaaaaaaaaaaaaaaaaaaaaaaaaaaaaaaaaaaaaaaaaaaaaaaaaaaaaaaaaaaaaaaaaaaaaaaaaaa

SEQ ID NO: 20229 - RNA, 1778 nt, Artificial Sequence
  SARS-CoV-2__MT811448.1__non-structural protein 4 (NSP4) mRNA gc
aggagagucccgcagucggcguccagcggcucugcuuguucgugugugugucguugcaggccuuauucaagcuuaccaugaagaucgugaacaacuggcugaagcagcucaucaaggucacccugguguuccuguucguggccgccaucuucuaccucaucacccccguccacgugaugagcaagcacacggacuucuccagcgagaucaucggcuacaaggcgaucgacgggggcgugacccgcgacaucgccuccaccgacacgugcuucgccaacaagcacgccgacuucgacaccugguucagccagcggggcggcuccuacaccaacgacaaggccugcccccugaucgcggccgucaucacccgcgaggugggguucgugguccccggccugcccggcaccauccuccggacgaccaacggggacuuccugcacuuccugccccgcguguucagcgccgugggcaacaucugcuacaccccguccaagcucaucgaguacaccgacuucgccacggcggccugcguccuggccgccgagugcaccaucuucaaggacgccagcgggaagcccgugcccuacugcuacgacaccaacgugcuggagggcuccgucgcguacgagagccuccggcccgacacccgcuacgugcugauggacggguccaucauccaguucccgaacacguaccuggagggcagcgugcgggucgugaccaccuucgacuccgaguacugccgccacgggaccugcgagcggagcgaggccggggugugcgucuccacgagcggccgcugggugcucaacaacgacuacuaccggucccugcccgggguguucugcggcgucgacgccgugaaccugcucaccaacauguucacgccccugauccagcccaucggcgcccuggacaucagcgccuccaucgucgccgggggcaucguggcgaucguggugaccugccucgccuacuacuucaugcgcuuccggcgcgccuucggggaguacagccacgucguggccuucaacacccugcuguuccucaugagcuucaccguccugugccugaccccgguguacuccuuccuccccggcguguacagcgucaucuaccuguaccugaccuucuaccucacgaacgacguguccuuccuggcgcacauccaguggauggugauguucacgccccugguccccuucuggaucaccaucgccuacaucaucugcaucagcaccaagcacuucuacugguucuucuccaacuaccucaagcggcgcgugguguucaacggggucagcuucuccaccuucgaggaggccgcccugugcaccuuccugcucaacaaggagauguaccugaagcugcggagcgacgugcuccugccgcugacccaguacaaccgcuaccucgcccuguacaacaaguacaaguacuucuccggcgcgauggacaccacgagcuaccgggaggccgccugcugccaccuggccaaggcgcucaacgacuucuccaacagcggcuccgacgugcuguaccagccgccccagaccagcaucaccuccgccguccugcagugaggacuagucccuguucccagagcccacuuuuuuuucuuuuuuugaaauaaaauagccugucuuucagaucucaaaggcucuuuucagagccaccaaaaaaaaaaaaaaaaaaaaaaaaaaaaaaaaaaaaaaaaaaaaaaaaaaaaaaaaaaaaaaaaaaaaaaaaaaaaaaaaaaaaaaaaaaaaaaaaaaaaa

SEQ ID NO: 20230 - RNA, 1778 nt, Artificial Sequence
  SARS-CoV-2__MT811484.1__non-structural protein 4 (NSP4) mRNA gc
aggagagucccgcagucggcguccagcggcucugcuuguucgugugugugucguugcaggccuuauucaagcuuaccaugaagaucgugaacaacuggcugaagcagcucaucaaggucacccugguguuccuguucguggccgccaucuucuaccucaucacccccguccacgugaugagcaagcacacggacuucuccagcgagaucaucggcuacaaggcgaucgacgggggcgugacccgcgacaucgccuccaccgacacgugcuucgccaacaagcacgccgacuucgacaccugguucagccagcggggcggcuccuacaccaacgacaaggccugcccccugaucgcggccgucaucacccgcgaggugggguucgugguccccggccugcccggcaccauccuccggacgaccaacggggacuuccugcacuuccugccccgcguguucagcgccgugggcaacaucugcuacaccccguccaagcucaucgaguacaccgacuucgccacgagcgcgugcguccuggccgccgagugcaccaucuucaaggacgccuccgggaagcccgugcccuacugcuacgacaccaacgugcuggagggcagcgucgccuacgagucccuccggcccgacacccgcuacgugcugauggacgggagcaucauccaguucccgaacacguaccuggagggcuccgugcgggucgugaccaccuucgacagcgaguacugccgccacgggaccugcgagcgguccgaggcgggggugugcgucagcacguccggccgcugggugcucaacaacgacuacuaccggagccugcccgggguguucugcggcgucgacgccgugaaccugcucaccaacauguucacgccccugauccagcccaucggcgcccuggacaucuccgccagcaucgucgccgggggcaucguggcgaucguggugaccugccucgccuacuacuucaugcgcuuccggcgcgccuucggggaguacagccacgucguggccuucaacacccugcuguuccucauguccuucaccguccugugccugaccccgguguacagcuuccuccccggcguguacuccgucaucuaccuguaccugaccuucuaccucacgaacgacgugagcuuccuggcccacauccaguggauggugauguucacgccccugguccccuucuggaucaccaucgcguacaucaucugcaucuccaccaagcacuucuacugguucuucagcaacuaccucaagcggcgcgugguguucaacggggucuccuucagcaccuucgaggaggccgcccugugcaccuuccugcucaacaaggagauguaccugaagcugcgguccgacgugcuccugccgcugacccaguacaaccgcuaccucgcccuguacaacaaguacaaguacuucagcggcgccauggacaccacguccuaccgggaggcggccugcugccaccuggccaaggcccucaacgacuucagcaacuccggcagcgacgugcuguaccagccgccccaggcguccaucaccagcgccguccugcagugaggacuagucccuguucccagagcccacuuuuuuuucuuuuuuugaaauaaaauagccugucuuucagaucucaaaggcucuuuucagagccaccaaaaaaaaaaaaaaaaaaaaaaaaaaaaaaaaaaaaaaaaaaaaaaaaaaaaaaaaaaaaaaaaaaaaaaaaaaaaaaaaaaaaaaaaaaaaaaaaaaaaa

SEQ ID NO: 20231 - RNA, 1778 nt, Artificial Sequence
  SARS-CoV-2__MT811505.1__non-structural protein 4 (NSP4) mRNA gc
aggagagucccgcagucggcguccagcggcucugcuuguucgugugugugucguugcaggccuuauucaagcuuaccaugaagaucgugaacaacuggcugaagcagcucaucaaggucacccugguguuccuguucguggccgccaucuucuaccucaucacccccguccacgugaugagcaagcacacggacuucuccagcgagaucaucggcuacaaggcgaucgacgggggcgugacccgcgacaucgccuccaccgacacgugcuucgccaacaagcacgccgacuucgacaccugguucagccagcggggcggcuccuacaccaacgacaaggccugcccccugaucgcggccgucaucacccgcgaggugggguucgugguccccggccugcccggcaccauccuccggacgaccaacggggacuuccugcacuuccugccccgcguguucagcgccgugggcaacaucugcuacaccccguccaagcucaucgaguacaccgacuucgccacgagcgcgugcguccuggccgccgagugcaccaucuucaaggacgccuccgggaagcccgugcccuacugcuacgacaccaacgugcuggagggcagcgucgccuacgagucccuccggcccgacacccgcuacgugcugauggacgggagcaucauccaguucccgaacacguaccuggagggcuccgugcgggucgugaucaccuucgacagcgaguacugccgccacgggaccugcgagcgguccgaggcgggggugugcgucagcaccuccggccgcugggugcucaacaacgacuacuaccggagccugcccgggguguucugcggcgucgacgccgugaaccugcucacgaacauguucacgccccugauccagcccaucggcgcccuggacaucuccgccagcaucgucgccgggggcaucguggcgaucguggugaccugccucgccuacuacuucaugcgcuuccggcgcgccuucggggaguacagccacgucguggccuucaacacccugcuguuccucauguccuucaccguccugugccugaccccgguguacagcuuccuccccggcguguacuccgucaucuaccuguaccugaccuucuaccucaccaacgacgugagcuuccuggcccacauccaguggauggugauguucacgccccugguccccuucuggaucaccaucgcguacaucaucugcaucuccaccaagcacuucuacugguucuucagcaacuaccucaagcggcgcgugguguucaacggggucuccuucagcaccuucgaggaggccgcccugugcacguuccugcucaacaaggagauguaccugaagcugcgguccgacgugcuccugccgcugacccaguacaaccgcuaccucgcccuguacaacaaguacaaguacuucagcggcgccauggacaccaccuccuaccgggaggcggccugcugccaccuggccaaggcccucaacgacuucagcaacuccggcagcgacgugcuguaccagccgccccagacguccaucaccagcgcgguccugcagugaggacuagucccuguucccagagcccacuuuuuuuucuuuuuuugaaauaaaauagccugucuuucagaucucaaaggcucuuuucagagccaccaaaaaaaaaaaaaaaaaaaaaaaaaaaaaaaaaaaaaaaaaaaaaaaaaaaaaaaaaaaaaaaaaaaaaaaaaaaaaaaaaaaaaaaaaaaaaaaaaaaaa

SEQ ID NO: 20232 - RNA, 1778 nt, Artificial Sequence
  SARS-CoV-2__MT811523.1__non-structural protein 4 (NSP4) mRNA gc
aggagagucccgcagucggcguccagcggcucugcuuguucgugugugugucguugcaggccuuauucaagcuuaccaugaagaucgugaacaacuggcugaagcagcucaucaaggucacccugguguuccuguucguggccgccaucuucuaccucaucacccccguccacgugaugagcaagcacacggacuucuccagcgagaucaucggcuacaaggcgaucgacgggggcgugacccgcgacaucgccuccaccgacacgugcuucgccaacaagcacgccgacuucgacaccugguucagccagcggggcggcuccuacaccaacgacaaggccugcccccugaucgcggccgucaucacccgcgaggugggguucgugguccccggccugcccggcaccauccuccggacgaccaacggggacuuccugcacuuccugccccgcguguucagcgccgugggcaacaucugcuacaccccguccaagcucaucgaguacaccgacuucgccacgagcgcgugcguccuggccgccgagugcaccaucuucaaggacgccuccgggaagcccgugcccuacugcuacgacaccaacgugcuggagggcagcgucgccuacgagucccuccggcccgacacccgcuacgugcugauggacgggagcaucauccaguucccgaacacguaccuggagggcuccgugcgggucgugaccaccuucgacagcgaguacugccgccacgggaccugcgagcgguccgaggcgggggugugcgucagcacguccggccgcugggugcucaacaacgacuacuaccggagccugcccgggguguucugcggcgucgacgccgugaaccugcucaccaacauguucacgccccugauccagcccaucggcgcccugaacaucuccgccagcaucgucgccgggggcaucguggcgaucguggugaccugccucgccuacuacuucaugcgcuuccggcgcgccuucggggaguacagccacgucguggccuucaacacccugcuguuccucauguccuucaccguccugugccugaccccgguguacagcuuccuccccggcguguacuccgucaucuaccuguaccugaccuucuaccucacgaacgacgugagcuuccuggcccacauccaguggauggugauguucacgccccugguccccuucuggaucaccaucgcguacaucaucugcaucuccaccaagcacuucuacugguucuucagcaacuaccucaagcggcgcgugguguucaacggggucuccuucagcaccuucgaggaggccgcccugugcaccuuccugcucaacaaggagauguaccugaagcugcgguccgacgugcuccugccgcugacccaguacaaccgcuaccucgcccuguacaacaaguacaaguacuucagcggcgccauggacaccacguccuaccgggaggcggccugcugccaccuggccaaggcccucaacgacuucagcaacuccggcagcgacgugcuguaccagccgccccagaccuccaucaccagcgcgguccugcagugaggacuagucccuguucccagagcccacuuuuuuuucuuuuuuugaaauaaaauagccugucuuucagaucucaaaggcucuuuucagagccaccaaaaaaaaaaaaaaaaaaaaaaaaaaaaaaaaaaaaaaaaaaaaaaaaaaaaaaaaaaaaaaaaaaaaaaaaaaaaaaaaaaaaaaaaaaaaaaaaaaaaa

SEQ ID NO: 20233 - RNA, 1778 nt, Artificial Sequence
  SARS-CoV-2__MT811707.1__non-structural protein 4 (NSP4) mRNA gc
aggagagucccgcagucggcguccagcggcucugcuuguucgugugugugucguugcaggccuuauucaagcuuaccaugaagaucgugaacaacuggcugaagcagcucaucaaggucacccugguguuccuguucguggccgccaucuucuaccucaucacccccguccacgugaugagcaagcacacggacuucuccagcgagaucaucggcuacaaggcgaucgacgggggcgugacccgcgacaucgccuccaccgacacgugcuucgccaacaagcacgccgacuucgacaccugguucagccagcggggcggcuccuacaccaacgacaaggccugcccccugaucgcggccgucaucacccgcgaggugggguucgugguccccggccugcccggcaccauccuccggacgaccaacggggacuuccugcacuuccugccccgcguguucagcgccgugggcaacaucugcuacaccccguccaagcucaucgaguacaccgacuucgccacgagcgcgugcguccuggccgccgagugcaccaucuucaaggacgccuccgggaagcccgugcccuacugcuacgacaccaacgugcuggagggcagcgucgccuacgagucccuccggcccgacacccgcuacgugcugauggacgggagcaucauccaguucccgaacacguaccuggagggcuccgugcgggucgugaccaccuucgacagcgaguacugccgccacgggaccugcgagcgguccgaggcgggggugugcgucagcacguccggccgcugggugcucaacaacgacuacuaccggagccugcccggggugcugugcggcgucgacgccgugaaccuccugaccaacauguucacgccccugauccagcccaucggcgcccucgacaucuccgccagcaucgucgccgggggcaucguggcgaucguggugaccugccuggccuacuacuucaugcgcuuccggcgcgccuucggggaguacagccacgucguggccuucaacacccuccuguuccugauguccuucaccguccugugccucaccccgguguacagcuuccugcccggcguguacuccgucaucuaccuguaccucaccuucuaccugacgaacgacgugagcuuccuggcccacauccaguggauggugauguucacgccccucguccccuucuggaucaccaucgcguacaucaucugcaucuccaccaagcacuucuacugguucuucagcaacuaccugaagcggcgcgugguguucaacggggucuccuucagcaccuucgaggaggccgcccugugcaccuuccuccugaacaaggagauguaccugaagcuccgguccgacgugcugcugccgcucacccaguacaaccgcuaccuggcccuguacaacaaguacaaguacuucagcggcgccauggacaccacguccuaccgggaggcggccugcugccaccucgccaaggcccugaacgacuucagcaacuccggcagcgacgugcuguaccagccgccccagaccuccaucaccagcgcgguccugcagugaggacuagucccuguucccagagcccacuuuuuuuucuuuuuuugaaauaaaauagccugucuuucagaucucaaaggcucuuuucagagccaccaaaaaaaaaaaaaaaaaaaaaaaaaaaaaaaaaaaaaaaaaaaaaaaaaaaaaaaaaaaaaaaaaaaaaaaaaaaaaaaaaaaaaaaaaaaaaaaaaaaaa

SEQ ID NO: 20234 - RNA, 1778 nt, Artificial Sequence
  SARS-CoV-2__MT811728.1__non-structural protein 4 (NSP4) mRNA gc
aggagagucccgcagucggcguccagcggcucugcuuguucgugugugugucguugcaggccuuauucaagcuuaccaugaagaucgugaacaacuggcugaagcagcucaucaaggucacccugguguuccuguucguggccgccaucuucuaccucaucacccccguccacgugaugagcaagcacacggacuucuccagcgagaucaucggcuacaaggcgaucgacgggggcgugacccgcgacaucgccuccaccgacacgugcuucgccaacaagcacgccgacuucgacaccugguucagccagcggggcggcuccuacaccaacgacaaggccugcccccugaucgcggccgucaucauccgcgaggugggguucgugguccccggccugcccggcaccauccuccggaccacgaacggggacuuccugcacuuccugccccgcguguucagcgccgugggcaacaucugcuacaccccguccaagcucaucgaguacaccgacuucgccaccagcgcgugcguccuggccgccgagugcacgaucuucaaggacgccuccgggaagcccgugcccuacugcuacgacaccaacgugcuggagggcagcgucgccuacgagucccuccggcccgacacccgcuacgugcugauggacgggagcaucauccaguucccgaacaccuaccuggagggcuccgugcgggucgugacgaccuucgacagcgaguacugccgccacgggaccugcgagcgguccgaggcgggggugugcgucagcaccuccggccgcugggugcucaacaacgacuacuaccggagccugcccgggguguucugcggcgucgacgccgugaaccugcucacgaacauguucacgccccugauccagcccaucggcgcccuggacaucuccgccagcaucgucgccgggggcaucguggcgaucguggugaccugccucgccuacuacuucaugcgcuuccggcgcgccuucggggaguacagccacgucguggccuucaacacccugcuguuccucauguccuucaccguccugugccugaccccgguguacagcuuccuccccggcguguacuccgucaucuaccuguaccugaccuucuaccucaccaacgacgugagcuuccuggcccacauccaguggauggugauguucacgccccugguccccuucuggaucaccaucgcguacaucaucugcaucuccaccaagcacuucuacugguucuucagcaacuaccucaagcggcgcgugguguucaacggggucuccuucagcaccuucgaggaggccgcccugugcacguuccugcucaacaaggagauguaccugaagcugcgguccgacgugcuccugccgcugacccaguacaaccgcuaccucgcccuguacaacaaguacaaguacuucagcggcgccauggacaccaccuccuaccgggaggcggccugcugccaccuggccaaggcccucaacgacuucagcaacuccggcagcgacgugcuguaccagccgccccagacguccaucaccagcgcgguccugcagugaggacuagucccuguucccagagcccacuuuuuuuucuuuuuuugaaauaaaauagccugucuuucagaucucaaaggcucuuuucagagccaccaaaaaaaaaaaaaaaaaaaaaaaaaaaaaaaaaaaaaaaaaaaaaaaaaaaaaaaaaaaaaaaaaaaaaaaaaaaaaaaaaaaaaaaaaaaaaaaaaaaaa

SEQ ID NO: 20235 - RNA, 1778 nt, Artificial Sequence
  SARS-CoV-2__MT811737.1__non-structural protein 4 (NSP4) mRNA gc
aggagagucccgcagucggcguccagcggcucugcuuguucgugugugugucguugcaggccuuauucaagcuuaccaugaagaucgugaacaacuggcugaagcagcucaucaaggucacccugguguuccuguucguggccgccaucuucuaccucaucacccccguccacgugaugagcaagcacacggacuucuccagcgagaucaucggcuacaaggcgaucgacgggggcgugacccgcgacaucgccuccaccgacacgugcuucgccaacaagcacgccgacuucgacaccugguucagccagcggggcggcuccuacaccaacgacaaggccugcccccugaucgcggccgucaucacccgcgaggugggguucgugguccccggccugcccggcaccauccuccggacgaccaacggggacuuccugcacuuccugccccgcguguucagcgccgugggcaacaucugcuacaccccguccaagcucaucgaguacaccgacuucgccacgagcgcgugcguccuggccgccgagugcaccaucuucaaggacgccuccgggaagcccgugcccuacugcuacgacaccaacgugcuggagggcagcgucgccuacgagucccuccggcccgacacccgcuacgugcugauggacgggagcaucauccaguucccgaacacguaccuggagggcuccgugcgggucgugaccaccuucgacagcgaguacugccgccacgggaccugcgagcgguccgaggcgggggugugcgucagcacguccggccgcugggugcucaacaacgacuacuaccggagccugcccgggguguucugcggcgucgacgccgugaaccugcucaccaacauguucacgccccugauccagcccaucggcgcccuggacaucuccgccagcaucgucgccgggggcaucguggcgaucguggugaccugccucgccuacuacuucaugcgcuuccggcgcgccuucggggaguacagccacgucguggccuucaacacccugcuguuccucauguccuucaccguccugugccugaccccgguguacagcuuccuccccggcguguacuccgucaucuaccuguaccugaucuucuaccucaccaacgacgugagcuuccuggcccacauccaguggauggugauguucacgccccugguccccuucuggaucaccaucgcguacaucaucugcaucuccaccaagcacuucuacugguucuucagcaacuaccucaagcggcgcgugguguucaacggggucuccuucagcaccuucgaggaggccgcccugugcacguuccugcucaacaaggagauguaccugaagcugcgguccgacgugcuccugccgcugacccaguacaaccgcuaccucgcccuguacaacaaguacaaguacuucagcggcgccauggacaccaccuccuaccgggaggcggccugcugccaccuggccaaggcccucaacgacuucagcaacuccggcagcgacgugcuguaccagccgccccagacguccaucaccagcgcgguccugcagugaggacuagucccuguucccagagcccacuuuuuuuucuuuuuuugaaauaaaauagccugucuuucagaucucaaaggcucuuuucagagccaccaaaaaaaaaaaaaaaaaaaaaaaaaaaaaaaaaaaaaaaaaaaaaaaaaaaaaaaaaaaaaaaaaaaaaaaaaaaaaaaaaaaaaaaaaaaaaaaaaaaaa

SEQ ID NO: 20236 - RNA, 1778 nt, Artificial Sequence
  SARS-CoV-2__MT806775.1__non-structural protein 4 (NSP4) mRNA gc
aggagagucccgcagucggcguccagcggcucugcuuguucgugugugugucguugcaggccuuauucaagcuuaccaugaagaucgugaacaacuggcugaagcagcucaucaaggucacccugguguuccuguucguggccgccaucuucuaccucaucacccccguccacgugaugagcaagcacacggacuucuccagcgagaucaucggcuacaaggcgaucgacgggggcgugacccgcgacaucgccuccaccgacacgugcuucgccaacaagcacgccgacuucgacaccugguucagccagcggggcggcuccuacaccaacgacaaggccugcccccugaucgcggccgucaucacccgcgaggugggguucgugguccccggccugcccggcaccauccuccggacgaccaacggggacuuccugcacuuccugccccgcguguucagcguggucggcaacaucugcuacaccccguccaagcucaucgaguacaccgacuucgccacgagcgccugcgugcuggcggccgagugcaccaucuucaaggacgccuccgggaagcccgugcccuacugcuacgacaccaacguccuggagggcagcguggccuacgagucccuccggcccgacacccgcuacgugcugauggacgggagcaucauccaguucccgaacacguaccuggagggcuccguccggguggugaccaccuucgacagcgaguacugccgccacgggaccugcgagcgguccgaggccggggucugcgugagcacguccggccgcugggugcucaacaacgacuacuaccggagccugcccggggucuucugcggcguggacgcggucaaccugcucaccaacauguucacgccccugauccagcccaucggcgcccuggacaucuccgccagcaucguggccgggggcaucguggccaucgucgugaccugccucgcguacuacuucaugcgcuuccggcgcgccuucggggaguacagccacguggucgccuucaacacccugcuguuccucauguccuucaccgugcugugccugaccccgguguacagcuuccuccccggcgucuacuccgugaucuaccuguaccugaccuucuaccucacgaacgacgugagcuuccuggcccacauccaguggauggucauguucacgccccuggugcccuucuggaucaccaucgccuacaucaucugcaucuccaccaagcacuucuacugguucuucagcaacuaccucaagcggcgcguggucuucaacgggguguccuucagcaccuucgaggaggcggcccugugcaccuuccugcucaacaaggagauguaccugaagcugcgguccgacgugcuccugccgcugacccaguacaaccgcuaccucgcccuguacaacaaguacaaguacuucagcggcgccauggacaccacguccuaccgggaggccgcgugcugccaccuggccaaggcccucaacgacuucagcaacuccggcagcgacguccuguaccagccgccccagaccuccaucaccagcgccgugcugcagugaggacuagucccuguucccagagcccacuuuuuuuucuuuuuuugaaauaaaauagccugucuuucagaucucaaaggcucuuuucagagccaccaaaaaaaaaaaaaaaaaaaaaaaaaaaaaaaaaaaaaaaaaaaaaaaaaaaaaaaaaaaaaaaaaaaaaaaaaaaaaaaaaaaaaaaaaaaaaaaaaaaaa

SEQ ID NO: 20237 - RNA, 1778 nt, Artificial Sequence
  SARS-CoV-2__MT806779.1__non-structural protein 4 (NSP4) mRNA gc
aggagagucccgcagucggcguccagcggcucugcuuguucgugugugugucguugcaggccuuauucaagcuuaccaugaagaucgugaacaacuggcugaagcagcucaucaaggucacccugguguuccuguucguggccgccaucuucuaccucaucacccccguccacgugaugagcaagcacacggacuucuccagcgagaucaucggcuacaaggcgaucgacgggggcgugacccgcgacaucgccuccaccgacacgugcuucgccaacaagcacgccgacuucgacaccugguucagccagcggggcggcuccuacaccaacgacaaggccugcccccugaucgcggccgucaucacccgcgaggugggguucgugguccccggccugcccggcaccauccuccggacgaccaacggggacuuccugcacuuccugccccgcguguucagcgccgugggcaacaucugcuacaccccguccaagcucaucgaguacaccgacuucgccacgagcgcgugcguccuggccgccgagugcaccaucuucaaggacgccuccgggaagcccgugcccuacugcuacgacaccaacgugcuggagggcagcgucgccuacgagucccuccggcccgacacccgcuacgugcugauggacgggagcaucauccaguucccgaacacguaccuggagggcuccgugcgggucgugaccaccuucgacagcgaguacugccgccacgggaccugcgagcgguccgaggcgggggugugcgucagcaucuccggccgcugggugcucaacaacgacuacuaccggagccugcccgggguguucugcggcgucgacgccgugaaccugcucacgaacauguucacgccccugauccagcccaucggcgcccuggacaucuccgccagcaucgucgccgggggcaucguggcgaucguggugaccugccucgccuacuacuucaugcgcuuccggcgcgccuucggggaguacagccacgucguggccuucaacacccugcuguuccucauguccuucaccguccugugccugaccccgguguacagcuuccuccccggcguguacuccgucaucuaccuguaccugaccuucuaccucaccaacgacgugagcuuccuggcccacauccaguggauggugauguucacgccccugguccccuucuggaucaccaucgcguacaucaucugcaucuccaccaagcacuucuacugguucuucagcaacuaccucaagcggcgcgugguguucaacggggucuccuucagcaccuucgaggaggccgcccugugcacguuccugcucaacaaggagauguaccugaagcugcgguccgacgugcuccugccgcugacccaguacaaccgcuaccucgcccuguacaacaaguacaaguacuucagcggcgccauggacaccaccuccuaccgggaggcggccugcugccaccuggccaaggcccucaacgacuucagcaacuccggcagcgacgugcuguaccagccgccccagacguccaucaccagcgcgguccugcagugaggacuagucccuguucccagagcccacuuuuuuuucuuuuuuugaaauaaaauagccugucuuucagaucucaaaggcucuuuucagagccaccaaaaaaaaaaaaaaaaaaaaaaaaaaaaaaaaaaaaaaaaaaaaaaaaaaaaaaaaaaaaaaaaaaaaaaaaaaaaaaaaaaaaaaaaaaaaaaaaaaaaa

SEQ ID NO: 20238 - RNA, 1778 nt, Artificial Sequence
  SARS-CoV-2__MT800029.1__non-structural protein 4 (NSP4) mRNA gc
aggagagucccgcagucggcguccagcggcucugcuuguucgugugugugucguugcaggccuuauucaagcuuaccaugaagaucgugaacaacuggcugaagcagcucaucaaggucacccugguguuccuguucguggccgccaucuucuaccucaucacccccguccacgugaugagcaagcacacggacuucuccagcgagaucaucggcuacaaggcgaucgacgggggcgugacccgcgacaucgccuccaccgacacgugcuucgccaacaagcacgccgacuucgacaccugguucagccagcggggcggcuccuacaccaacgacaaggccugcccccugaucgcggccgucaucacccgcgaggugggguucgugguccccggccugcccggcaccauccuccggacgaccaacggggacuuccugcacuuccugccccgcguguucagcgccgugggcaacaucugcuacaccccguccaagcucaucgaguacaccgacuucgccacgagcgcgugcguccuggccgccgagugcaccaucuucaaggacgccuccgggaagcccgugcccuacugcuacgacaccaacgugcuggagggcagcgucgccuacgagucccuccggcccgacacccgcuacgugcugauggacgggagcaucauccaguucccgaacacguaccuggagggcuccgugcgggucgugaccaccuucgacagcgaguacugccgccacgggaccugcgagcgguccgaggcgggggugugcgucagcacguccggccgcugggugcucaacaacgacuacuaccggagccugcccgggguguucugcggcgucgacgccgugaaccugcucaccaacauguucacgccccugauccagcccaucggcgcccuggacaucuccgccagcaucgucgccgggggcaucguggcgaucguggugaccugccucgccuacuacuucaugcgcuuccggcgcgccuucggggaguacagccacgucguggccuucaacacccugcuguuccucaucuccuucaccguccugugccugaccccgguguacagcuuccuccccggcguguacuccgucaucuaccuguaccugaccuucuaccucacgaacgacgugagcuuccuggcccacauccaguggauggugauguucacgccccugguccccuucuggaucaccaucgcguacaucaucugcaucuccaccaagcacuucuacugguucuucagcaacuaccucaagcggcgcgugguguucaacggggucuccuucagcaccuucgaggaggccgcccugugcaccuuccugcucaacaaggagauguaccugaagcugcgguccgacgugcuccugccgcugacccaguacaaccgcuaccucgcccuguacaacaaguacaaguacuucagcggcgccauggacaccacguccuaccgggaggcggccugcugccaccuggccaaggcccucaacgacuucagcaacuccggcagcgacgugcuguaccagccgccccagaccuccaucaccagcgcgguccugcagugaggacuagucccuguucccagagcccacuuuuuuuucuuuuuuugaaauaaaauagccugucuuucagaucucaaaggcucuuuucagagccaccaaaaaaaaaaaaaaaaaaaaaaaaaaaaaaaaaaaaaaaaaaaaaaaaaaaaaaaaaaaaaaaaaaaaaaaaaaaaaaaaaaaaaaaaaaaaaaaaaaaaa

SEQ ID NO: 20239 - RNA, 1778 nt, Artificial Sequence
  SARS-CoV-2__MT800282.1__non-structural protein 4 (NSP4) mRNA gc
aggagagucccgcagucggcguccagcggcucugcuuguucgugugugugucguugcaggccuuauucaagcuuaccaugaagaucgugaacaacuggcugaagcagcucaucaaggucacccugguguuccuguucguggccgccaucuucuaccucaucacccccguccacgugaugagcaagcacacggacuucuccagcgagaucaucggcuacaaggcgaucgacgggggcgugacccgcgacaucgccuccaccgacacgugcuucgccaacaagcacgccgacuucgacaccugguucagccagcggggcggcuccuacaccaacgacaaggccugcccccugaucgcggccgucaucacccgcgaggugggguucgugguccccggccugcccggcaccauccuccggacgaccaacggggacuuccugcacuuccugccccgcguguucagcgccgugggcaacaucugcuacaccccguccaagcucaucgaguacaccgacuucgccacgagcgcgugcguccuggccgccgagugcaccaucuucaaggacgccuccgggaagcccgugcccuacugcuacgacaccaacgugcuggagggcagcgucgccuacgagucccuccggcccgacacccgcuacgugcugauggacgggagcaucauccaguucccgaacacguaccuggagggcuccgugcgggucgugaccaccuucgacagcgaguacugccgccacgggaccugcgagcgguccgaggcgggggugugcgucagcacguccggccgcugggugcucaacaacgacuacuaccggagccugcccgggguguucugcggcgucgacgccgugaaccugcucaccaacauguucacgccccugauccagcccaucggcgcccuggacaucuccgccagcaucgucgccgggggcaucguggcgaucguggugaccugccucgccuacuacuucaugcgcuuccggcgcgccuucggggaguacagccacgucguggccuucaacacccugcuguuccucauguccuucaccguccugugccugaccccgguguacagcuuccuccccggcguguacuccgucaucuaccuguaccugaccuucuaccucacgaacgacgugagcuuccuggcccacauccaguggauggugauguucacgccccugguccccuucuggaucaccaucgcguacaucaucugcaucuccaccaagcacuucuacugguucuucgggaacuaccucaagcggcgcgugguguucaacggcgucagcuucuccaccuucgaggaggccgcccugugcaccuuccugcucaacaaggagauguaccugaagcugcggagcgacgugcuccugccgcugacccaguacaaccgcuaccucgcccuguacaacaaguacaaguacuucuccggcgccauggacaccacgagcuaccgggaggcggccugcugccaccuggccaaggcccucaacgacuucuccaacagcggguccgacgugcuguaccagccgccccagaccagcaucaccuccgcgguccugcagugaggacuagucccuguucccagagcccacuuuuuuuucuuuuuuugaaauaaaauagccugucuuucagaucucaaaggcucuuuucagagccaccaaaaaaaaaaaaaaaaaaaaaaaaaaaaaaaaaaaaaaaaaaaaaaaaaaaaaaaaaaaaaaaaaaaaaaaaaaaaaaaaaaaaaaaaaaaaaaaaaaaaa

SEQ ID NO: 20240 - RNA, 1778 nt, Artificial Sequence
  SARS-CoV-2__MT800753.1__non-structural protein 4 (NSP4) mRNA gc
aggagagucccgcagucggcguccagcggcucugcuuguucgugugugugucguugcaggccuuauucaagcuuaccaugaagaucgugaacaacuggcugaagcagcucaucaaggucacccugguguuccuguucguggccgccaucuucuaccucaucacccccguccacgugaugagcaagcacacggacuucuccagcgagaucaucggcuacaaggcgaucgacgggggcgugacccgcgacaucgccuccaccgacacgugcuucgccaacaagcacgccgacuucgacaccugguucagccagcggggcggcuccuacaccaacgacaaggccugcccccugaucgcggccgucaucacccgcgaggugggguucgugguccccggccugcccggcaccauccuccggacgaccaacggggacuuccugcacuuccugccccgcguguucagcgccgugggcaacaucugcuacaccccguccaagcucaucgaguacaccgacuucgccacgagcgcgugcguccuggccgccgagugcaccaucuucaaggacgccuccgggaagcccgugcccuacugcuacgacaccaacgugcuggagggcagcgucgccuacgagucccuccggcccgacacccgcuacgugcugauggacgggagcaucauccaguucccgaacacguaccuggagggcuccgugcgggucgugaccaccuucgacagcgaguacugccgccacgggaccugcgagcgguccgaggcgggggugugcgucagcacguccggccgcugggugcucaacaacgacuacuaccggagccugcccgggguguucugcggcgucgacgccgugaaccugcucaccaacauguucacgccccugauccagcccaucggcgcccuggacaucuccgccagcaucgucgccgggggcaucguggcgaucguggugaccugccucgccuacuacuucaugcgcuuccggcgcgccuucggggaguacagccacgucguggccuucaacacccugcuguuccucauguccuucaccguccugugccugaccccgguguacagcuuccuccccggcguguacuccgucaucuaccuguaccugaccuucuaccucacgaacgacgugagcuuccuggcccacauccaguggauggugauguucacgccccugguccccuucuggaucaccaucgcguacaucaucugcaucuccaucaagcacuucuacugguucuucagcaacuaccucaagcggcgcgugguguucaacggggucuccuucagcaccuucgaggaggccgcccugugcaccuuccugcucaacaaggagauguaccugaagcugcgguccgacgugcuccugccgcugacccaguacaaccgcuaccucgcccuguacaacaaguacaaguacuucagcggcgccauggacaccaccuccuaccgggaggcggccugcugccaccuggccaaggcccucaacgacuucagcaacuccggcagcgacgugcuguaccagccgccccagacguccaucaccagcgcgguccugcagugaggacuagucccuguucccagagcccacuuuuuuuucuuuuuuugaaauaaaauagccugucuuucagaucucaaaggcucuuuucagagccaccaaaaaaaaaaaaaaaaaaaaaaaaaaaaaaaaaaaaaaaaaaaaaaaaaaaaaaaaaaaaaaaaaaaaaaaaaaaaaaaaaaaaaaaaaaaaaaaaaaaaa

SEQ ID NO: 20241 - RNA, 1778 nt, Artificial Sequence
  SARS-CoV-2__MT791940.1__non-structural protein 4 (NSP4) mRNA gc
aggagagucccgcagucggcguccagcggcucugcuuguucgugugugugucguugcaggccuuauucaagcuuaccaugaagaucgugaacaacuggcugaagcagcucaucaaggucacccugguguuccuguucguggccgccaucuucuaccucaucacccccguccacgugaugagcaagcacacggacuucuccagcgagaucaucggcuacaaggcgaucgacgggggcgugacccgcgacaucgccuccaccgacacgugcuucgccaacaagcacgccgacuucgacaccugguucagccagcggggcggcuccuacaccaacgacaaggccugcccccugaucgcggccgucaucacccgcgaggugggguucgugguccccggccugcccggcaccauccuccggacgaccaacggggacuuccugcacuuccugccccgcguguucagcgccgugggcaacaucugcuacaccccguccaagcucaucgaguacaccgacuucgccacgagcgcgugcguccuggccgccgagugcaccaucuucaaggacgccuccgggaagcccgugcccuacugcuacgacaccaacgugcuggagggcagcgucgccuacgagucccuccggcccgacacccgcuacgugcugauggacgggagcaucauccaguucccgaacacguaccuggagggcuccgugcgggucgugaccaccuucgacagcgaguacugccgccacgggaccugcgagcgguccgaggcgggggugugcgucagcacguccggccgcugggugcucaacaacgacuacuaccggagccugcccgggguguucugcggcgucgacgccgugaaccugcucaccaacauguucacgccccugauccagcccaucggcgcccuggacaucuccgccagcaucgucgccgggggcaucguggcgaucguggugaccugccucgccuacuacuucaugcgcuuccggcgcgccuucggggaguacagccacgucguggccuucaacacccugcuguuccucauguccuucaccguccugugccugaccccgguguacagcuuccuccccggcguguacuccgucaucuaccuguaccugaccuucuaccucacgaacgacgugagcuuccuggcccacauccaguggauggugaugcugacgccccucguccccuucuggaucaccaucgcguacaucaucugcaucuccaccaagcacuucuacugguucuucagcaacuaccugaagcggcgcgugguguucaacggggucuccuucagcaccuucgaggaggccgcccugugcaccuuccuccugaacaaggagauguaccugaagcuccgguccgacgugcugcugccgcucacccaguacaaccgcuaccuggcccuguacaacaaguacaaguacuucagcggcgccauggacaccacguccuaccgggaggcggccugcugccaccucgccaaggcccugaacgacuucagcaacuccggcagcgacgugcuguaccagccgccccagaccuccaucaccagcgcgguccugcagugaggacuagucccuguucccagagcccacuuuuuuuucuuuuuuugaaauaaaauagccugucuuucagaucucaaaggcucuuuucagagccaccaaaaaaaaaaaaaaaaaaaaaaaaaaaaaaaaaaaaaaaaaaaaaaaaaaaaaaaaaaaaaaaaaaaaaaaaaaaaaaaaaaaaaaaaaaaaaaaaaaaaa

SEQ ID NO: 20242 - RNA, 1778 nt, Artificial Sequence
  SARS-CoV-2__MT786815.1__non-structural protein 4 (NSP4) mRNA gc
aggagagucccgcagucggcguccagcggcucugcuuguucgugugugugucguugcaggccuuauucaagcuuaccaugaagaucgugaacaacuggcugaagcagcucaucaaggucacccugguguuccuguucguggccgccaucuucuaccucaucacccccguccacgugaugagcaagcacacggacuucuccagcgagaucaucggcuacaaggcgaucgacgggggcgugacccgcgacaucgccuccaccgacacgugcuucgccaacaagcacgccgacuucgacaccugguucagccagcggggcggcuccuacaccaacgacaaggccugcccgcugaucgcggccgucaucacccgcgaggugggguucgugguccccggccugcccggcaccauccuccggacgaccaacggggacuuccugcacuuccugccccgcguguucagcgccgugggcaacaucugcuacaccccguccaagcucaucgaguacaccgacuucgccacgagcgcgugcguccuggccgccgagugcaccaucuucaaggacgccuccgggaagcccgugcccuacugcuacgacaccaacgugcuggagggcagcgucgccuacgagucccuccggcccgacacccgcuacgugcugauggacgggagcaucauccaguucuccaacacguaccuggagggcagcgugcgggucgugaccaccuucgacuccgaguacugccgccacgggaccugcgagcggagcgaggcgggggugugcgucuccacgagcggccgcugggugcucaacaacgacuacuaccggucccugccggggguguucugcggcgucgacgccgugaaccugcucaccaacauguucacgccccugauccagcccaucggcgcccuggacaucagcgccagcaucgucgccgggggcaucguggcgaucguggugaccugccucgccuacuacuucaugcgcuuccggcgcgccuucggggaguacucccacgucguggccuucaacacccugcuguuccucaugagcuucaccguccugugccugacccccguguacuccuuccucccgggcguguacagcgucaucuaccuguaccugaccuucuaccucacgaacgacguguccuuccuggcccacauccaguggauggugauguucacgccccugguccccuucuggaucaccaucgcguacaucaucugcaucagcaccaagcacuucuacugguucuucuccaacuaccucaagcggcgcgugguguucaacggggucagcuucuccaccuucgaggaggccgcccugugcaccuuccugcucaacaaggagauguaccugaagcugcggagcgacgugcuccugccccugacccaguacaaccgcuaccucgcccuguacaacaaguacaaguacuucuccggcgccauggacaccacgagcuaccgggaggcggccugcugccaccuggccaaggcccucaacgacuucuccaacagcggcuccgacgugcuguaccagccgccccagaccagcaucaccuccgcgguccugcagugaggacuagucccuguucccagagcccacuuuuuuuucuuuuuuugaaauaaaauagccugucuuucagaucucaaaggcucuuuucagagccaccaaaaaaaaaaaaaaaaaaaaaaaaaaaaaaaaaaaaaaaaaaaaaaaaaaaaaaaaaaaaaaaaaaaaaaaaaaaaaaaaaaaaaaaaaaaaaaaaaaaaa

SEQ ID NO: 20243 - RNA, 1778 nt, Artificial Sequence
  SARS-CoV-2__MT786838.1__non-structural protein 4 (NSP4) mRNA gc
aggagagucccgcagucggcguccagcggcucugcuuguucgugugugugucguugcaggccuuauucaagcuuaccaugaagaucgugaacaacuggcugaagcagcucaucaaggucacccugguguuccuguucguggccgccaucuucuaccucaucacccccguccacgugaugagcaagcacacggacuucuccagcgagaucaucggcuacaaggcgaucgacgggggcgugacccgcgacaucgccuccaccgacacgugcuucgccaacaagcacgccgacuucgacaccugguucagccagcggggcggcuccuacaccaacgacaaggccugcccccugaucgcggccgucaucacccgcgaggugggguucgugguccccggccugcccggcaccauccuccggacgaccaacggggacuuccugcacuuccugccccgcguguucagcgccgugggcaacaucugcuacaccccguccaagcucaucgaguacaccgacuucgccacgagcgcgugcguccuggccgccgagugcaccaucuucaaggacgccuccgggaagcccgugcccuacugcuacgacaccaacgugcuggagggcagcgucgccuacgagucccuccggcccgacacccgcuacgugcugauggacgggagcaucauccaguucccgaacacguaccuggagggcuccgugcgggucgugaccaccuucgacagcgaguacugccgccacgggaccugcgagcgguccgaggcgggggugugcgucagcacguccggccgcugggugcucaacaacgacuacuaccggagccugcccgggguguucugcggcgucgacgccgugaaccugcucaccaacauguucacgccccugauccagcccaucggcgcccuggacaucuccgccagcaucgucgccgggggcaucguggcgaucguggugaccugccucgccuacuacuucaugcgcuuccggcgcgccuucggggaguacagccacgucguggccuucaacacccugcuguuccucauguccuucaccguccugugccugaccccgguguacagcuuccuccccggcguguacuccgucaucuaccuguaccugaccuucuaccucacgaacgacgugagcuuccuggcccacauccaguggauggugauguucacgccccugguccccuucuggaucaccaucgcguacaucaucugcaucuccaccaagcacuucuacugguucuucagcaacuaccucaagcggcgcgugguguucaacggggucuccuucagcaccuucgaggaggccgcccugugcaccuuccugcucaacaaggagauguaccugaagcugcgguccgacgugcuccugccgcugacccaguacaaccgcuaccucgccuucuacaacaaguacaaguacuucagcggcgccauggacaccacguccuaccgggaggcggccugcugccaccuggccaaggcccugaacgacuucagcaacuccggcagcgacgugcucuaccagccgccccagaucuccaucaccagcgcgguccugcagugaggacuagucccuguucccagagcccacuuuuuuuucuuuuuuugaaauaaaauagccugucuuucagaucucaaaggcucuuuucagagccaccaaaaaaaaaaaaaaaaaaaaaaaaaaaaaaaaaaaaaaaaaaaaaaaaaaaaaaaaaaaaaaaaaaaaaaaaaaaaaaaaaaaaaaaaaaaaaaaaaaaaa

SEQ ID NO: 20244 - RNA, 1778 nt, Artificial Sequence
  SARS-CoV-2__MT775831.1__non-structural protein 4 (NSP4) mRNA gc
aggagagucccgcagucggcguccagcggcucugcuuguucgugugugugucguugcaggccuuauucaagcuuaccaugaagaucgugaacaacuggcugaagcagcucaucaaggucacccugguguuccuguucguggccgccaucuucuaccucaucacccccguccacgugaugagcaagcacacggacuucuccagcgagaucaucggcuacaaggcgaucgacgggggcgugacccgcgacaucgccuccaccgacacgugcuucgccaacaagcacgccgacuucgacaccugguucagccagcggggcggcuccuacaccaacgacaaggccugcccccugaucgcggccgucaucacccgcgaggugggguucgugguccccggccugcccggcaccauccuccggacgaccaacggggacuuccugcacuuccugccccgcguguucagcgccgugggcaacaucugcuacaccccguccaagcucaucgaguacaccgacuucgccacgagcgcgugcguccuggccgccgagugcaccaucuucaaggacgccuccgggaagcccgugcccuacugcuacgacaccaacgugcuggagggcagcgucgccuacgagucccuccggcccgacacccgcuacgugcugauggacgggagcaucauccaguucccgaacacguaccuggagggcuccgugcgggucgugaccaccuucgacagcgaguacugccgccacgggaccugcgagcgguccgaggcgggggugugcgucagcacguccggccgcugggugcucaacaacgacuacuaccggagccugcccgggguguucugcggcgucgacgccgugaaccugcucaccaacauguucacgccccugauccagcccaucggcgcccuggacaucuccgccagcaucgucgccgggggcaucguggcgaucguggugaccugccucgccuacuacuucaugcgcuuccggcgcgccuucggggacuacagccacgucguggccuucaacacccugcuguuccucauguccuucaccguccugugccugaccccgguguacagcuuccuccccggcguguacuccgucaucuaccuguaccugaccuucuaccucacgaacgacgugagcuuccuggcccacauccaguggauggugauguucacgccccugguccccuucuggaucaccaucgcguacaucaucugcaucuccaccaagcacuucuacugguucuucagcaacuaccucaagcggcgcgugguguucaacggggucuccuucagcaccuucgaggaggccgcccugugcaccuuccugcucaacaaggagauguaccugaagcugcgguccgacgugcuccugccgcugacccaguacaaccgcuaccucgcccuguacaacaaguacaaguacuucagcggcgccauggacaccacguccuaccgggaggcggccugcugccaccuggccaaggcccucaacgacuucagcaacuccggcagcgacgugcuguaccagccgccccagaccuccaucaccagcgcgguccugcagugaggacuagucccuguucccagagcccacuuuuuuuucuuuuuuugaaauaaaauagccugucuuucagaucucaaaggcucuuuucagagccaccaaaaaaaaaaaaaaaaaaaaaaaaaaaaaaaaaaaaaaaaaaaaaaaaaaaaaaaaaaaaaaaaaaaaaaaaaaaaaaaaaaaaaaaaaaaaaaaaaaaaa

SEQ ID NO: 20245 - RNA, 1778 nt, Artificial Sequence
  SARS-CoV-2__MT772215.1__non-structural protein 4 (NSP4) mRNA gc
aggagagucccgcagucggcguccagcggcucugcuuguucgugugugugucguugcaggccuuauucaagcuuaccaugaagaucgugaacaacuggcugaagcagcucaucaaggucacccugguguuccuguucguggccgccaucuucuaccucaucacccccguccacgugaugagcaagcacacggacuucuccagcgagaucaucggcuacaaggcgaucgacgggggcgugacccgcgacaucgccuccaccgacacgugcuucgccaacaagcacgccgacuucgacaccugguucagccagcgcgggggcuccuacaccaacgacaaggccugcccccugaucgcggccgucaucacccgggaggugggguucgugguccccggccugcccggcaccauccuccggacgaccaacggggacuuccugcacuuccugccccgcguguucagcgccgugggcaacaucugcuacaccccguccaagcucaucgaguacaccgacuucgccacgagcgcgugcguccuggccgccgagugcaccaucuucaaggacgccuccgggaagcccgugcccuacugcuacgacaccaacgugcuggagggcagcgucgccuacgagucccuccggcccgacacccgcuacgugcugauggacgggagcaucauccaguucccgaacacguaccuggagggcuccgugcgggucgugaccaccuucggcagcgaguacugccgccacgggaccugcgagcgguccgaggcgggcgugugcgucagcacguccgggcgcugggugcucaacaacgacuacuaccggagccugcccggcguguucugcggcgucgacgccgugaaccugcucaccaacauguucacgccccugauccagcccaucggggcccuggacaucuccgccagcaucgucgccggcgggaucguggcgaucguggugaccugccucgccuacuacuucaugcgcuuccggcgcgccuucggcgaguacagccacgucguggccuucaacacccugcuguuccucauguccuucaccguccugugccugaccccgguguacagcuuccuccccgggguguacuccgucaucuaccuguaccugaccuucuaccucacgaacgacgugagcuuccuggcccacauccaguggauggugauguucacgccccugguccccuucuggaucaccaucgcguacaucaucugcaucuccaccaagcacuucuacugguucuucagcaacuaccucaagcggcgcgugguguucaacggcgucuccuucagcaccuucgaggaggccgcccugugcaccuuccugcucaacaaggagauguaccugaagcugcgguccgacgugcuccugccgcugacccaguacaaccgcuaccucgcccuguacaacaaguacaaguacuucagcggcgccauggacaccacguccuaccgggaggcggccugcugccaccuggccaaggcccucaacgacuucagcaacuccgggagcgacgugcuguaccagccgccccagaccuccaucaccagcgcgguccugcagugaggacuagucccuguucccagagcccacuuuuuuuucuuuuuuugaaauaaaauagccugucuuucagaucucaaaggcucuuuucagagccaccaaaaaaaaaaaaaaaaaaaaaaaaaaaaaaaaaaaaaaaaaaaaaaaaaaaaaaaaaaaaaaaaaaaaaaaaaaaaaaaaaaaaaaaaaaaaaaaaaaaaa

SEQ ID NO: 20246 - RNA, 1778 nt, Artificial Sequence
  SARS-CoV-2__MT772564.1__non-structural protein 4 (NSP4) mRNA gc
aggagagucccgcagucggcguccagcggcucugcuuguucgugugugugucguugcaggccuuauucaagcuuaccaugaagaucgugaacaacuggcugaagcagcucaucaaggucacccugguguuccuguucguggccgccaucuucuaccucaucacccccguccacgugaugagcaagcacacggacuucuccagcgagaucaucggcuacaaggcgaucgacgggggcgugacccgcgacaucgccuccaccgacacgugcuucgccaacaagcacgccgacuucgacaccugguucagccagcggggcggcuccuacaccaacgacaaggccugcccccugaucgcggccgucaucacccgcgaggugggguucgugguccccggccugcccggcaccauccuccggacgaccaacggggacuuccugcacuuccugccccgcguguucagcgccgugggcaacaucugcuacaccccguccaagcucaucgaguacaccgacuucgccacgagcgcgugcguccuggccgccgagugcaccaucuucaaggacgccuccgggaagcccgugcccuacugcuacgacaccaacgugcuggagggcagcgucgccuacgagucccuccggcccgacacccgcuacgugcugauggacgggagcaucauccaguucccgaacacguaccuggagggcuccgugcgggucgugaccaccuucgacagcgaguacugccgccacgggaccugcgagcgguccgaggcgggggugugcgucagcacguccggccgcugggugcucaacaacgacuacuaccggagccugcccgggguguucugcggcgucgacgccgugaaccugcucaccaacauguucacgccccugauccagcccaucggcgcccuggacaucuccgccagcaucgucgccgggggcaucguggcgaucguggugaccugccucgccuacuacuucaugcgcuuccggcgcgccuucggggaguacagccacgucguggccuucaacacccugcuguuccucauguccuucaccguccugugccugaccccgguguacagcuuccuccccggcguguacuccgucaucuaccuguaccugaccuucuaccucacgaacgacgugagcuuccuggcccacauccaguggauggugauguucacgccccugguccccuucuggaucaccaucgcguacaucaucugcaucuucaccaagcacuucuacugguucuucuccaacuaccucaagcggcgcgugguguucaacggggucagcuucuccaccuucgaggaggccgcccugugcaccuuccugcucaacaaggagauguaccugaagcugcggagcgacgugcuccugccgcugacccaguacaaccgcuaccucgcccuguacaacaaguacaaguacuucuccggcgccauggacaccacgagcuaccgggaggcggccugcugccaccuggccaaggcccucaacgacuucuccaacagcggcuccgacgugcuguaccagccgccccagaccagcaucaccuccgcgguccugcagugaggacuagucccuguucccagagcccacuuuuuuuucuuuuuuugaaauaaaauagccugucuuucagaucucaaaggcucuuuucagagccaccaaaaaaaaaaaaaaaaaaaaaaaaaaaaaaaaaaaaaaaaaaaaaaaaaaaaaaaaaaaaaaaaaaaaaaaaaaaaaaaaaaaaaaaaaaaaaaaaaaaaa

SEQ ID NO: 20247 - RNA, 1778 nt, Artificial Sequence
  SARS-CoV-2__MT764170.1__non-structural protein 4 (NSP4) mRNA gc
aggagagucccgcagucggcguccagcggcucugcuuguucgugugugugucguugcaggccuuauucaagcuuaccaugaagaucgugaacaacuggcugaagcagcucaucaaggucacccugguguuccuguucguggccgccaucuucuaccucaucacccccguccacgugaugagcaagcacacggacuucuccagcgagaucaucggcuacaaggcgaucgacgggggcgugacccgcgacaucgccuccaccgacacgugcuucgccaacaagcacgccgacuucgacaccugguucagccagcggggcggcuccuacaccaacgacaaggccugcccccugaucgcggccgucaucacccgcgaggugggguucgugguccccggccugcccggcaccauccuccggacgaccaacggggacuuccugcacuuccugccccgcguguucagcgccgugggcaacaucugcuacaccccguccaagcucaucgaguacaccgacuucgccacgagcgcgugcguccuggccgccgagugcaccaucuucaaggacgccuccgggaagcccgugcccuacugcuacgacaccaacgugcuggagggcagcgucgccuacgagucccuccggcccgacacccgcuacgugcugauggacgggagcaucauccaguucccgaacacguaccuggagggcuccgugcgggucgugaccaccuucgacagcgaguacugccgccacgggaccugcgagcgguccgaggcgggggugugcgucagcacguccggccgcugggugcucaacaacgacuacuaccggagccugcccgggguguucugcggcgucgacgccgugaaccugcucaccaacauguucacgccccugauccagcccaucggcgcccuggacaucuccgccagcaucgucgccgggggcaucguggcgaucguggugaccugccucgccuacuacuucaugcgcuuccggcgcgccuucggggaguacagccacgucguggccuucaacacccugcuguuccucauguccuucaccguccugugccugaccccgguguacagcuuccuccccggcguguacuccgucaucuaccuguaccugaccuucuaccucacgaacgacgugagcuuccuggcccacauccaguggauggugauguucacgccccugguccccuucuggaucaccaucgcguacaucaucuucaucuccaccaagcacuucuacugguucuucagcaacuaccucaagcggcgcgugguguucaacggggucuccuucagcaccuucgaggaggccgcccugugcaccuuccugcucaacaaggagauguaccugaagcugcgguccgacgugcuccugccgcugacccaguacaaccgcuaccucgcccuguacaacaaguacaaguacuucagcggcgccauggacaccacguccuaccgggaggcggccugcugccaccuggccaaggcccucaacgacuucagcaacuccggcagcgacgugcuguaccagccgccccagaccuccaucaccagcgcgguccugcagugaggacuagucccuguucccagagcccacuuuuuuuucuuuuuuugaaauaaaauagccugucuuucagaucucaaaggcucuuuucagagccaccaaaaaaaaaaaaaaaaaaaaaaaaaaaaaaaaaaaaaaaaaaaaaaaaaaaaaaaaaaaaaaaaaaaaaaaaaaaaaaaaaaaaaaaaaaaaaaaaaaaaa

SEQ ID NO: 20248 - RNA, 1778 nt, Artificial Sequence
  SARS-CoV-2__MT755829.1__non-structural protein 4 (NSP4) mRNA gc
aggagagucccgcagucggcguccagcggcucugcuuguucgugugugugucguugcaggccuuauucaagcuuaccaugaagaucgugaacaacuggcugaagcagcucaucaaggucacccugguguuccuguucguggccgccaucuucuaccucaucacccccguccacgugaugagcaagcacacggacuucuccagcgagaucaucggcuacaaggcgaucgacgggggcgugacccgcgacaucgccuccaccgacacgugcuucgccaacaagcacgccgacuucgacaccugguucagccagcggggcggcuccuacaccaacgacaaggccugcccccugaucgcggccgucaucacccgcgaggugggguucgugguccccggccugcccggcaccauccuccggacgaccaacggggacuuccugcacuuccugccccgcguguucagcgccgugggcaacaucugcuacaccccguccaagcucaucgaguacaccgacuucgccacgagcgcgugcguccuggccgccgagugcaccaucuucaaggacgccuccgggaagcccgugcccuacugcuacgacaccaacgugcuggagggcagcgucgccuacgagucccuccggcccgacacccgcuacgugcugauggacgggagcaucauccaguucccgaacacguaccuggagggcuccgugcgggucgugaccaccuucgacagcgaguacugccgccacgggaccugcgagcgguccgaggcgggggugugcgucagcacguccggccgcugggugcucaacaacgacuacuaccggagccugcccgggguguucugcggcgucgacgccgugaaccugcucaccaacauguucacgccccugauccagcccaucggcgcccuggacaucuccgccagcaucgucgccgggggcaucguggcgaucguggugaccugccucgccuacuacuucaugcgcuuccggcgcgccuucggggaguacagccacgucguggccuucaacacccugcuguuccucauguccuucaccguccugugccugaccccgguguacagcuuccuccccggcguguacuccgucaucuaccuguaccugaccuucuaccucacgaacgacgugagcuuccuggcccacauccaguggauggugauguucacgccccugguccccuucuggaucaccaucgcguacaucaucugcaucuccaccaagcacuucuacugguucuucagcaacuaccucaagcggcgcgugguguucaacggggucuccuucagcaccuucgaggaggccgcccugugcaccuuccugcucaacaaggagauguaccugaagcugcgguccgacgugcuccugccguucacccaguacaaccgcuaccuggcccucuacaacaaguacaaguacuucagcggcgccauggacaccacguccuaccgggaggcggccugcugccaccuggccaaggcccugaacgacuucagcaacuccggcagcgacgugcucuaccagccgccccagaccuccaucaccagcgcgguccugcagugaggacuagucccuguucccagagcccacuuuuuuuucuuuuuuugaaauaaaauagccugucuuucagaucucaaaggcucuuuucagagccaccaaaaaaaaaaaaaaaaaaaaaaaaaaaaaaaaaaaaaaaaaaaaaaaaaaaaaaaaaaaaaaaaaaaaaaaaaaaaaaaaaaaaaaaaaaaaaaaaaaaaa

SEQ ID NO: 20249 - RNA, 1778 nt, Artificial Sequence
  SARS-CoV-2__MT755892.1__non-structural protein 4 (NSP4) mRNA gc
aggagagucccgcagucggcguccagcggcucugcuuguucgugugugugucguugcaggccuuauucaagcuuaccaugaagaucgugaacaacuggcugaagcagcucaucaaggucacccugguguuccuguucguggccgccaucuucuaccucaucacccccguccacgugaugagcaagcacacggacuucuccagcgagaucaucggcuacaaggcgaucgacgggggcgugacccgcgacaucgccuccaccgacacgugcuucgccaacaagcacgccgacuucgacaccugguucagccagcgcgggggcuccuacaccaacgacaaggccugcccccugaucgcggccgucaucacccgggaggugggguucgugguccccggccugcccggcaccauccuccggacgaccaacggggacuuccugcacuuccugccccgcguguucagcgccgugggcaacaucugcuacaccccguccaagcucaucgaguacaccgacuucgccacgagcgcgugcguccuggccgccgagugcaccaucuucaaggacgccuccgggaagcccgugcccuacugcuacgacaccaacgugcuggagggcagcgucgccuacgggucccuccggcccgacacccgcuacgugcugauggacggcagcaucauccaguucccgaacacguaccuggagggcuccgugcgggucgugaccaccuucgacagcgaguacugccgccacgggaccugcgagcgguccgaggcgggcgugugcgucagcacguccgggcgcugggugcucaacaacgacuacuaccggagccugcccggcguguucugcggcgucgacgccgugaaccugcucaccaacauguucacgccccugauccagcccaucggggcccuggacaucuccgccagcaucgucgccggcgggaucguggcgaucguggugaccugccucgccuacuacuucaugcgcuuccggcgcgccuucggcgaguacagccacgucguggccuucaacacccugcuguuccucauguccuucaccguccugugccugaccccgguguacagcuuccuccccgggguguacuccgucaucuaccuguaccugaccuucuaccucacgaacgacgugagcuuccuggcccacauccaguggauggugauguucacgccccugguccccuucuggaucaccaucgcguacaucaucugcaucuccaccaagcacuucuacugguucuucagcaacuaccucaagcggcgcgugguguucaacggcgucuccuucagcaccuucgaggaggccgcccugugcaccuuccugcucaacaaggagauguaccugaagcugcgguccgacgugcuccugccgcugacccaguacaaccgcuaccucgcccuguacaacaaguacaaguacuucagcggcgccauggacaccacguccuaccgggaggcggccugcugccaccuggccaaggcccucaacgacuucagcaacuccgggagcgacgugcuguaccagccgccccagaccuccaucaccagcgcgguccugcagugaggacuagucccuguucccagagcccacuuuuuuuucuuuuuuugaaauaaaauagccugucuuucagaucucaaaggcucuuuucagagccaccaaaaaaaaaaaaaaaaaaaaaaaaaaaaaaaaaaaaaaaaaaaaaaaaaaaaaaaaaaaaaaaaaaaaaaaaaaaaaaaaaaaaaaaaaaaaaaaaaaaaa

SEQ ID NO: 20250 - RNA, 1778 nt, Artificial Sequence
  SARS-CoV-2__MT745605.1__non-structural protein 4 (NSP4) mRNA gc
aggagagucccgcagucggcguccagcggcucugcuuguucgugugugugucguugcaggccuuauucaagcuuaccaugaagaucgugaacaacuggcugaagcagcucaucaaggucacccugguguuccuguucguggccgccaucuucuaccucaucacccccguccacgugaugagcaagcacacggacuucuccagcgagaucaucggcuacaaggcgaucgacgggggcgugacccgcgacaucgccuccaccgacacgugcuucgccaacaagcacgccgacuucgacaccugguucagccagcggggcggcuccuacaccaacgacaaggccugcccccugaucgcggccgucaucacccgcgaggugggguucgugguccccggccugcccggcaccauccuccggacgaccaacggggacuuccugcacuuccugccccgcguguucagcgccgugggcaacaucugcuacaccccguccaagcucaucgaguacaccgacuucgccacgagcgcgugcguccuggccgccgagugcaccaucuucaaggacgccuccgggaagcccgugcccuacugcuacgacaccaacgugcuggagggcagcgucgccuacgagucccuccggcccgacacccgcuacgugcugauggacgggagcaucauccaguucccgaacaucuaccuggagggcuccgugcgggucgugacgaccuucgacagcgaguacugccgccacgggaccugcgagcgguccgaggcgggggugugcgucagcaccuccggccgcugggugcucaacaacgacuacuaccggagccugcccgggguguucugcggcgucgacgccgugaaccugcucacgaacauguucacgccccugauccagcccaucggcgcccuggacaucuccgccagcaucgucgccgggggcaucguggcgaucguggugaccugccucgccuacuacuucaugcgcuuccggcgcgccuucggggaguacagccacgucguggccuucaacacccugcuguuccucauguccuucaccguccugugccugaccccgguguacagcuuccuccccggcguguacuccgucaucuaccuguaccugaccuucuaccucaccaacgacgugagcuuccuggcccacauccaguggauggugauguucacgccccugguccccuucuggaucaccaucgcguacaucaucugcaucuccaccaagcacuucuacugguucuucagcaacuaccucaagcggcgcgugguguucaacggggucuccuucagcaccuucgaggaggccgcccugugcacguuccugcucaacaaggagauguaccugaagcugcgguccgacgugcuccugccgcugacccaguacaaccgcuaccucgcccuguacaacaaguacaaguacuucagcggcgccauggacaccaccuccuaccgggaggcggccugcugccaccuggccaaggcccucaacgacuucagcaacuccggcagcgacgugcuguaccagccgccccagacguccaucaccagcgcgguccugcagugaggacuagucccuguucccagagcccacuuuuuuuucuuuuuuugaaauaaaauagccugucuuucagaucucaaaggcucuuuucagagccaccaaaaaaaaaaaaaaaaaaaaaaaaaaaaaaaaaaaaaaaaaaaaaaaaaaaaaaaaaaaaaaaaaaaaaaaaaaaaaaaaaaaaaaaaaaaaaaaaaaaaa

SEQ ID NO: 20251 - RNA, 1778 nt, Artificial Sequence
  SARS-CoV-2__MT745655.1__non-structural protein 4 (NSP4) mRNA gc
aggagagucccgcagucggcguccagcggcucugcuuguucgugugugugucguugcaggccuuauucaagcuuaccaugaagaucgugaacaacuggcugaagcagcucaucaaggucacccugguguuccuguucguggccgccaucuucuaccucaucacccccguccacgugaugagcaagcacacggacuucuccagcgagaucaucggcuacaaggcgaucgacgggggcgugacccgcgacaucgccuccaccgacacgugcuucgccaacaagcacgccgacuucgacaccugguucagccagcggggcggcuccuacaccaacgacaaggccugcccccugaucgcggccgucaucacccgcgaggugggguucgugguccccggccugcccggcaccauccuccggacgaccaacggggacuuccugcacuuccugccccgcguguucagcgccgugggcaacaucugcuacaccccguccaagcucaucgaguacaccgacuucgccacgagcgcgugcguccuggccgccgagugcaccaucuucaaggacgccuccgggaagcccgugcccuacugcuacgacaccaacgugcuggagggcagcgucgccuacgagucccuccggcccgacacccgcuacgugcugauggacgggagcaucauccaguucccgaacacguaccuggagggcuccgugcgggucgugaccaccuucgacagcgaguacugccgccacgggaccugcgagcgguccgaggcgggggugugcgucagcacguccggccgcugggugcucaacaacgacuacuaccggagccugcccgggguguucugcggcgucgacgccgugaaccugcucaccaacauguucacgccccugauccagcccaucggcgcccuggacaucuccgccagcaucgucgccgggggcaucguggcgaucguggugaccugccucgccuacuacuucaugcgcuuccggcgcgccuucggggaguacagccacgucguggccuucaacacccugcuguuccucauguccuucaccguccugugccugaccccgguguacagcuuccuccccggcguguacuccgucaucuaccuguaccugaccuucuaccucacgaacgacgugagcuuccuggcccacucccaguggauggugauguucacgccccugguccccuucuggaucaccaucgcguacaucaucugcaucagcaccaagcacuucuacugguucuucuccaacuaccucaagcggcgcgugguguucaacggggucagcuucuccaccuucgaggaggccgcccugugcaccuuccugcucaacaaggagauguaccugaagcugcggagcgacgugcuccugccgcugacccaguacaaccgcuaccucgcccuguacaacaaguacaaguacuucuccggcgccauggacaccacgagcuaccgggaggcggccugcugccaccuggccaaggcccucaacgacuucuccaacagcggcuccgacgugcuguaccagccgccccagaccagcaucaccuccgcgguccugcagugaggacuagucccuguucccagagcccacuuuuuuuucuuuuuuugaaauaaaauagccugucuuucagaucucaaaggcucuuuucagagccaccaaaaaaaaaaaaaaaaaaaaaaaaaaaaaaaaaaaaaaaaaaaaaaaaaaaaaaaaaaaaaaaaaaaaaaaaaaaaaaaaaaaaaaaaaaaaaaaaaaaaa

SEQ ID NO: 20252 - RNA, 1778 nt, Artificial Sequence
  SARS-CoV-2__MT745677.1__non-structural protein 4 (NSP4) mRNA gc
aggagagucccgcagucggcguccagcggcucugcuuguucgugugugugucguugcaggccuuauucaagcuuaccaugaagaucgugaacaacuggcugaagcagcucaucaaggucacccugguguuccuguucguggccgccaucuucuaccucaucacccccguccacgugaugagcaagcacacggacuucuccagcgagaucaucggcuacaaggcgaucgacgggggcgugacccgcgacaucgccuccaucgacacgugcuucgccaacaagcacgccgacuucgacaccugguucagccagcggggcggcuccuacaccaacgacaaggccugcccccugaucgcggccgucaucacccgcgaggugggguucgugguccccggccugcccggcaccauccuccggaccacgaacggggacuuccugcacuuccugccccgcguguucagcgccgugggcaacaucugcuacaccccguccaagcucaucgaguacaccgacuucgccaccagcgcgugcguccuggccgccgagugcacgaucuucaaggacgccuccgggaagcccgugcccuacugcuacgacaccaacgugcuggagggcagcgucgccuacgagucccuccggcccgacacccgcuacgugcugauggacgggagcaucauccaguucccgaacaccuaccuggagggcuccgugcgggucgugacgaccuucgacagcgaguacugccgccacgggaccugcgagcgguccgaggcgggggugugcgucagcaccuccggccgcugggugcucaacaacgacuacuaccggagccugcccgggguguucugcggcgucgacgccgugaaccugcucacgaacauguucacgccccugauccagcccaucggcgcccuggacaucuccgccagcaucgucgccgggggcaucguggcgaucguggugaccugccucgccuacuacuucaugcgcuuccggcgcgccuucggggaguacagccacgucguggccuucaacacccugcuguuccucauguccuucaccguccugugccugaccccgguguacagcuuccuccccggcguguacuccgucaucuaccuguaccugaccuucuaccucaccaacgacgugagcuuccuggcccacauccaguggauggugauguucacgccccugguccccuucuggaucaccaucgcguacaucaucugcaucuccaccaagcacuucuacugguucuucagcaacuaccucaagcggcgcgugguguucaacggggucuccuucagcaccuucgaggaggccgcccugugcacguuccugcucaacaaggagauguaccugaagcugcgguccgacgugcuccugccgcugacccaguacaaccgcuaccucgcccuguacaacaaguacaaguacuucagcggcgccauggacaccaccuccuaccgggaggcggccugcugccaccuggccaaggcccucaacgacuucagcaacuccggcagcgacgugcuguaccagccgccccagacguccaucaccagcgcgguccugcagugaggacuagucccuguucccagagcccacuuuuuuuucuuuuuuugaaauaaaauagccugucuuucagaucucaaaggcucuuuucagagccaccaaaaaaaaaaaaaaaaaaaaaaaaaaaaaaaaaaaaaaaaaaaaaaaaaaaaaaaaaaaaaaaaaaaaaaaaaaaaaaaaaaaaaaaaaaaaaaaaaaaaa

SEQ ID NO: 20253 - RNA, 1778 nt, Artificial Sequence
  SARS-CoV-2__MT740431.1__non-structural protein 4 (NSP4) mRNA gc
aggagagucccgcagucggcguccagcggcucugcuuguucgugugugugucguugcaggccuuauucaagcuuaccaugaagaucgugaacaacuggcugaagcagcucaucaaggucacccugguguuccuguucguggccgccaucuucuaccucaucacccccguccacgugaugagcaagcacacggacuucuccagcgagaucaucggcuacaaggcgaucgacgggggcgugacccgcgacaucgccuccaccgacacgugcuucgccaacaagcacgucgacuucgacaccugguucagccagcggggcggcuccuacaccaacgacaaggccugcccccugaucgccgcggugaucacccgcgaggugggguucgucgugcccggccugcccggcaccauccuccggacgaccaacggggacuuccugcacuuccugccccgcguguucagcgccgucggcaacaucugcuacaccccguccaagcucaucgaguacaccgacuucgccacgagcgccugcgugcuggcggccgagugcaccaucuucaaggacgccuccgggaagcccgugcccuacugcuacgacaccaacguccuggagggcagcguggccuacgagucccuccggcccgacacccgcuacgugcugauggacgggagcaucauccaguucccgaacacguaccuggagggcuccguccggguggugaccaccuucgacagcgaguacugccgccacgggaccugcgagcgguccgaggccggggucugcgugagcacguccggccgcugggugcucaacaacgacuacuaccggagccugcccggggucuucugcggcguggacgcggucaaccugcucaccaacauguucacgccccugauccagcccaucggcgcccuggacaucuccgccagcaucguggccgggggcaucguggccaucgucgugaccugccucgcguacuacuucaugcgcuuccggcgcgccuucggggaguacagccacguggucgccuucaacacccugcuguuccucauguccuucaccgugcugugccugaccccgguguacagcuuccuccccggcgucuacuccgugaucuaccuguaccugaccuucuaccucacgaacgacgugagcuuccuggcccacauccaguggauggucauguucacgccccuggugcccuucuggaucaccaucgccuacaucaucugcaucuccaccaagcacuucuacugguucuucagcaacuaccucaagcggcgcguggucuucaacgggguguccuucagcaccuucgaggaggcggcccugugcaccuuccugcucaacaaggagauguaccugaagcugcgguccgacgugcuccugccgcugacccaguacaaccgcuaccucgcccuguacaacaaguacaaguacuucagcggcgccauggacaccacguccuaccgggaggccgcgugcugccaccuggccaaggcccucaacgacuucagcaacuccggcagcgacguccuguaccagccgccccagaccuccaucaccagcgccgugcugcagugaggacuagucccuguucccagagcccacuuuuuuuucuuuuuuugaaauaaaauagccugucuuucagaucucaaaggcucuuuucagagccaccaaaaaaaaaaaaaaaaaaaaaaaaaaaaaaaaaaaaaaaaaaaaaaaaaaaaaaaaaaaaaaaaaaaaaaaaaaaaaaaaaaaaaaaaaaaaaaaaaaaaa

SEQ ID NO: 20254 - RNA, 1778 nt, Artificial Sequence
  SARS-CoV-2__MT731936.1__non-structural protein 4 (NSP4) mRNA gc
aggagagucccgcagucggcguccagcggcucugcuuguucgugugugugucguugcaggccuuauucaagcuuaccaugaagaucgugaacaacuggcugaagcagcucaucaaggucacccugguguuccuguucguggccgccaucuucuaccucaucacccccguccacgugaugagcaagcacacggacuucuccagcgagaucaucggcuacaaggcgaucgacgggggcgugacccgcgacaucgccuccaccgacacgugcuucgccaacaagcacgccgacuucgacaccugguucagccagcgcgggggcuccuacaccaacgacaaggccugcccgcugaucgcggccgucaucacccgggaggugggguucgugguccccggccugcccggcaccauccuccggacgaccaacggggacuuccugcacuuccugccccgcguguucagcgccgugggcaacaucugcuacaccccguccaagcucaucgaguacaccgacuucgccacgagcgcgugcguccuggccgccgagugcaccaucuucaaggacgccuccggcaagagcgugcccuacugcuacgacaccaacgugcuggagggcuccgucgccuacgagagccuccggcccgacacccgcuacgugcugauggacggguccaucauccaguuccccaacacguaccuggagggcagcgugcgggucgugaccaccuucgacuccgaguacugccgccacgggaccugcgagcggagcgaggcgggggugugcgucuccacgagcggccgcugggugcucaacaacgacuacuaccggucccugccggggguguucugcggcgucgacgccgugaaccugcucaccaacauguucacgccccugauccagcccaucggcgcccuggacaucagcgccagcaucgucgccgggggcaucguggcgaucguggugaccugccucgccuacuacuucaugcgcuuccggcgcgccuucggggaguacucccacgucguggccuucaacacccugcuguuccucaugagcuucaccguccugugccugacccccguguacuccuuccucccgggcguguacagcgucaucuaccuguaccugaccuucuaccucacgaacgacguguccuuccuggcccacauccaguggauggugauguucacgccccugguccccuucuggaucaccaucgcguacaucaucugcaucagcaccaagcacuucuacugguucuucuccaacuaccucaagcggcgcgugguguucaacggggucagcuucuccaccuucgaggaggccgcccugugcaccuuccugcucaacaagggcauguaccugaagcugcggagcgacgugcuccugccccugacccaguacaaccgcuaccucgcccuguacaacaaguacaaguacuucuccggcgccauggacaccacgagcuaccgggaggcggccugcugccaccuggccaaggcccucaacgacuucuccaacagcggguccgacgugcuguaccagccgccccagaccagcaucaccuccgcgguccugcagugaggacuagucccuguucccagagcccacuuuuuuuucuuuuuuugaaauaaaauagccugucuuucagaucucaaaggcucuuuucagagccaccaaaaaaaaaaaaaaaaaaaaaaaaaaaaaaaaaaaaaaaaaaaaaaaaaaaaaaaaaaaaaaaaaaaaaaaaaaaaaaaaaaaaaaaaaaaaaaaaaaaaa

SEQ ID NO: 20255 - RNA, 1778 nt, Artificial Sequence
  SARS-CoV-2__MT706149.1__non-structural protein 4 (NSP4) mRNA gc
aggagagucccgcagucggcguccagcggcucugcuuguucgugugugugucguugcaggccuuauucaagcuuaccaugaagaucgugaacaacuggcugaagcagcucaucaaggucacccugguguuccuguucguggccgccaucuucuaccucaucacccccguccacgugaugagcaagcacacggacuucuccagcgagaucaucggcuacaaggcgaucgacgggggcgugacccgcgacaucgccuccaccgacacgugcuucgccaacaagcacgccgacuucgacaccugguucagccagcggggcggcuccuacaccaacgacaaggccugcccgcugaucgcggccgucaucacccgcgaggugggguucgugguccccggccugcccggcaccauccuccggacgaccaacggggacuuccugcacuuccugccccgcguguucagcgccgugggcaacaucugcuacaccccguccaagcucaucgaguacaccgacuucgccacgagcgcgugcguccuggccgccgagugcaccaucuucaaggacgccuccgggaagcccgugcccuacugcuacgacaccaacgugcuggagggcagcgucgccuacgagucccuccggagcgacacccgcuacgugcugauggacggguccaucauccaguuccccaacacguaccuggagggcagcgugcgggucgugaccaccuucgacuccgaguacugccgccacgggaccugcgagcggagcgaggcgggggugugcgucuccacgagcggccgcugggugcucaacaacgacuacuaccggucccugccggggguguucugcggcgucgacgccgugaaccugcucaccaacauguucacgccccugauccagcccaucggcgcccuggacaucagcgccagcaucgucgccgggggcaucguggcgaucguggugaccugccucgccuacuacuucaugcgcuuccggcgcgccuucggggaguacucccacgucguggccuucaacacccugcuguuccucaugagcuucaccguccugugccugacccccguguacuccuuccucccgggcguguacagcgucaucuaccuguaccugaccuucuaccucacgaacgacguguccuuccuggcccacauccaguggauggugauguucacgccccugguccccuucuggaucaccaucgcguacaucaucugcaucagcaccaagcacuucuacugguucuucuccaacuaccucaagcggcgcgugguguucaacggggucagcuucuccaccuucgaggaggccgcccugugcaccuuccugcucaacaaggagauguaccugaagcugcggagcgacgugcuccugccccugacccaguacaaccgcuaccucgcccuguacaacaaguacaaguacuucuccggcgccauggacaccacgagcuaccgggaggcggccugcugccaccuggccaaggcccucaacgacuucuccaacagcggcuccgacgugcuguaccagccgccccagaccagcaucaccuccgcgguccugcagugaggacuagucccuguucccagagcccacuuuuuuuucuuuuuuugaaauaaaauagccugucuuucagaucucaaaggcucuuuucagagccaccaaaaaaaaaaaaaaaaaaaaaaaaaaaaaaaaaaaaaaaaaaaaaaaaaaaaaaaaaaaaaaaaaaaaaaaaaaaaaaaaaaaaaaaaaaaaaaaaaaaaa

SEQ ID NO: 20256 - RNA, 1778 nt, Artificial Sequence
  SARS-CoV-2__MT706230.1__non-structural protein 4 (NSP4) mRNA gc
aggagagucccgcagucggcguccagcggcucugcuuguucgugugugugucguugcaggccuuauucaagcuuaccaugaagaucgugaacaacuggcugaagcagcucaucaaggucacccugguguuccuguucguggccgccaucuucuaccucaucacccccguccacgugaugagcaagcacacggacuucuccagcgagaucaucggcuacaaggcgaucgacgggggcgugacccgcgacaucgccuccaccgacacgugcuucgccaacaagcacgccgacuucgacaccugguucagccagcggggcggcuccuacaccaacgacaaggccugcccccugaucgcggccgucaucacccgcgaggugggguucgugguccccggccugcccggcaccauccuccggacgaccaacggggacuuccugcacuuccugccccgcguguucagcgccgugggcaacaucugcuacaccccguccaagcucaucgaguacaccgacuucgccacgagcgcgugcguccuggccgccgagugcaccaucuucaaggacgccuccgggaagccccugcccuacugcuacgacaccaacgugcucgagggcagcguggccuacgagucccugcggcccgacacccgcuacguccugauggacgggagcaucauccaguucccgaacacguaccucgagggcuccgugcggguggucaccaccuucgacagcgaguacugccgccacgggaccugcgagcgguccgaggcgggggugugcgugagcacguccggccgcuggguccugaacaacgacuacuaccggagccugcccgggguguucugcggcguggacgccgucaaccuccugaccaacauguucacgccccugauccagcccaucggcgcccucgacaucuccgccagcaucguggccgggggcaucgucgcgaucguggugaccugccuggccuacuacuucaugcgcuuccggcgcgccuucggggaguacagccacgucguggccuucaacacccuccuguuccugauguccuucaccgugcugugccucaccccggucuacagcuuccugcccggcguguacuccgugaucuaccuguaccucaccuucuaccugacgaacgacgucagcuuccuggcccacauccaguggauggugauguucacgccccucgugcccuucuggaucaccaucgcguacaucaucugcaucuccaccaagcacuucuacugguucuucagcaacuaccugaagcggcgcgucguguucaacgggguguccuucagcaccuucgaggaggccgcccugugcaccuuccuccugaacaaggagauguaccugaagcuccgguccgacguccugcugccgcucacccaguacaaccgcuaccuggcccuguacaacaaguacaaguacuucagcggcgccauggacaccacguccuaccgggaggcggccugcugccaccucgccaaggcccugaacgacuucagcaacuccggcagcgacgugcuguaccagccgccccagaccuccaucaccagcgcggugcugcagugaggacuagucccuguucccagagcccacuuuuuuuucuuuuuuugaaauaaaauagccugucuuucagaucucaaaggcucuuuucagagccaccaaaaaaaaaaaaaaaaaaaaaaaaaaaaaaaaaaaaaaaaaaaaaaaaaaaaaaaaaaaaaaaaaaaaaaaaaaaaaaaaaaaaaaaaaaaaaaaaaaaaa

SEQ ID NO: 20257 - RNA, 1778 nt, Artificial Sequence
  SARS-CoV-2__MT706254.1__non-structural protein 4 (NSP4) mRNA gc
aggagagucccgcagucggcguccagcggcucugcuuguucgugugugugucguugcaggccuuauucaagcuuaccaugaagaucgugaacaacuggcugaagcagcucaucaaggucacccugguguuccuguucguggccgccaucuucuaccucaucacccccguccacgugaugagcaagcacacggacuucuccagcgagaucaucggcuacaaggcgaucgacgggggcgugacccgcgacaucgccuccaccgacacgugcuucgccaacaagcacgccgacuucgacaccugguucagccagcggggcggcuccuacaccaacgacaaggccugcccccugaucgcggccgucaucacccgcgaggugggguucgugguccccggccugcccggcaccauccuccggacgaccaacggggacuuccugcacuuccugccccgcguguucagcgccgugggcaacaucugcuacaccccguccaagcucaucgaguacaccgacuucgccacgagcgcgugcguccuggccgccgagugcaccaucuucaaggacgccuccgggaagcccgugcccuacugcuacgacaccaacgugcuggagggcagcgucgccuacgagucccuccggcccgacacccgcuacgugcugauggacgggagcaucauccaguucccgaacacguaccuggagggcuccgugcgggucgugaccaccuucgacagcgaguacugccgccacgggaccugcgagcgguccgaggcgggggugugcgucagcacguccggccgcugggugcucaacaacgacuacuaccggagccugcccgggguguucugcggcgucgacgccgugaaccugcucaccaacauguucacgccccugauccagcccaucggcgcccuggacaucuccgccagcaucgucgccgggggcaucguggcgaucguggugaccugccucgccuacuacuucaugcgcuuccggcgcgccuucggggaguacagccacgucguggccuucaacacccugcuguuccucauguccuucaccguccugugccugaccccgguguacagcuuccuccccggcguguacuccgucaucuaccuguaccugaccuucuaccucacgaacgacgugagcuuccuggcccacauccaguggauggugauguucacgccccugguccccuucuggaugaccaucgcguacaucaucugcaucuccaccaagcacuucuacugguucuucagcaacuaccucaagcggcgcgugguguucaacggggucuccuucagcaccuucgaggaggccgcccugugcaccuuccugcucaacaaggagauguaccugaagcugcgguccgacgugcuccugccgcugacccaguacaaccgcuaccucgcccuguacaacaaguacaaguacuucagcggcgccauggacaccacguccuaccgggaggcggccugcugccaccuggccaaggcccucaacgacuucagcaacuccggcagcgacgugcuguaccagccgccccagaccuccaucaccagcgcgguccugcagugaggacuagucccuguucccagagcccacuuuuuuuucuuuuuuugaaauaaaauagccugucuuucagaucucaaaggcucuuuucagagccaccaaaaaaaaaaaaaaaaaaaaaaaaaaaaaaaaaaaaaaaaaaaaaaaaaaaaaaaaaaaaaaaaaaaaaaaaaaaaaaaaaaaaaaaaaaaaaaaaaaaaa

SEQ ID NO: 20258 - RNA, 1778 nt, Artificial Sequence
  SARS-CoV-2__MT706307.1__non-structural protein 4 (NSP4) mRNA gc
aggagagucccgcagucggcguccagcggcucugcuuguucgugugugugucguugcaggccuuauucaagcuuaccaugaagaucgugaacaacuggcugaagcagcucaucaaggucacccugguguuccuguucguggccgccaucuucuaccucaucacccccguccacgugaugagcaagcacacggacuucuccagcgagaucaucggcuacaaggcgaucgacgggggcgugacccgcgacaucgccuccaccgacacgugcuucgccaacaagcacgccgacuucgacaccugguucagccagcggggcggcuccuacaccaacgacaaggccugcccccugaucgcggccgucaucacccgcgaggugggguucgugguccccggccugcccggcaccauccuccggacgaccaacggggacuuccugcacuuccugccccgcguguucagcgccgugggcaacaucugcuacaccccguccaagcucaucgaguacaccgacuucgccacgagcgcgugcguccuggccgccgagugcaccaucuucaaggacgccuccgggaagcccgugcccuacugcuacgacaccaacgugcuggagggcagcgucgccuacgagucccuccggcccgacacccgcuacgugcugauggacgggagcaucauccaguucccgaacacguaccuggagggcuccgugcgggucgugaccaccuucgacagcgaguacugccgccacgggaccugcgagcgguccgaggcgggggugugcgucagcacguccggccgcugggugcucaacaacgacuacuaccggagccugcccgggguguucugcggcgucgacgccgugaaccugcucaccaacauguucacgccccugauccagcccaucggcgcccuggacaucuccgccagcaucgucgccgggggcaucguggcgaucguggugaccugccucgccuacuacuucaugcgcuuccggcgcgccuucggggaguacagccacgucguggccuucaacauccugcuguuccucauguccuucaccguccugugccugaccccgguguacagcuuccuccccggcguguacuccgucaucuaccuguaccugaccuucuaccucaccaacgacgugagcuuccuggcccacauccaguggauggugauguucacgccccugguccccuucuggaucaccaucgcguacaucaucugcaucuccaccaagcacuucuacugguucuucagcaacuaccucaagcggcgcgugguguucaacggggucuccuucagcaccuucgaggaggccgcccugugcacguuccugcucaacaaggagauguaccugaagcugcgguccgacgugcuccugccgcugacccaguacaaccgcuaccucgcccuguacaacaaguacaaguacuucagcggcgccauggacaccaccuccuaccgggaggcggccugcugccaccuggccaaggcccucaacgacuucagcaacuccggcagcgacgugcuguaccagccgccccagacguccaucaccagcgcgguccugcagugaggacuagucccuguucccagagcccacuuuuuuuucuuuuuuugaaauaaaauagccugucuuucagaucucaaaggcucuuuucagagccaccaaaaaaaaaaaaaaaaaaaaaaaaaaaaaaaaaaaaaaaaaaaaaaaaaaaaaaaaaaaaaaaaaaaaaaaaaaaaaaaaaaaaaaaaaaaaaaaaaaaaa

SEQ ID NO: 20259 - RNA, 1778 nt, Artificial Sequence
  SARS-CoV-2__MT706334.1__non-structural protein 4 (NSP4) mRNA gc
aggagagucccgcagucggcguccagcggcucugcuuguucgugugugugucguugcaggccuuauucaagcuuaccaugaagaucgugaacaacuggcugaagcagcucaucaaggucacccugguguuccuguucguggccgccaucuucuaccucaucacccccguccacgugaugagcaagcacacggacuucuccagcgagaucaucggcuacaaggcgaucgacgggggcgugacccgcgacaucgccuccaccgacacgugcuucgccaacaagcacgccgacuucgacaccugguucagccagcggggcggcuccuacaccaacgacaaggccugcccccugaucgcggccgucaucacccgcgaggugggguucgugguccccggccugcccggcaccauccuccggacgaccaacggggacuuccugcacuuccugccccgcguguucagcgccgugggcaacaucugcuacaccccguccaagcucaucgaguacaccgacuucgccacgagcgcgugcguccuggccgccgagugcaccaucuucaaggacgccuccgggaagcccgugcccuacugcuacgacaccaacgugcuggagggcagcgucgccuacgagucccuccggcccgacacccgcuacgugcugauggacgggagcaucauccaguucccgaacacguaccuggagggcuccgugcgggucgugaccaccuucgacagcgaguacugccgccacgggaccugcgagcgguccgaggcgggggugugcgucagcacguccggccgcugggugcucaacaacgacuacuaccggagccugcccgggguguucugcggcgucgacgccgugaaccugcucaccaacauguucacgccccugauccagcccaucggcgcccuggacaucuccgccagcaucgucgccgggggcaucguggcgaucguggugaccugccucgccuacuacuucaugcgcuuccggcgcgccuucggggaguacagccacgucguggccuucaacacccugcuguuccucauguccuucaccguccugugccugaccccgguguacagcuuccuccccggcguguacuccgucaucuaccuguaccugaccuucuaccucacgaacgacgugagcuuccuggcccacauccaguggauggugauguucacgccccugguccccuucuggaucaccaucgcguacaucaucugcaucuccaccaagcacuucuacugguucuucagcaacuaccucaagcggcgcgugguguucaacggggucuccuucagcaccuucgaggaggccgcccugugcaccuuccugcucaacaaggagauguaccugaagcugcggggcgacgugcuccugccgcugacccaguacaaccgcuaccucgcccuguacaacaaguacaaguacuucuccggcgccauggacaccacgagcuaccgggaggcggccugcugccaccuggccaaggcccucaacgacuucuccaacagcggguccgacgugcuguaccagccgccccagaccagcaucaccuccgcgguccugcagugaggacuagucccuguucccagagcccacuuuuuuuucuuuuuuugaaauaaaauagccugucuuucagaucucaaaggcucuuuucagagccaccaaaaaaaaaaaaaaaaaaaaaaaaaaaaaaaaaaaaaaaaaaaaaaaaaaaaaaaaaaaaaaaaaaaaaaaaaaaaaaaaaaaaaaaaaaaaaaaaaaaaa

SEQ ID NO: 20260 - RNA, 1778 nt, Artificial Sequence
  SARS-CoV-2__MT706437.1__non-structural protein 4 (NSP4) mRNA gc
aggagagucccgcagucggcguccagcggcucugcuuguucgugugugugucguugcaggccuuauucaagcuuaccaugaagaucgugaacaacuggcugaagcagcucaucaaggucacccugguguuccuguucguggccgccaucuucuaccucaucacccccguccacgugaugagcaagcacacggacuucuccagcgagaucaucggcuacaaggcgaucgacgggggcgugacccgcgacaucgccuccaccgacacgugcuucgccaacaagcacgccgacuucgacaccugguucagccagcggggcggcuccuacaccaacgacaaggccugcccccugaucgcggccgucaucacccgcgaggugggguucgugguccccggccugcccggcaccauccuccggacgaccaacggggacuuccugcacuuccugccccgcguguucagcgccgugggcaacaucugcuacaccccguccaagcucaucgaguacaccgacuucgccacgagcgcgugcguccuggccgccgagugcaccaucuucaaggacgccuccgggaagcccgugcccuacugcuacgacaccaacgugcuggagggcagcgucgccuacgagucccuccggcccgacacccgcuacgugcugauggacgggagcaucauccaguucccgaacacguaccuggagggcuccgugcgggucgugaccaccuucgacagcgaguacugccgccacgggaccugcgagcgguccgaggcgggggugugcgucagcacguccggccgcugggugcucaacaacgacuacuaccggagccugcccgggguguucugcggcgucgacgccgugaaccugcucaccaacauguucacgccccugauccagcccaucggcgcccuggacaucuccgccagcaucgucgccgggggcaucguggcgaucguggugaccugccucgccuacuacuucaugcgcuuccggcgcgccuucggggaguacagccacgucguggccuucaacacccugcuguuccucauguccuucaccguccugugccugaccccgguguacagcuuccuccccggcguguacuccgucaucuaccuguaccugaccuucuaccucacgaacgacgugagcuuccuggcccacauccaguggauggugauguucacgccccugguccccuucugggugaccaucgcguacaucaucugcaucuccaccaagcacuucuacugguucuucagcaacuaccucaagcggcgcguggucuucaacgggguguccuucagcaccuucgaggaggccgcccugugcaccuuccugcucaacaaggagauguaccugaagcugcgguccgacgugcuccugccgcugacccaguacaaccgcuaccucgcccuguacaacaaguacaaguacuucagcggcgccauggacaccacguccuaccgggaggcggccugcugccaccuggccaaggcccucaacgacuucagcaacuccggcagcgacguccuguaccagccgccccagaccuccaucaccagcgcggugcugcagugaggacuagucccuguucccagagcccacuuuuuuuucuuuuuuugaaauaaaauagccugucuuucagaucucaaaggcucuuuucagagccaccaaaaaaaaaaaaaaaaaaaaaaaaaaaaaaaaaaaaaaaaaaaaaaaaaaaaaaaaaaaaaaaaaaaaaaaaaaaaaaaaaaaaaaaaaaaaaaaaaaaaa

SEQ ID NO: 20261 - RNA, 1778 nt, Artificial Sequence
  SARS-CoV-2__MT704022.1__non-structural protein 4 (NSP4) mRNA gc
aggagagucccgcagucggcguccagcggcucugcuuguucgugugugugucguugcaggccuuauucaagcuuaccaugaagaucgugaacaacuggcugaagcagcucaucaaggucacccugguguuccuguucguggccgccaucuucuaccucaucacccccguccacgugaugagcaagcacacggacuucuccagcgagaucaucggcuacaaggcgaucgacgggggcgugacccgcgacaucgccuccaccgacacgugcuucgccaacaagcacgccgacuucgacaccugguucagccagcggggcggcuccuacaccaacgacaaggccugcccccugaucgcggccgucaucacccgcgaggugggguucgugguccccggccugcccggcaccauccuccggacgaccaacggggacuuccugcacuuccugccccgcguguucagcgccgugggcaacaucugcuacaccccguccaagcucaucgaguacaccgacuucgccacgagcgcgugcguccuggccgccgagugcaccaucuucaaggacgccuccgggaagcccgugcccuacugcuacgacaccaacgugcuggagggcagcgucgccuacgagucccuccggcccgacacccgcuacgugcugauggacgggagcaucauccaguucccgaacacguaccuggagggcuccgugcgggucgugaccaccuucgacagcgaguacugccgccacgggaccugcgagcgguccgaggcgggggugugcgucagcacguccggccgcugggugcucaacaacgacuacuaccggagccugcccgggguguucugcggcgucgacgccgugaaccugcucaccaacauguucacgccccugauccagcccaucggcgcccuggacaucuccgccagcaucgucgccgggggcaucguggcgaucaucgugaccugccucgccuacuacuucaugcgcuuccggcgcgccuucggggaguacagccacgucguggccuucaacacccugcuguuccucauguccuucaccgugcugugccugaccccggucuacagcuuccuccccggcguguacuccgugaucuaccuguaccugaccuucuaccucacgaacgacgucagcuuccuggcccacauccaguggauggugauguucacgccccuggugcccuucuggaucaccaucgcguacaucaucugcaucuccaccaagcacuucuacugguucuucagcaacuaccucaagcggcgcgucguguucaacgggguguccuucagcaccuucgaggaggccgcccugugcaccuuccugcucaacaaggagauguaccugaagcugcgguccgacguccuccugccgcugacccaguacaaccgcuaccucgcccuguacaacaaguacaaguacuucagcggcgccauggacaccacguccuaccgggaggcggccugcugccaccuggccaaggcccucaacgacuucagcaacuccggcagcgacgugcuguaccagccgccccagaccuccaucaccagcgcggugcugcagugaggacuagucccuguucccagagcccacuuuuuuuucuuuuuuugaaauaaaauagccugucuuucagaucucaaaggcucuuuucagagccaccaaaaaaaaaaaaaaaaaaaaaaaaaaaaaaaaaaaaaaaaaaaaaaaaaaaaaaaaaaaaaaaaaaaaaaaaaaaaaaaaaaaaaaaaaaaaaaaaaaaaa

SEQ ID NO: 20262 - RNA, 1778 nt, Artificial Sequence
  SARS-CoV-2__MT704064.1__non-structural protein 4 (NSP4) mRNA gc
aggagagucccgcagucggcguccagcggcucugcuuguucgugugugugucguugcaggccuuauucaagcuuaccaugaagaucgugaacaacuggcugaagcagcucaucaaggucacccugguguuccuguucguggccgccaucuucuaccucaucacccccguccacgugaugagcaagcacacggacuucuccagcgagaucaucggcuacaaggcgaucgacgggggcgugacccgcgacaucgccuccaccgacacgugcuucgccaacaagcacgccgacuucgacaccugguucagccagcggggcggcuccuacaccaacgacaaggccugcccccugaucgcggccgucaucacccgcgaggugggguucgugguccccggccugcccggcaccauccuccggacgaccaacggggacuuccugcacuuccugccccgcguguucagcgccgugggcaacaucugcuacaccccguccaagcucaucgaguacaccgacuucgccacgagcgcgugcguccuggccgccgagugcaccaucuucaaggacgccuccgggaagcccgugcccuacugcuacgacaccaacgugcuggagggcagcgucgccuacgagucccuccggcccgacacccgcuacgugcugauggacgggagcaucauccaguucccgaacacguaccuggagggcuccgugcgggucgugaccaccuucgacagcgaguacugccgccacgggaccugcgagcgguccgaggcgggggugugcgucagcacguccggccgcugggugcucaacaacgacuucuaccggagccugcccgggguguucugcggcgucgacgccgugaaccugcucaccaacauguucacgccccugauccagcccaucggcgcccuggacaucuccgccagcaucgucgccgggggcaucguggcgaucguggugaccugccucgccuacuacuucaugcgcuuccggcgcgccuucggggaguacagccacgucguggccuucaacacccugcuguuccucauguccuucaccguccugugccugaccccgguguacagcuuccuccccggcguguacuccgucaucuaccuguaccugaccuucuaccucacgaacgacgugagcuuccuggcccacauccaguggauggugauguucacgccccugguccccuucuggaucaccaucgcguacaucaucugcaucuccaccaagcacuucuacugguucuucagcaacuaccucaagcggcgcgugguguucaacggggucuccuucagcaccuucgaggaggccgcccugugcaccuuccugcucaacaaggagauguaccugaagcugcgguccgacgugcuccugccgcugacccaguacaaccgcuaccucgcccuguacaacaaguacaaguacuucagcggcgccauggacaccacguccuaccgggaggcggccugcugccaccuggccaaggcccucaacgacuucagcaacuccggcagcgacgugcuguaccagccgccccagaccuccaucaccagcgcgguccugcagugaggacuagucccuguucccagagcccacuuuuuuuucuuuuuuugaaauaaaauagccugucuuucagaucucaaaggcucuuuucagagccaccaaaaaaaaaaaaaaaaaaaaaaaaaaaaaaaaaaaaaaaaaaaaaaaaaaaaaaaaaaaaaaaaaaaaaaaaaaaaaaaaaaaaaaaaaaaaaaaaaaaaa

SEQ ID NO: 20263 - RNA, 1778 nt, Artificial Sequence
  SARS-CoV-2__MT704121.1__non-structural protein 4 (NSP4) mRNA gc
aggagagucccgcagucggcguccagcggcucugcuuguucgugugugugucguugcaggccuuauucaagcuuaccaugaagaucgugaacaacuggcugaagcagcucaucaaggucacccugguguuccuguucguggccgccaucuucuaccucaucacccccguccacgugaugagcaagcacacggacuucuccagcgagaucaucggcuacaaggcgaucgacgggggcgugacccgcgacaucgccuccaccgacacgugcuucgccaacaagcacgccgacuucgacaccugguucagccagcggggcggcuccuacaccaacgacaaggccugcccccugaucgcggccgucaucacccgcgaggugggguucgugguccccggccugcccggcaccauccuccggacgaccaacggggacuuccugcacuuccugccccgcguguucagcgccgugggcaacaucugcuacaccccguccaagcucaucgaguacaccgacuucgccacgagcgcgugcguccuggccgccgagugcaccaucuucaaggacgccuccgggaagcccgugcccuacugcuacgacaccaacgugcuggagggcagcgucgccuacgagucccuccggcccgacacccgcuacgugcugauggacgggagcaucauccaguucccgaacacguacuucgagggcuccgugcgggucgugaccaccuucgacagcgaguacugccgccacgggaccugcgagcgguccgaggcgggggugugcgucagcacguccggccgcugggugcugaacaacgacuacuaccggagccuccccgggguguucugcggcgucgacgccgugaaccugcugaccaacauguucacgccccucauccagcccaucggcgcccuggacaucuccgccagcaucgucgccgggggcaucguggcgaucguggugaccugccuggccuacuacuucaugcgcuuccggcgcgccuucggggaguacagccacgucguggccuucaacacccuccuguuccugauguccuucaccguccucugccugaccccgguguacagcuuccugcccggcguguacuccgucaucuaccucuaccugaccuucuaccugacgaacgacgugagcuuccucgcccacauccaguggauggugauguucacgccccugguccccuucuggaucaccaucgcguacaucaucugcaucuccaccaagcacuucuacugguucuucagcaacuaccugaagcggcgcgugguguucaacggggucuccuucagcaccuucgaggaggccgcccucugcaccuuccugcugaacaaggagauguaccucaagcugcgguccgacgugcugcucccgcugacccaguacaaccgcuaccuggcccucuacaacaaguacaaguacuucagcggcgccauggacaccacguccuaccgggaggcggccugcugccaccuggccaaggcccugaacgacuucagcaacuccggcagcgacgugcucuaccagccgccccagaccuccaucaccagcgcgguccugcagugaggacuagucccuguucccagagcccacuuuuuuuucuuuuuuugaaauaaaauagccugucuuucagaucucaaaggcucuuuucagagccaccaaaaaaaaaaaaaaaaaaaaaaaaaaaaaaaaaaaaaaaaaaaaaaaaaaaaaaaaaaaaaaaaaaaaaaaaaaaaaaaaaaaaaaaaaaaaaaaaaaaaa

SEQ ID NO: 20264 - RNA, 1778 nt, Artificial Sequence
  SARS-CoV-2__MT704136.1__non-structural protein 4 (NSP4) mRNA gc
aggagagucccgcagucggcguccagcggcucugcuuguucgugugugugucguugcaggccuuauucaagcuuaccaugaagaucgugaacaacuggcugaagcagcucaucaaggucacccugguguuccuguucguggccgccaucuucuaccucaucacccccguccacgugaugagcaagcacacggacuucuccagcgagaucaucggcuacaaggcgaucgacgggggcgugacccgcgacaucgccuccaccgacacgugcuucgccaacaagcacgccgacuucgacaccugguucagccagcggggcggcuccuacaccaacgacaaggccugcccccugaucgcggccgucaucacccgcgaggugggguucgugguccccggccugcccggcaccauccuccggacgaccaacggggacuuccugcacuuccugccccgcguguucagcgccgugggcaacaucugcuacaccccguccaagcucaucgaguacaccgacuucgccacgagcgcgugcguccuggccgccgagugcaccaucuucaaggacgccuccgggaagcccgugcccuacugcuacgacaccaacgugcuggagggcagcgucgccuacgagucccuccggcccgacacccgcuacgugcugauggacgggagcaucauccaguucccgaacacguaccuggagggcuccgugcgggucgugaccaccuucgacagcgaguacugccgccacgggaccugcgagcgguccgaggcgggggugugcgucagcacguccggccgcugggugcucaacaacgacuacuaccggagccugcccgggguguucugcggcgucgacgccgugaaccugcucaccaacauguucacgccccugauccagcccaucggcgcccuggacaucuccgccagcaucgucgccgggggcaucguggcgaucguggugaccugccucgccuacuacuucaugcgcuuccggcgcgccuucggggaguacagccacgucguggccuucaacacccugcuguucuucauguccuucaccguccucugccugaccccgguguacagcuuccugcccggcguguacuccgucaucuaccucuaccugaccuucuaccugacgaacgacgugagcuuccucgcccacauccaguggauggugauguucacgccccugguccccuucuggaucaccaucgcguacaucaucugcaucuccaccaagcacuucuacugguucuucagcaacuaccugaagcggcgcgugguguucaacggggucuccuucagcaccuucgaggaggccgcccucugcaccuuccugcugaacaaggagauguaccucaagcugcgguccgacgugcugcucccgcugacccaguacaaccgcuaccuggcccucuacaacaaguacaaguacuucagcggcgccauggacaccacguccuaccgggaggcggccugcugccaccuggccaaggcccugaacgacuucagcaacuccggcagcgacgugcucuaccagccgccccagaccuccaucaccagcgcgguccugcagugaggacuagucccuguucccagagcccacuuuuuuuucuuuuuuugaaauaaaauagccugucuuucagaucucaaaggcucuuuucagagccaccaaaaaaaaaaaaaaaaaaaaaaaaaaaaaaaaaaaaaaaaaaaaaaaaaaaaaaaaaaaaaaaaaaaaaaaaaaaaaaaaaaaaaaaaaaaaaaaaaaaaa

SEQ ID NO: 20265 - RNA, 1778 nt, Artificial Sequence
  SARS-CoV-2__MT683386.1__non-structural protein 4 (NSP4) mRNA gc
aggagagucccgcagucggcguccagcggcucugcuuguucgugugugugucguugcaggccuuauucaagcuuaccaugaagaucgugaacaacuggcugaagcagcucaucaaggucacccugguguuccuguucguggccgccaucuucuaccucaucacccccguccacgugaugagcaagcacacggacuucuccagcgagaucaucggcuacaaggcgaucgacgggggcgugacccgcgacaucgccuccaccgacacgugcuucgccaacaagcacgccgacuucgacaccugguucagccagcggggcggcuccuacaccaacgacaaggccugcccccugaucgcggccgucaucacccgcgaggugggguucgugguccccggccugcccggcaccauccuccggacgaccaacggggacuuccugcacuuccugccccgcguguucagcgccgugggcaacaucugcuacaccccguccaagcucaucgaguacaccgacuucgccacgagcgcgugcguccuggccgccgagugcaccaucuucaaggacgccuccgggaagcccgugcccuacugcuacgacaccaacgugcuggagggcagcgucgccuacgagucccuccggcccgacacccgcuacgugcugauggacgggagcaucauccaguucccgaacacguaccuggagggcuccgugcgggucgugaccaccuucgacagcgaguacugccgccacgggaccugcgagcgguccgaggcgggggugugcgucagcacguccggccgcugggugcucaacaacgacuacuaccggagccugcccgggguguucugcggcgucgacgccgugaaccugcucaccaacauguucacgccccugauccagcccaucggcgcccuggacaucuccgccagcaucgucgccgggggcaucguggcgauccucgugaccugccuggccuacuacuucaugcgcuuccggcgcgccuucggggaguacagccacgucguggccuucaacacccuccuguuccugauguccuucaccgugcugugccucaccccggucuacagcuuccugcccggcguguacuccgugaucuaccuguaccucaccuucuaccugacgaacgacgucagcuuccuggcccacauccaguggauggugauguucacgccccucgugcccuucuggaucaccaucgcguacaucaucugcaucuccaccaagcacuucuacugguucuucagcaacuaccugaagcggcgcgucguguucaacgggguguccuucagcaccuucgaggaggccgcccugugcaccuuccuccugaacaaggagauguaccugaagcuccgguccgacguccugcugccgcucacccaguacaaccgcuaccuggcccuguacaacaaguacaaguacuucagcggcgccauggacaccacguccuaccgggaggcggccugcugccaccucgccaaggcccugaacgacuucagcaacuccggcagcgacgugcuguaccagccgccccagaccuccaucaccagcgcggugcugcagugaggacuagucccuguucccagagcccacuuuuuuuucuuuuuuugaaauaaaauagccugucuuucagaucucaaaggcucuuuucagagccaccaaaaaaaaaaaaaaaaaaaaaaaaaaaaaaaaaaaaaaaaaaaaaaaaaaaaaaaaaaaaaaaaaaaaaaaaaaaaaaaaaaaaaaaaaaaaaaaaaaaaa

SEQ ID NO: 20266 - RNA, 1778 nt, Artificial Sequence
  SARS-CoV-2__MT627391.1__non-structural protein 4 (NSP4) mRNA gc
aggagagucccgcagucggcguccagcggcucugcuuguucgugugugugucguugcaggccuuauucaagcuuaccaugaagaucgugaacaacuggcugaagcagcucaucaaggucacccugguguuccuguucguggccgccaucuucuaccucaucacccccguccacgugaugagcaagcacacggacuucuccagcgagaucaucggcuacaaggcgaucgacgggggcgugacccgcgacaucgccuccaccgacacgugcuucgccaacaagcacgccgacuucgacaccugguucagccagcggggcggcuccuacaccaacgacaaggccugcccccugaucgcggccgucaucacccgcgaggugggguucgugguccccggccugcccggcaccauccuccggacgaccaacggggacuuccugcacuuccugccccgcguguucagcgccgugggcaacaucugcuacaccccguccaagcucaucgaguacaccgacuucgccacgagcgcgugcguccuggccgccgagugcaccaucuucaaggacgccuccgggaagcccgugcccuacugcuacgacaccaacgugcuggagggcagcgucgccuacgagucccuccggcccgacacccgcuacgugcugauggacgggagcaucauccaguucccgaacacguaccuggagggcuccgugcgggucgugaccaccuucgacagcgaguacugccgccacgggaccugcgagcgguccgaggcgggggugugcgucagcacguccggccgcugggugcucaacaacgacuacuaccggagccugcccgggguguucugcggcgucgacgccgugaaccugcucaccaacauguucacgccccugauccagcccaucggcgcccuggacaucuccgccagcaucgucgccgggggcaucguggcgaucguggugaccugccucgccuacuacuucaugcgcuuccggcgcgccuucggggccuacagccacgucguggccuucaacacccugcuguuccucauguccuucaccguccugugccugaccccgguguacagcuuccuccccggcguguacuccgucaucuaccuguaccugaccuucuaccucacgaacgacgugagcuuccuggcgcacauccaguggauggugauguucacgccccugguccccuucuggaucaccaucgccuacaucaucugcaucuccaccaagcacuucuacugguucuucagcaacuaccucaagcggcgcgugguguucaacggggucuccuucagcaccuucgaggaggccgcccugugcaccuuccugcucaacaaggagauguaccugaagcugcgguccgacgugcuccugccgcugacccaguacaaccgcuaccucgcccuguacaacaaguacaaguacuucagcggcgcgauggacaccacguccuaccgggaggccgccugcugccaccuggccaaggcgcucaacgacuucagcaacuccggcagcgacgugcuguaccagccgccccagaccuccaucaccagcgccguccugcagugaggacuagucccuguucccagagcccacuuuuuuuucuuuuuuugaaauaaaauagccugucuuucagaucucaaaggcucuuuucagagccaccaaaaaaaaaaaaaaaaaaaaaaaaaaaaaaaaaaaaaaaaaaaaaaaaaaaaaaaaaaaaaaaaaaaaaaaaaaaaaaaaaaaaaaaaaaaaaaaaaaaaa

SEQ ID NO: 20267 - RNA, 1778 nt, Artificial Sequence
  SARS-CoV-2__MT678839.1__non-structural protein 4 (NSP4) mRNA gc
aggagagucccgcagucggcguccagcggcucugcuuguucgugugugugucguugcaggccuuauucaagcuuaccaugaagaucgugaacaacuggcugaagcagcucaucaaggucacccugguguuccuguucguggccgccaucuucuaccucaucacccccguccacgugaugagcaagcacacggacuucuccagcgagaucaucggcuacaaggcgaucgacgggggcgugacccgcgacaucgccuccaccgacacgugcuucgccaacaagcacgccgacuucgacaccugguucagccagcggggcggcuccuacaccaacgacaaggccugcccccugaucgcggccgucaucacccgcgaggugggguucgugguccccggccugcccagcaccauccuccggacgaccaacggcgacuuccugcacuuccugccccgcguguucuccgccguggggaacaucugcuacaccccgagcaagcucaucgaguacaccgacuucgccacguccgcgugcguccuggccgccgagugcaccaucuucaaggacgccagcggcaagcccgugcccuacugcuacgacaccaacgugcuggagggguccgucgccuacgagagccuccggcccgacacccgcuacgugcugauggacggcuccaucauccaguucccgaacacguaccuggaggggcccgugcgggucgugaccaccuucgacagcgaguacugcggccacgggaccugcgagcgcuccgaggcgggggugugcgucagcacguccggccggugggugcucaacaacgacuacuaccgcagccugcccgggguguucugcggcgucgacgccgugaaccugcucaccaacauguucacgccccugauccagccgaucggcgcccuggacaucuccgccagcaucgucgccgggggcaucguggcgaucguggugaccugccucgccuacuacuucaugcgguuccgccgggccuucggggaguacagccacgucguggccuucaacacccugcuguuccucauguccuucaccguccugugccugacccccguguacagcuuccuccccggcguguacuccgucaucuaccuguaccugaccuucuaccucacgaacgacgugagcuuccuggcccacauccaguggauggugauguucacgccccuggucccguucuggaucaccaucgcguacaucaucugcaucuccaccaagcacuucuacugguucuucagcaacuaccucaagcgccgggugguguucaacggggucuccuucagcaccuucgaggaggccgcccugugcaccuuccugcucaacaaggagauguaccugaagcugcgcuccgacgugcuccugccccugacccaguacaaccgguaccucgcccuguacaacaaguacaaguacuucagcggcgccauggacaccacguccuaccgcgaggcggccugcugccaccuggccaaggcccucaacgacuucagcaacuccggcagcgacgugcuguaccagccgccccagaccuccaucaccagcgcgguccugcagugaggacuagucccuguucccagagcccacuuuuuuuucuuuuuuugaaauaaaauagccugucuuucagaucucaaaggcucuuuucagagccaccaaaaaaaaaaaaaaaaaaaaaaaaaaaaaaaaaaaaaaaaaaaaaaaaaaaaaaaaaaaaaaaaaaaaaaaaaaaaaaaaaaaaaaaaaaaaaaaaaaaaa

SEQ ID NO: 20268 - RNA, 1778 nt, Artificial Sequence
  SARS-CoV-2__MT611440.1__non-structural protein 4 (NSP4) mRNA gc
aggagagucccgcagucggcguccagcggcucugcuuguucgugugugugucguugcaggccuuauucaagcuuaccaugaagaucgugaacaacuggcugaagcagcucaucaaggucacccugguguuccuguucguggccgccaucuucuaccucaucacccccguccacgugaugagcaagcacacggacuucuccagcgagaucaucggcuacaaggcgaucgacgggggcgugacccgcgacaucgccuccaccgacacgugcuucgccaacaagcacgccgacuucgacaccugguucagccagcggggcggcuccuacaccaacgacaaggccugcccccugaucgcggccgucaucacccgcgaggugggguucgugguccccggccugcccggcaccauccuccggacgaccaacggggacuuccugcacuuccugccccgcguguucagcgccgugggcaacaucugcuacaccccguccaagcucaucgaguacaccgacuucgccacgagcgcgugcguccuggccgccgagugcaccaucuucaaggacgccuccgggaagcccgugcccuacugcuacgacaccaacgugcuggagggcagcgucgccuacgagucccuccggcccgacacccgcuacgugcugauggacgggagcaucauccaguucccgaacacguaccuggagggcuccgugcgggucgugaccaccuucgacagcgaguacugccgccacgggaccugcgagcgguccgaggcgggggugugcgucagcacguccggccgcugggugcucaacaacgacuacuaccggagccugcccgggguguucugcggcgucgacgccgugaaccugcucaccaacauguucacgccccugauccagcccaucggcgcccuggacaucuccgccagcaucgucgccgggggcaucguggcgaucguggugaccugccucgccuacuacuucaugcgcuuccggcgcgccuucggggaguacagccacgucguggccuucaacacccugcuguuccucauguccuucaccguccugugccugaccccgguguacagcuuccuccccggcguguacuccgucaucuaccuguaccugaccuucuaccucacgaacgacgugagcuuccuggcccacauccaguggauggugauguucacgccccugguccccuucuggaucaccaucgcguacaucaucugcaucuccaccaagcacuucuacugguucuucagcaacuaccucaagcggcgcgugguguucaacggggucuccuucagcaccuucgaggaggccgcccugugcaccuuccugcucaacaaggagauguaccugaagcugcgguccgacgugcuccugccgcugacccaguacaaccgcuaccucgcccuguacaacaaguacaaguacuucagcggcgccauggacaccacguccuaccgggaggcggccugcugccaccuggccaaggcccucaacgacuucagcaacuccggcagcgacgugcuguaccagccgccccagaccuccaucaccagcgcgauccugcagugaggacuagucccuguucccagagcccacuuuuuuuucuuuuuuugaaauaaaauagccugucuuucagaucucaaaggcucuuuucagagccaccaaaaaaaaaaaaaaaaaaaaaaaaaaaaaaaaaaaaaaaaaaaaaaaaaaaaaaaaaaaaaaaaaaaaaaaaaaaaaaaaaaaaaaaaaaaaaaaaaaaaa

SEQ ID NO: 20269 - RNA, 1778 nt, Artificial Sequence
  SARS-CoV-2__MT648830.1__non-structural protein 4 (NSP4) mRNA gc
aggagagucccgcagucggcguccagcggcucugcuuguucgugugugugucguugcaggccuuauucaagcuuaccaugaagaucgugaacaacuggcugaagcagcucaucaaggucacccugguguuccuguucguggccgccaucuucuaccucaucacccccguccacgugaugagcaagcacacggacuucuccagcgagaucaucggcuacaaggcgaucgacgggggcgugacccgcgacaucgccuccaccgacacgugcuucgccaacaagcacgccgacuucgacaccugguucagccagcggggcggcuccuacaccaacgacaaggccugcccccugaucgcggccgucaucacccgcgaggugggguucgugguccccggccugcccggcaccauccuccggacgaccaacggggacuuccugcacuuccugccccgcguguucagcgccgugggcaacaucugcuacaccccguccaagcucaucgaguacaccgacuucgccacgagcgcgugcguccuggccgccgagugcaccaucuucaaggacgccuccgggaagcccgugcccuacugcuacgacaccaacgugcuggagggcagcgucgccuacgagucccuccggcccgacacccgcuacgugcugauggacgggagcaucauccaguucccgaacacguaccuggagggcuccgugcgggucgugaccaccuucgacagcgaguacugccgccacgggaccugcgagcgguccgaggcgggggugugcgucagcacguccggccgcugggugcucaacaacgacuacuaccggagccugcccgggguguucugcggcgucgacgccgugaaccugcucaccaacauguucacgccccugauccagcccaucggcgcccuggacaucuccgccagcaucgucgccgggggcaucguggcgaucguggugaccugccucgccuacuacuucaugcgcuuccggcgcgccuucggggaguacagccacgucguggccuucaacacccugcuguuccucauguccuucaccguccugugccugaccccgguguacagcuuccuccccggcguguacuccgucaucuaccuguaccugaccuucuaccucacgaacgacgugagcuuccuggcccacauccaguggauggugauguucacgccccugguccccuucuggaucaccaucgcguacaucaucugcaucuccaccaagcacuucuacugguucuucagcaacuaccucaagcggcgcgugguguucaacggggucuccuucagcaccuucgaggaggccgcccugugcaccuuccugcucaacaaggagauguaccugaagcugcgguccgacgugcuccugccgcugacccaguacaaccgcuaccucgcccuguacaacaaguacaaguacuucagcggcgccauggacaccacguccuaccgggaggcggccugcugccaccugagcaaggcccucaacgacuucuccaacagcggcuccgacgugcuguaccagccgccccagaccagcaucaccuccgccguccugcagugaggacuagucccuguucccagagcccacuuuuuuuucuuuuuuugaaauaaaauagccugucuuucagaucucaaaggcucuuuucagagccaccaaaaaaaaaaaaaaaaaaaaaaaaaaaaaaaaaaaaaaaaaaaaaaaaaaaaaaaaaaaaaaaaaaaaaaaaaaaaaaaaaaaaaaaaaaaaaaaaaaaaa

SEQ ID NO: 20270 - RNA, 1778 nt, Artificial Sequence
  SARS-CoV-2__MT641509.1__non-structural protein 4 (NSP4) mRNA gc
aggagagucccgcagucggcguccagcggcucugcuuguucgugugugugucguugcaggccuuauucaagcuuaccaugaagaucgugaacaacuggcugaagcagcucaucaaggucacccugguguuccuguucguggccgccaucuucuaccucaucacccccguccacgugaugagcaagcacacggacuucuccagcgagaucaucggcuacaaggcgaucgacgggggcgugacccgcgacaucgccuccaccgacacgugcuucgccaacaagcacgccgacuucgacaccugguucagccagcggggcggcuccuacaccaacgacaaggccugcccccugaucgcggccgucaucacccgcgaggugggguucgugguccccggccugcccggcaccauccuccggacgaccaacggggacuuccugcacuuccugccccgcguguucagcgccgugggcaacaucugcuacaccccguccaagcucaucgaguacaccgacuucgccacgagcgcgugcguccuggccgccgagugcaccaucuucaaggacgccuccgggaagcccgugcccuacugcuacgacaccaacgugcuggagggcagcgucgccuacgagucccuccggcccgacacccgcuacgugcugauggacgggagcaucauccaguucccgaacacguaccuggagggcuccgugcgggucgugaccaccuucgacagcgaguacugccgccacgggaccugcgagcgguccgaggcgggggugugcgucagcacguccggccgcugggugcucaacaacgacuacuaccggagccugcccgggguguucugcggcgucgacgccgugaaccugcucaucaacauguucacgccccugauccagcccaucggcgcccuggacaucuccgccagcaucgucgccgggggcaucguggcgaucguggugaccugccucgccuacuacuucaugcgcuuccggcgcgccuucggggaguacagccacgucguggccuucaacacccugcuguuccucauguccuucaccguccugugccugaccccgguguacagcuuccuccccggcguguacuccgucaucuaccuguaccugaccuucuaccucaccaacgacgugagcuuccuggcccacauccaguggauggugauguucacgccccugguccccuucuggaucaccaucgcguacaucaucugcaucuccaccaagcacuucuacugguucuucagcaacuaccucaagcggcgcgugguguucaacggggucuccuucagcaccuucgaggaggccgcccugugcacguuccugcucaacaaggagauguaccugaagcugcgguccgacgugcuccugccgcugacccaguacaaccgcuaccucgcccuguacaacaaguacaaguacuucagcggcgccauggacaccaccuccuaccgggaggcggccugcugccaccuggccaaggcccucaacgacuucagcaacuccggcagcgacgugcuguaccagccgccccagacguccaucaccagcgcgguccugcagugaggacuagucccuguucccagagcccacuuuuuuuucuuuuuuugaaauaaaauagccugucuuucagaucucaaaggcucuuuucagagccaccaaaaaaaaaaaaaaaaaaaaaaaaaaaaaaaaaaaaaaaaaaaaaaaaaaaaaaaaaaaaaaaaaaaaaaaaaaaaaaaaaaaaaaaaaaaaaaaaaaaaa

SEQ ID NO: 20271 - RNA, 1778 nt, Artificial Sequence
  SARS-CoV-2__MT641646.1__non-structural protein 4 (NSP4) mRNA gc
aggagagucccgcagucggcguccagcggcucugcuuguucgugugugugucguugcaggccuuauucaagcuuaccaugaagaucgugaacaacuggcugaagcagcucaucaaggucacccugguguuccuguucguggccgccaucuucuaccucaucacccccguccacgugaugagcaagcacacggacuucuccagcgagaucaucggcuacaaggcgaucgacgggggcgugacccgcgacaucgccuccaccgacacgugcuucgccaacaagcacgccgacuucgacaccugguucagccagcggggcggcuccuacaccaacgacaaggccugcccccugaucgcggccgucaucacccgcgaggugggguucgugguccccggccugcccggcaccauccuccggacgaccaacggggacuuccugcacuuccugccccgcguguucagcgccgugggcaacaucugcuacaccccguccaagcucaucgaguacaccgacuucgccacgagcgcgugcguccuggccgccgagugcaccaucuucaaggacgccuccgggaagcccgugcccuacugcuacgacaccaacgugcuggagggcagcgucgccuacgagucccuccggcccgacacccgcuacgugcugauggacgggagcaucauccaguucccgaacacguaccuggagggcuccgugcgggucgugaccaccuucgacagcgaguacugccgccacgggaccugcgagcgguccgaggcgggggugugcgucagcacguccggccgcugggugcucaacaacgacuacuaccggagccugcccgggguguucugcggcgucgacguggucaaccugcucaccaacauguucacgccccugauccagcccaucggcgcccuggacaucuccgccagcaucguggccgggggcaucguggccaucgucgugaccugccucgcguacuacuucaugcgcuuccggcgcgccuucggggaguacagccacguggucgccuucaacacccugcuguuccucauguccuucaccgugcugugccugaccccgguguacagcuuccuccccggcgucuacuccgugaucuaccuguaccugaccuucuaccucacgaacgacgugagcuuccuggcccacauccaguggauggucauguucacgccccuggugcccuucuggaucaccaucgccuacaucaucugcaucuccaccaagcacuucuacugguucuucagcaacuaccucaagcggcgcguggucuucaacgggguguccuucagcaccuucgaggaggcggcccugugcaccuuccugcucaacaaggagauguaccugaagcugcgguccgacgugcuccugccgcugacccaguacaaccgcuaccucgcccuguacaacaaguacaaguacuucagcggcgccauggacaccacguccuaccgggaggccgcgugcugccaccuggccaaggcccucaacgacuucagcaacuccggcagcgacguccuguaccagccgccccagaccuccaucaccagcgccgugcugcagugaggacuagucccuguucccagagcccacuuuuuuuucuuuuuuugaaauaaaauagccugucuuucagaucucaaaggcucuuuucagagccaccaaaaaaaaaaaaaaaaaaaaaaaaaaaaaaaaaaaaaaaaaaaaaaaaaaaaaaaaaaaaaaaaaaaaaaaaaaaaaaaaaaaaaaaaaaaaaaaaaaaaa

SEQ ID NO: 20272 - RNA, 1778 nt, Artificial Sequence
  SARS-CoV-2__MT641677.1__non-structural protein 4 (NSP4) mRNA gc
aggagagucccgcagucggcguccagcggcucugcuuguucgugugugugucguugcaggccuuauucaagcuuaccaugaagaucgugaacaacuggcugaagcagcucaucaaggucacccugguguuccuguucguggccgccaucuucuaccucaucacccccguccacgugaugagcaagcacacggacuucuccagcgagaucaucggcuacaaggcgaucgacgggggcgugacccgcgacaucgccuccaccgacacgugcuucgccaacaagcacgccgacuucgacaccugguucagccagcggggcggcuccuacaccaacgacaaggccugcccccugaucgcggccgucaucacccgcgaggugggguucgugguccccggccugcccggcaccauccuccggacgaccaacggggacuuccugcacuuccugccccgcguguucagcgccgugggcaacaucugcuacaccccguccaagcucaucgaguacaccgacuucgccacgagcgcgugcguccuggccgccgagugcaccaucuucaaggacgccuccgggaagcccgugcccuacugcuacgacaccaacgugcuggagggcagcgucgccuacgagucccuccggcccgacacccgcuacgugcugauggacgggagcaucauccaguucccgaacacguaccuggagggcuccgugcgggucgugaccaccuucgacagcgaguacugccgccacgggaccugcgagcgguccgaggcgggggugugcgucagcacguccggccgcugggugcucaacaacgacuacuaccggagccugcccgggguguucugcggcgucgacgccgugaaccugcucaccaacauguucacgccccugauccagcccaucggcgcccuggacaucuccgccagcaucgucgccgggggcaucguggcgaucguggugaccugccucgccuacuacuucaugcgcuuccggcgcgccuucggggaguacagccacgucguggccuucaacacccugcuguuccucauguccuucaccguccugugccugaccccgguguacagcuuccuccccggcguguacuccgucaucuaccuguaccugaccuucuaccucacgaacgacgugagcuuccuggcccacauccaguggauggugauguucacgccccugguccccuucuggaucaccaucgcguacaucaucugcaucuccaccaagcacuucuacugguucuucagcaacuaccucaagcggcgcgugguguucaacggggucuccuucagcaccuucgaggaggccgcccugugcaccuuccugcucaacaaggagauguaccugaagcugcgguccgacgugcuccugccgcugacccaguacaaccgcuaccucgcccuguacaacaaguacaaguacuucagcggcgccauggacaccacguccuaccgggaggcggccugcugccaccugaccaaggcccucaacgacuucagcaacuccggcagcgacgugcuguaccagccgccccagaccuccaucaccagcgccguccugcagugaggacuagucccuguucccagagcccacuuuuuuuucuuuuuuugaaauaaaauagccugucuuucagaucucaaaggcucuuuucagagccaccaaaaaaaaaaaaaaaaaaaaaaaaaaaaaaaaaaaaaaaaaaaaaaaaaaaaaaaaaaaaaaaaaaaaaaaaaaaaaaaaaaaaaaaaaaaaaaaaaaaaa

SEQ ID NO: 20273 - RNA, 1778 nt, Artificial Sequence
  SARS-CoV-2__MT641679.1__non-structural protein 4 (NSP4) mRNA gc
aggagagucccgcagucggcguccagcggcucugcuuguucgugugugugucguugcaggccuuauucaagcuuaccaugaagaucgugaacaacuggcugaagcagcucaucaaggucacccugguguuccuguucguggccgccaucuucuaccucaucacccccguccacgugaugagcaagcacacggacuucuccagcgagaucaucggcuacaaggcgaucgacgggggcgugacccgcgacaucgccuccaccgacacgugcuucgccaacaagcacgccgacuucgacaccugguucagccagcgggucggguccuacaccaacgacaaggccugcccccugaucgcggccgugaucacccgcgaggugggcuucgucgugcccgggcugcccggcaccauccuccggacgaccaacggcgacuuccugcacuuccugccccgcguguucagcgccgucgggaacaucugcuacaccccguccaagcucaucgaguacaccgacuucgccacgagcgcgugcgugcuggccgccgagugcaccaucuucaaggacgccuccggcaagcccgugcccuacugcuacgacaccaacguccuggaggggagcguggccuacgagucccuccggcccgacacccgcuacgugcugauggacggcagcaucauccaguucccgaacacguaccuggagggguccguccggguggugaccaccuucgacagcgaguacugccgccacgggaccugcgagcgguccgaggcgggcgucugcgugagcacguccggccgcugggugcucaacaacgacuacuaccggagccugcccggcgucuucugcgggguggacgccgucaaccugcucaccaacauguucacgccccugauccagcccaucggcgcccuggacaucuccgccagcaucguggccggcgggaucguggcgaucgucgugaccugccucgccuacuacuucaugcgcuuccggcgcgccuucggcgaguacagccacguggucgccuucaacacccugcuguuccucauguccuucaccgugcugugccugaccccgguguacagcuuccuccccggggucuacuccgugaucuaccuguaccugaccuucuaccucacgaacgacgugagcuuccuggcccacauccaguggauggucauguucacgccccuggugcccuucuggaucaccaucgcguacaucaucugcaucuccaccaagcacuucuacugguucuucagcaacuaccucaagcggcgcguggucuucaacggcguguccuucagcaccuucgaggaggccgcccugugcaccuuccugcucaacaaggagauguaccugaagcugcgguccgacgugcuccugccgcugacccaguacaaccgcuaccucgcccuguacaacaaguacaaguacuucagcggggccauggacaccacguccuaccgggaggcggccugcugccaccuggccaaggcccucaacgacuucagcaacuccggcagcgacguccuguaccagccgccccagaccuccaucaccagcgcggugcugcagugaggacuagucccuguucccagagcccacuuuuuuuucuuuuuuugaaauaaaauagccugucuuucagaucucaaaggcucuuuucagagccaccaaaaaaaaaaaaaaaaaaaaaaaaaaaaaaaaaaaaaaaaaaaaaaaaaaaaaaaaaaaaaaaaaaaaaaaaaaaaaaaaaaaaaaaaaaaaaaaaaaaaa

SEQ ID NO: 20274 - RNA, 1778 nt, Artificial Sequence
  SARS-CoV-2__MT641710.1__non-structural protein 4 (NSP4) mRNA gc
aggagagucccgcagucggcguccagcggcucugcuuguucgugugugugucguugcaggccuuauucaagcuuaccaugaagaucgugaacaacuggcugaagcagcucaucaaggucacccugguguuccuguucguggccgccaucuucuaccucaucacccccguccacgugaugagcaagcacacggacuucuccagcgagaucaucggcuacaaggcgaucgacgggggcgugacccgcgacaucgccuccaccgacacgugcuucgccaacaagcacgccgacuucgacaccugguucagccagcggggcggcuccuacaccaacgacaaggccugcccccugaucgcggccgucaucacccgcgaggugggguucgugguccccggccugcccggcaccauccuccggacgaccaacggggacuuccugcacuuccugccccgcguguucagcgccgugggcaacaucugcuacaccccguccaagcucaucgaguacaccgacuucgccacgagcgcgugcguccuggccgccgagugcaccaucuucaaggacgccuccgggaagcccgugcccuacugcuacgacaccaacgugcuggagggcagcgucgccuacgagucccuccggcccgacacccgcuacgugcugauggacgggagcaucauccaguucccgaacacguaccuggagggcuccgugcgggucgugaccaccuucgacagcgaguacugccgccacgggaccugcgagcgguccgaggcgggggugugcgucagcacguccggccgcugggugcucaacaacgacuacuaccggagccugcccgggguguucugcggcgucgacgccgugaaccugcucaccaacauguucacgccccugauccagcccaucggcgcccuggacaucuccgccagcaucgucgccgggggcaucguggcgaucguggugaccugccucgccuacuacuucaugcgcuuccggcgcgccuucggggaguacagcuacgucguggccuucaacacccugcuguuccucauguccuucaccguccugugccugaccccgguguacagcuuccuccccggcguguacuccgucaucuaccuguaccugaccuucuaccucacgaacgacgugagcuuccuggcccacauccaguggauggugauguucacgccccugguccccuucuggaucaccaucgcguacaucaucugcaucuccaccaagcacuucuacugguucuucagcaacuaccucaagcggcgcgugguguucaacggggucuccuucagcaccuucgaggaggccgcccugugcaccuuccugcucaacaaggagauguaccugaagcugcgguccgacgugcuccugccgcugacccaguacaaccgcuaccucgcccuguacaacaaguacaaguacuucagcggcgccauggacaccacguccuaccgggaggcggccugcugccaccuggccaaggcccucaacgacuucagcaacuccggcagcgacgugcuguaccagccgccccagaccuccaucaccagcgcgguccugcagugaggacuagucccuguucccagagcccacuuuuuuuucuuuuuuugaaauaaaauagccugucuuucagaucucaaaggcucuuuucagagccaccaaaaaaaaaaaaaaaaaaaaaaaaaaaaaaaaaaaaaaaaaaaaaaaaaaaaaaaaaaaaaaaaaaaaaaaaaaaaaaaaaaaaaaaaaaaaaaaaaaaaa

SEQ ID NO: 20275 - RNA, 1778 nt, Artificial Sequence
  SARS-CoV-2__MT642243.1__non-structural protein 4 (NSP4) mRNA gc
aggagagucccgcagucggcguccagcggcucugcuuguucgugugugugucguugcaggccuuauucaagcuuaccaugaagaucgugaacaacuggcugaagcagcucaucaaggucauccugguguuccuguucguggccgccaucuucuaccucaucacccccguccacgugaugagcaagcacaccgacuucuccagcgagaucaucggcuacaaggcgaucgacgggggcgugacgcgcgacaucgccuccaccgacacgugcuucgccaacaagcacgccgacuucgacaccugguucagccagcggggcggcuccuacaccaacgacaaggccugcccccugaucgcggccgucaucacccgcgaggugggguucgugguccccggccugcccggcaccauccuccggaccacgaacggggacuuccugcacuuccugccccgcguguucagcgccgugggcaacaucugcuacaccccguccaagcucaucgaguacaccgacuucgccaccagcgcgugcguccuggccgccgagugcacgaucuucaaggacgccuccgggaagcccgugcccuacugcuacgacaccaacgugcuggagggcagcgucgccuacgagucccuccggcccgacacccgcuacgugcugauggacgggagcaucauccaguucccgaacaccuaccuggagggcuccgugcgggucgugacgaccuucgacagcgaguacugccgccacgggaccugcgagcgguccgaggcgggggugugcgucagcaccuccggccgcugggugcucaacaacgacuacuaccggagccugcccgggguguucugcggcgucgacgccgugaaccugcucacgaacauguucacgccccugauccagcccaucggcgcccuggacaucuccgccagcaucgucgccgggggcaucguggcgaucguggugaccugccucgccuacuacuucaugcgcuuccggcgcgccuucggggaguacagccacgucguggccuucaacacccugcuguuccucauguccuucaccguccugugccugaccccgguguacagcuuccuccccggcguguacuccgucaucuaccuguaccugaccuucuaccucaccaacgacgugagcuuccuggcccacauccaguggauggugauguucacgccccugguccccuucuggaucaccaucgcguacaucaucugcaucuccaccaagcacuucuacugguucuucagcaacuaccucaagcggcgcgugguguucaacggggucuccuucagcaccuucgaggaggccgcccugugcacguuccugcucaacaaggagauguaccugaagcugcgguccgacgugcuccugccgcugacccaguacaaccgcuaccucgcccuguacaacaaguacaaguacuucagcggcgccauggacaccaccuccuaccgggaggcggccugcugccaccuggccaaggcccucaacgacuucagcaacuccggcagcgacgugcuguaccagccgccccagacguccaucaccagcgcgguccugcagugaggacuagucccuguucccagagcccacuuuuuuuucuuuuuuugaaauaaaauagccugucuuucagaucucaaaggcucuuuucagagccaccaaaaaaaaaaaaaaaaaaaaaaaaaaaaaaaaaaaaaaaaaaaaaaaaaaaaaaaaaaaaaaaaaaaaaaaaaaaaaaaaaaaaaaaaaaaaaaaaaaaaa

SEQ ID NO: 20276 - RNA, 1778 nt, Artificial Sequence
  SARS-CoV-2__MT642326.1__non-structural protein 4 (NSP4) mRNA gc
aggagagucccgcagucggcguccagcggcucugcuuguucgugugugugucguugcaggccuuauucaagcuuaccaugaagaucgugaacaacuggcugaagcagcucaucaaggucacccugguguuccuguucguggccgccaucuucuaccucaucacccccguccacgugaugagcaagcacacggacuucuccagcgagaucaucggcuacaaggcgaucgacgggggcgugacccgcgacaucgccuccaccgacacgugcuucgccaacaagcacgccgacuucgacaccugguucagccagcggggcggcuccuacaccaacgacaaggccugcccccugaucgcggccgucaucacccgcgaggugggguucgugguccccggccugcccggcaccauccuccggacgaccaacggggacuuccugcacuuccugccccgcguguucagcgccgugggcaacaucugcuacaccccguccaagcucaucgaguacaccgacuucgccacgagcgcgugcguccuggccgccgagugcaccaucuucaaggacgccuccgggaagcccgugcccuacugcuacgacaccaacgugcuggagggcagcgucgccuacgagucccuccggcccgacacccgcuacgugcugauggacgggagcaucauccaguucccgaacacguaccuggagggcuccgugcgggucgugaccaccuucgacagcgaguacugccgccacgggaccugcgagcgguccgaggcgggggugugcgucagcacguccggccgcuggguguucaacaacgacuacuaccggagccuccccgggguguucugcggcgucgacgccgugaaccugcugaccaacauguucacgccccucauccagcccaucggcgcccuggacaucuccgccagcaucgucgccgggggcaucguggcgaucguggugaccugccuggccuacuacuucaugcgcuuccggcgcgccuucggggaguacagccacgucguggccuucaacacccuccuguuccugauguccuucaccguccucugccugaccccgguguacagcuuccugcccggcguguacuccgucaucuaccucuaccugaccuucuaccugacgaacgacgugagcuuccucgcccacauccaguggauggugauguucacgccccugguccccuucuggaucaccaucgcguacaucaucugcaucuccaccaagcacuucuacugguucuucagcaacuaccugaagcggcgcgugguguucaacggggucuccuucagcaccuucgaggaggccgcccucugcaccuuccugcugaacaaggagauguaccucaagcugcgguccgacgugcugcucccgcugacccaguacaaccgcuaccuggcccucuacaacaaguacaaguacuucagcggcgccauggacaccacguccuaccgggaggcggccugcugccaccuggccaaggcccugaacgacuucagcaacuccggcagcgacgugcucuaccagccgccccagaccuccaucaccagcgcgguccugcagugaggacuagucccuguucccagagcccacuuuuuuuucuuuuuuugaaauaaaauagccugucuuucagaucucaaaggcucuuuucagagccaccaaaaaaaaaaaaaaaaaaaaaaaaaaaaaaaaaaaaaaaaaaaaaaaaaaaaaaaaaaaaaaaaaaaaaaaaaaaaaaaaaaaaaaaaaaaaaaaaaaaaa

SEQ ID NO: 20277 - RNA, 1778 nt, Artificial Sequence
  SARS-CoV-2__MT642360.1__non-structural protein 4 (NSP4) mRNA gc
aggagagucccgcagucggcguccagcggcucugcuuguucgugugugugucguugcaggccuuauucaagcuuaccaugaagaucgugaacaacuggcugaagcagcucaucaaggucacccugguguuccuguucguggccgccaucuucuaccucaucacccccguccacgugaugagcaagcacacggacuucuccagcgagaucaucggcuacaaggcgaucgacgggggcgugacccgcgacaucgccuccaccgacacgugcuucgccaacaagcacgccgacuucgacaccugguucagccagcggggcggcuccuacaccaacgacaaggccugcccccugaucgcggccgucaucacccgcgaggugggguucgugguccccggccugcccggcaccauccuccggacgaccaacggggacuuccugcacuuccugccccgcguguucagcgccgugggcaacaucugcuacaccccguccaagcucaucgaguacaucgacuucgccaccagcgcgugcguccuggccgccgagugcacgaucuucaaggacgccuccgggaagcccgugcccuacugcuacgacaccaacgugcuggagggcagcgucgccuacgagucccuccggcccgacacccgcuacgugcugauggacgggagcaucauccaguucccgaacaccuaccuggagggcuccgugcgggucgugacgaccuucgacagcgaguacugccgccacgggaccugcgagcgguccgaggcgggggugugcgucagcaccuccggccgcugggugcucaacaacgacuacuaccggagccugcccgggguguucugcggcgucgacgccgugaaccugcucacgaacauguucacgccccugauccagcccaucggcgcccuggacaucuccgccagcaucgucgccgggggcaucguggcgaucguggugaccugccucgccuacuacuucaugcgcuuccggcgcgccuucggggaguacagccacgucguggccuucaacacccugcuguuccucauguccuucaccguccugugccugaccccgguguacagcuuccuccccggcguguacuccgucaucuaccuguaccugaccuucuaccucaccaacgacgugagcuuccuggcccacauccaguggauggugauguucacgccccugguccccuucuggaucaccaucgcguacaucaucugcaucuccaccaagcacuucuacugguucuucagcaacuaccucaagcggcgcgugguguucaacggggucuccuucagcaccuucgaggaggccgcccugugcacguuccugcucaacaaggagauguaccugaagcugcgguccgacgugcuccugccgcugacccaguacaaccgcuaccucgcccuguacaacaaguacaaguacuucagcggcgccauggacaccaccuccuaccgggaggcggccugcugccaccuggccaaggcccucaacgacuucagcaacuccggcagcgacgugcuguaccagccgccccagacguccaucaccagcgcgguccugcagugaggacuagucccuguucccagagcccacuuuuuuuucuuuuuuugaaauaaaauagccugucuuucagaucucaaaggcucuuuucagagccaccaaaaaaaaaaaaaaaaaaaaaaaaaaaaaaaaaaaaaaaaaaaaaaaaaaaaaaaaaaaaaaaaaaaaaaaaaaaaaaaaaaaaaaaaaaaaaaaaaaaaa

SEQ ID NO: 20278 - RNA, 1778 nt, Artificial Sequence
  SARS-CoV-2__MT627615.1__non-structural protein 4 (NSP4) mRNA gc
aggagagucccgcagucggcguccagcggcucugcuuguucgugugugugucguugcaggccuuauucaagcuuaccaugaagaucgugaacaacuggcugaagcagcucaucaaggucacccugguguuccuguucguggccgccaucuucuaccucaucacccccguccacgugaugagcaagcacacggacuucuccagcgaggugaucggcuacaaggcgaucgacgggggcgucacccgcgacaucgccuccaccgacacgugcuucgccaacaagcacgccgacuucgacaccugguucagccagcggggcggcuccuacaccaacgacaaggccugcccccugaucgcggccgugaucacccgcgaggugggguucgucgugcccggccugcccggcaccauccuccggacgaccaacggggacuuccugcacuuccugccccgcguguucagcgccgucggcaacaucugcuacaccccguccaagcucaucgaguacaccgacuucgccacgagcgcgugcgugcuggccgccgagugcaccaucuucaaggacgccuccgggaagcccgugcccuacugcuacgacaccaacguccuggagggcagcguggccuacgagucccuccggcccgacacccgcuacgugcugauggacgggagcaucauccaguucccgaacacguaccuggagggcuccguccggguggugaccaccuucgacagcgaguacugccgccacgggaccugcgagcgguccgaggcgggggucugcgugagcacguccggccgcugggugcucaacaacgacuacuaccggagccugcccggggucuucugcggcguggacgccgucaaccugcucaccaacauguucacgccccugauccagcccaucggcgcccuggacaucuccgccagcaucguggccgggggcaucguggcgaucgucgugaccugccucgccuacuacuucaugcgcuuccggcgcgccuucggggaguacagccacguggucgccuucaacacccugcuguuccucauguccuucaccgugcugugccugaccccgguguacagcuuccuccccggcgucuacuccgugaucuaccuguaccugaccuucuaccucacgaacgacgugagcuuccuggcccacauccaguggauggucauguucacgccccuggugcccuucuggaucaccaucgcguacaucaucugcaucuccaccaagcacuucuacugguucuucagcaacuaccucaagcggcgcguggucuucaacgggguguccuucagcaccuucgaggaggccgcccugugcaccuuccugcucaacaaggagauguaccugaagcugcgguccgacgugcuccugccgcugacccaguacaaccgcuaccucgcccuguacaacaaguacaaguacuucagcggcgccauggacaccacguccuaccgggaggcggccugcugccaccuggccaaggcccucaacgacuucagcaacuccggcagcgacguccuguaccagccgccccagaccuccaucaccagcgcggugcugcagugaggacuagucccuguucccagagcccacuuuuuuuucuuuuuuugaaauaaaauagccugucuuucagaucucaaaggcucuuuucagagccaccaaaaaaaaaaaaaaaaaaaaaaaaaaaaaaaaaaaaaaaaaaaaaaaaaaaaaaaaaaaaaaaaaaaaaaaaaaaaaaaaaaaaaaaaaaaaaaaaaaaaa

SEQ ID NO: 20279 - RNA, 1778 nt, Artificial Sequence
  SARS-CoV-2__MT628156.1__non-structural protein 4 (NSP4) mRNA gc
aggagagucccgcagucggcguccagcggcucugcuuguucgugugugugucguugcaggccuuauucaagcuuaccaugaagaucgugaacaacuggcugaagcagcucaucaaggucacccugguguuccuguucguggccgccaucuucuaccucaucacccccguccacgugaugagcaagcacacggacuucuccagcgagaucaucggcuacaaggcgaucgacgggggcgugacccgcgacaucgccuccaccgacacgugcuucgccaacaagcacgccgacuucgacaccugguucagccagcggggcggcuccuacaccaacgacaaggccugcccccugaucgcggccgucaucacccgcgaggugggguucgugguccccggccugcccggcaccauccuccggacgaccaacggggacuuccugcacuuccugccccgcguguucagcgccgugggcaacaucugcuacaccccguccaagcucaucgaguacaccgacuucgccacgagcgcgugcguccuggccgccgagugcaccaucuucaaggacgccuccgggaagcccgugcccuacugcuacgacaccaacgugcuggagggcagcgucgccuacgagucccuccggcccgacacccgcuacgugcugauggacgggagcaucauccaguucccgaacacguaccuggagggcuccgugcgggucgugaccaccuucgacagcgaguacugccgccacgggaccugcgagcgguccgaggcgggggugugcgucagcacguccggccgcugggugcucaacaacgacuacuaccggagccugcccgggguguucugcggcgucgacgccgugaaccugcucaccaacauguucacgccccugauccagcccaucggcgcccuggacaucuccgccagcaucgucgccgggggcaucguggcgaucguggucaccagccucgccuacuacuucaugcgcuuccggcgcgccuucggggaguacucccacgugguggccuucaacacccugcuguuccucaugagcuucaccguccugugccugaccccgguguacuccuuccuccccggcguguacagcgucaucuaccuguaccugaccuucuaccucacgaacgacguguccuuccuggcccacauccaguggauggugauguucacgccccugguccccuucuggaucaccaucgcguacaucaucugcaucagcaccaagcacuucuacugguucuucuccaacuaccucaagcggcgcgugguguucaacggggucagcuucuccaccuucgaggaggccgcccugugcaccuuccugcucaacaaggagauguaccugaagcugcggagcgacgugcuccugccgcugacccaguacaaccgcuaccucgcccuguacaacaaguacaaguacuucuccggcgccauggacaccacgagcuaccgggaggcggccugcugccaccuggccaaggcccucaacgacuucuccaacagcggcuccgacgugcuguaccagccgccccagaccagcaucaccuccgcgguccugcagugaggacuagucccuguucccagagcccacuuuuuuuucuuuuuuugaaauaaaauagccugucuuucagaucucaaaggcucuuuucagagccaccaaaaaaaaaaaaaaaaaaaaaaaaaaaaaaaaaaaaaaaaaaaaaaaaaaaaaaaaaaaaaaaaaaaaaaaaaaaaaaaaaaaaaaaaaaaaaaaaaaaaa

SEQ ID NO: 20280 - RNA, 1778 nt, Artificial Sequence
  SARS-CoV-2__MT628225.1__non-structural protein 4 (NSP4) mRNA gc
aggagagucccgcagucggcguccagcggcucugcuuguucgugugugugucguugcaggccuuauucaagcuuaccaugaagaucgugaacaacuggcugaagcagcucaucaaggucacccugguguuccuguucguggccgccaucuucuaccucaucacccccguccacgugaugagcaagcacacggacuucuccagcgagaucaucggcuacaaggcgaucgacgggggcgugacccgcgacaucgccuccaccgacacgugcuucgccaacaagcacgccgacuucgacaccugguucagccagcggggcggcuccuacaccaacgacaaggccugcccccugaucgcggccgucaucacccgcgaggugggguucgugguccccggccugcccggcaccauccuccggacgaccaacggggacuuccugcacuuccugccccgcguguucagcgccgugggcaacaucugcuacaccccguccaagcucaucgaguacaccgacuucgccacgagcgcgugcguccuggccgccgagugcaccaucuucaaggacgccuccgggaagcccgugcccuacugcuacgacaccaacgugcuggagggcagcgucgccuacgagucccuccggcccgacacccgcuacgugcugauggacgggagcaucauccaguucccgaacacguaccuggagggcuucgugcgggucgugaccaccuucgacuccgaguacugccgccacgggaccugcgagcggagcgaggcgggggugugcgucuccacgagcggccgcugggugcucaacaacgacuacuaccggucccugcccgggguguucugcggcgucgacgccgugaaccugcucaccaacauguucacgccccugauccagcccaucggcgcccuggacaucagcgccuccaucgucgccgggggcaucguggcgaucguggugaccugccucgccuacuacuucaugcgcuuccggcgcgccuucggggaguacagccacgucguggccuucaacacccugcuguuccucaugagcuucaccguccugugccugaccccgguguacuccuuccuccccggcguguacagcgucaucuaccuguaccugaccuucuaccucacgaacgacguguccuuccuggcccacauccaguggauggugauguucacgccccugguccccuucuggaucaccaucgcguacaucaucugcaucagcaccaagcacuucuacugguucuucuccaacuaccucaagcggcgcgugguguucaacggggucagcuucuccaccuucgaggaggccgcccugugcaccuuccugcucaacaaggagauguaccugaagcugcggagcgacgugcuccugccgcugacccaguacaaccgcuaccucgcccuguacaacaaguacaaguacuucuccggcgccauggacaccacgagcuaccgggaggcggccugcugccaccuggccaaggcccucaacgacuucuccaacagcggcuccgacgugcuguaccagccgccccagaccagcaucaccuccgcgguccugcagugaggacuagucccuguucccagagcccacuuuuuuuucuuuuuuugaaauaaaauagccugucuuucagaucucaaaggcucuuuucagagccaccaaaaaaaaaaaaaaaaaaaaaaaaaaaaaaaaaaaaaaaaaaaaaaaaaaaaaaaaaaaaaaaaaaaaaaaaaaaaaaaaaaaaaaaaaaaaaaaaaaaaa

SEQ ID NO: 20281 - RNA, 1778 nt, Artificial Sequence
  SARS-CoV-2__MT632520.1__non-structural protein 4 (NSP4) mRNA gc
aggagagucccgcagucggcguccagcggcucugcuuguucgugugugugucguugcaggccuuauucaagcuuaccaugaagaucgugaacaacuggcugaagcagcucaucaaggucacccugguguuccuguucguggucgccaucuucuaccucaucacccccgugcacgugaugagcaagcacacggacuucuccagcgagaucaucggcuacaaggccaucgacgggggcgucacccgcgacaucgcguccaccgacacgugcuucgccaacaagcacgccgacuucgacaccugguucagccagcggggcggcuccuacaccaacgacaaggccugcccccugaucgccgcggugaucacccgcgaggugggguucgucgugcccggccugcccggcaccauccuccggacgaccaacggggacuuccugcacuuccugccccgcguguucagcgccgucggcaacaucugcuacaccccguccaagcucaucgaguacaccgacuucgccacgagcgccugcgugcuggcggccgagugcaccaucuucaaggacgccuccgggaagcccgugcccuacugcuacgacaccaacguccuggagggcagcguggccuacgagucccuccggcccgacacccgcuacgugcugauggacgggagcaucauccaguucccgaacacguaccuggagggcuccguccggguggugaccaccuucgacagcgaguacugccgccacgggaccugcgagcgguccgaggccggggucugcgugagcacguccggccgcugggugcucaacaacgacuacuaccggagccugcccggggucuucugcggcguggacgcggucaaccugcucaccaacauguucacgccccugauccagcccaucggcgcccuggacaucuccgccagcaucguggccgggggcaucguggccaucgucgugaccugccucgcguacuacuucaugcgcuuccggcgcgccuucggggaguacagccacguggucgccuucaacacccugcuguuccucauguccuucaccgugcugugccugaccccgguguacagcuuccuccccggcgucuacuccgugaucuaccuguaccugaccuucuaccucacgaacgacgugagcuuccuggcccacauccaguggauggucauguucacgccccuggugcccuucuggaucaccaucgccuacaucaucugcaucuccaccaagcacuucuacugguucuucagcaacuaccucaagcggcgcguggucuucaacgggguguccuucagcaccuucgaggaggcggcccugugcaccuuccugcucaacaaggagauguaccugaagcugcgguccgacgugcuccugccgcugacccaguacaaccgcuaccucgcccuguacaacaaguacaaguacuucagcggcgccauggacaccacguccuaccgggaggccgcgugcugccaccuggccaaggcccucaacgacuucagcaacuccggcagcgacguccuguaccagccgccccagaccuccaucaccagcgccgugcugcagugaggacuagucccuguucccagagcccacuuuuuuuucuuuuuuugaaauaaaauagccugucuuucagaucucaaaggcucuuuucagagccaccaaaaaaaaaaaaaaaaaaaaaaaaaaaaaaaaaaaaaaaaaaaaaaaaaaaaaaaaaaaaaaaaaaaaaaaaaaaaaaaaaaaaaaaaaaaaaaaaaaaaa

SEQ ID NO: 20282 - RNA, 1778 nt, Artificial Sequence
  SARS-CoV-2__MT632793.1__non-structural protein 4 (NSP4) mRNA gc
aggagagucccgcagucggcguccagcggcucugcuuguucgugugugugucguugcaggccuuauucaagcuuaccaugaagaucgugaacaacuggcugaagcagcucaucaaggucacccugguguuccuguucguggccgccaucuucuaccucaucacccccguccacgugaugagcaagcacacggacuucuccagcgagaucaucggcuacaaggcgaucgacgggggcgugacccgcgacaucgccuccaccgacacgugcuucgccaacaagcacgccgacuucgacaccugguucagccagcggggcggcuccuacaccaacgacaaggccugcccccugaucgcggccgucaucacccgcgaggugggguucgugguccccggccugcccggcaccauccuccggacgaccaacggggacuuccugcacuuccugccccgcguguucagcgccgugggcaacaucugcuacaccccguccaagcucaucgaguacaccgacuucgccacgagcgcgugcguccuggccgccgagugcaccaucuucaaggacgccuccgggaagcccgugcccuacugcuacgacaccaacgugcuggagggcagcgucgccuacgagucccuccggcccgacacccgcuacgugcugauggacgggagcaucauccaguucccgaacacguaccuggagggcuccgugcgggucgugaccaccuucgacuucgaguacugccgccacgggaccugcgagcggagcgaggcgggggugugcgucuccacgagcggccgcugggugcucaacaacgacuacuaccggucccugcccgggguguucugcggcgucgacgccgugaaccugcucaccaacauguucacgccccugauccagcccaucggcgcccuggacaucagcgccuccaucgucgccgggggcaucguggcgaucguggugaccugccucgccuacuacuucaugcgcuuccggcgcgccuucggggaguacagccacgucguggccuucaacacccugcuguuccucaugagcuucaccguccugugccugaccccgguguacuccuuccuccccggcguguacagcgucaucuaccuguaccugaccuucuaccucacgaacgacguguccuuccuggcccacauccaguggauggugauguucacgccccugguccccuucuggaucaccaucgcguacaucaucugcaucagcaccaagcacuucuacugguucuucuccaacuaccucaagcggcgcgugguguucaacggggucagcuucuccaccuucgaggaggccgcccugugcaccuuccugcucaacaaggagauguaccugaagcugcggagcgacgugcuccugccgcugacccaguacaaccgcuaccucgcccuguacaacaaguacaaguacuucuccggcgccauggacaccacgagcuaccgggaggcggccugcugccaccuggccaaggcccucaacgacuucuccaacagcggcuccgacgugcuguaccagccgccccagaccagcaucaccuccgcgguccugcagugaggacuagucccuguucccagagcccacuuuuuuuucuuuuuuugaaauaaaauagccugucuuucagaucucaaaggcucuuuucagagccaccaaaaaaaaaaaaaaaaaaaaaaaaaaaaaaaaaaaaaaaaaaaaaaaaaaaaaaaaaaaaaaaaaaaaaaaaaaaaaaaaaaaaaaaaaaaaaaaaaaaaa

SEQ ID NO: 20283 - RNA, 1778 nt, Artificial Sequence
  SARS-CoV-2__MT633007.1__non-structural protein 4 (NSP4) mRNA gc
aggagagucccgcagucggcguccagcggcucugcuuguucgugugugugucguugcaggccuuauucaagcuuaccaugaagaucgugaacaacuggcugaagcagcucaucaaggucacccugguguuccuguucguggccgccaucuucuaccucaucacccccguccacgugaugagcaagcacacggacuucuccagcgagaucaucggcuacaaggcgaucgacgggggcgugacccgcgacaucgccuccaccgacacgugcuucgccaacaagcacgccgacuucgacaccugguucagccagcggggcggcuccuacaccaacgacaaggccugcccccugaucgcggccgucaucacccgcgaggugggguucgugguccccggccugcccggcaccauccuccggacgaccaacggggacuuccugcacuuccugccccgcguguucagcgccgugggcaacaucugcuacaccccguccaagcucaucgaguacaccgacuucgccacgagcgcgugcguccuggccgccgagugcaccaucuucaaggacgccuccgggaagcccgugcccuacugcuacgacaccaacgugcuggagggcagcgucgccuacgagucccuccggcccgacacccgcuacgugcugauggacgggagcaucauccaguucccgaacacguaccuggagggcuccgugcgggucgugaccaccuucgacagcgaguacugccgccacgggaccugcgagcgguccgaggcgggggugugcgucagcacguccggccgcugggugcucaacaacgacuacuaccggagccugcccgggguguucugcggcgucgacgccgugaaccugcucaccaacauguucacgccccugauccagcccaucggcgcccuggacaucuccgccagcaucgucgccgggggcaucguggcgaucguggugaccugccucgccuacuacuucaugcgcuuccggcgcgccuucggggaguacagccacgucguggccuucaacacccugcuguuccucauguccuucaucguccugugccugaccccgguguacagcuuccuccccggcguguacuccgucaucuaccuguaccugaccuucuaccucaccaacgacgugagcuuccuggcccacauccaguggauggugauguucacgccccugguccccuucuggaucaccaucgcguacaucaucugcaucuccaccaagcacuucuacugguucuucagcaacuaccucaagcggcgcgugguguucaacggggucuccuucagcaccuucgaggaggccgcccugugcacguuccugcucaacaaggagauguaccugaagcugcgguccgacgugcuccugccgcugacccaguacaaccgcuaccucgcccuguacaacaaguacaaguacuucagcggcgccauggacaccaccuccuaccgggaggcggccugcugccaccuggccaaggcccucaacgacuucagcaacuccggcagcgacgugcuguaccagccgccccagacguccaucaccagcgcgguccugcagugaggacuagucccuguucccagagcccacuuuuuuuucuuuuuuugaaauaaaauagccugucuuucagaucucaaaggcucuuuucagagccaccaaaaaaaaaaaaaaaaaaaaaaaaaaaaaaaaaaaaaaaaaaaaaaaaaaaaaaaaaaaaaaaaaaaaaaaaaaaaaaaaaaaaaaaaaaaaaaaaaaaaa

SEQ ID NO: 20284 - RNA, 1778 nt, Artificial Sequence
  SARS-CoV-2__MT609566.1__non-structural protein 4 (NSP4) mRNA gc
aggagagucccgcagucggcguccagcggcucugcuuguucgugugugugucguugcaggccuuauucaagcuuaccaugaagaucgugaacaacuggcugaagcagcucaucaaggucacccugguguuccuguucguggccgccaucuucuaccucaucacccccguccacgugaugagcaagcacacggacuucuccagcgagaucaucggcuacaaggcgaucgacgggggcgugacccgcgacaucgccuccaccgacacgugcuucgccaacaagcacgccgacuucgacaccugguucagccagcggggcggcuccuacaccaacgacaaggccugcccccugaucgcggccgucaucacccgcgaggugggguucgugguccccggccugcccggcaccauccuccggacgaccaacggggacuuccugcacuuccugccccgcguguucagcgccgugggcaacaucugcuacaccccguccaagcucaucgaguacaccgacuucgccacgagcgcgugcguccuggccgccgagugcaccaucuucaaggacgccuccgggaagcccgugcccuacugcuacgacaccaacgugcuggagggcagcgucgccuacgagucccuccggcccgacacccgcuacgugcugauggacgggagcaucauccaguucccgaacacguaccuggagggcuccgugcgggucgugaccaccuucgacagcgaguacugccgccacgggaccugcgagcgguccgaggcgggggugugcgucagcacguccggccgcugggugcucaacaacgacuacuaccggagccugcccgggguguucugcggcgucgacgccgugaaccugcucaccaacauguucacgccccugauccagcccaucggcgcccuggacaucuccgccagcaucgucgccgggggcaucguggcgaucguggugaccugccucgccuacuacuucaugcgcuuccggcgcgccuucggggaguacagccacgucguggccuucaacacccugcuguuccucauguccuucaccguccugugccugaccccgguguacagcuuccuccccggcguguacuccgucaucuaccuguaccugaccuucuaccucacgaacgacgugagcuuccuggcccacauccaguggauggugauguucacgccccugguccccuucuggaucaccaucgcguacaucaucugcaucuccaccaagcacuucuacugguucuucagcaacuaccucaagcggcgcgugguguucaacggggucuccuucagcaccuucgaggaggccgcccugugcaccuuccugcucaacaaggagauguaccugaagcugcgguccgacgugcuccugccgcugacccaguacaaccgcuaccucgcccuguacaacaaguacaaguacuucagcggcgccauggacaccaucuccuaccgggaggcggccugcugccaccuggccaaggcccucaacgacuucagcaacuccggcagcgacgugcuguaccagccgccccagacguccaucaccagcgcgguccugcagugaggacuagucccuguucccagagcccacuuuuuuuucuuuuuuugaaauaaaauagccugucuuucagaucucaaaggcucuuuucagagccaccaaaaaaaaaaaaaaaaaaaaaaaaaaaaaaaaaaaaaaaaaaaaaaaaaaaaaaaaaaaaaaaaaaaaaaaaaaaaaaaaaaaaaaaaaaaaaaaaaaaaa

SEQ ID NO: 20285 - RNA, 1778 nt, Artificial Sequence
  SARS-CoV-2__MT609577.1__non-structural protein 4 (NSP4) mRNA gc
aggagagucccgcagucggcguccagcggcucugcuuguucgugugugugucguugcaggccuuauucaagcuuaccaugaagaucgugaacaacuggcugaagcagcucaucaaggucacccugguguuccuguucguggccgccaucuucuaccucaucacccccguccacgugaugagcaagcacacggacuucuccagcgagaucaucggcuacaaggcgaucgacgggggcgugacccgcgacaucgccuccaccgacacgugcuucgccaacaagcacgccgacuucgacaccugguucagccagcggggcggcuccuacaccaacgacaaggccugcccccugaucgcggccgucaucacccgcgaggugggguucgugguccccggccugcccggcaccauccuccggacgaccaacggggacuuccugcacuuccugccccgcguguucagcgccgugggcaacaucugcuacaccccguccaagcucaucgaguacaccgacuucgccacgagcgcgugcguccuggccgccgagugcaccaucuucaaggacgccuccgggaagcccgugcccuacugcuacgacaccaacgugcuggagggcagcgucgccuacgagucccuccggcccgacacccgcuacgugcugauggacgggagcaucauccaguucccgaacacguaccuggagggcuccgugcgggucgugaccaccuucgacagcgaguacugccgccacgggaccugcgagcgguccgaggcgggggugugcgucagcacguccggccgcugggugcucaacaacgacuacuaccggagccugcccgggguguucugcggcgucgacgccgugaaccugcucaccaacauguucacgccccugauccagcccaucggcgcccuggacaucuccgccagcaucgucgccgggggcaucguggcgaucguggugaccugccucgccuacuacuucaugcgcuuccggcgcgccuucggggaguacagccacgucguggccuucaacacccugcuguuccucauguccuucaccguccugugccugaccccgguguacagcuuccuccccggcguguacuccgucaucuaccuguacuucaccuucuaccugacgaacgacgugagcuuccucgcccacauccaguggauggugauguucacgccccugguccccuucuggaucaccaucgcguacaucaucugcaucuccaccaagcacuucuacugguucuucagcaacuaccugaagcggcgcgugguguucaacggggucuccuucagcaccuucgaggaggccgcccucugcaccuuccugcugaacaaggagauguaccucaagcugcgguccgacgugcugcucccgcugacccaguacaaccgcuaccuggcccucuacaacaaguacaaguacuucagcggcgccauggacaccacguccuaccgggaggcggccugcugccaccuggccaaggcccugaacgacuucagcaacuccggcagcgacgugcucuaccagccgccccagaccuccaucaccagcgcgguccugcagugaggacuagucccuguucccagagcccacuuuuuuuucuuuuuuugaaauaaaauagccugucuuucagaucucaaaggcucuuuucagagccaccaaaaaaaaaaaaaaaaaaaaaaaaaaaaaaaaaaaaaaaaaaaaaaaaaaaaaaaaaaaaaaaaaaaaaaaaaaaaaaaaaaaaaaaaaaaaaaaaaaaaa

SEQ ID NO: 20286 - RNA, 1778 nt, Artificial Sequence
  SARS-CoV-2__MT601291.1__non-structural protein 4 (NSP4) mRNA gc
aggagagucccgcagucggcguccagcggcucugcuuguucgugugugugucguugcaggccuuauucaagcuuaccaugaagaucgugaacaacuggcugaagcagcucaucaaggucacccugguguuccuguucguggccgccaucuucuaccucaucacccccguccacgugaugagcaagcacacggacuucuccagcgagaucaucggcuacaaggcgaucgacgggggcgugacccgcgacaucgccuccaccgacacgugcuucgccaacaagcacgccgacuucgacaccugguucagccagcggggcggcuccuacaccaacgacaaggccugcccccugaucgcggccgucaucacccgcgaggugggguucgugguccccggccugcccggcaccauccuccggacgaccaacggggacuuccugcacuuccugccccgcguguucagcgccgugggcaacaucugcuacaccccguccaagcucaucgaguacaccgacuucgccacgagcgcgugcguccuggccgccgagugcaccaucuucaaggacgccuccgggaagcccgugcccuacugcuacgacaccaacgugcuggagggcagcgucgccuacgagucccuccggcccgacacccgcuacgugcugauggacgggagcaucauccaguucccgaacacguaccuggagggcuccgugcgggucgugaccaccuucgacagcgaguacugccgccacgggaccugcgagcgguccgaggcgggggugugcgucagcacguccggccgcugggugcucaacaacgacuacuaccggagccugcccgggguguucugcggcgucgacgccgugaaccugcucaccaacauguucacgccccugauccagcccaucggcgcccuggacaucuccgccagcaucgucgccgggggcaucguggcgaucguggugaccugccucgccuacuacuucaugcgcuuccggcgcgccuucggggaguacagccacgucguggccuucaacacccugcuguuccucauguccuucaccguccugugccugaccccgguguacagcuuccuccccggcguguacuccgucaucuaccuguaccugaccuucuaccucacgaacgacgugagcuuccuggcccacauccaguggauggugauguucacgccccugguccccuucuggaucaccaucgcguacaucaucugcaucuccaccaagcacuucuacugguucuucagcaacuaccucaagcggcgcguguucuucaacgggguguccuucagcaccuucgaggaggccgcccugugcaccuuccugcucaacaaggagauguaccugaagcugcgguccgacguccuccugccgcugacccaguacaaccgcuaccucgcccuguacaacaaguacaaguacuucagcggcgccauggacaccacguccuaccgggaggcggccugcugccaccuggccaaggcccucaacgacuucagcaacuccggcagcgacgugcuguaccagccgccccagaccuccaucaccagcgcggugcugcagugaggacuagucccuguucccagagcccacuuuuuuuucuuuuuuugaaauaaaauagccugucuuucagaucucaaaggcucuuuucagagccaccaaaaaaaaaaaaaaaaaaaaaaaaaaaaaaaaaaaaaaaaaaaaaaaaaaaaaaaaaaaaaaaaaaaaaaaaaaaaaaaaaaaaaaaaaaaaaaaaaaaaa

SEQ ID NO: 20287 - RNA, 1778 nt, Artificial Sequence
  SARS-CoV-2__MT585084.1__non-structural protein 4 (NSP4) mRNA gc
aggagagucccgcagucggcguccagcggcucugcuuguucgugugugugucguugcaggccuuauucaagcuuaccaugaagaucgugaacaacuggcugaagcagcucaucaaggucacccugguguuccuguucguggccgccaucuucuaccucaucacccccguccacgugaugagcaagcacacggacuucuccagcgagaucaucggcuacaaggcgaucgacgggggcgugacccgcgacaucgccuccaccgacacgugcuucgccaacaagcacgccgacuucgacaccugguucagccagcggggcggcuccuacaccaacgacaaggccugcccccugaucgcggccgucaucacccgcgaggugggguucgugguccccggccugcccggcaugauccuccggaccacgaacggggacuuccugcacuuccugccccgcguguucagcgccgugggcaacaucugcuacaccccguccaagcucaucgaguacaccgacuucgccaccagcgcgugcguccuggccgccgagugcacgaucuucaaggacgccuccgggaagcccgugcccuacugcuacgacaccaacgugcuggagggcagcgucgccuacgagucccuccggcccgacacccgcuacgugcugauggacgggagcaucauccaguucccgaacaccuaccuggagggcuccgugcgggucgugacgaccuucgacagcgaguacugccgccacgggaccugcgagcgguccgaggcgggggugugcgucagcaccuccggccgcugggugcucaacaacgacuacuaccggagccugcccgggguguucugcggcgucgacgccgugaaccugcucacgaacauguucacgccccugauccagcccaucggcgcccuggacaucuccgccagcaucgucgccgggggcaucguggcgaucguggugaccugccucgccuacuacuucaugcgcuuccggcgcgccuucggggaguacagccacgucguggccuucaacacccugcuguuccucauguccuucaccguccugugccugaccccgguguacagcuuccuccccggcguguacuccgucaucuaccuguaccugaccuucuaccucaccaacgacgugagcuuccuggcccacauccaguggauggugauguucacgccccugguccccuucuggaucaccaucgcguacaucaucugcaucuccaccaagcacuucuacugguucuucagcaacuaccucaagcggcgcgugguguucaacggggucuccuucagcaccuucgaggaggccgcccugugcacguuccugcucaacaaggagauguaccugaagcugcgguccgacgugcuccugccgcugacccaguacaaccgcuaccucgcccuguacaacaaguacaaguacuucagcggcgccauggacaccaccuccuaccgggaggcggccugcugccaccuggccaaggcccucaacgacuucagcaacuccggcagcgacgugcuguaccagccgccccagacguccaucaccagcgcgguccugcagugaggacuagucccuguucccagagcccacuuuuuuuucuuuuuuugaaauaaaauagccugucuuucagaucucaaaggcucuuuucagagccaccaaaaaaaaaaaaaaaaaaaaaaaaaaaaaaaaaaaaaaaaaaaaaaaaaaaaaaaaaaaaaaaaaaaaaaaaaaaaaaaaaaaaaaaaaaaaaaaaaaaaa

SEQ ID NO: 20288 - RNA, 1778 nt, Artificial Sequence
  SARS-CoV-2__MT499215.1__non-structural protein 4 (NSP4) mRNA gc
aggagagucccgcagucggcguccagcggcucugcuuguucgugugugugucguugcaggccuuauucaagcuuaccaugaagaucgugaacaacuggcugaagcagcucaucaaggucacccugguguuccuguucguggccgccaucuucuaccucaucacccccguccacgugaugagccgccacacggacuucuccagcgagaucaucggcuacaaggcgaucgacgggggcgugacccgggacaucgccuccaccgacacgugcuucgccaacaagcacgccgacuucgacaccugguucagccagcgcgggggcuccuacaccaacgacaaggccugcccccugaucgcggccgucaucacccgggaggugggguucgugguccccggccugcccggcaccauccuccgcacgaccaacggggacuuccugcacuuccugccccggguguucagcgccgugggcaacaucugcuacaccccguccaagcucaucgaguacaccgacuucgccacgagcgcgugcguccuggccgccgagugcaccaucuucaaggacgccuccgggaagcccgugcccuacugcuacgacaccaacgugcuggagggcagcgucgccuacgagucccuccgccccgacacccgguacgugcugauggacgggagcaucauccaguucccgaacacguaccuggagggcuccgugcgcgucgugaccaccuucgacagcgaguacugccggcacgggaccugcgagcgcuccgaggcgggcgugugcgucagcacguccggccggugggugcucaacaacgacuacuaccgcagccugcccgggguguucugcggcgucgacgccgugaaccugcucaccaacauguucacgccccugauccagcccaucggcgcccuggacaucuccgccagcaucgucgccgggggcaucguggcgaucguggugaccugccucgccuacuacuucaugcgguuccgccgggccuucggggaguacagccacgucguggccuucaacacccugcuguuccucauguccuucaccguccugugccugaccccgguguacagcuuccuccccggcguguacuccgucaucuaccuguaccugaccuucuaccucacgaacgacgugagcuuccuggcccacauccaguggauggugauguucacgccccugguccccuucuggaucaccaucgcguacaucaucugcaucuccaccaagcacuucuacugguucuucagcaacuaccucaagcgccgggugguguucaacggggucuccuucagcaccuucgaggaggccgcccugugcaccuuccugcucaacaaggagauguaccugaagcugcgcuccgacgugcuccugccgcugacccaguacaaccgguaccucgcccuguacaacaaguacaaguacuucagcggcgccauggacaccacguccuaccgcgaggcggccugcugccaccuggccaaggcccucaacgacuucagcaacuccggcagcgacgugcuguaccagccgccccagaccuccaucaccagcgcgguccugcagugaggacuagucccuguucccagagcccacuuuuuuuucuuuuuuugaaauaaaauagccugucuuucagaucucaaaggcucuuuucagagccaccaaaaaaaaaaaaaaaaaaaaaaaaaaaaaaaaaaaaaaaaaaaaaaaaaaaaaaaaaaaaaaaaaaaaaaaaaaaaaaaaaaaaaaaaaaaaaaaaaaaaa

SEQ ID NO: 20289 - RNA, 1778 nt, Artificial Sequence
  SARS-CoV-2__MT499217.1__non-structural protein 4 (NSP4) mRNA gc
aggagagucccgcagucggcguccagcggcucugcuuguucgugugugugucguugcaggccuuauucaagcuuaccaugaagaucgugaacaacuggcugaagcagcucaucaaggucacccugguguuccuguucguggccgccaucuucuaccucaucacccccguccacgugaugagccgccacacggacuucuccagcgagaucaucggcuacaaggcgaucgacgggggcgugacccgggacaucgccuccaccgacacgugcuucgccaacaagcacgccgacuucgacaccugguucaaccagcgcgggggcagcuacaccaacgacaaggccugcccccugaucgcggccgucaucacccgggaggugggguucgugguccccggccugcccggcaccauccuccgcacgaccaacggggacuuccugcacuuccugccccggguguucuccgccgugggcaacaucugcuacaccccgagcaagcucaucgaguacaccgacuucgccacguccgcgugcguccuggccgccgagugcaccaucuucaaggacgccagcgggaagcccgugcccuacugcuacgacaccaacgugcuggagggcuccgucgccuacgagagccuccgccccgacacccgguacgugcugauggacggguccaucauccaguucccgaacacguaccuggagggcagcgugcgcgucgugaccaccuucgacuccgaguacugccggcacgggaccugcgagcgcagcgaggcgggcgugugcgucuccacgagcggccggugggugcucaacaacgacuacuaccgcucccugcccgggguguucugcggcgucgacgccgugaaccugcucaccaacauguucacgccccugauccagcccaucggcgcccuggacaucagcgccuccaucgucgccgggggcaucguggcgaucguggugaccugccucgccuacuacuucaugcgguuccgccgggccuucggggaguacagccacgucguggccuucaacacccugcuguuccucaugagcuucaccguccugugccugaccccgguguacuccuuccuccccggcguguacagcgucaucuaccuguaccugaccuucuaccucacgaacgacguguccuuccuggcccacauccaguggauggugauguucacgccccugguccccuucuggaucaccaucgcguacaucaucugcaucagcaccaagcacuucuacugguucuucuccaacuaccucaagcgccgggugguguucaacggggucagcuucuccaccuucgaggaggccgcccugugcaccuuccugcucaacaaggagauguaccugaagcugcgcagcgacgugcuccugccgcugacccaguacaaccgguaccucgcccuguacaacaaguacaaguacuucuccggcgccauggacaccacgagcuaccgcgaggcggccugcugccaccuggccaaggcccucaacgacuucuccaacagcggcuccgacgugcuguaccagccgccccagaccagcaucaccuccgcgguccugcagugaggacuagucccuguucccagagcccacuuuuuuuucuuuuuuugaaauaaaauagccugucuuucagaucucaaaggcucuuuucagagccaccaaaaaaaaaaaaaaaaaaaaaaaaaaaaaaaaaaaaaaaaaaaaaaaaaaaaaaaaaaaaaaaaaaaaaaaaaaaaaaaaaaaaaaaaaaaaaaaaaaaaa

SEQ ID NO: 20290 - RNA, 1778 nt, Artificial Sequence
  SARS-CoV-2__MT576530.1__non-structural protein 4 (NSP4) mRNA gc
aggagagucccgcagucggcguccagcggcucugcuuguucgugugugugucguugcaggccuuauucaagcuuaccaugaagaucgugaacaacuggcugaagcagcucaucaaggucacccugguguuccuguucguggccgccaucuucuaccucaucacccccguccacgugaugagcaagcacacggacuucuccagcgagaucaucggcuacaaggcgaucgacgggggcgugacccgcgacaucgccuccaccgacacgugcuucgccaacaaguacgccgacuucgacaccugguucagccagcggggcggcuccuacaccaacgacaaggccugcccccugaucgcggccgucaucacccgcgaggugggguucgugguccccggccugcccggcaccauccuccggacgaccaacggggacuuccugcacuuccugccccgcguguucagcgccgugggcaacaucugcuacaccccguccaagcucaucgaguacaccgacuucgccacgagcgcgugcguccuggccgccgagugcaccaucuucaaggacgccuccgggaagcccgugcccuacugcuacgacaccaacgugcuggagggcagcgucgccuacgagucccuccggcccgacacccgcuacgugcugauggacgggagcaucauccaguucccgaacacguaccuggagggcuccgugcgggucgugaccaccuucgacagcgaguacugccgccacgggaccugcgagcgguccgaggcgggggugugcgucagcacguccggccgcugggugcucaacaacgacuacuaccggagccugcccgggguguucugcggcgucgacgccgugaaccugcucaccaacauguucacgccccugauccagcccaucggcgcccuggacaucuccgccagcaucgucgccgggggcaucguggcgaucguggugaccugccucgccuacuacuucaugcgcuuccggcgcgccuucggggaguacagccacgucguggccuucaacacccugcuguuccucauguccuucaccguccugugccugaccccgguguacagcuuccuccccggcguguacuccgucaucuaccuguaccugaccuucuaccucacgaacgacgugagcuuccuggcccacauccaguggauggugauguucacgccccugguccccuucuggaucaccaucgcguacaucaucugcaucuccaccaagcacuucuacugguucuucagcaacuaccucaagcggcgcgugguguucaacggggucuccuucagcaccuucgaggaggccgcccugugcaccuuccugcucaacaaggagauguaccugaagcugcgguccgacgugcuccugccgcugacccaguacaaccgcuaccucgcccuguacaacaaguacaaguacuucagcggcgccauggacaccacguccuaccgggaggcggccugcugccaccuggccaaggcccucaacgacuucagcaacuccggcagcgacgugcuguaccagccgccccagaccuccaucaccagcgcgguccugcagugaggacuagucccuguucccagagcccacuuuuuuuucuuuuuuugaaauaaaauagccugucuuucagaucucaaaggcucuuuucagagccaccaaaaaaaaaaaaaaaaaaaaaaaaaaaaaaaaaaaaaaaaaaaaaaaaaaaaaaaaaaaaaaaaaaaaaaaaaaaaaaaaaaaaaaaaaaaaaaaaaaaaa

SEQ ID NO: 20291 - RNA, 1778 nt, Artificial Sequence
  SARS-CoV-2__MT520390.1__non-structural protein 4 (NSP4) mRNA gc
aggagagucccgcagucggcguccagcggcucugcuuguucgugugugugucguugcaggccuuauucaagcuuaccaugaagaucgugaacaacuggcugaagcagcucaucaaggucacccugguguuccuguucguggccgccaucuucuaccucaucacccccguccacgugaugagcaagcacacggacuucuccagcgagaucaucggcuacaaggcgaucgacgggggcgugacccgcgacaucgccuacaccgacacgugcuucgccaacaagcacgccgacuucgacaccugguucucccagcggggcggcagcuacaccaacgacaaggccugcccccugaucgcggccgucaucacccgcgaggugggguucgugguccccggccugcccggcaccauccuccggacgaccaacggggacuuccugcacuuccugccccgcguguucuccgccgugggcaacaucugcuacaccccgagcaagcucaucgaguacaccgacuucgccacguccgcgugcguccuggccgccgagugcaccaucuucaaggacgccagcgggaagcccgugcccuacugcuacgacaccaacgugcuggagggcuccgucgccuacgagagccuccggcccgacacccgcuacgugcugauggacggguccaucauccaguucccgaacacguaccuggagggcagcgugcgggucgugaccaccuucgacuccgaguacugccgccacgggaccugcgagcggagcgaggcgggggugugcgucuccacgagcggccgcugggugcucaacaacgacuacuaccggucccugcccgggguguucugcggcgucgacgccgugaaccugcucaccaacauguucacgccccugauccagcccaucggcgcccuggacaucagcgccuccaucgucgccgggggcaucguggcgaucguggugaccugccucgccuacuacuucaugcgcuuccggcgcgccuucggggaguacagccacgucguggccuucaacacccugcuguuccucaugagcuucaccguccugugccugaccccgguguacuccuuccuccccggcguguacagcgucaucuaccuguaccugaccuucuaccucacgaacgacguguccuuccuggcccacauccaguggauggugauguucacgccccugguccccuucuggaucaccaucgcguacaucaucugcaucagcaccaagcacuucuacugguucuucuccaacuaccucaagcggcgcgugguguucaacggggucagcuucuccaccuucgaggaggccgcccugugcaccuuccugcucaacaaggagauguaccugaagcugcggagcgacgugcuccugccgcugacccaguacaaccgcuaccucgugcuguacaacaaguacaaguacuucuccggcgccauggacaccacgagcuaccgggaggccgcgugcugccaccuggccaaggcccucaacgacuucuccaacagcggcuccgacguccuguaccagccgccccagaccagcaucaccuccgccgugcugcagugaggacuagucccuguucccagagcccacuuuuuuuucuuuuuuugaaauaaaauagccugucuuucagaucucaaaggcucuuuucagagccaccaaaaaaaaaaaaaaaaaaaaaaaaaaaaaaaaaaaaaaaaaaaaaaaaaaaaaaaaaaaaaaaaaaaaaaaaaaaaaaaaaaaaaaaaaaaaaaaaaaaaa

SEQ ID NO: 20292 - RNA, 1778 nt, Artificial Sequence
  SARS-CoV-2__MT539163.1__non-structural protein 4 (NSP4) mRNA gc
aggagagucccgcagucggcguccagcggcucugcuuguucgugugugugucguugcaggccuuauucaagcuuaccaugaagaucgugaacaacuggcugaagcagcucaucaaggucacccugguguuccuguucguggccgccaucuucuaccucaucacccccguccacgugaugagcaagcacacggacuucuccagcgagaucaucggcuacaaggcgaucgacgggggcgugacccgcgacaucgccuccaccgacacgugcuucgccaacaagcacgccgacuucgacaccugguucagccagcggggcggcuccuacaccaacgacaaggccugcccccugaucgcggccgucaucacccgcgaggugggguucgugguccccggccugcccggcaccauccuccggacgaccaacggggacuuccugcacuuccugccccgcguguucagcgccgugggcaacaucugcuacaccccguccaagcucaucgaguacaccgacuucgccacgagcgcgugcguccuggccgccgagugcaccaucuucaaggacgccuccgggaagcccgugcccuacugcuacgacaccaacgugcuggagggcagcgucgccuacgagucccuccggcccgacacccgcuacgugcugauggacgggagcaucauccaguucccgaacacguaccuggagggcuccgugcgggucgugaccaccuucgacagcgaguacugccgccacgggaccugcgagcgguccgaggcgggggugugcgucagcacguccggccgcugggugcucaacaacgacuacuaccggagccugcccgggguguucugcggcgucgacgccgugaaccugcucaccaacauguucacgccccugauccagcccaucggcgcccuggacaucuccgccagcaucgucgccgggggcaucguggcgaucguggugaccugccucgccuacuacuucaugcgcuuccggcgcgccuucggggaguacagccacgucguggccuucuccacccugcuguuccucaugagcuucaccguccugugccugaccccgguguacuccuuccuccccggcguguacagcgucaucuaccuguaccugaccuucuaccucacgaacgacguguccuuccuggcccacauccaguggauggugauguucacgccccugguccccuucuggaucaccaucgcguacaucaucugcaucagcaccaagcacuucuacugguucuucuccaacuaccucaagcggcgcgugguguucaacggggucagcuucuccaccuucgaggaggccgcccugugcaccuuccugcucaacaaggagauguaccugaagcugcggagcgacgugcuccugccgcugacccaguacaaccgcuaccucgcccuguacaacaaguacaaguacuucuccggcgccauggacaccacgagcuaccgggaggcggccugcugccaccuggccaaggcccucaacgacuucuccaacagcggcuccgacgugcuguaccagccgccccagaccagcaucaccuccgcgguccugcagugaggacuagucccuguucccagagcccacuuuuuuuucuuuuuuugaaauaaaauagccugucuuucagaucucaaaggcucuuuucagagccaccaaaaaaaaaaaaaaaaaaaaaaaaaaaaaaaaaaaaaaaaaaaaaaaaaaaaaaaaaaaaaaaaaaaaaaaaaaaaaaaaaaaaaaaaaaaaaaaaaaaaa

SEQ ID NO: 20293 - RNA, 1778 nt, Artificial Sequence
  SARS-CoV-2__MT407653.1__non-structural protein 4 (NSP4) mRNA gc
aggagagucccgcagucggcguccagcggcucugcuuguucgugugugugucguugcaggccuuauucaagcuuaccaugaagaucgugaacaacuggcugaagcagcucaucaaggucacccugguguuccuguucguggccgccaucuucuaccucaucacccccguccacgugaugagcaagcacacggacuucuccagcgagaucaucggcuacaaggcgaucgacgggggcgugacccgcgacaucgccuccaccgacacgugcuucgccaacaagcacgccgacuucgacaccugguucagccagcggggcggcuccuacaccaacgacaaggccugcccccugaucgcggccgucaucacccgcgaggugggguucgugguccccggccugcccggcaccauccuccggacgaccaacggggacuuccugcacuuccugccccgcguguucagcgccgugggcaacaucugcuacaccccguccaagcucaucgaguacaccgacuucgccacgagcgcgugcguccuggccgccgagugcaccaucuucaaggacgccuccgggaagcccgugcccuacugcuacgacaccaacgugcuggagggcagcgucgccuacgagucccuccggcccgacacccgcuacgugcugauggacgggagcaucauccaguucccgaacacguaccuggagggcuccgugcgggucgugaccaccuucgacagcgaguacugccgccacgggaccugcgagcgguccgaggcgggggugugcgucagcacguccggccgcugggugcucaacaacgacuacuaccggagccugcccgggguguucugcggcgucgacgccgugaaccugcucaccaacauguucacgccccugaugcagcccaucggcgcccuggacaucuccgccagcaucgucgccgggggcaucguggcgaucguggugaccugccucgccuacuacuucaugcgcuuccggcgcgccuucggggaguacagccacgucguggccuucaacacccugcuguuccucauguccuucaccguccugugccugaccccgguguacagcuuccuccccggcguguacuccgucaucuaccuguaccugaccuucuaccucacgaacgacgugagcuuccuggcccacauccaguggauggugauguucacgccccugguccccuucuggaucaccaucgcguacaucaucugcaucuccaccaagcacuucuacugguucuucagcaacuaccucaagcggcgcgugguguucaacggggucuccuucagcaccuucgaggaggccgcccugugcaccuuccugcucaacaaggagauguaccugaagcugcgguccgacgugcuccugccgcugacccaguacaaccgcuaccucgcccuguacaacaaguacaaguacuucagcggcgccauggacaccacguccuaccgggaggcggccugcugccaccuggccaaggcccucaacgacuucagcaacuccggcagcgacgugcuguaccagccgccccagaccuccaucaccagcgcgguccugcagugaggacuagucccuguucccagagcccacuuuuuuuucuuuuuuugaaauaaaauagccugucuuucagaucucaaaggcucuuuucagagccaccaaaaaaaaaaaaaaaaaaaaaaaaaaaaaaaaaaaaaaaaaaaaaaaaaaaaaaaaaaaaaaaaaaaaaaaaaaaaaaaaaaaaaaaaaaaaaaaaaaaaa

SEQ ID NO: 20294 - RNA, 1778 nt, Artificial Sequence
  SARS-CoV-2__MT535503.1__non-structural protein 4 (NSP4) mRNA gc
aggagagucccgcagucggcguccagcggcucugcuuguucgugugugugucguugcaggccuuauucaagcuuaccaugaagaucgugaacaacuggcugaagcagcucaucaaggucacccugguguuccuguucguggccgccaucuucuaccucaucacccccguccacgugaugagcaagcacacggacuucuccagcgagaucaucggcuacaaggcgaucgacgggggcgugacccgcgacaucgccuccaccgacacgugcuucgccaacaagcacgccgacuucagccagcggggcggcuccuacaccaacgacaaggccugcccccugaucgcggccgucaucacccgcgaggugggguucgugguccccggccugcccggcaccauccuccggaccacgaacggggacuuccugcacuuccugccccgcguguucagcgccgugggcaacaucugcuacaccccguccaagcucaucgaguacaccgacuucgccaccagcgcgugcguccuggccgccgagugcacgaucuucaaggacgccuccgggaagcccgugcccuacugcuacgacaccaacgugcuggagggcagcgucgccuacgagucccuccggcccgacacccgcuacgugcugauggacgggagcaucauccaguucccgaacaccuaccuggagggcuccgugcgggucgugacgaccuucgacagcgaguacugccgccacgggaccugcgagcgguccgaggcgggggugugcgucagcaccuccggccgcugggugcucaacaacgacuacuaccggagccugcccgggguguucugcggcgucgacgccgugaaccugcucacgaacauguucacgccccugauccagcccaucggcgcccuggacaucuccgccagcaucgucgccgggggcaucguggcgaucguggugaccugccucgccuacuacuucaugcgcuuccggcgcgccuucggggaguacagccacgucguggccuucaacacccugcuguuccucauguccuucaccguccugugccugaccccgguguacagcuuccuccccggcguguacuccgucaucuaccuguaccugaccuucuaccucaccaacgacgugagcuuccuggcccacauccaguggauggugauguucacgccccugguccccuucuggaucaccaucgcguacaucaucugcaucuccaccaagcacuucuacugguucuucagcaacuaccucaagcggcgcgugguguucaacggggucuccuucagcaccuucgaggaggccgcccugugcacguuccugcucaacaaggagauguaccugaagcugcgguccgacgugcuccugccgcugacccaguacaaccgcuaccucgcccuguacaacaaguacaaguacuucagcggcgccauggacaccaccuccuaccgggaggcggccugcugccaccuggccaaggcccucaacgacuucagcaacuccggcagcgacgugcuguaccagccgccccagacguccaucaccagcgcgguccugcaguccggguuccgcugaggacuagucccuguucccagagcccacuuuuuuuucuuuuuuugaaauaaaauagccugucuuucagaucucaaaggcucuuuucagagccaccaaaaaaaaaaaaaaaaaaaaaaaaaaaaaaaaaaaaaaaaaaaaaaaaaaaaaaaaaaaaaaaaaaaaaaaaaaaaaaaaaaaaaaaaaaaaaaaaaaaaa

SEQ ID NO: 20295 - RNA, 1778 nt, Artificial Sequence
  SARS-CoV-2__MT533204.1__non-structural protein 4 (NSP4) mRNA gc
aggagagucccgcagucggcguccagcggcucugcuuguucgugugugugucguugcaggccuuauucaagcuuaccaugaagaucgugaacaacuggcugaagcagcucaucaaggucacccugguguuccuguucguggccgccaucuucuaccucaucacccccguccacgugaugagcaagcacacggacuucuccagcgagaucaucggcuacaaggcgaucgacgggggcgugacccgcgacaucgccuccaccgacacgugcuucgccaacaagcacgccgacuucgacaccugguucagccagcggggcggcuccuacaccaacgacaaggccugcccccugaucgcggccgucaucacccgcgaggugggguucgugguccccggccugcccggcaccauccuccggacgaccaacggggacuuccugcacuuccugccccgcguguucagcgccgugggcaacaucugcuacaccccguccaagcucaucgaguacaccgacuucgccacgagcgcgugcguccuggccgccgagugcaccaucuucaaggacgccuccgggcggcccgugcccuacugcuacgacaccaacgugcuggagggcagcgucgccuacgagucccuccgccccgacacccgguacgugcugauggacgggagcaucauccaguucccgaacacguaccuggagggcuccgugcgcgucgugaccaccuucgacagcgaguacugccggcacgggaccugcgagcgcuccgaggcgggggugugcgucagcacguccggccggugggugcucaacaacgacuacuaccgcagccugcccgggguguucugcggcgucgacgccgugaaccugcucaccaacauguucacgccccugauccagcccaucggcgcccuggacaucuccgccagcaucgucgccgggggcaucguggcgaucguggugaccugccucgccuacuacuucaugcgguuccgccgggccuucggggaguacagccacgucguggccuucaacacccugcuguuccucauguccuucaccguccugugccugaccccgguguacagcuuccuccccggcguguacuccgucaucuaccuguaccugaccuucuaccucacgaacgacgugagcuuccuggcccacauccaguggauggugauguucacgccccugguccccuucuggaucaccaucgcguacaucaucugcaucuccaccaagcacuucuacugguucuucagcaacuaccucaagcgccgggugguguucaacggggucuccuucagcaccuucgaggaggccgcccugugcaccuuccugcucaacaaggagauguaccugaagcugcgcuccgacgugcuccugccgcugacccaguacaaccgguaccucgcccuguacaacaaguacaaguacuucagcggcgccauggacaccacguccuaccgcgaggcggccugcugccaccuggccaaggcccucaacgacuucagcaacuccggcagcgacgugcuguaccagccgccccagaccuccaucaccagcgcgguccugcagugaggacuagucccuguucccagagcccacuuuuuuuucuuuuuuugaaauaaaauagccugucuuucagaucucaaaggcucuuuucagagccaccaaaaaaaaaaaaaaaaaaaaaaaaaaaaaaaaaaaaaaaaaaaaaaaaaaaaaaaaaaaaaaaaaaaaaaaaaaaaaaaaaaaaaaaaaaaaaaaaaaaaa

SEQ ID NO: 20296 - RNA, 1778 nt, Artificial Sequence
  SARS-CoV-2__MT512440.1__non-structural protein 4 (NSP4) mRNA gc
aggagagucccgcagucggcguccagcggcucugcuuguucgugugugugucguugcaggccuuauucaagcuuaccaugaagaucgugaacaacuggcugaagcagcucaucaaggucacccugguguuccuguucguggccgccaucuucuaccucaucacccccguccacgugaugagcaagcacacggacuucuccagcgagaucaucggcuacaaggcgaucgacgggggcgugacccgcgacaucgccuccaccgacacgugcuucgccaacaagcacgccgacuucgacaccugguucagccagcggggcggcuccuacaccaacgacaaggccugcccccugaucgcggccgucaucacccgcgaggugggguucgugguccccggccugcccggcaccauccuccggacgaccaacggggacuuccugcacuuccugccccgcguguucagcgccgugggcaacaucugcuacaccccguccaagcucaucgaguacaccgacuucgccacgagcgcgugcguccuggccgccgagugcaccaucuucaaggacgccuccgggaagcccgugcccuacugcuacgacaccaacgugcuggagggcagcgucgccuacgagucccuccggcccgacacccgcuacgugcugauggacgggagcaucauccaguucccgaacacguaccuggagggcuccgugcgggucgugaccaccuucgacagcgaguacugccgccacgggaccugcgagcgguccgaggcgggggugugcgucagcacguccggccgcugggugcucaacaacgacuacuaccggagccugcccgggguguucugcggcgucgacgccgugaaccugcucaccaacauguucacgccccugauccagcccaucggcgcccuggacaucuccgccagcaucgucgccgggggcaucguggcgaucguggugaccugccucgccuacuacuucaugcgcuuccggcgcgccuucggggaguacagccacgucguggccuucaacacccugcuguuccucauguccuucaccguccugugccugaccccgguguacagcuuccuccccggcguguacuccgucaucuaccuguaccugaccuucuaccucacgaacgacgugagcuuccuggcccacauccaguggauggugauguucacgccccugguccccuucuggaucaccaucgcguacaucaucugcaccuccaccaagcacuucuacugguucuucagcaacuaccucaagcggcgcgugguguucaacggggucuccuucagcaccuucgaggaggccgcccugugcaccuuccugcucaacaaggagauguaccugaagcugcgguccgacgugcuccugccgcugacccaguacaaccgcuaccucgcccuguacaacaaguacaaguacuucagcggcgccauggacacgaccuccuaccgggaggcggccugcugccaccuggccaaggcccucaacgacuucagcaacuccggcagcgacgugcuguaccagccgccccagaccuccaucaccagcgcgguccugcagugaggacuagucccuguucccagagcccacuuuuuuuucuuuuuuugaaauaaaauagccugucuuucagaucucaaaggcucuuuucagagccaccaaaaaaaaaaaaaaaaaaaaaaaaaaaaaaaaaaaaaaaaaaaaaaaaaaaaaaaaaaaaaaaaaaaaaaaaaaaaaaaaaaaaaaaaaaaaaaaaaaaaa

SEQ ID NO: 20297 - RNA, 1778 nt, Artificial Sequence
  SARS-CoV-2__MT509489.1__non-structural protein 4 (NSP4) mRNA gc
aggagagucccgcagucggcguccagcggcucugcuuguucgugugugugucguugcaggccuuauucaagcuuaccaugaagaucgugaacaacuggcugaagcagcucaucaaggucacccugguguuccuguucguggccgccaucuucuaccucaucacccccguccacgugaugagcaagcacacggacuucuccagcgagaucaucggcuacaaggugaucgacgggggcgucacccgcgacaucgcguccaccgacacgugcuucgccaacaagcacgccgacuucgacaccugguucagccagcggggcggcuccuacaccaacgacaaggccugcccccugaucgccgcggugaucacccgcgaggugggguucgucgugcccggccugcccggcaccauccuccggacgaccaacggggacuuccugcacuuccugccccgcguguucagcgccgucggcaacaucugcuacaccccguccaagcucaucgaguacaccgacuucgccacgagcgccugcgugcuggcggccgagugcaccaucuucaaggacgccuccgggaagcccgugcccuacugcuacgacaccaacguccuggagggcagcguggccuacgagucccuccggcccgacacccgcuacgugcugauggacgggagcaucauccaguucccgaacacguaccuggagggcuccguccggguggugaccaccuucgacagcgaguacugccgccacgggaccugcgagcgguccgaggccggggucugcgugagcacguccggccgcugggugcucaacaacgacuacuaccggagccugcccggggucuucugcggcguggacgcggucaaccugcucaccaacauguucacgccccugauccagcccaucggcgcccuggacaucuccgccagcaucguggccgggggcaucguggccaucgucgugaccugccucgcguacuacuucaugcgcuuccggcgcgccuucggggaguacagccacguggucgccuucaacacccugcuguuccucauguccuucaccgugcugugccugaccccgguguacagcuuccuccccggcgucuacuccgugaucuaccuguaccugaccuucuaccucacgaacgacgugagcuuccuggcccacauccaguggauggucauguucacgccccuggugcccuucuggaucaccaucgccuacaucaucugcaucuccaccaagcacuucuacugguucuucagcaacuaccucaagcggcgcguggucuucaacgggguguccuucagcaccuucgaggaggcggcccugugcaccuuccugcucaacaaggagauguaccugaagcugcgguccgacgugcuccugccgcugacccaguacaaccgcuaccucgcccuguacaacaaguacaaguacuucagcggcgccauggacaccacguccuaccgggaggccgcgugcugccaccuggccaaggcccucaacgacuucagcaacuccggcagcgacguccuguaccagccgccccagaccuccaucaccagcgccgugcugcagugaggacuagucccuguucccagagcccacuuuuuuuucuuuuuuugaaauaaaauagccugucuuucagaucucaaaggcucuuuucagagccaccaaaaaaaaaaaaaaaaaaaaaaaaaaaaaaaaaaaaaaaaaaaaaaaaaaaaaaaaaaaaaaaaaaaaaaaaaaaaaaaaaaaaaaaaaaaaaaaaaaaaa

SEQ ID NO: 20298 - RNA, 1778 nt, Artificial Sequence
  SARS-CoV-2__MT506886.1__non-structural protein 4 (NSP4) mRNA gc
aggagagucccgcagucggcguccagcggcucugcuuguucgugugugugucguugcaggccuuauucaagcuuaccaugaagaucgugaacaacuggcugaagcagcucaucaaggucacccugguguuccuguucguggccgccaucuucuaccucaucacccccguccacgugaugagcaagcacacggacuucuccagcgagaucaucggcuacaaggcgaucgacgggggcgugacccgcgacaucgccuccaccgacacgugcuucgccaacaagcacgccgacuucgacaccugguucagccagcggggcggcuccuacaccaacgacaaggccugcccccugaucgcggccgucaucacccgcgaggugggguucgugguccccggccugcccggcaccauccuccggacgaccaacggggacuuccugcacuuccugccccgcguguucagcgccgugggcaacaucugcuacaccccguccaagcucgucgaguacaccgacuucgccacgagcgcgugcgugcuggccgccgagugcaccaucuucaaggacgccuccgggaagcccgugcccuacugcuacgacaccaacguccuggagggcagcguggccuacgagucccuccggcccgacacccgcuacgugcugauggacgggagcaucauccaguucccgaacacguaccuggagggcuccguccggguggugaccaccuucgacagcgaguacugccgccacgggaccugcgagcgguccgaggcgggggucugcgugagcacguccggccgcugggugcucaacaacgacuacuaccggagccugcccggggucuucugcggcguggacgccgucaaccugcucaccaacauguucacgccccugauccagcccaucggcgcccuggacaucuccgccagcaucguggccgggggcaucguggcgaucgucgugaccugccucgccuacuacuucaugcgcuuccggcgcgccuucggggaguacagccacguggucgccuucaacacccugcuguuccucauguccuucaccgugcugugccugaccccgguguacagcuuccuccccggcgucuacuccgugaucuaccuguaccugaccuucuaccucacgaacgacgugagcuuccuggcccacauccaguggauggucauguucacgccccuggugcccuucuggaucaccaucgcguacaucaucugcaucuccaccaagcacuucuacugguucuucagcaacuaccucaagcggcgcguggucuucaacgggguguccuucagcaccuucgaggaggccgcccugugcaccuuccugcucaacaaggagauguaccugaagcugcgguccgacgugcuccugccgcugacccaguacaaccgcuaccucgcccuguacaacaaguacaaguacuucagcggcgccauggacaccacguccuaccgggaggcggccugcugccaccuggccaaggcccucaacgacuucagcaacuccggcagcgacguccuguaccagccgccccagaccuccaucaccagcgcggugcugcagugaggacuagucccuguucccagagcccacuuuuuuuucuuuuuuugaaauaaaauagccugucuuucagaucucaaaggcucuuuucagagccaccaaaaaaaaaaaaaaaaaaaaaaaaaaaaaaaaaaaaaaaaaaaaaaaaaaaaaaaaaaaaaaaaaaaaaaaaaaaaaaaaaaaaaaaaaaaaaaaaaaaaa

SEQ ID NO: 20299 - RNA, 1778 nt, Artificial Sequence
  SARS-CoV-2__MT499188.1__non-structural protein 4 (NSP4) mRNA gc
aggagagucccgcagucggcguccagcggcucugcuuguucgugugugugucguugcaggccuuauucaagcuuaccaugaagaucgugaacaacuggcugaagcagcucaucaaggucacccugguguuccuguucguggccgccaucuucuaccucaucacccccguccacgugaugagcaagcacacggacuucuccagcgagaucaucggcuacaaggcgaucgacgggggcgugacccgcgacaucgccuccaccgacacgugcuucgccaacaagcacgccgacuucgacaccugguucagccagcggggcggcuccuacaccaacgacaaggccugcccccugaucgcggccgucaucacccgcgaggugggguucgugguccccggccugcccggcaccgugcuccggacgaccaacggggacuuccugcacuuccugccccgcguguucagcgccgucggcaacaucugcuacaccccguccaagcucaucgaguacaccgacuucgccacgagcgcgugcgugcuggccgccgagugcaccaucuucaaggacgccuccgggaagcccgugcccuacugcuacgacaccaacguccuggagggcagcguggccuacgagucccuccggcccgacacccgcuacgugcugauggacgggagcaucauccaguucccgaacacguaccuggagggcuccguccggguggugaccaccuucgacagcgaguacugccgccacgggaccugcgagcgguccgaggcgggggucugcgugagcacguccggccgcugggugcucaacaacgacuacuaccggagccugcccggggucuucugcggcguggacgccgucaaccugcucaccaacauguucacgccccugauccagcccaucggcgcccuggacaucuccgccagcaucguggccgggggcaucguggcgaucgucgugaccugccucgccuacuacuucaugcgcuuccggcgcgccuucggggaguacagccacguggucgccuucaacacccugcuguuccucauguccuucaccgugcugugccugaccccgguguacagcuuccuccccggcgucuacuccgugaucuaccuguaccugaccuucuaccucacgaacgacgugagcuuccuggcccacauccaguggauggucauguucacgccccuggugcccuucuggaucaccaucgcguacaucaucugcaucuccaccaagcacuucuacugguucuucagcaacuaccucaagcggcgcguggucuucaacgggguguccuucagcaccuucgaggaggccgcccugugcaccuuccugcucaacaaggagauguaccugaagcugcgguccgacgugcuccugccgcugacccaguacaaccgcuaccucgcccuguacaacaaguacaaguacuucagcggcgccauggacaccacguccuaccgggaggcggccugcugccaccuggccaaggcccucaacgacuucagcaacuccggcagcgacguccuguaccagccgccccagaccuccaucaccagcgcggugcugcagugaggacuagucccuguucccagagcccacuuuuuuuucuuuuuuugaaauaaaauagccugucuuucagaucucaaaggcucuuuucagagccaccaaaaaaaaaaaaaaaaaaaaaaaaaaaaaaaaaaaaaaaaaaaaaaaaaaaaaaaaaaaaaaaaaaaaaaaaaaaaaaaaaaaaaaaaaaaaaaaaaaaaa

SEQ ID NO: 20300 - RNA, 1778 nt, Artificial Sequence
  SARS-CoV-2__MT499209.1__non-structural protein 4 (NSP4) mRNA gc
aggagagucccgcagucggcguccagcggcucugcuuguucgugugugugucguugcaggccuuauucaagcuuaccaugaagaucgugaacaacuggcugaagcagcucaucaaggucacccugguguuccuguucguggccgccaucuucuaccucaucacccccguccacgugaugagcaagcacacggacuucuccagcgagaucaucggcuacaaggcgaucgacgggggcgugacccgcgacaucgccuccaccgacacgugcuucgccaacaagcacgccgacuucgacaccugguucagccagcggggcggcuccuacaccaacgacaaggccugcccccugaucgcggccgucaucacccgcgaggugggguucgugguccccggccugcccggcaccauccuccggacgaccaacggggacuuccugcacuuccugccccgcguguucagcgccgugggcaacaucugcuacaccccguccaagcucaucgaguacaccgacuucgccacgagcgcgugcguccuggccgccgagugcaccaucuucaaggacgccuccgggaagcccgugcccuacugcuacgacaccaacgugcuggagggcagcgucgccuacgagucccuccggcccgacacccgcuacgugcugauggacgggagcaucauccaguucccgaacacguaccuggaguccagcgugcgggucgugaccaccuucgacuccgaguacugccgccacgggaccugcgagcggagcgaggcgggcgugugcgucuccacgagcgggcgcugggugcucaacaacgacuacuaccggucccugcccggcguguucugcggggucgacgccgugaaccugcucaccaacauguucacgccccugauccagcccaucggcgcccuggacaucagcgccagcaucgucgccggcgggaucguggcgaucguggugaccugccucgccuacuacuucaugcgcuuccggcgcgccuucggcgaguacucccacgucguggccuucaacacccugcuguuccucaugagcuucaccguccugugccugaccccgguguacuccuuccuccccgggguguacagcgucaucuaccuguaccugaccuucuaccucacgaacgacguguccuuccuggcccacauccaguggauggugauguucacgccccugguccccuucuggaucaccaucgcguacaucaucugcaucagcaccaagcacuucuacugguucuucuccaacuaccucaagcggcgcgugguguucaacggcgucagcuucuccaccuucgaggaggccgcccugugcaccuuccugcucaacaaggagauguaccugaagcugcggagcgacgugcuccugccgcugacccaguacaaccgcuaccucgcccuguacaacaaguacaaguacuucuccggggccauggacaccacgagcuaccgggaggcggccugcugccaccuggccaaggcccucaacgacuucuccaacagcggcuccgacgugcuguaccagccgccccagaccagcaucaccuccgcgguccugcagugaggacuagucccuguucccagagcccacuuuuuuuucuuuuuuugaaauaaaauagccugucuuucagaucucaaaggcucuuuucagagccaccaaaaaaaaaaaaaaaaaaaaaaaaaaaaaaaaaaaaaaaaaaaaaaaaaaaaaaaaaaaaaaaaaaaaaaaaaaaaaaaaaaaaaaaaaaaaaaaaaaaaa

SEQ ID NO: 20301 - RNA, 1778 nt, Artificial Sequence
  SARS-CoV-2__MT477852.1__non-structural protein 4 (NSP4) mRNA gc
aggagagucccgcagucggcguccagcggcucugcuuguucgugugugugucguugcaggccuuauucaagcuuaccaugaagaucgugaacaacuggcugaagcagcucaucaaggucacccugcuguuccucuucguggccgccaucuucuaccugaucacccccgugcacgucaugagcaagcacacggacuucuccagcgagaucaucggcuacaaggcgaucgacgggggcgugacccgcgacaucgccuccaccgacacgugcuucgccaacaagcacgccgacuucgacaccugguucagccagcggggcggcuccuacaccaacgacaaggccugcccccugaucgcggccgugaucacccgcgaggucggguucguggugcccggccuccccggcaccauccugcggacgaccaacggggacuuccugcacuuccucccccgcgucuucagcgccgugggcaacaucugcuacaccccguccaagcugaucgaguacaccgacuucgccacgagcgcgugcgugcuggccgccgagugcaccaucuucaaggacgccuccgggaagcccguccccuacugcuacgacaccaacgugcucgagggcagcguggccuacgagucccugcggcccgacacccgcuacguccugauggacgggagcaucauccaguucccgaacacguaccucgagggcuccgugcggguggucaccaccuucgacagcgaguacugccgccacgggaccugcgagcgguccgaggcgggggugugcgugagcacguccggccgcuggguccugaacaacgacuacuaccggagccugcccgggguguucugcggcguggacgccgucaaccuccugaccaacauguucacgccccugauccagcccaucggcgcccucgacaucuccgccagcaucguggccgggggcaucgucgcgaucguggugaccugccuggccuacuacuucaugcgcuuccggcgcgccuucggggaguacagccacgucguggccuucaacacccuccuguuccugauguccuucaccgugcugugccucaccccggucuacagcuuccugcccggcguguacuccgugaucuaccuguaccucaccuucuaccugacgaacgacgucagcuuccuggcccacauccaguggauggugauguucacgccccucgugcccuucuggaucaccaucgcguacaucaucugcaucuccaccaagcacuucuacugguucuucagcaacuaccugaagcggcgcgucguguucaacgggguguccuucagcaccuucgaggaggccgcccugugcaccuuccuccugaacaaggagauguaccugaagcuccgguccgacguccugcugccgcucacccaguacaaccgcuaccuggcccuguacaacaaguacaaguacuucagcggcgccauggacaccacguccuaccgggaggcggccugcugccaccucgccaaggcccugaacgacuucagcaacuccggcagcgacgugcuguaccagccgccccagaccuccaucaccagcgcggugcugcagugaggacuagucccuguucccagagcccacuuuuuuuucuuuuuuugaaauaaaauagccugucuuucagaucucaaaggcucuuuucagagccaccaaaaaaaaaaaaaaaaaaaaaaaaaaaaaaaaaaaaaaaaaaaaaaaaaaaaaaaaaaaaaaaaaaaaaaaaaaaaaaaaaaaaaaaaaaaaaaaaaaaaa

SEQ ID NO: 20302 - RNA, 1778 nt, Artificial Sequence
  SARS-CoV-2__MT481932.1__non-structural protein 4 (NSP4) mRNA gc
aggagagucccgcagucggcguccagcggcucugcuuguucgugugugugucguugcaggccuuauucaagcuuaccaugaagaucgugaacaacuggcugaagcagcucaucaaggucacccugguguuccuguucguggccgccaucuucuaccucaucacccccguccacgugaugagcaagcacacggacuucuccagcgagaucaucggcuacaaggcgaucgacgggggcgugacccgcgacaucgccuccaccgacacgugcuucgccaacaagcacgccgacuucgacaccugguucagccagcggggcggcuccuacaccaacgacaaggccugcccccugaucgcggccgucaucacccgcgaggugggguucgugguccccggccugcccggcaccauccuccggacgaccaacggggacuuccugcacuuccugccccgcguguucagcgccgugggcaacaucugcuacaccccguccaagcucaucgaguacaccgacuucgccacgagcgcgugcguccuggccgccgagugcaccaucuucaaggacgccuccgggaagcccgugcccuacugcuacgacaccaacgugcuggagggcagcgucgccuacgagucccuccggcccgacacccgcuacgugcugauggacgggagcaucauccaguucccgaacacguaccuggagggcuccgugcgggucgugaccaccuucgacagcgaguacugccgccacgggaccugcgagcgguccgaggcgggggugugcgucagcacguccggccgcugggugcucaacaacgacuacuaccggagccugcccgggguguucugcggcgucgacgccgugaaccugcucaccaacauguucacgccccugauccagcccaucggcgcccuggacaucuccgccagcaucgucgccgggggcaucguggcgaucguggugaccugccucgccuacuacuucaugcgcuuccggcgcgccuucggggaguacagccacgucguggccuucaacacccugcuguuccucauguccuucaccguccugugccugaccccgguguaccucuuccugcccggcguguacagcgucaucuaccuguaccucaccuucuaccugacgaacgacguguccuuccuggcccacauccaguggauggugauguucacgccccucguccccuucuggaucaccaucgcguacaucaucugcaucagcaccaagcacuucuacugguucuucuccaacuaccugaagcggcgcgugguguucaacggggucagcuucuccaccuucgaggaggccgcccugugcaccuuccuccugaacaaggagauguaccugaagcuccggagcgacgugcugcugccgcucacccaguacaaccgcuaccuggcccuguacaacaaguacaaguacuucuccggcgccauggacaccacgagcuaccgggaggcggccugcugccaccucgccaaggcccugaacgacuucuccaacagcggcuccgacgugcuguaccagccgccccagaccagcaucaccuccgcgguccugcagugaggacuagucccuguucccagagcccacuuuuuuuucuuuuuuugaaauaaaauagccugucuuucagaucucaaaggcucuuuucagagccaccaaaaaaaaaaaaaaaaaaaaaaaaaaaaaaaaaaaaaaaaaaaaaaaaaaaaaaaaaaaaaaaaaaaaaaaaaaaaaaaaaaaaaaaaaaaaaaaaaaaaa

SEQ ID NO: 20303 - RNA, 1778 nt, Artificial Sequence
  SARS-CoV-2__MT482148.1__non-structural protein 4 (NSP4) mRNA gc
aggagagucccgcagucggcguccagcggcucugcuuguucgugugugugucguugcaggccuuauucaagcuuaccaugaagaucgugaacaacuggcugaagcagcucaucaaggucacccugguguuccuguucguggccgccaucuucuaccucaucacccccguccacgugaugagcaagcacacggacuucuccagcgagaucaucggcuacaaggcgaucgacgggggcgugacccgcgacaucgccuccaccgacacgugcuucgccaacaagcacgccgacuucgacaccugguucagccagcggggcggcuccuacaccaacgacaaggccugcccccugaucgcggccgucaucacccgcgaggugggguucgugguccccggccugcccagcaccauccuccggacgaccaacggcgacuuccugcacuuccugccccgcguguucuccgccguggggaacaucugcuacaccccgagcaagcucaucgaguacaccgacuucgccacguccgcgugcguccuggccgccgagugcaccaucuucaaggacgccagcggcaagcccgugcccuacugcuacgacaccaacgugcuggagggguccgucgccuacgagagccuccggcccgacacccgcuacgugcugauggacggcuccaucauccaguucccgaacacguaccuggaggggagcgugcgggucgugaccaccuucgacuccgaguacugccgccacgggaccugcgagcggagcgaggcgggcgugugcgucuccacgagcgggcgcugggugcucaacaacgacuacuaccggucccugcccggcguguucugcggggucgacgccgugaaccugcucaccaacauguucacgccccugauccagcccaucggcgcccuggacaucagcgccagcaucgucgccggcgggaucguggcgaucguggugaccugccucgccuacuacuucaugcgcuuccggcgcgccuucggcgaguacucccacgucguggccuucaacacccugcuguuccucaugagcuucaccguccugugccugaccccgguguacuccuuccuccccgggguguacagcgucaucuaccuguaccugaccuucuaccucacgaacgacguguccuuccuggcccacauccaguggauggugauguucacgccccugguccccuucuggaucaccaucgcguacaucaucugcaucagcaccaagcacuucuacugguucuucuccaacuaccucaagcggcgcgugguguucaacggcgucagcuucuccaccuucgaggaggccgcccugugcaccuuccugcucaacaaggagauguaccugaagcugcggagcgacgugcuccugccgcugacccaguacaaccgcuaccucgcccuguacaacaaguacaaguacuucuccggggccauggacaccacgagcuaccgggaggcggccugcugccaccuggccaaggcccucaacgacuucuccaacagcggcuccgacgugcuguaccagccgccccagaucagcaucaccuccgcgguccugcagugaggacuagucccuguucccagagcccacuuuuuuuucuuuuuuugaaauaaaauagccugucuuucagaucucaaaggcucuuuucagagccaccaaaaaaaaaaaaaaaaaaaaaaaaaaaaaaaaaaaaaaaaaaaaaaaaaaaaaaaaaaaaaaaaaaaaaaaaaaaaaaaaaaaaaaaaaaaaaaaaaaaaa

SEQ ID NO: 20304 - RNA, 1778 nt, Artificial Sequence
  SARS-CoV-2__MT079843.1__non-structural protein 4 (NSP4) mRNA gc
aggagagucccgcagucggcguccagcggcucugcuuguucgugugugugucguugcaggccuuauucaagcuuaccaugaagaucgugaacaacuggcugaagcagcucaucaaggucacccugguguuccuguucguggccgccaucuucuaccucaucacccccguccacgugaugagcaagcacacggacuucuccagcgagaucaucggcuacaaggcgaucgacgggggcgugacccgcgacaucgccuccaccgacacgugcuucgccaacaagcacgccgacuucgacaccugguucagccagcggggcggcuccuacaccaacgacaaggccugcccccugaucgcggccgucaucacccgcgaggugggguucgugguccccggccugcccggcaccaucagccggacgaccaacggggacuuccuccacuuccugccccgcguguucuccgccgugggcaacaucugcuacaccccgagcaagcugaucgaguacaccgacuucgccacguccgcgugcguccucgccgccgagugcaccaucuucaaggacgccagcgggaagcccgugcccuacugcuacgacaccaacgugcuggagggcuccgucgccuacgagagccugcggcccgacacccgcuacgugcucauggacggguccaucauccaguucccgaacacguaccuggagggcagcgugcgggucgugaccaccuucgacuccgaguacugccgccacgggaccugcgagcggagcgaggcgggggugugcgucuccacgagcggccgcugggugcugaacaacgacuacuaccggucccuccccgggguguucugcggcgucgacgccgugaaccugcugaccaacauguucacgccccucauccagcccaucggcgcccuggacaucagcgccagcaucgucgccgggggcaucguggcgaucguggugaccugccuggccuacuacuucaugcgcuuccggcgcgccuucggggaguacucccacgucguggccuucaacacccuccuguuccugaugagcuucaccguccucugccugaccccgguguacuccuuccugcccggcguguacagcgucaucuaccucuaccugaccuucuaccugacgaacgacguguccuuccucgcccacauccaguggauggugauguucacgccccugguccccuucuggaucaccaucgcguacaucaucugcaucagcaccaagcacuucuacugguucuucuccaacuaccugaagcggcgcgugguguucaacggggucagcuucuccaccuucgaggaggccgcccucugcaccuuccugcugaacaaggagauguaccucaagcugcggagcgacgugcugcucccgcugacccaguacaaccgcuaccuggcccucuacaacaaguacaaguacuucuccggcgccauggacaccacgagcuaccgggaggcggccugcugccaccuggccaaggcccugaacgacuucuccaacagcggcuccgacgugcucuaccagccgccccagaccagcaucaccuccgcgguccugcagugaggacuagucccuguucccagagcccacuuuuuuuucuuuuuuugaaauaaaauagccugucuuucagaucucaaaggcucuuuucagagccaccaaaaaaaaaaaaaaaaaaaaaaaaaaaaaaaaaaaaaaaaaaaaaaaaaaaaaaaaaaaaaaaaaaaaaaaaaaaaaaaaaaaaaaaaaaaaaaaaaaaaa

SEQ ID NO: 20305 - RNA, 1778 nt, Artificial Sequence
  SARS-CoV-2__MT459878.1__non-structural protein 4 (NSP4) mRNA gc
aggagagucccgcagucggcguccagcggcucugcuuguucgugugugugucguugcaggccuuauucaagcuuaccaugaagaucgugaacaacuggcugaagcagcucaucaaggucacccugguguuccuguucguggccgccaucuucuaccucaucacccccguccacgugaugagcaagcacacggacuucuccagcgagaucaucggcuacaaggcgaucgacgggggcgugacccgcgacaucgccuccaccgacacgugcuucgccaacaagcacgccgacuucgacaccugguucagccagcggggcggcuccuacaccaacgacaaggccugcccccugaucgcggccgucaucacccgcgaggugggguucgugguccccggccugcccggcaccauccuccggacgaccaacggggacuuccugcacuuccugccccgcguguucagcgccgugggcaacaucugcuacaccccguccaagcucaucgaguacaccgacuucgccacgagcgcgugcguccuggccgccgagugcaccaucuucaaggacguguccgggaagcccgugcccuacugcuacgacaccaacguccuggagggcagcguggccuacgagucccuccggcccgacacccgcuacgugcugauggacgggagcaucauccaguucccgaacacguaccuggagggcuccguccggguggugaccaccuucgacagcgaguacugccgccacgggaccugcgagcgguccgaggccggggucugcgugagcacguccggccgcugggugcucaacaacgacuacuaccggagccugcccggggucuucugcggcguggacgcggucaaccugcucaccaacauguucacgccccugauccagcccaucggcgcccuggacaucuccgccagcaucguggccgggggcaucguggccaucgucgugaccugccucgcguacuacuucaugcgcuuccggcgcgccuucggggaguacagccacguggucgccuucaacacccugcuguuccucauguccuucaccgugcugugccugaccccgguguacagcuuccuccccggcgucuacuccgugaucuaccuguaccugaccuucuaccucacgaacgacgugagcuuccuggcccacauccaguggauggucauguucacgccccuggugcccuucuggaucaccaucgccuacaucaucugcaucuccaccaagcacuucuacugguucuucagcaacuaccucaagcggcgcguggucuucaacgggguguccuucagcaccuucgaggaggcggcccugugcaccuuccugcucaacaaggagauguaccugaagcugcgguccgacgugcuccugccgcugacccaguacaaccgcuaccucgcccuguacaacaaguacaaguacuucagcggcgccauggacaccacguccuaccgggaggccgcgugcugccaccuggccaaggcccucaacgacuucagcaacuccggcagcgacguccuguaccagccgccccagaccuccaucaccagcgccgugcugcagugaggacuagucccuguucccagagcccacuuuuuuuucuuuuuuugaaauaaaauagccugucuuucagaucucaaaggcucuuuucagagccaccaaaaaaaaaaaaaaaaaaaaaaaaaaaaaaaaaaaaaaaaaaaaaaaaaaaaaaaaaaaaaaaaaaaaaaaaaaaaaaaaaaaaaaaaaaaaaaaaaaaaa

SEQ ID NO: 20306 - RNA, 1778 nt, Artificial Sequence
  SARS-CoV-2__MT459985.1__non-structural protein 4 (NSP4) mRNA gc
aggagagucccgcagucggcguccagcggcucugcuuguucgugugugugucguugcaggccuuauucaagcuuaccaugaagaucgugaacaacuggcugaagcagcucaucaaggucacccugguguuccuguucguggccgccaucuucuaccucaucacccccguccacgugaugagcaagcacacggacuucuccagcgagaucaucggcuacaaggcgaucgacgggggcgugacccgcgacaucgccuccaccgacacgugcuucgccaacaagcacgccgacuucgacaccugguucagccagcggggcggcuccuacaccaacgacaaggccugcccccugaucgcggccgucaucacccgcgagguggggcuggugguccccggccuccccggcaccauccugcggacgaccaacggggacuuccugcacuuccucccccgcguguucagcgccgugggcaacaucugcuacaccccguccaagcugaucgaguacaccgacuucgccacgagcgcgugcguccuggccgccgagugcaccaucuucaaggacgccuccgggaagcccgugcccuacugcuacgacaccaacgugcucgagggcagcgucgccuacgagucccugcggcccgacacccgcuacgugcugauggacgggagcaucauccaguucccgaacacguaccucgagggcuccgugcgggucgugaccaccuucgacagcgaguacugccgccacgggaccugcgagcgguccgaggcgggggugugcgucagcacguccggccgcugggugcugaacaacgacuacuaccggagccugcccgggguguucugcggcgucgacgccgugaaccuccugaccaacauguucacgccccugauccagcccaucggcgcccucgacaucuccgccagcaucgucgccgggggcaucguggcgaucguggugaccugccuggccuacuacuucaugcgcuuccggcgcgccuucggggaguacagccacgucguggccuucaacacccuccuguuccugauguccuucaccguccugugccucaccccgguguacagcuuccugcccggcguguacuccgucaucuaccuguaccucaccuucuaccugacgaacgacgugagcuuccuggcccacauccaguggauggugauguucacgccccucguccccuucuggaucaccaucgcguacaucaucugcaucuccaccaagcacuucuacugguucuucagcaacuaccugaagcggcgcgugguguucaacggggucuccuucagcaccuucgaggaggccgcccugugcaccuuccuccugaacaaggagauguaccugaagcuccgguccgacgugcugcugccgcucacccaguacaaccgcuaccuggcccuguacaacaaguacaaguacuucagcggcgccauggacaccacguccuaccgggaggcggccugcugccaccucgccaaggcccugaacgacuucagcaacuccggcagcgacgugcuguaccagccgccccagaccuccaucaccagcgcgguccugcagugaggacuagucccuguucccagagcccacuuuuuuuucuuuuuuugaaauaaaauagccugucuuucagaucucaaaggcucuuuucagagccaccaaaaaaaaaaaaaaaaaaaaaaaaaaaaaaaaaaaaaaaaaaaaaaaaaaaaaaaaaaaaaaaaaaaaaaaaaaaaaaaaaaaaaaaaaaaaaaaaaaaaa

SEQ ID NO: 20307 - RNA, 1778 nt, Artificial Sequence
  SARS-CoV-2__MT451244.1__non-structural protein 4 (NSP4) mRNA gc
aggagagucccgcagucggcguccagcggcucugcuuguucgugugugugucguugcaggccuuauucaagcuuaccaugaagaucgugaacaacuggcugaagcagcucaucaaggucacccugguguuccuguucguggccgccaucuucuaccucaucacccccguccacgugaugagcaaguacacggacuucuccagcgagaucaucggcuacaaggcgaucgacgggggcgugacccgcgacaucgccuccaccgacacgugcuucgccaacaagcacgccgacuucgacaccugguucagccagcggggcggcuccuacaccaacgacaaggccugcccccugaucgcggccgucaucacccgcgaggugggguucgugguccccggccugcccggcaccauccuccggacgaccaacggggacuuccugcacuuccugccccgcguguucagcgccgugggcaacaucugcuacaccccguccaagcucaucgaguacaccgacuucgccacgagcgcgugcguccuggccgccgagugcaccaucuucaaggacgccuccgggaagcccgugcccuacugcuacgacaccaacgugcuggagggcagcgucgccuacgagucccuccggcccgacacccgcuacgugcugauggacgggagcaucauccaguucccgaacacguaccuggagggcuccgugcgggucgugaccaccuucgacagcgaguacugccgccacgggaccugcgagcgguccgaggcgggggugugcgucagcacguccggccgcugggugcucaacaacgacuacuaccggagccugcccgggguguucugcggcgucgacgccgugaaccugcucaccaacauguucacgccccugauccagcccaucggcgcccuggacaucuccgccagcaucgucgccgggggcaucguggcgaucguggugaccugccucgccuacuacuucaugcgcuuccggcgcgccuucggggaguacagccacgucguggccuucaacacccugcuguuccucauguccuucaccguccugugccugaccccgguguacagcuuccuccccggcguguacuccgucaucuaccuguaccugaccuucuaccucacgaacgacgugagcuuccuggcccacauccaguggauggugauguucacgccccugguccccuucuggaucaccaucgcguacaucaucugcaucuccaccaagcacuucuacugguucuucagcaacuaccucaagcggcgcgugguguucaacggggucuccuucagcaccuucgaggaggccgcccugugcaccuuccugcucaacaaggagauguaccugaagcugcgguccgacgugcuccugccgcugacccaguacaaccgcuaccucgcccuguacaacaaguacaaguacuucagcggcgccauggacaccacguccuaccgggaggcggccugcugccaccuggccaaggcccucaacgacuucagcaacuccggcagcgacgugcuguaccagccgccccagaccuccaucaccagcgcgguccugcagugaggacuagucccuguucccagagcccacuuuuuuuucuuuuuuugaaauaaaauagccugucuuucagaucucaaaggcucuuuucagagccaccaaaaaaaaaaaaaaaaaaaaaaaaaaaaaaaaaaaaaaaaaaaaaaaaaaaaaaaaaaaaaaaaaaaaaaaaaaaaaaaaaaaaaaaaaaaaaaaaaaaaa

SEQ ID NO: 20308 - RNA, 1778 nt, Artificial Sequence
  SARS-CoV-2__MT451712.1__non-structural protein 4 (NSP4) mRNA gc
aggagagucccgcagucggcguccagcggcucugcuuguucgugugugugucguugcaggccuuauucaagcuuaccaugaagaucgugaacaacuggcugaagcagcucaucaaggucacccugguguuccuguucguggccgccaucuucuaccucaucacccccguccacgugaugagcaagcacacggacuucuccagcgagaucaucggcuacaaggcgaucgacgggggcgugacccgcgacaucgccuccaccgacacgugcuucgccaacaagcacgccgacuucgacaccugguucagccagcggggcggcuccuacaccaacgacaaggccugcccccugaucgcggccgucaucacccgcgaggugagcuucgugguccccgggcugcccggcaccauccuccggacgaccaacggcgacuuccugcacuuccugccccgcguguucuccgccguggggaacaucugcuacaccccgagcaagcucaucgaguacaccgacuucgccacguccgcgugcguccuggccgccgagugcaccaucuucaaggacgccagcggcaagcccgugcccuacugcuacgacaccaacgugcuggagggguccgucgccuacgagagccuccggcccgacacccgcuacgugcugauggacggcuccaucauccaguucccgaacacguaccuggaggggagcgugcgggucgugaccaccuucgacuccgaguacugccgccacgggaccugcgagcggagcgaggcgggcgugugcgucuccacgagcgggcgcugggugcucaacaacgacuacuaccggucccugcccggcguguucugcggggucgacgccgugaaccugcucaccaacauguucacgccccugauccagcccaucggcgcccuggacaucagcgccagcaucgucgccggcgggaucguggcgaucguggugaccugccucgccuacuacuucaugcgcuuccggcgcgccuucggcgaguacucccacgucguggccuucaacacccugcuguuccucaugagcuucaccguccugugccugaccccgguguacuccuuccuccccgggguguacagcgucaucuaccuguaccugaccuucuaccucacgaacgacguguccuuccuggcccacauccaguggauggugauguucacgccccugguccccuucuggaucaccaucgcguacaucaucugcaucagcaccaagcacuucuacugguucuucuccaacuaccucaagcggcgcgugguguucaacggcgucagcuucuccaccuucgaggaggccgcccugugcaccuuccugcucaacaaggagauguaccugaagcugcggagcgacgugcuccugccgcugacccaguacaaccgcuaccucgcccuguacaacaaguacaaguacuucuccggggccauggacaccacgagcuaccgggaggcggccugcugccaccuggccaaggcccucaacgacuucuccaacagcggcuccgacgugcuguaccagccgccccagaccagcaucaccuccgcgguccugcagugaggacuagucccuguucccagagcccacuuuuuuuucuuuuuuugaaauaaaauagccugucuuucagaucucaaaggcucuuuucagagccaccaaaaaaaaaaaaaaaaaaaaaaaaaaaaaaaaaaaaaaaaaaaaaaaaaaaaaaaaaaaaaaaaaaaaaaaaaaaaaaaaaaaaaaaaaaaaaaaaaaaaa

SEQ ID NO: 20309 - RNA, 1778 nt, Artificial Sequence
  SARS-CoV-2__MT451755.1__non-structural protein 4 (NSP4) mRNA gc
aggagagucccgcagucggcguccagcggcucugcuuguucgugugugugucguugcaggccuuauucaagcuuaccaugaagaucgugaacaacuggcugaagcagcucaucaaggucacccugguguuccuguucguggccgccaucuucuaccucaucacccccguccacgugaugagcaagcacacggacuucuccagcgagaucaucggcuacaaggcgaucgacgggggcgugacccgcgacaucgccuccaccgacacgugcuucgccaacaagcacgccgacuucgacaccugguucagccagcggggcggcuccuacaccaacgacaaggccugcccccugaucgcggccgucaucacccgcgaggugggguucgugguccccggccugcccggcaccauccuccggacgaccaacggggacuuccugcacuuccugccccgcguguucagcgccgugggcaacaucugcuacaccccguccaagcucaucgaguacaccgacuucgccacgagcgcgugcguccuggccgccgagugcaccaucuucaaggacgccuccgggaagcccgugcccuacugcuacgacaccaacgugcuggagggcagcgucgccuacgagucccuccggcccgacacccgcuacgugcugauggacgggagcaucauccaguucccgaacacguaccuggagggcuccgugcgggucgugaccaccuucgacagcgaguacugccgccacgggaccugcgagcgguccgaggcgggggugugcgucagcacguccggccgcugggugcucaacaacgacuacuaccggagccugcccgggguguucugcggcgucgacgccgugaaccugcucaccaacauguucacgccccugauccagcccaucggcgcccuggacaucuccgccagcaucgucgccgggggcaucguggcgaucguggugaccugccucgccuacuacuucaugcgcuuccggcgcgccuucggggaguacagccacgucguggccuucaacacccugcuguuccucauguccuucaccguccugugccugaccccgguguacagcuuccuccccggcguguacuccgucaucuaccuguaccugaccuucuaccucacgaacgacgugagcuuccuggcccacauccaguggauggugauguucacgccccugguccccuucuggaucaccaucgcguacaucaucugcguguccaccaagcacuucuacugguucuucagcaacuaccucaagcggcgcguggucuucaacgggguguccuucagcaccuucgaggaggccgcccugugcaccuuccugcucaacaaggagauguaccugaagcugcgguccgacgugcuccugccgcugacccaguacaaccgcuaccucgcccuguacaacaaguacaaguacuucagcggcgccauggacaccacguccuaccgggaggcggccugcugccaccuggccaaggcccucaacgacuucagcaacuccggcagcgacguccuguaccagccgccccagaccuccaucaccagcgcggugcugcagugaggacuagucccuguucccagagcccacuuuuuuuucuuuuuuugaaauaaaauagccugucuuucagaucucaaaggcucuuuucagagccaccaaaaaaaaaaaaaaaaaaaaaaaaaaaaaaaaaaaaaaaaaaaaaaaaaaaaaaaaaaaaaaaaaaaaaaaaaaaaaaaaaaaaaaaaaaaaaaaaaaaaa

SEQ ID NO: 20310 - RNA, 1778 nt, Artificial Sequence
  SARS-CoV-2__MT276600.1__non-structural protein 4 (NSP4) mRNA gc
aggagagucccgcagucggcguccagcggcucugcuuguucgugugugugucguugcaggccuuauucaagcuuaccaugaagaucgugaacaacuggcugaagcagcucaucaaggucacccugguguuccuguucguggccgccaucuucuaccucaucacccccguccacgugaugagcaagcacacggacuucuccagcgagaucaucggcuacaaggcgaucgacgggggcgugacccgcgacaucgccuccaccgacacgugcuucgccaacaagcacgccgacuucgacaccugguucagccagcggggcggcuccuacaccaacgacaaggccugcccccugaucgcggccgucaucacccgcgaggugggguucgugguccccggccugcccggcaccauccuccggacgaccaacggggacuuccugcacuuccugccccgcguguucagcgccgugggcaacaucugcuacaccccguccaagcucaucgaguacaccgacuucgccacgagcgcgugcguccuggccgccgagugcaccaucuucaaggacgccuccgggaagcccgugcccuacugcuacgacaccaacgugcuggagggcagcgucgccuacgagucccuccggcccgacacccgcuacgugcugauggacgggagcaucauccaguucccgaacacguaccuggagggcuccgugcgggucgugaccaccuucgacagcgaguacugccgccacgggaccugcgagcgguccgaggcgggggugugcgucagcacguccggccgcugggugcucaacaacgacuacuaccggagccugcccgggguguucugcggcgucgacgccgugaaccugcucaccaacauguucacgccccugauccagcccaucggcgcccuggacaucuccgccagcaucgucgccgggggcaucguggcgaucguggugaccugccucgccuacuacuucaugcgcuuccggcgcgccuucggggaguacagccacgucguggccuucaacacccugcuguuccucauguccuucaccguccugugccugaccccgguguacagcuuccuccccggcguguacuccgucaucuaccuguaccugaccuucuaccucacgaacgacgugagcuuccuggcccacauccaguggauggugauguucacgccccugguccccuucuggaucaccaucgcguacaucaucugcaucuccaccaagcacuucuacugguucuucagcaacuaccucaagcggcgcgugguguucaacggggucuccuucagcaccuucgaggaggccgcccugugcaccuuccugcucaacaaggagauguaccugaagcugcgguccgacgugcuccugccgcugacccaguacaaccgcuaccucgcccuguacaacaaguacaaguacuucagcggcgccauggacaccacguccuaccgggaggcggccugcugcuaccuggccaaggcccucaacgacuucagcaacuccggcagcgacgugcuguaccagccgccccagaccuccaucaccagcgcgguccugcagugaggacuagucccuguucccagagcccacuuuuuuuucuuuuuuugaaauaaaauagccugucuuucagaucucaaaggcucuuuucagagccaccaaaaaaaaaaaaaaaaaaaaaaaaaaaaaaaaaaaaaaaaaaaaaaaaaaaaaaaaaaaaaaaaaaaaaaaaaaaaaaaaaaaaaaaaaaaaaaaaaaaaa

SEQ ID NO: 20311 - RNA, 1778 nt, Artificial Sequence
  SARS-CoV-2__MT412337.1__non-structural protein 4 (NSP4) mRNA gc
aggagagucccgcagucggcguccagcggcucugcuuguucgugugugugucguugcaggccuuauucaagcuuaccaugaagaucgugaacaacuggcugaagcagcucaucaaggucacccugguguuccuguucguggccgccaucuucuaccucaucacccccguccacgugaugagcaagcacacggacuucuccagcgagaucaucggcuacaaggcgaucgacgggggcgugacccgcgacaucgccuccaccgacacgugcuucgccaacaagcacgccgacuucgacaccugguucagccagcggggcggcuccuacaccaacgacaaggccugcccccugaucgcggccgucaucacccgcgaggugggguucgugguccccggccugcccggcaccauccuccggacgaccaacggggacuuccugcacuuccugccccgcguguucagcgccgugggcaacaucugcuacaccccguccaagcucaucgaguacaccgacuucgccacgagcgcgugcguccuggccgccgagugcaccaucuucaaggacgccuccgggaagcccgugcccuacugcuacgacaccaacgugcuggagggcagcgucgccuacgagucccuccggcccgacacccgcuacgugcugauggacgggagcaucauccaguucccgaacacguaccuggagggcuccgugcgggucgugaccaccuucgacagcgaguacugccgccacgggaccugcgagcgguccgaggcgggggugugcgucagcacguccggccgcugggugcucaacaacgacuacuaccggagccugcccgggguguucugcggcgucgacgccgugaaccugcucaccaacauguucaucccccugauccagcccaucggcgcccuggacaucuccgccagcaucgucgccgggggcaucguggcgaucguggugaccugccucgccuacuacuucaugcgcuuccggcgcgccuucggggaguacagccacgucguggccuucaacacccugcuguuccucauguccuucacgguccugugccugaccccgguguacagcuuccuccccggcguguacuccgucaucuaccuguaccugaccuucuaccucaccaacgacgugagcuuccuggcccacauccaguggauggugauguucacgccccugguccccuucuggaucaccaucgcguacaucaucugcaucuccaccaagcacuucuacugguucuucagcaacuaccucaagcggcgcgugguguucaacggggucuccuucagcaccuucgaggaggccgcccugugcacguuccugcucaacaaggagauguaccugaagcugcgguccgacgugcuccugccgcugacccaguacaaccgcuaccucgcccuguacaacaaguacaaguacuucagcggcgccauggacaccaccuccuaccgggaggcggccugcugccaccuggccaaggcccucaacgacuucagcaacuccggcagcgacgugcuguaccagccgccccagacguccaucaccagcgcgguccugcagugaggacuagucccuguucccagagcccacuuuuuuuucuuuuuuugaaauaaaauagccugucuuucagaucucaaaggcucuuuucagagccaccaaaaaaaaaaaaaaaaaaaaaaaaaaaaaaaaaaaaaaaaaaaaaaaaaaaaaaaaaaaaaaaaaaaaaaaaaaaaaaaaaaaaaaaaaaaaaaaaaaaaa

SEQ ID NO: 20312 - RNA, 1778 nt, Artificial Sequence
  SARS-CoV-2__MT385450.1__non-structural protein 4 (NSP4) mRNA gc
aggagagucccgcagucggcguccagcggcucugcuuguucgugugugugucguugcaggccuuauucaagcuuaccaugaagaucgugaacaacuggcugaagcagcucaucaaggucacccugguguuccuguucguggccgccaucuucuaccucaucacccccguccacgugaugagcaagcacacggacuucuccagcgagaucaucggcuacaaggcgaucgacgggggcgugacccgcgacaucgccuccaccgacacgugcuucgccaacaagcacgccgacuucgacaccugguucagccagcggggcggcuccuacaccaacgacaaggccugcccccugaucgcggccgucaucacccgcgaggugggguucgugguccccggccugcccggcaccauccuccggacgaccaacggggacuuccugcacuuccugccccgcguguucagcgccgugggcaacaucugcuacaccccguccaagcucaucgaguacaccgacuucgccacgagcgcgugcguccuggccgccgagugcaccaucuucaaggacgccuccgggaaccccgugcccuacugcuacgacaccaacgugcuggagggcagcgucgccuacgagucccuccggcccgacacccgcuacgugcugauggacgggagcaucauccaguucccgaacacguaccuggagggcuccgugcgggucgugaccaccuucgacagcgaguacugccgccacgggaccugcgagcgguccgaggcgggggugugcgucagcacguccggccgcugggugcucaacaacgacuacuaccggagccugcccgggguguucugcggcgucgacgccgugaaccugcucaccaacauguucacgccccugauccagcccaucggcgcccuggacaucuccgccagcaucgucgccgggggcaucguggcgaucguggugaccugccucgccuacuacuucaugcgcuuccggcgcgccuucggggaguacagccacgucguggccuucaacacccugcuguuccucauguccuucaccguccugugccugaccccgguguacagcuuccuccccggcguguacuccgucaucuaccuguaccugaccuucuaccucacgaacgacgugagcuuccuggcccacauccaguggauggugauguucacgccccugguccccuucuggaucaccaucgcguacaucaucugcaucuccaccaagcacuucuacugguucuucagcaacuaccucaagcggcgcgugguguucaacggggucuccuucagcaccuucgaggaggccgcccugugcaccuuccugcucaacaaggagauguaccugaagcugcgguccgacgugcuccugccgcugacccaguacaaccgcuaccucgcccuguacaacaaguacaaguacuucagcggcgccauggacaccacguccuaccgggaggcggccugcugccaccuggccaaggcccucaacgacuucagcaacuccggcagcgacgugcuguaccagccgccccagaccuccaucaccagcgcgguccugcagugaggacuagucccuguucccagagcccacuuuuuuuucuuuuuuugaaauaaaauagccugucuuucagaucucaaaggcucuuuucagagccaccaaaaaaaaaaaaaaaaaaaaaaaaaaaaaaaaaaaaaaaaaaaaaaaaaaaaaaaaaaaaaaaaaaaaaaaaaaaaaaaaaaaaaaaaaaaaaaaaaaaaa

SEQ ID NO: 20313 - RNA, 1778 nt, Artificial Sequence
  SARS-CoV-2__MT252823.1__non-structural protein 4 (NSP4) mRNA gc
aggagagucccgcagucggcguccagcggcucugcuuguucgugugugugucguugcaggccuuauucaagcuuaccaugaagaucgugaacaacuggcugaagcagcucaucaaggucacccugguguuccuguucguggccgccaucuucuaccucaucacccccguccacgugaugagcaagcacacggacuucuccagcgagaucaucggcuacaaggcgaucgacgggggcgugacccgcgacaucgccuccaccgacacgugcuucgccaacaagcacgccgacuucgacaccugguucagccagcggggcggcuccuacaccaacgacaaggccugcccccugaucgcggccgucaucacccgcgaggugggguucgugguccccggccugcccggcaccauccuccggacgaccaacggggacuuccugcacuuccugccccgcguguucagcgccgugggcaacaucugcuacaccccguccaagcucaucgaguacaccgacuucgccacgagcgcgugcguccuggccgccgagugcaccaucuucaaggacgccuccgggaagcccgugcccuacugcuacgacaccaacgugcuggagggcagcgucgccuacgagucccuccggcccgacacccgcuacgugcugauggacgggagcaucauccaguucccgaacacguaccuggagggcuccgugcgggucgugaccaccuucgacagcgaguacugccgccacgggaccugcgagcgguccgaggcgggggugugcgucagcacguccggccgcugggugcucaacaacgacuacuaccggagccugcccgggguguucugcggcgucgacgccgugaaccugcucaccaacauguucacgccccugauccagcccaucggcgcccuggacaucuccgccagcaucgucgccgggggcaucguggcgaucguggugaccugccucgccuacuacuucaugcgcuuccggcgcgccuucggggaguacagccacgucguggccuucaacacccugcuguuccucauguccuucaccguccugugccugaccccgguguacagcuuccuccccggcguguacuccgucaucuaccuguaccugaccuucuaccucacgaacgacgugagcuuccuggcccacauccaguggauggugauguucacgccccugguccccuucuggaucaccaucgcguacaucauccucaucuccaccaagcacuucuacugguucuucagcaacuaccugaagcggcgcgugguguucaacggggucuccuucagcaccuucgaggaggccgcccugugcaccuuccuccugaacaaggagauguaccugaagcuccgguccgacgugcugcugccgcucacccaguacaaccgcuaccuggcccuguacaacaaguacaaguacuucagcggcgccauggacaccacguccuaccgggaggcggccugcugccaccucgccaaggcccugaacgacuucagcaacuccggcagcgacgugcuguaccagccgccccagaccuccaucaccagcgcgguccugcagugaggacuagucccuguucccagagcccacuuuuuuuucuuuuuuugaaauaaaauagccugucuuucagaucucaaaggcucuuuucagagccaccaaaaaaaaaaaaaaaaaaaaaaaaaaaaaaaaaaaaaaaaaaaaaaaaaaaaaaaaaaaaaaaaaaaaaaaaaaaaaaaaaaaaaaaaaaaaaaaaaaaaa

SEQ ID NO: 20314 - RNA, 1778 nt, Artificial Sequence
  SARS-CoV-2__MT358730.1__non-structural protein 4 (NSP4) mRNA gc
aggagagucccgcagucggcguccagcggcucugcuuguucgugugugugucguugcaggccuuauucaagcuuaccaugaagaucgugaacaacuggcugaagcagcucaucaaggucacccugguguuccuguucguggccgccaucuucuaccucaucacccccguccacgugaugagcaagcacacggacuucuccagcgagaucaucggcuacaaggcgaucgacgggggcgugacccgcgacaucgccuccaccgacacgugcuucgccaacaagcacgccgacuucgacaccugguucagccagcgcgggggcuccuacaccaacgacaaggccugcccccugaucgcggccgucaucacccgggaggugggguucgugguccccggccugcccggcaccacgaagcggaccaccaacggggacuuccuccacuuccugccccgcguguucagcgccgugggcaacaucugcuacaccccguccaagcugaucgaguacacggacuucgccaccagcgcgugcguccucgccgccgagugcaccaucuucaaggacgccuccgggaagcccgugcccuacugcuacgacaccaacgugcuggagggcagcgucgccuacgagucccugcggcccgacacgcgcuacgugcucauggacgggagcaucauccaguucccgaacaccuaccuggagggcuccgugcgggucgugaccaccuucgacagcgaguacugccgccacggcacgugcgagcgguccgaggcgggggugugcgucagcaccuccggccgcugggugcugaacaacgacuacuaccggagccuccccgggguguucugcggcgucgacgccgugaaccugcugaccaacauguucaccccgcucauccagcccaucggcgcccuggacaucuccgccagcaucgucgccgggggcaucguggcgaucguggucacgugccuggccuacuacuucaugcgcuuccggcgcgccuucggggaguacagccacgugguggccuucaacacccuccuguuccugauguccuucaccguccucugccugacccccguguacagcuuccugcccggcguguacuccgucaucuaccucuaccugacguucuaccugaccaacgacgugagcuuccucgcccacauccaguggauggugauguucacgccccugguccccuucuggaucaccaucgcguacaucaucugcaucuccaccaagcacuucuacugguucuucagcaacuaccugaagcggcgcgugguguucaacggggucuccuucagcaccuucgaggaggccgcccucugcaccuuccugcugaacaaggagauguaccucaagcugcgguccgacgugcugcucccgcugacccaguacaaccgcuaccuggcccucuacaacaaguacaaguacuucagcggcgccauggacacgaccuccuaccgggaggcggccugcugccaccuggccaaggcccugaacgacuucagcaacuccggcagcgacgugcucuaccagccgccccagaccuccaucaccagcgcgguccugcagugaggacuagucccuguucccagagcccacuuuuuuuucuuuuuuugaaauaaaauagccugucuuucagaucucaaaggcucuuuucagagccaccaaaaaaaaaaaaaaaaaaaaaaaaaaaaaaaaaaaaaaaaaaaaaaaaaaaaaaaaaaaaaaaaaaaaaaaaaaaaaaaaaaaaaaaaaaaaaaaaaaaaa

SEQ ID NO: 20315 - RNA, 1778 nt, Artificial Sequence
  SARS-CoV-2__MT345830.1__non-structural protein 4 (NSP4) mRNA gc
aggagagucccgcagucggcguccagcggcucugcuuguucgugugugugucguugcaggccuuauucaagcuuaccaugaagaucgugaacaacuggcugaagcagcucaucaaggucacccugguguuccuguucguggccgccaucuucuaccucaucacccccguccacgugaugagcaagcacacggacuucuccagcgagaucaucggcuacaaggcgaucgacgggggcgugacccgcgacaucgccuccaccgacacgugcuucgccaacaagcacgccgacuucgacaccugguucagccagcggggcggcuccuacaccaacgacaaggccugcccccugaucgcggccgucaucacccgcgaggugggguucgugguccccggccugcccggcaccauccuccggacgaccaacggggacuuccugcacuuccugccccgcguguucagcgccgugggcaacaucugcuacaccccguccaagcucaucgaguacaccgacuucgccacgagcgcgugcguccuggccgccgagugcaccaucuucaaggacgccuccgggaagcccgugcccuacugcuacgacaccaacgugcuggagggcagcgucgccuacgagucccuccggcccgacacccgcuacgugcugauggacgggagcaucauccaguucccgaacacguaccuggagggcuccgugcgggucgugaccaccuucgacagcgaguacugccgccacgggaccugcgagcgguccgaggcgggggugugcgucagcacguccggccgcugggugcucaacaacgacuacuaccggagccugcccgggguguucugcggcgucgacgccgugaaccugcucaccaacauguucacgccccugauccagcccaucggcgcccuggacaucuccgccagcaucgucgccgggggcaucguggcgaucguggugaccugccucgccuacuacuucaugcgcuuccggcgcgccuucggggaguacagccacgucguggccuucaacacccugcuguuccucauguccuucaccguccugugccugaccccgguguacagcuuccuccccggcguguacuccgucaucuaccuguaccugaccuucuaccucacgaacgacgugagcuuccuggcccacauccaguggauggugauguucacgccccugguccccuucuggaucaccaucgcguacaucaucugcaucuccaccaagcacuucuacugguucuucagcaacuaccucaagcggcgcgugguguucaacggggucuccuucagcaccuucgaggaggccgcccugugcaccuuccugcucaacaaggagauguaccugaagcugcgguccgacgugcuccugccgcugacccaguacaaccgcuaccucgcccuguacaacaaguacaaguacuucagcggcgccauggacaccacguccuaccgggagguggcgugcugccaccuggccaaggcccucaacgacuucagcaacuccggcagcgacguccuguaccagccgccccagaccuccaucaccagcgccgugcugcagugaggacuagucccuguucccagagcccacuuuuuuuucuuuuuuugaaauaaaauagccugucuuucagaucucaaaggcucuuuucagagccaccaaaaaaaaaaaaaaaaaaaaaaaaaaaaaaaaaaaaaaaaaaaaaaaaaaaaaaaaaaaaaaaaaaaaaaaaaaaaaaaaaaaaaaaaaaaaaaaaaaaaa

SEQ ID NO: 20316 - RNA, 1778 nt, Artificial Sequence
  SARS-CoV-2__MT345869.1__non-structural protein 4 (NSP4) mRNA gc
aggagagucccgcagucggcguccagcggcucugcuuguucgugugugugucguugcaggccuuauucaagcuuaccaugaagaucgugaacaacuggcugaagcagcucaucaaggucacccugguguuccuguucguggccgccaucuucuaccucaucacccccguccacgugaugagcaagcacacggacuucuccagcgagaucaucggcuacaaggcgaucgacgggggcgugacccgcgacaucgccuccaccgacacgugcuucgccaacaagcacgccgacuucgacaccugguucagccagcggggcggcuccuacaccaacgacaaggccugcccccugaucgcggccgucaucacccgcgaggugggguucgugguccccggccugcccggcaccauccuccggacgaccaacggggacuuccugcacuuccugccccgcguguucagcgccgugggcaacaucugcuacaccccguccaagcucaucgaguacaccgacuucgccacgagcgcgugcguccuggccgccgagugcaccaucuucaaggacgccuccgggaagcccgugcccuacugcuacgacaccaacgugcuggagggcagcgucgccuacgagucccuccggcccgacacccgcuacgugcugauggacgggagcaucauccaguucccgaacacguaccuggagggcuccgugcgggucgugaccaccuucgacagcgaguacugccgccacgggaccugcgagcgguccgaggcgggggugugcgucagcacguccggccgcugggugcucaacaacgacuacuaccggagccugcccgggguguucugcggcgucgacgccgugaaccugcucaccaacauguucacgccccugauccagcccaucggcgcccuggacaucuccgccagcaucgucgccgggggcaucguggcgaucguggugaccugccucgccuacuacuucaugcgcuuccggcgcgccuucggggaguacagccacgucguggccuucaacacccugcuguuccucauguccuucaccguccugugccugaccccgguguacagcuuccuccccggcguguacuccgucaucuaccuguaccugaccuucuaccucacgaacgacgugagcuuccuggcccacauccaguggauggugauguucacgccccugguccccuucuggaucaccaucgcguacaucaucugcaucuccaccaagcacuucuacugguucuucagcaacuaccucaagcggcgcgugguguucaacggggucuccuucagcaccuucgaggaggccgcccugugcaccuuccugcucaacaaggagauguaccugaagcugcgguccgacgugcuccugccgcugacccaguacaaccgcuaccucgcccuguacaacaaguacaaguacuucagcggcgccauggacaccacguccuaccgggaggcggccugcugccaccuggccaaggcccucaacgacuucagcaacgcgggcuccgacgugcuguaccagccgccccagaccagcaucaccuccgccguccugcagugaggacuagucccuguucccagagcccacuuuuuuuucuuuuuuugaaauaaaauagccugucuuucagaucucaaaggcucuuuucagagccaccaaaaaaaaaaaaaaaaaaaaaaaaaaaaaaaaaaaaaaaaaaaaaaaaaaaaaaaaaaaaaaaaaaaaaaaaaaaaaaaaaaaaaaaaaaaaaaaaaaaaa

SEQ ID NO: 20317 - RNA, 1778 nt, Artificial Sequence
  SARS-CoV-2__MT326052.1__non-structural protein 4 (NSP4) mRNA gc
aggagagucccgcagucggcguccagcggcucugcuuguucgugugugugucguugcaggccuuauucaagcuuaccaugaagaucgugaacaacuggcugaagcagcucaucaaggucacccugguguuccuguucguggccgccaucuucuaccucaucacccccguccacgugaugagcaagcacacggacuucuccagcgagaucaucggcuacaaggcgaucgacgggggcgugacccgcgacaucgccuccaccgacacgugcuucgccaacaagcacgccgacuucgacaccugguucagccagcggggcggcuccuacaccaacgacaaggccugcccccugaucgcggccgucaucacccgcgaggugggguucgugguccccggccugcccggcaccauccuccggacgaccaacggggacuuccugcacuuccugccccgcguguucagcgccgugggcaacaucugcuacaccccguccaagcucaucgaguacaccgacuucgccacgagcgcgugcguccuggccgccgagugcaccaucuucaaggacgccuccgggaagcccgugcccuacugcuacgacaccaacgugcuggagggcagcgucgccuacgagucccuccggcccgacacccgcuacgugcugauggacgggagcaucauccaguucccgaacacguaccuggagggcuccgugcgggucgugaccaccuucgacagcgaguacugccgccacgggaccugcgagcgguccgaggcgggggugugcgucagcacguccggccgcugggugcucaacaacgacuacuaccggagccugcccgggguguucugcggcgucgacgccgugaaccugcucaccaacauguucacgccccugauccagcccaucggcgcccuggacaucuccgccagcaucgucgccgggggcaucguggcgaucguggugaccugccucgccuacuacuucaugcgcuuccggcgcgccuucggggaguacagccacgucguggccuucaacacccugcuguuccucauguccuucaccguccugugccugaccccgguguacagcuuccuccccggcguguacuccgucaucuaccuguaccugaccuucuaccucacgaacgacgugagcuuccuggcccacauccaguggauggugauguucacgccccugguccccuucuggaucaccaucgcguacaucaucugcaucuccaccaagcacuucuacugguucuucagcaacuaccucaagcggcgcgugguguucaacggggucuccuucagcaccuucgaggaggccgcccugugcaccuuccugcucaacaaggagauguaccugaagcugcgguccgacgugcuccugccgcugacccaguacaaccgcuaccucgcccuguacaacaaguacaaguacuucagcggcgccauggacaccacguccuaccgggaggcggccugcugccaccuggccaaggcccucaacgacuucagcaacuccggcuucgacgugcuguaccagccgccccagaccagcaucaccuccgcgguccugcagugaggacuagucccuguucccagagcccacuuuuuuuucuuuuuuugaaauaaaauagccugucuuucagaucucaaaggcucuuuucagagccaccaaaaaaaaaaaaaaaaaaaaaaaaaaaaaaaaaaaaaaaaaaaaaaaaaaaaaaaaaaaaaaaaaaaaaaaaaaaaaaaaaaaaaaaaaaaaaaaaaaaaa

SEQ ID NO: 20318 - RNA, 1778 nt, Artificial Sequence
  SARS-CoV-2__MT293186.1__non-structural protein 4 (NSP4) mRNA gc
aggagagucccgcagucggcguccagcggcucugcuuguucgugugugugucguugcaggccuuauucaagcuuaccaugaagaucgugaacaacuggcugaagcagcucaucaaggucacccugguguuccuguucguggccgccaucuucuaccucaucacccccguccacgugaugagcaagcacacggacuucuccagcgagaucaucggcuacaaggcgaucgacgggggcgugacccgcgacaucgccuccaccgacacgugcuucgccaacaagcacgccgacuucgacaccugguucagccagcggggcggcuccuacaccaacgacaaggccugcccccugaucgcggccgucaucacccgcgaggugggguucgugguccccggccugcccggcaccauccuccggacgaccaacggggacuuccugcacuuccugccccgcguguucagcgccgugggcaacaucugcuacaccccguccaagcucaucgaguacaccgacuucgccacgagcgcgugcguccuggccgccgagugcaccaucuucaaggacgccuccgggaagcccgugcccuacugcuacgacaccaacgugcuggagggcagcgucgccuacgagucccuccggcccgacacccgcuacgugcugauggacgggagcaucauccaguucccgaacacguaccuggagggcuccgugcgggucgugaccaccuucgacagcgaguacugccgccacgggaccugcgagcgguccgaggcgggggugugcgucagcacguccggccgcugggugcucaacaacgacuacuaccggagccugcccgggguguucugcggcgucgacgccgugaaccugcucaccaacauguucacgccccugauccagcccaucggcgcccuggacaucuccgccagcaucgucgccgggggcaucguggcgaucguggugaccugccucgccuacuacuucaugcgcuuccggcgcgccuucggggaguacagccacgucguggccuucaacacccugcuguuccucauguccuucaccguccugugccugaccccgguguacagcuuccuccccggcguguacuccgucaucuaccuguaccugaccuucuaccucacgaacgacgugagcuucuucgcccacauccaguggauggugauguucacgccccugguccccuucuggaucaccaucgcguacaucaucugcaucuccaccaagcacuucuacugguucuucagcaacuaccugaagcggcgcgugguguucaacggggucuccuucagcaccuucgaggaggccgcccucugcaccuuccugcugaacaaggagauguaccucaagcugcgguccgacgugcugcucccgcugacccaguacaaccgcuaccuggcccucuacaacaaguacaaguacuucagcggcgccauggacaccacguccuaccgggaggcggccugcugccaccuggccaaggcccugaacgacuucagcaacuccggcagcgacgugcucuaccagccgccccagaccuccaucaccagcgcgguccugcagugaggacuagucccuguucccagagcccacuuuuuuuucuuuuuuugaaauaaaauagccugucuuucagaucucaaaggcucuuuucagagccaccaaaaaaaaaaaaaaaaaaaaaaaaaaaaaaaaaaaaaaaaaaaaaaaaaaaaaaaaaaaaaaaaaaaaaaaaaaaaaaaaaaaaaaaaaaaaaaaaaaaaa

SEQ ID NO: 20319 - RNA, 1778 nt, Artificial Sequence
  SARS-CoV-2__MT262993.1__non-structural protein 4 (NSP4) mRNA gc
aggagagucccgcagucggcguccagcggcucugcuuguucgugugugugucguugcaggccuuauucaagcuuaccaugaagaucgugaacaacuggcugaagcagcucaucaaggucacccugguguuccuguucguggccgccaucuucuaccucaucacccccguccacgugaugagcaagcacacggacuucuccagcgagaucaucggcuacaaggcgaucgacgggggcgugacccgcgacaucgccuccaccgacacgugcuucgccaacaagcacgccgacuucgacaccugguucagccagcggggcggcuccuacaccaacgacaaggccugcccccugaucgcggccgucaucacccgcgaggugggguucgugguccccggccugcccggcaccauccuccggacgaccaacggggacuuccugcacuuccugccccgcguguucagcgccgugggcaacaucugcuacaccccguccaagcucaucgaguacaccgacuucgccacgagcgcgugcguccuggccgccgagugcaccaucuucaaggacgccuccgggaagcccgugcccuacugcuacgacaccaacgugcuggagggcagcgucgccuacgagucccuccggcccgacacccgcuacgugcugauggacgggagcaucauccaguucccgaacacguaccuggagggcuccgugcgggucgugaccaccuucgacagcgaguacugccgccacgggaccugcgagcgguccgaggcgggggugugcgucagcacguccggccgcugggugcucaacaacgacuacuaccggagccugcccgggguguucugcggcgucgacgccgugaaccugcucaccaacauguucacgccccugauccagcccaucggcgcccuggacaucuccgccagcaucgucgccgggggcaucguggcgaucguggugaccugccucgccuacuacuucaugcgcuuccggcgcgccuucggggaguacagccacgucguggccuucaacacccugcuguuccucauguccuucaccguccugugccugaccccgguguacagcuuccuccccggcguguacuccgucaucuaccuguaccugaccuucuaccucacgaacgacgugagcuuccuggcccacauccaguggauggugauguucacgccccugguccccuucuggaucaccaucgcguacaucaucugcaucuccaccaagcacagcaacuaccucaagcggcgcgugguguucaacggggucuccuucagcaccuucgaggaggccgcccugugcaccuuccugcucaacaaggagauguaccugaagcugcgguccgacgugcuccugccgcugacccaguacaaccgcuaccucgcccuguacaacaaguacaaguacuucagcggcgccauggacaccacguccuaccgggaggcggccugcugccaccuggccaaggcccucaacgacuucagcaacuccggcagcgacgugcuguaccagccgccccagaccuccaucaccagcgcgguccugcaguccggguuccgcaagugaggacuagucccuguucccagagcccacuuuuuuuucuuuuuuugaaauaaaauagccugucuuucagaucucaaaggcucuuuucagagccaccaaaaaaaaaaaaaaaaaaaaaaaaaaaaaaaaaaaaaaaaaaaaaaaaaaaaaaaaaaaaaaaaaaaaaaaaaaaaaaaaaaaaaaaaaaaaaaaaaaaaa

SEQ ID NO: 20320 - RNA, 1778 nt, Artificial Sequence
  SARS-CoV-2__MT263074.1__non-structural protein 4 (NSP4) mRNA gc
aggagagucccgcagucggcguccagcggcucugcuuguucgugugugugucguugcaggccuuauucaagcuuaccaugaagaucgugaacaacuggcugaagcagcucaucaaggucacccugguguuccuguucguggccgccaucuucuaccucaucacccccguccacgugaugagcaagcacacggacuucuccagcgagaucaucggcuacaaggcgaucgacgggggcgugacccgcgacaucgccuccaccgacacgugcuucgccaacaagcacgccgacuucgacaccugguucagccagcggggcggcuccuacaccaacgacaaggccugcccccugaucgcggccgucaucacccgcgaggugggguucgugguccccggccugcccggcaccauccuccggacgaccaacggggacuuccugcacuuccugccccgcguguucagcgccgugggcgacaucugcuacaccccguccaagcucaucgaguacaccgacuucgccacgagcgcgugcguccuggccgccgagugcaccaucuucaaggacgccuccgggaagcccgugcccuacugcuacgacaccaacgugcuggagggcagcgucgccuacgagucccuccggcccgacacccgcuacgugcugauggacgggagcaucauccaguucccgaacacguaccuggagggcuccgugcgggucgugaccaccuucgacagcgaguacugccgccacgggaccugcgagcgguccgaggcgggggugugcgucagcacguccggccgcugggugcucaacaacgacuacuaccggagccugcccgggguguucugcggcgucgacgccgugaaccugcucaccaacauguucacgccccugauccagcccaucggcgcccuggacaucuccgccagcaucgucgccgggggcaucguggcgaucguggugaccugccucgccuacuacuucaugcgcuuccggcgcgccuucggggaguacagccacgucguggccuucaacacccugcuguuccucauguccuucaccguccugugccugaccccgguguacagcuuccuccccggcguguacuccgucaucuaccuguaccugaccuucuaccucacgaacgacgugagcuuccuggcccacauccaguggauggugauguucacgccccugguccccuucuggaucaccaucgcguacaucaucugcaucuccaccaagcacuucuacugguucuucagcaacuaccucaagcggcgcgugguguucaacggggucuccuucagcaccuucgaggaggccgcccugugcaccuuccugcucaacaaggagauguaccugaagcugcgguccgacgugcuccugccgcugacccaguacaaccgcuaccucgcccuguacaacaaguacaaguacuucagcggcgccauggacaccacguccuaccgggaggcggccugcugccaccuggccaaggcccucaacgacuucagcaacuccggcagcgacgugcuguaccagccgccccagaccuccaucaccagcgcgguccugcagugaggacuagucccuguucccagagcccacuuuuuuuucuuuuuuugaaauaaaauagccugucuuucagaucucaaaggcucuuuucagagccaccaaaaaaaaaaaaaaaaaaaaaaaaaaaaaaaaaaaaaaaaaaaaaaaaaaaaaaaaaaaaaaaaaaaaaaaaaaaaaaaaaaaaaaaaaaaaaaaaaaaaa

SEQ ID NO: 20321 - RNA, 1778 nt, Artificial Sequence
  SARS-CoV-2__MT263411.1__non-structural protein 4 (NSP4) mRNA gc
aggagagucccgcagucggcguccagcggcucugcuuguucgugugugugucguugcaggccuuauucaagcuuaccaugaagaucgugaacaacuggcugaagcagcucaucaaggucacccugguguuccuguucguggccgccaucuucuaccucaucacccccguccacgugaugagcaagcacacggacuucuccagcgagaucaucggcuacaaggcgaucgacgggggcgugacccgcgacaucgccuccaccgacacgugcuucgccaacaagcacgccgacuucgacaccugguucagccagcggggcggcuccuacaccaacgacaaggccugcccccugaucgcggccgucaucacccgcgaggugggguucgugguccccggccugcccggcaccauccuccggacgaccaacggggacuuccugcacuuccugccccgcguguucagcgccgugggcaacaucugcuacaccccguccaagcucaucgaguacaccgacuucgccacgagcgcgugcguccuggccgccgagugcaccaucuucaaggacgccuccgggaagcccgugcccuacugcuacgacaccaacgugcuggagggcagcgucgccuacgagucccuccggcccgacacccgcuacgugcugauggacgggagcaucauccaguucccgaacacguaccuggagggcuccgugcgggucgugaccaccuucgacagcgaguacugccgccacgggaccugcgagcgguccgaggcgggggugugcgucagcacguccggccgcugggugcucaacaacgacuacuaccggagccugcccgggguguucugcggcgucgacgccgugaaccugcucaccaacauguucacgccccugauccagcccaucggcgcccuggacaucuccgccagcaucgucgccgggggcaucguggcgaucguggugaccugccucgccuacuacuucaugcgcuuccggcgcgccuucggggaguacagccacgucguggccuucaacacccugcuguuccucauguccuucaacguccugugccugaccccgguguacagcuuccuccccggcguguacuccgucaucuaccuguaccugaccuucuaccucaccaacgacgugagcuuccuggcccacauccaguggauggugauguucacgccccugguccccuucuggaucaccaucgcguacaucaucugcaucuccaccaagcacuucuacugguucuucagcaacuaccucaagcggcgcgugguguucaacggggucuccuucagcaccuucgaggaggccgcccugugcacguuccugcucaacaaggagauguaccugaagcugcgguccgacgugcuccugccgcugacccaguacaaccgcuaccucgcccuguacaacaaguacaaguacuucagcggcgccauggacaccaccuccuaccgggaggcggccugcugccaccuggccaaggcccucaacgacuucagcaacuccggcagcgacgugcuguaccagccgccccagacguccaucaccagcgcgguccugcagugaggacuagucccuguucccagagcccacuuuuuuuucuuuuuuugaaauaaaauagccugucuuucagaucucaaaggcucuuuucagagccaccaaaaaaaaaaaaaaaaaaaaaaaaaaaaaaaaaaaaaaaaaaaaaaaaaaaaaaaaaaaaaaaaaaaaaaaaaaaaaaaaaaaaaaaaaaaaaaaaaaaaa

SEQ ID NO: 20322 - RNA, 1778 nt, Artificial Sequence
  SARS-CoV-2__MT240479.1__non-structural protein 4 (NSP4) mRNA gc
aggagagucccgcagucggcguccagcggcucugcuuguucgugugugugucguugcaggccuuauucaagcuuaccaugaagaucgugaacaacuggcugaagcagcucaucaaggucacccugguguuccuguucguggccgccaucuucuaccucaucacccccguccacgugaugagcaagcacacggacuucuccagcgagaucaucggcuacaaggcgaucgacgggggcgugacccgcgacaucgccuccaccgacacgugcuucgccaacaagcacgccgacuucgacaccugguucagccagcggggcggcuccuacaccaacgacaaggccugcccgcugaucgcggccgucaucacccgcgaggugggguucgugguccccggccugcccggcaccauccuccggacgaccaacggggacuuccugcacuuccugccccgcguguucagcgccgugggcaacaucugcuacaccccguccaagcucaucgaguacaccgacuucgccacgagcgcgugcguccuggccgccgagugcaccaucuucaaggacgccuccgggaagcccgugcccuacugcuacgacaccaacgugcuggagggcagcgucgccuacgagucccuccggcccgacacccgcuacgugcugauggacgggagcaucauccaguuccugaacacguaccucgagggcuccgugcgggucgugaccaccuucgacagcgaguacugccgccacgggaccugcgagcgguccgaggcgggggugugcgucagcacguccggccgcugggugcugaacaacgacuacuaccggagccugccggggguguucugcggcgucgacgccgugaaccuccugaccaacauguucacgccccugauccagcccaucggcgcccucgacaucuccgccagcaucgucgccgggggcaucguggcgaucguggugaccugccuggccuacuacuucaugcgcuuccggcgcgccuucggggaguacagccacgucguggccuucaacacccuccuguuccugauguccuucaccguccugugccucacccccguguacagcuuccugccgggcguguacuccgucaucuaccuguaccucaccuucuaccugacgaacgacgugagcuuccuggcccacauccaguggauggugauguucacgccccucguccccuucuggaucaccaucgcguacaucaucugcaucuccaccaagcacuucuacugguucuucagcaacuaccugaagcggcgcgugguguucaacggggucuccuucagcaccuucgaggaggccgcccugugcaccuuccuccugaacaaggagauguaccugaagcuccgguccgacgugcugcugccccucacccaguacaaccgcuaccuggcccuguacaacaaguacaaguacuucagcggcgccauggacaccacguccuaccgggaggcggccugcugccaccucgccaaggcccugaacgacuucagcaacuccggcagcgacgugcuguaccagccgccccagaccuccaucaccagcgcgguccugcagugaggacuagucccuguucccagagcccacuuuuuuuucuuuuuuugaaauaaaauagccugucuuucagaucucaaaggcucuuuucagagccaccaaaaaaaaaaaaaaaaaaaaaaaaaaaaaaaaaaaaaaaaaaaaaaaaaaaaaaaaaaaaaaaaaaaaaaaaaaaaaaaaaaaaaaaaaaaaaaaaaaaaa

SEQ ID NO: 20323 - RNA, 1154 nt, Artificial Sequence
  MERS-CoV/MERS-CoV-Jeddah-human-1__KF958702.1__non-structural protein 6 (NSP6) mRNA gc
aggagagucccgcagucggcguccagcggcucugcuuguucgugugugugucguugcaggccuuauucaagcuuaccaugagcggcgugcgcaaggucaccuacgggaccgcccacuggcuguucgccacccucguguccaccuacgugaucauccugcaggcgaccaaguucacccuguggaacuaccucuucgagacgauccccacccagcuguucccgcuccuguucgucaccauggccuucgugaugcugcuggugaagcacaagcacaccuuccucacgcuguuccugcuccccgucgccaucugccugaccuacgccaacaucguguacgagcccaccacccccaucagcuccgcccugaucgcgguggccaacuggcucgccccgacgaacgccuacaugcggaccacccacaccgacaucggcgucuacaucagcaugucccuggugcuggugaucgucgugaagcgccucuacaaccccagccuguccaacuucgcgcuggcccucugcagcggggugauguggcuguacacguacuccaucggcgaggccagcucccccaucgccuaccuggucuucgugaccacccucaccagcgacuacacgaucaccguguucgucaccgugaaccuggccaaggugugcaccuacgcgaucuucgccuacagcccccagcugacgcucgucuucccggaggugaagaugauccugcugcucuacacgugccugggguucaugugcacgugcuacuucggcguguucucccugcucaaccugaagcugcgggcccccaugggcgucuacgacuucaagguguccacccaggaguuccgcuucaugaccgccaacaaccucaccgcgccccggaacagcugggaggccauggcccugaacuucaagcugaucgggaucggcgggacccccugcaucaaggucgccgccaugcagugaggacuagucccuguucccagagcccacuuuuuuuucuuuuuuugaaauaaaauagccugucuuucagaucucaaaggcucuuuucagagccaccaaaaaaaaaaaaaaaaaaaaaaaaaaaaaaaaaaaaaaaaaaaaaaaaaaaaaaaaaaaaaaaaaaaaaaaaaaaaaaaaaaaaaaaaaaaaaaaaaaaaa

SEQ ID NO: 20324 - RNA, 1154 nt, Artificial Sequence; identical to SEQ ID NO: 20323
  MERS-CoV/Al-Hasa_4_2013__KF186564.1__non-structural protein 6 (NSP6) mRNA gc

SEQ ID NO: 20325 - RNA, 1154 nt, Artificial Sequence; identical to SEQ ID NO: 20323
  MERS-CoV/Riyadh_14_2013__KJ156934.1__non-structural protein 6 (NSP6) mRNA gc

SEQ ID NO: 20326 - RNA, 1154 nt, Artificial Sequence; identical to SEQ ID NO: 20323
  MERS-CoV/England 1__NC_038294.1__non-structural protein 6 (NSP6) mRNA gc

SEQ ID NO: 20327 - RNA, 1148 nt, Artificial Sequence
  SARS-CoV/Tor2__NC_004718.3__non-structural protein 6 (NSP6) mRNA gc
aggagagucccgcagucggcguccagcggcucugcuuguucgugugugugucguugcaggccuuauucaagcuuaccaugggcaaguucaagaagaucgugaaggggacccaccacuggaugcugcucaccuuccugacgagccugcucauccugguccaguccacccaguggagccuguucuucuucguguacgagaacgccuuccuccccuucacccugggcaucauggccaucgcggccugcgccaugcugcucgugaagcacaagcacgccuuccugugccuguuccuccugccgucccuggccaccgucgcguacuucaacaugguguacaugcccgccagcugggugaugcgcaucaugacguggcucgagcuggccgacaccucccugagcggguaccggcucaaggacugcgucauguacgccuccgcgcuggugcugcucauccugaugaccgcccgcaccguguacgacgacgccgcccggcgcgucuggacgcugaugaacgugaucacccucguguacaaggucuacuacggcaacgcccuggaccaggcgaucagcaugugggcccuggugaucuccgugaccagcaacuacuccggggucgugaccacgaucauguuccucgcccgggccaucguguucgucugcguggaguacuacccccugcuguucaucaccggcaacacccuccagugcaucaugcugguguacugcuuccugggcuacugcugcugcugcuacuucggccucuucugccugcugaaccgcuacuuccggcucacccugggggucuacgacuaccuggugagcacgcaggaguuccgcuacaugaacucccaggggcuccugcccccgaaguccagcaucgacgccuucaagcugaacaucaagcuccugggcaucgggggcaagcccugcaucaagguggcgaccguccagugaggacuagucccuguucccagagcccacuuuuuuuucuuuuuuugaaauaaaauagccugucuuucagaucucaaaggcucuuuucagagccaccaaaaaaaaaaaaaaaaaaaaaaaaaaaaaaaaaaaaaaaaaaaaaaaaaaaaaaaaaaaaaaaaaaaaaaaaaaaaaaaaaaaaaaaaaaaaaaaaaaaaa

SEQ ID NO: 20328 - RNA, 1139 nt, Artificial Sequence
  HCoV/OC43__NC_006213.1__non-structural protein 6 (NSP6) mRNA gc
aggagagucccgcagucggcguccagcggcucugcuuguucgugugugugucguugcaggccuuauucaagcuuaccaugagcaagcgcacccggcuguucaagggcaccgugugcuggaucauggccuccacguuccucuucagcugcaucaucaccgccuucgucaaguggaccauguucauguacgugaccacgaacauguucuccaucaccuucugcgcgcugugcgugaucagccuggccaugcuccuggucaagcacaagcaccuguaccucaccauguacaucacccccgugcuguucacgcugcucuacaacaacuaccugguggucuacaagcacaccuuccgcggguacguguacgccuggcuguccuacuacgugccgagcgucgaguacaccuacaccgacgaggugaucuacggcaugcuccugcugguggggauggucuucgugacgcuccgguccaucaaccacgaccuguucagcuucaucauguucgugggccgccugaucuccgucuucagccucugguacaagggguccaaccuggaggaggagauccugcucaugcuggccagccuguucggcaccuacaccuggaccacggugcucuccauggccguggcgaaggucaucgccaaguggguggccgugaacguccuguacuucaccgacaucccccagaucaagaucgugcugcucugcuaccuguucaucggcuacaucaucagcugcuacugggggcuguucucccucaugaacagccuguuccggaugccccugggcguguacaacuacaagaucuccguccaggagcuccgcuacaugaacgccaacgggcugcggcccccgaagaacagcuucgaggcgcugaugcucaacuucaagcugcugggcaucgggggcgugcccaucaucgaggucucccaguuccagugaggacuagucccuguucccagagcccacuuuuuuuucuuuuuuugaaauaaaauagccugucuuucagaucucaaaggcucuuuucagagccaccaaaaaaaaaaaaaaaaaaaaaaaaaaaaaaaaaaaaaaaaaaaaaaaaaaaaaaaaaaaaaaaaaaaaaaaaaaaaaaaaaaaaaaaaaaaaaaaaaaaaa

SEQ ID NO: 20329 - RNA, 1139 nt, Artificial Sequence
  HCoV/HKU1__NC_006577.2__non-structural protein 6 (NSP6) mRNA gc
aggagagucccgcagucggcguccagcggcucugcuuguucgugugugugucguugcaggccuuauucaagcuuaccaugagcaagaccaagcgcuucaucaaggagaccaucuacuggauccugaucuccacguuccucuucagcugcaucaucuccgccuucgugaaguggaccaucuucauguacaucaacacccacaugaucggcgucacccugugcgugcugugcuucgugagcuucaugaugcuccuggucaagcacaagcacuucuaccugacgauguacaucauccccgugcucugcacccuguucuacgugaacuaccuggucguguacaaggagggguuccggggcuucaccuacguguggcucuccuacuucgucccggccgugaacuucaccuacguguacgaggucuucuacgggugcauccugugcguguucgcgaucuucaucacgaugcacagcaucaaccacgacaucuucucccugauguuccucgugggccgcaucgucacccugaucagcaugugguacuucggguccaaccuggaggaggacgugcuccuguucaucaccgccuuccugggcaccuacacguggaccaccauccucagccuggccaucgccaagaucguggccaacuggcuguccgucaacaucuucuacuucaccgacgugcccuacaucaagcucauccugcugagcuaccucuucaucggcuacauccuguccugcuacuggggguucuucagccugcucaacuccguguuccggaugcccaugggcgucuacaacuacaagaucagcgugcaggagcugcgcuacaugaacgcgaacgggcugcggcccccgcgcaacuccuucgaggccauccuccugaaccugaagcuccugggcaucgggggcgugcccgucaucgaggugagccagauccagugaggacuagucccuguucccagagcccacuuuuuuuucuuuuuuugaaauaaaauagccugucuuucagaucucaaaggcucuuuucagagccaccaaaaaaaaaaaaaaaaaaaaaaaaaaaaaaaaaaaaaaaaaaaaaaaaaaaaaaaaaaaaaaaaaaaaaaaaaaaaaaaaaaaaaaaaaaaaaaaaaaaaa

SEQ ID NO: 20330 - RNA, 1115 nt, Artificial Sequence
  HCoV/229E/BN1/GER/2015__KU291448.1__non-structural protein 6 (NSP6) mRNA gc
aggagagucccgcagucggcguccagcggcucugcuuguucgugugugugucguugcaggccuuauucaagcuuaccaugagcggcaagaccaccuccauguucaagagcaucucccuguucgccggguucuucgugauguucugggccgagcuguucgucuacacgaccaccaucugggugaaccccggcuuccucaccccguucaugauccugcucguggcgcugagccugugccucacguucgucgugaagcacaaggugcuguuccugcaggucuuccuccugcccuccaucaucguggccgccauccagaacugcgccugggacuaccacaucaccaaggugcuggccgagaaguucgacuacaacgucagcgugaugcagauggacauccagggguucgugaacaucuucaucugccucuucgucgcgcugcugcacaccuggcgcuucgccaaggagcggugcacccacuggugcacguaccucuucucccugaucgccgugcuguacaccgcccucuacagcuacgacuacgugucccugcuggucaugcuccugugcgcgaucagcaacgagugguacaucggcgccaucaucuuccgcaucugccgguucgggguggccuuccugcccguggaguacgucuccuacuucgacggcgugaagaccgugcuccuguucuacaugcugcucggcuucgucagcugcauguacuacgggcugcuguacuggaucaaccgcuucugcaagugcacccucggcguguacgacuucugcgugucccccgccgaguucaaguacauggucgccaacgggcugaacgcgccgaacggccccuucgacgcccuguuccucagcuucaagcugauggggaucggcggcccccggacgaucaagguguccaccguccagugaggacuagucccuguucccagagcccacuuuuuuuucuuuuuuugaaauaaaauagccugucuuucagaucucaaaggcucuuuucagagccaccaaaaaaaaaaaaaaaaaaaaaaaaaaaaaaaaaaaaaaaaaaaaaaaaaaaaaaaaaaaaaaaaaaaaaaaaaaaaaaaaaaaaaaaaaaaaaaaaaaaaa

SEQ ID NO: 20331 - RNA, 1115 nt, Artificial Sequence
  HCoV/NL63/RPTEC/2004__JX504050.1__non-structural protein 6 (NSP6) mRNA gc
aggagagucccgcagucggcguccagcggcucugcuuguucgugugugugucguugcaggccuuauucaagcuuaccaugagcggcaaggugaucuucgggcugaagaccauguuccucuucuccgucuucuucaccauguucugggccgagcuguucaucuacacgaacaccaucuggaucaaccccgugauccugaccccgaucuucugccuccugcuguuccucagccuggugcugaccauguuccucaagcacaaguuccuguuccugcaggucuuccuccugcccacggugaucgccaccgcgcuguacaacugcgugcucgacuacuacaucgucaaguuccuggccgaccacuucaacuacaacguguccgugcugcagauggacguccagggccucgugaacgugcuggucugccuguucgugguguuccuccacaccuggcgcuucagcaaggagcgguucacccacugguucacguacgucugcucccugaucgccguggccuacaccuacuucuacagcggggacuuccugucccuccuggugauguuccugugcgccaucagcuccgacugguacaucggcgcgaucgucuuccgccucagccggcugaucguguucuucucccccgagagcguguucuccgucuucggggacgugaagcugacccucguggucuaccugaucugcggcuaccuggugugcaccuacuggggcauccucuacugguucaaccgcuucuucaagugcacgaugggggucuacgacuucaaggugagcgccgccgaguucaaguacaugguggccaacggccugcacgcgccccacgggccguucgacgcccuguggcucuccuucaagcugcugggcaucgggggcgaccggugcaucaagaucagcaccguccagugaggacuagucccuguucccagagcccacuuuuuuuucuuuuuuugaaauaaaauagccugucuuucagaucucaaaggcucuuuucagagccaccaaaaaaaaaaaaaaaaaaaaaaaaaaaaaaaaaaaaaaaaaaaaaaaaaaaaaaaaaaaaaaaaaaaaaaaaaaaaaaaaaaaaaaaaaaaaaaaaaaaaa

SEQ ID NO: 20332 - RNA, 1148 nt, Artificial Sequence
  Bat SARS-like CoV/WIV1__KF367457.1__non-structural protein 6 (NSP6) mRNA gc
aggagagucccgcagucggcguccagcggcucugcuuguucgugugugugucguugcaggccuuauucaagcuuaccaugggcaaguucaagaagaucgugaaggggacccaccacuggaugcugcucaccuuccugacgagccugcucauccugguccaguccacccaguggagccuguucuucuucguguacgagaacgccuuccuccccuucacccugggcaucauggccaucgcggccugcgccaugcugcucgugaagcacaagcacgccuuccugugccuguuccuccugccgucccuggccaccgucgcguacuucaacaugguguacaugcccgccagcugggugaugcgcaucaugacgugguucgagcucgccgacaccucccugagcggguaccggcugaaggacugcgucauguacgccuccgcgcucgugcugcugauccucaugaccgcccgcaccguguacgacgacgccgcccggcgcgucuggacgcugaugaacgugaucacccugguguacaaggucuacuacggcaacgcccucgaccaggcgaucagcaugugggcccuggugaucuccgugaccagcaacuacuccggggucgugaccacgaucauguuccuggcccgggccaucguguucgucugcguggaguacuacccccuccuguucaucaccggcaacacccugcagugcaucaugcucguguacugcuuccugggcuacugcugcugcugcuacuucgggcuguucugccuccugaaccgcuacuuccggcugacccucggcgucuacgacuaccuggugagcacgcaggaguuccgcuacaugaacucccaggggcugcucccgcccaagagcuccaucgacgccuucaagcugaacaucaagcugcucggcaucgggggcaagcccugcaucaagguggcgaccguccagugaggacuagucccuguucccagagcccacuuuuuuuucuuuuuuugaaauaaaauagccugucuuucagaucucaaaggcucuuuucagagccaccaaaaaaaaaaaaaaaaaaaaaaaaaaaaaaaaaaaaaaaaaaaaaaaaaaaaaaaaaaaaaaaaaaaaaaaaaaaaaaaaaaaaaaaaaaaaaaaaaaaaa

SEQ ID NO: 20333 - RNA, 1148 nt, Artificial Sequence
  BatCoV/HKU9-1 BF_005I__NC_009021.1__non-structural protein 6 (NSP6) mRNA gc
aggagagucccgcagucggcguccagcggcucugcuuguucgugugugugucguugcaggccuuauucaagcuuaccaugggcaaguuccagagcauguuccgcuggacccugcagugguucgccaucaucuucgugcucaccauccugauccugcuccagcuggcccaguggacguucgucggggcgcugcccuucacccuccugcugccccucaucggcuucguggccgugugcgucggguucgugucccugcugaucaagcacaagcacaccuaccucaccguguaccugcugcccgucgccauggugacggccuacuacaacuuccaguacacccccgagggcgugcagggguaccuccugagccuguacaacuacgucaaccccggccggaucgacgugaucggcaccgaccuccugaccaugcugaucaucuccguggccugcacgcuccugagcguccgcauggugcggaccgacgcguacucccgcaucugguacgugugcaccgccgucggguggcuguacaacugcuggaccggcagcgccgacacgguggccaucuccuaccucaccuucauggugagcgucuucaccaacuacaccgggguggcgugcgccucccuguacgccgcccaguucaugguguggguccugaaguuccucgacccgacgauccugcugcucuacggccgguuccgcugcgugcuggugugcuaccugcucgucggguaccugugcacgugcuacuucggcguguucaaccugaucaaccgccucuuccggugcacccugggcaacuacgaguacgucgugagcucccaggagcugcgguacaugaacagccacgggcuccugccgcccaccaacuccuggcaggcccugaugcucaacaucaagcuggcgggcaucgggggcauccccaucuaccgcgugagcaccauccagugaggacuagucccuguucccagagcccacuuuuuuuucuuuuuuugaaauaaaauagccugucuuucagaucucaaaggcucuuuucagagccaccaaaaaaaaaaaaaaaaaaaaaaaaaaaaaaaaaaaaaaaaaaaaaaaaaaaaaaaaaaaaaaaaaaaaaaaaaaaaaaaaaaaaaaaaaaaaaaaaaaaaa

SEQ ID NO: 20334 - RNA, 1118 nt, Artificial Sequence
  PEDV/NPL-PEDv/2013/P10__KJ778616.1__non-structural protein 6 (NSP6) mRNA gc
aggagagucccgcagucggcguccagcggcucugcuuguucgugugugugucguugcaggccuuauucaagcuuaccaugagcggcuacgugucccgcgccugccggaacguccugcucguggggagcuuccugaccuucuucugguccgagcuggugagcuacaccaaguucuucugggucaaccccggcuacgugacgccgauguucgccugccucucccugcugagcucccuccugauguucacccugaagcacaagacccucuucuuccagguguuccugauccccgcgcugaucgucaccagcugcaucaaccucgccuucgacguggagguguacaacuaccuggccgagcacuucgacuaccacgucucccugaugggguucaacgcccagggccucgugaacaucuucgugugcuucgucgugacgauccugcacgggaccuacaccuggcgcuucuucaacacccccgugagcuccgucacguacgugguggcccugcucaccgcggccuacaacuacuucuacgccagcgacauccuguccugcgccaugacccuguucgcgagcgucaccggcaacugguucgugggcgccgugugcuacaaggccgccgucuacauggcccuccgguuccccacguucguggcgaucuucggggacaucaaguccgugauguucugcuaccugguccugggcuacuucacgugcugcuucuacgggauccucuacugguucaaccgcuucuucaaggugagcgucggcguguacgacuacaccguguccgccgccgaguucaaguacauggucgccaacgggcugcgggccccgaccggcacccuggacagccuccugcuguccgcgaagcucaucggcaucgggggcgagcgcaacaucaagaucagcagcgugcagugaggacuagucccuguucccagagcccacuuuuuuuucuuuuuuugaaauaaaauagccugucuuucagaucucaaaggcucuuuucagagccaccaaaaaaaaaaaaaaaaaaaaaaaaaaaaaaaaaaaaaaaaaaaaaaaaaaaaaaaaaaaaaaaaaaaaaaaaaaaaaaaaaaaaaaaaaaaaaaaaaaaaa

SEQ ID NO: 20335 - RNA, 1139 nt, Artificial Sequence
  MHV/A59__NC_048217.1__non-structural protein 6 (NSP6) mRNA gc
aggagagucccgcagucggcguccagcggcucugcuuguucgugugugugucguugcaggccuuauucaagcuuaccaugagcaagcgcacccgggugaucaaggggaccugcugcuggauccuggccuccacguuccucuucugcagcaucaucuccgccuucgucaaguggaccauguucauguacgugaccacccacaugcugggcgugacgcugugcgcgcucugcuucgucagcuucgccaugcugcugaucaagcacaagcaccucuaccugaccauguacaucaugcccgugcugugcacccucuucuacaccaacuaccugguggucuacaagcaguccuuccgcggccuggccuacgccuggcucagccacuucgugccggccguggacuacacguacauggacgagguccuguacgggguggugcugcucgucgcgaugguguucgugaccaugcgguccaucaaccacgacgucuucagcaucauguuccuggugggccgccuggugucccucgucagcaugugguacuucggggccaaccuggaggaggaggugcuccuguuccugaccucccuguucggcaccuacacguggaccaccaugcucagccuggccaccgccaaggugaucgcgaaguggcuggccgucaacgugcucuacuucacggacgugccccagaucaagcugguccugcucuccuaccugugcaucggcuacgugugcugcugcuacugggggauccugagccuccugaacuccaucuuccggaugccccugggcgucuacaacuacaagaucagcgugcaggagcuccgcuacaugaacgccaacgggcugcggcccccgcgcaacuccuucgaggcccugaugcucaacuucaagcugcugggcaucgggggcgugcccgucaucgaggugagccagauccagugaggacuagucccuguucccagagcccacuuuuuuuucuuuuuuugaaauaaaauagccugucuuucagaucucaaaggcucuuuucagagccaccaaaaaaaaaaaaaaaaaaaaaaaaaaaaaaaaaaaaaaaaaaaaaaaaaaaaaaaaaaaaaaaaaaaaaaaaaaaaaaaaaaaaaaaaaaaaaaaaaaaaa

SEQ ID NO: 20336 - RNA, 1148 nt, Artificial Sequence
  SARS-CoV-2/Wuhan-Hu-1__NC_045512.2/MN908947.2/EPI_ISL_402128__non -structural protein 6 (NSP6) mRNA gc R9948
aggagagucccgcagucggcguccagcggcucugcuuguucgugugugugucguugcaggccuuauucaagcuuaccaugagcgccgugaagcgcaccaucaagggcacccaccacuggcugcuccugacgauccugaccucccuccugguccuggugcagagcacccaguggucccucuucuucuuccuguacgagaacgccuuccugcccuucgcgauggggaucaucgccaugagcgccuucgccaugauguucgugaagcacaagcacgccuuccucugccuguuccugcucccgucccuggcgaccgucgccuacuucaacaugguguacaugcccgccagcugggugaugcggaucaugacguggcuggacauggucgacaccucccucagcggcuucaagcugaaggacugcgugauguacgccuccgcggugguccugcucauccugaugaccgcccgcaccguguacgacgacggggcccggcgcguguggacgcugaugaacguccucacccugguguacaagguguacuacggcaacgcccuggaccaggccaucagcaugugggcgcucaucaucuccgucaccagcaacuacuccgggguggugaccacggucauguuccuggcccggggcaucguguucaugugcguggaguacugccccaucuucuucaucaccggcaacacccugcagugcaucaugcucgucuacugcuuccugggguacuucugcacgugcuacuucggccuguucugccuccugaaccgcuacuuccggcugacccucgggguguacgacuaccuggugagcacccaggaguuccgcuacaugaacucccagggccugcugcccccgaagaacagcaucgacgccuucaagcucaacaucaagcugcucggggucggcggcaagcccugcaucaagguggccaccguccagugaggacuagucccuguucccagagcccacuuuuuuuucuuuuuuugaaauaaaauagccugucuuucagaucucaaaggcucuuuucagagccaccaaaaaaaaaaaaaaaaaaaaaaaaaaaaaaaaaaaaaaaaaaaaaaaaaaaaaaaaaaaaaaaaaaaaaaaaaaaaaaaaaaaaaaaaaaaaaaaaaaaaa

SEQ ID NO: 20337 - RNA, 1148 nt, Artificial Sequence
  SARS-CoV-2__MT919768.1__non-structural protein 6 (NSP6) mRNA gc
aggagagucccgcagucggcguccagcggcucugcuuguucgugugugugucguugcaggccuuauucaagcuuaccaugagcgccgugaagcgcaccaucaagggcacccaccacuggcugcuccugacgauccugaccucccuccugguccuggugcagagcacccaguggucccucuucuucuucuucuacgagaacgccuuccugcccuucgcgauggggaucaucgccaugagcgccuucgccaugauguucgugaagcacaagcacgccuuccugugccucuuccugcugccgucccucgcgaccgucgccuacuucaacaugguguacaugcccgccagcugggugaugcggaucaugacguggcuggacauggucgacaccucccugagcggcuucaagcucaaggacugcgugauguacgccuccgcggugguccugcugauccucaugaccgcccgcaccguguacgacgacggggcccggcgcguguggacgcugaugaacguccugacccucguguacaagguguacuacggcaacgcccuggaccaggccaucagcaugugggcgcugaucaucuccgucaccagcaacuacuccgggguggugaccacggucauguuccucgcccggggcaucguguucaugugcguggaguacugccccaucuucuucaucaccggcaacacccugcagugcaucaugcuggucuacugcuuccucggguacuucugcacgugcuacuucggccuguucugccugcucaaccgcuacuuccggcugacccuggggguguacgacuaccucgugagcacccaggaguuccgcuacaugaacucccagggccugcugcccccgaagaacagcaucgacgccuucaagcucaacaucaagcugcugggggucggcggcaagcccugcaucaagguggccaccguccagugaggacuagucccuguucccagagcccacuuuuuuuucuuuuuuugaaauaaaauagccugucuuucagaucucaaaggcucuuuucagagccaccaaaaaaaaaaaaaaaaaaaaaaaaaaaaaaaaaaaaaaaaaaaaaaaaaaaaaaaaaaaaaaaaaaaaaaaaaaaaaaaaaaaaaaaaaaaaaaaaaaaaa

SEQ ID NO: 20338 - RNA, 1148 nt, Artificial Sequence
  SARS-CoV-2__MT920039.1__non-structural protein 6 (NSP6) mRNA gc
aggagagucccgcagucggcguccagcggcucugcuuguucgugugugugucguugcaggccuuauucaagcuuaccaugagcgccgugaagcgcaccaucaagggcacccaccacuggcugcuccugacgauccugaccucccuccugguccuggugcagagcacccaguggucccucuucuucuuccuguacgagaacgccuuccugcccuucgcgauggggaucaucgccaugagcgccuucgccaugauguucgugaagcacaagcacgccuuccucugccuguuccugcucccgucccuggcgaccgucgccuacuucaacaugguguacaugcccgccagcugggugaugcggaucaugacguggcuggacauggucgacaccucccucagcggcuucaagcugaaggacugcgugauguacgccuccgcggugguccugcucauccuggugaccgcccgcaccguguacgacgacggggcccggcgcgucuggacgcugaugaacgugcucacccugguguacaaggucuacuacggcaacgcccuggaccaggccaucagcaugugggcgcucaucaucuccgugaccagcaacuacuccgggguggucaccacggugauguuccuggcccggggcaucguguucaugugcgucgaguacugccccaucuucuucaucaccggcaacacccugcagugcaucaugcucguguacugcuuccugggguacuucugcacgugcuacuucggccuguucugccuccugaaccgcuacuuccggcugacccucgggguguacgacuaccuggucagcacccaggaguuccgcuacaugaacucccagggccugcugcccccgaagaacagcaucgacgccuucaagcucaacaucaagcugcucggggugggcggcaagcccugcaucaaggucgccaccgugcagugaggacuagucccuguucccagagcccacuuuuuuuucuuuuuuugaaauaaaauagccugucuuucagaucucaaaggcucuuuucagagccaccaaaaaaaaaaaaaaaaaaaaaaaaaaaaaaaaaaaaaaaaaaaaaaaaaaaaaaaaaaaaaaaaaaaaaaaaaaaaaaaaaaaaaaaaaaaaaaaaaaaaa

SEQ ID NO: 20339 - RNA, 1148 nt, Artificial Sequence
  SARS-CoV-2__MT913118.1__non-structural protein 6 (NSP6) mRNA gc
aggagagucccgcagucggcguccagcggcucugcuuguucgugugugugucguugcaggccuuauucaagcuuaccaugagcgccgugaagcgcaccaucaagggcacccaccacuggcugcuccugacgauccugaccucccuccugguccuggugcagagcacccaguggucccucuucuucuuccuguacgagaacgccuuccugcccuucgcgauggggaucaucgccaugagcgccuucgccaugauguucgugaagcacaagcacgccuuccucugccuguuccugcucccgucccuggcgaccgucgccuacuucaacgugguguacaugcccgccagcugggucaugcggaucaugacguggcuggacaugguggacaccucccucagcggcuucaagcugaaggacugcgugauguacgccuccgcggucgugcugcucauccugaugaccgcccgcaccguguacgacgacggggcccggcgcgucuggacgcugaugaacgugcucacccugguguacaaggucuacuacggcaacgcccuggaccaggccaucagcaugugggcgcucaucaucuccgugaccagcaacuacuccgggguggucaccacggugauguuccuggcccggggcaucguguucaugugcgucgaguacugccccaucuucuucaucaccggcaacacccugcagugcaucaugcucguguacugcuuccugggguacuucugcacgugcuacuucggccuguucugccuccugaaccgcuacuuccggcugacccucgggguguacgacuaccuggucagcacccaggaguuccgcuacaugaacucccagggccugcugcccccgaagaacagcaucgacgccuucaagcucaacaucaagcugcucggggugggcggcaagcccugcaucaaggucgccaccgugcagugaggacuagucccuguucccagagcccacuuuuuuuucuuuuuuugaaauaaaauagccugucuuucagaucucaaaggcucuuuucagagccaccaaaaaaaaaaaaaaaaaaaaaaaaaaaaaaaaaaaaaaaaaaaaaaaaaaaaaaaaaaaaaaaaaaaaaaaaaaaaaaaaaaaaaaaaaaaaaaaaaaaaa

SEQ ID NO: 20340 - RNA, 1148 nt, Artificial Sequence
  SARS-CoV-2__MT913130.1__non-structural protein 6 (NSP6) mRNA gc
aggagagucccgcagucggcguccagcggcucugcuuguucgugugugugucguugcaggccuuauucaagcuuaccaugagcgccgugaagcgcaccaucaagggcacccaccacuggcugcuccugacgauccugaccucccuccugguccuggugcagagcacccaguggucccucuucuucuuccuguacgagaacgccuuccugcccuucgcgauggggaucaucgccaugagcgccuucgccaugauguucgugaagcacaagcacgccuuccucugccuguuccugcucccgucccuggcgaccgucgccuacuucaacaugguguacaugcccgccagcugggugaugcggaucaugacguggcuggacauggucgacaccucccucagcggcuucaagcugaaggacugcgugauguacgccuccgcggugguccugcucauccugaugaccgcccgcaccguguacgacgacggggcccggcgcguguggacgcugaugaacguccucacccugguguacaagguguacuacggcaacgcccuggaccaggccaucagcaugugggcgcucaucaucuccgucaccagcaacuacuccgggguggugaccacggucauguuccuggcccggggcaucguguucaugugcguggaguacugccccaucuucuucaucaccggcaacacccugcagugcaucaugcucgucuacugcuuccugggguacuucugcacgugcuacuucggccuguucugccuccugaaccgcuacuuccggcugacccucgggguguacgacuaccuggugagcacccaggaguuccgcuacaugaacucccagggccugcugcccccgaagaacagcaucgacgccuuccggcucaacaucaagcugcucggggucggcggcaagcccugcaucaagguggccaccguccagugaggacuagucccuguucccagagcccacuuuuuuuucuuuuuuugaaauaaaauagccugucuuucagaucucaaaggcucuuuucagagccaccaaaaaaaaaaaaaaaaaaaaaaaaaaaaaaaaaaaaaaaaaaaaaaaaaaaaaaaaaaaaaaaaaaaaaaaaaaaaaaaaaaaaaaaaaaaaaaaaaaaaa

SEQ ID NO: 20341 - RNA, 1148 nt, Artificial Sequence
  SARS-CoV-2__MT893668.1__non-structural protein 6 (NSP6) mRNA gc
aggagagucccgcagucggcguccagcggcucugcuuguucgugugugugucguugcaggccuuauucaagcuuaccaugagcgccgugaagcgcaccaucaagggcacccaccacuggcugcuccugacgauccugaccucccuccugguccuggugcagagcacccaguggucccucuucuucuuccuguacgagaacgccuuccugcccuucgcgauggggaucaucgccaugagcgccuucgccaugauguucgugaagcacaagcacgccuuccucugccuguuccugcucccgucccuggcgaccgucgccuacuucaacaugguguacaugcccgccagcugggugaugcggaucaugacguggcuggacauggucgacaccucccucagcggcuucaagcugaaggacugcgugauguacgccuccgcggugguccugcucauccugaugaccgcccgcaccguguacgacgacggggcccggcgcguguggacgcugaugaacguccucacccugguguacaagguguacuacggcaacgcccuggaccaggccaucagcaugugggcgcucaucaucuccgucaccagcaacuacuccgggguggugaccacggucauguuccuggcccggggcaucguguucaugugcguggaguacugccccaucuucuucaucaccggcaacacccugcagugcaucaugcucgucuacugcuuccugggguacuucugcacgugcuacuucggccuguucugccuccugaaccgcuaccugcggcucacccuggggguguacgacuaccuggugagcacccaggaguuccgcuacaugaacucccagggccuccugcccccgaagaacagcaucgacgccuucaagcugaacaucaagcuccugggggucggcggcaagcccugcaucaagguggccaccguccagugaggacuagucccuguucccagagcccacuuuuuuuucuuuuuuugaaauaaaauagccugucuuucagaucucaaaggcucuuuucagagccaccaaaaaaaaaaaaaaaaaaaaaaaaaaaaaaaaaaaaaaaaaaaaaaaaaaaaaaaaaaaaaaaaaaaaaaaaaaaaaaaaaaaaaaaaaaaaaaaaaaaaa

SEQ ID NO: 20342 - RNA, 1148 nt, Artificial Sequence
  SARS-CoV-2__MT890238.1__non-structural protein 6 (NSP6) mRNA gc
aggagagucccgcagucggcguccagcggcucugcuuguucgugugugugucguugcaggccuuauucaagcuuaccaugagcgccgugaagcgcaccaucaagggcacccaccacuggcugcuccugacgauccugaccucccuccugguccuggugcagagcacccaguggucccucuucuucuuccuguacgagaacgccuuccugcccuucgcgauggggaucaucgccaugagcgccuucgccaugauguucgugaagcacaagcacgccuuccucugccuguuccugcucccgucccuggcgaccgucgccuacuucaacaugguguacauccccgccagcugggugaugcggaucaugacguggcuggacauggucgacaccucccucagcggcuucaagcugaaggacugcgugauguacgccuccgcggugguccugcucauccugaugaccgcccgcaccguguacgacgacggggcccggcgcguguggacgcugaugaacguccucacccugguguacaagguguacuacggcaacgcccuggaccaggccaucagcaugugggcgcucaucaucuccgucaccagcaacuacuccgggguggugaccacggucauguuccuggcccggggcaucguguucaugugcguggaguacugccccaucuucuucaucaccggcaacacccugcagugcaucaugcucgucuacugcuuccugggguacuucugcacgugcuacuucggccuguucugccuccugaaccgcuacuuccggcugacccucgggguguacgacuaccuggugagcacccaggaguuccgcuacaugaacucccagggccugcugcccccgaagaacagcaucgacgccuucaagcucaacaucaagcugcucggggucggcggcaagcccugcaucaagguggccaccguccagugaggacuagucccuguucccagagcccacuuuuuuuucuuuuuuugaaauaaaauagccugucuuucagaucucaaaggcucuuuucagagccaccaaaaaaaaaaaaaaaaaaaaaaaaaaaaaaaaaaaaaaaaaaaaaaaaaaaaaaaaaaaaaaaaaaaaaaaaaaaaaaaaaaaaaaaaaaaaaaaaaaaaa

SEQ ID NO: 20343 - RNA, 1148 nt, Artificial Sequence
  SARS-CoV-2__MT890355.1__non-structural protein 6 (NSP6) mRNA gc
aggagagucccgcagucggcguccagcggcucugcuuguucgugugugugucguugcaggccuuauucaagcuuaccaugagcgccgugaagcgcaccaucaagggcacccaccacuggcugcuccugacgauccugaccucccuccugguccuggugcagagcacccaguggucccucuucuucuuccuguacgagaacgccuuccugcccuucgcgauggggaucaucgccaugagcgccuucgccaugauguucgugaagcacaagcacgccuuccucugccuguuccugcucccgucccuggcgaccgucgccuacuucaacaugguguacaugcccgccagcugggugaugcggaucaugacguggcuggacauggucgacaccucccucagcggcuucaagcugaaggacugcgugauguacgccuccgcggugguccugcucauccugaugaccgcccgcaccguguacgacgacggggcccggcgcguguggacgcugaugaacguccucacccugguguacaagguguacuacggcaacgcccuggaccaggccaucagcaugugggcgcucaucaucuccgucaccagcaacuacuccgggguggugaccacggucauguuccuggcccggggcaucguguucaugugcguggaguacugccccaucuucuucaucaccggcaacacccugcacugcaucaugcucgucuacugcuuccugggguacuucugcacgugcuacuucggccuguucugccuccugaaccgcuacuuccggcugacccucgggguguacgacuaccuggugagcacccaggaguuccgcuacaugaacucccagggccugcugcccccgaagaacagcaucgacgccuucaagcucaacaucaagcugcucggggucggcggcaagcccugcaucaagguggccaccguccagugaggacuagucccuguucccagagcccacuuuuuuuucuuuuuuugaaauaaaauagccugucuuucagaucucaaaggcucuuuucagagccaccaaaaaaaaaaaaaaaaaaaaaaaaaaaaaaaaaaaaaaaaaaaaaaaaaaaaaaaaaaaaaaaaaaaaaaaaaaaaaaaaaaaaaaaaaaaaaaaaaaaaa

SEQ ID NO: 20344 - RNA, 1148 nt, Artificial Sequence
  SARS-CoV-2__MT889692.1__non-structural protein 6 (NSP6) mRNA gc
aggagagucccgcagucggcguccagcggcucugcuuguucgugugugugucguugcaggccuuauucaagcuuaccaugagcgccgugaagcgcaccaucaagggcacccaccacuggcugcuccugacgauccugaccucccuccugguccuggugcagagcacccaguggucccucuucuucuuccuguacgagaacgccuuccugcccuucgcgauggggaucaucgccaugagcgccuucgccaugauguucgugaagcacaagaacgccuuccucugccuguuccugcucccgucccuggcgaccgucgccuacuucaacaugguguacaugcccgccagcugggugaugcggaucaugacguggcuggacauggucgacaccucccucagcggcuucaagcugaaggacugcgugauguacgccuccgcggugguccugcucauccugaugaccgcccgcaccguguacgacgacggggcccggcgcguguggacgcugaugaacguccucacccugguguacaagguguacuacggcaacgcccuggaccaggccaucagcaugugggcgcucaucaucuccgucaccagcaacuacuccgggguggugaccacggucauguuccuggcccggggcaucguguucaugugcguggaguacugccccaucuucuucaucaccggcaacacccugcagugcaucaugcucgucuacugcuuccugggguacuucugcacgugcuacuucggccuguucugccuccugaaccgcuacuuccggcugacccucgggguguacgacuaccuggugagcacccaggaguuccgcuacaugaacucccagggccugcugcccccgaagaacagcaucgacgccuucaagcucaacaucaagcugcucggggucggcggcaagcccugcaucaagguggccaccguccagugaggacuagucccuguucccagagcccacuuuuuuuucuuuuuuugaaauaaaauagccugucuuucagaucucaaaggcucuuuucagagccaccaaaaaaaaaaaaaaaaaaaaaaaaaaaaaaaaaaaaaaaaaaaaaaaaaaaaaaaaaaaaaaaaaaaaaaaaaaaaaaaaaaaaaaaaaaaaaaaaaaaaa

SEQ ID NO: 20345 - RNA, 1148 nt, Artificial Sequence
  SARS-CoV-2__MT886314.1__non-structural protein 6 (NSP6) mRNA gc
aggagagucccgcagucggcguccagcggcucugcuuguucgugugugugucguugcaggccuuauucaagcuuaccaugagcgccgugaagcgcaccaucaagggcacccaccacuggcugcuccugacgauccugaccucccuccugguccuggugcagagcacccaguggucccucuucuucuuccuguacgagaacgccuuccugcccuucgcgauggggaucaucgccaugagcgccuucgccaugauguucgugaagcacaagcacgccuuccucugccuguuccugcucccgucccuggcgaccgucgccuacuucaacaugguguacaugcccgccagcugggugaugcggaucaugacguggcuggacauggucgacaccucccucagcggcuucaagcugaaggacugcgugauguacgccuccgcggugguccugcucauccugaugaccgcccgcaccguguacgacgacggggcccggcgcguguggacgcugaugaacguccucacccugguguacaagguguacuacggcaacgcccuggaccaggccaucagcaugugggcgcucaucaucuccgucaccagcaacuacuccgggguggugaccacggucauguuccuggcccggagcaucguguucaugugcguggaguacugccccaucuucuucaucaccggcaacacccugcagugcaucaugcucgucuacugcuuccugggcuacuucugcacgugcuacuucgggcuguucugccuccugaaccgcuacuuccggcugacccucggcguguacgacuaccugguguccacccaggaguuccgcuacaugaacagccaggggcugcugcccccgaagaacuccaucgacgccuucaagcucaacaucaagcugcucggcgucgggggcaagcccugcaucaagguggccaccguccagugaggacuagucccuguucccagagcccacuuuuuuuucuuuuuuugaaauaaaauagccugucuuucagaucucaaaggcucuuuucagagccaccaaaaaaaaaaaaaaaaaaaaaaaaaaaaaaaaaaaaaaaaaaaaaaaaaaaaaaaaaaaaaaaaaaaaaaaaaaaaaaaaaaaaaaaaaaaaaaaaaaaaa

SEQ ID NO: 20346 - RNA, 1148 nt, Artificial Sequence
  SARS-CoV-2__MT886376.1__non-structural protein 6 (NSP6) mRNA gc
aggagagucccgcagucggcguccagcggcucugcuuguucgugugugugucguugcaggccuuauucaagcuuaccaugagcgccgugaagcgcaccaucaagggcacccaccacuggcugcuccugacgauccugaccucccuccugguccuggugcagagcacccaguggucccucuucuucuuccuguacgagaacgccuuccugcccuucgcgauggggaucaucgccaugagcgccuucgccaugauguucgugaagcacaagcacgccuuccucugccuguuccugcucccgucccuggcgaccgucgccuacuucaacauguucuacaugcccgccagcugggugaugcggaucaugacguggcuggacaugguggacaccucccucagcggcuucaagcugaaggacugcgucauguacgccuccgcgguggugcugcucauccugaugaccgcccgcaccgucuacgacgacggggcccggcgcguguggacgcugaugaacgugcucacccuggucuacaagguguacuacggcaacgcccuggaccaggccaucagcaugugggcgcucaucaucuccgugaccagcaacuacuccggggucgugaccacggugauguuccuggcccggggcaucgucuucaugugcguggaguacugccccaucuucuucaucaccggcaacacccugcagugcaucaugcucguguacugcuuccugggguacuucugcacgugcuacuucggccuguucugccuccugaaccgcuacuuccggcugacccucggggucuacgacuaccuggugagcacccaggaguuccgcuacaugaacucccagggccugcugcccccgaagaacagcaucgacgccuucaagcucaacaucaagcugcucggggugggcggcaagcccugcaucaaggucgccaccgugcagugaggacuagucccuguucccagagcccacuuuuuuuucuuuuuuugaaauaaaauagccugucuuucagaucucaaaggcucuuuucagagccaccaaaaaaaaaaaaaaaaaaaaaaaaaaaaaaaaaaaaaaaaaaaaaaaaaaaaaaaaaaaaaaaaaaaaaaaaaaaaaaaaaaaaaaaaaaaaaaaaaaaaa

SEQ ID NO: 20347 - RNA, 1148 nt, Artificial Sequence
  SARS-CoV-2__MT873090.1__non-structural protein 6 (NSP6) mRNA gc
aggagagucccgcagucggcguccagcggcucugcuuguucgugugugugucguugcaggccuuauucaagcuuaccaugagcgccgugaagcgcaccaucaagggcacccaccacuggcugcuccugacgauccugaccucccuccugguccuggugcagagcacccaguggucccucuucuucuuccuguacgagaacgccuuccugcccuucgcgauggggaucaucgccaugagcgccuucgccaugauguucgugaagcacaagcacgccuuccucugccuguuccugcucccgucccuggcgaccgucgccuacuucaacaugguguacaugcccgccagcugggugaugcggaucaugacguggcuggacauggucgacaccucccucagcggcuucaagcugaaggacugcgugauguacgccuccgcggugguccugcucauccugaugaccgcccgcaccguguacgacgacggggcccggcgcguguggacgcugaugaacguccucacccugguguacaagguguacuacggcaacgcccuggaccaggucaucagcaugugggcccucaucaucuccgugaccagcaacuacuccgggguggucaccacggugauguuccuggcgcggggcaucguguucaugugcgucgaguacugccccaucuucuucaucaccggcaacacccugcagugcaucaugcucguguacugcuuccugggguacuucugcacgugcuacuucggccuguucugccuccugaaccgcuacuuccggcugacccucgggguguacgacuaccuggucagcacccaggaguuccgcuacaugaacucccagggccugcugcccccgaagaacagcaucgacgccuucaagcucaacaucaagcugcucggggugggcggcaagcccugcaucaaggucgccaccgugcagugaggacuagucccuguucccagagcccacuuuuuuuucuuuuuuugaaauaaaauagccugucuuucagaucucaaaggcucuuuucagagccaccaaaaaaaaaaaaaaaaaaaaaaaaaaaaaaaaaaaaaaaaaaaaaaaaaaaaaaaaaaaaaaaaaaaaaaaaaaaaaaaaaaaaaaaaaaaaaaaaaaaaa

SEQ ID NO: 20348 - RNA, 1148 nt, Artificial Sequence
  SARS-CoV-2__MT873137.1__non-structural protein 6 (NSP6) mRNA gc
aggagagucccgcagucggcguccagcggcucugcuuguucgugugugugucguugcaggccuuauucaagcuuaccaugagcgccgugaagcgcaccaucaagggcacccaccacuggcugcuccugacgauccugaccucccuccugguccuggugcagagcacccaguggucccucuucuucuuccuguacgagaacgccuuccugcccuucgcgauggggaucaucgccaugagcgccuucgccaugauguucgugaagcacaagcacgccuuccucugccuguuccugcucccgucccuggcgaccgucgccuacuucaacaugguguacaugcccgccagcugggugaugcggaucaugacguggcuggacauggucgacaccucccucagcggcuucaagcugaaggacugcgugauguacgccuccgcggugguccugcucauccugaugaccgcccgcaccguguacgacgacggggcccggcgcguguggacgcugaugaacguccucacccuguucuacaagguguacuacggcaacgcccuggaccaggccaucagcaugugggcgcucaucaucuccgugaccagcaacuacuccggggucgugaccacggugauguuccuggcccggggcaucgucuucaugugcguggaguacugccccaucuucuucaucaccggcaacacccugcagugcaucaugcucguguacugcuuccugggguacuucugcacgugcuacuucggccuguucugccuccugaaccgcuacuuccggcugacccucggggucuacgacuaccuggugagcacccaggaguuccgcuacaugaacucccagggccugcugcccccgaagaacagcaucgacgccuucaagcucaacaucaagcugcucggggugggcggcaagcccugcaucaaggucgccaccgugcagugaggacuagucccuguucccagagcccacuuuuuuuucuuuuuuugaaauaaaauagccugucuuucagaucucaaaggcucuuuucagagccaccaaaaaaaaaaaaaaaaaaaaaaaaaaaaaaaaaaaaaaaaaaaaaaaaaaaaaaaaaaaaaaaaaaaaaaaaaaaaaaaaaaaaaaaaaaaaaaaaaaaaa

SEQ ID NO: 20349 - RNA, 1148 nt, Artificial Sequence
  SARS-CoV-2__MT873178.1__non-structural protein 6 (NSP6) mRNA gc
aggagagucccgcagucggcguccagcggcucugcuuguucgugugugugucguugcaggccuuauucaagcuuaccaugagcgccgugaagcgcaccaucaagggcacccaccacuggcugcuccugacgauccugaccucccuccugguccuggugcagagcacccaguggucccucuucuucuuccuguacgagaacgccuuccugcccuucgcgauggggaucaucgccaugagcgccuucgccaugauguucgugaagcacaagcacgccuuccucugccuguuccugcucccgucccuggcgaccgucgccuacuucaacaugguguacaugcccgccagcugggugaugcggaucaugacguggcuggacauggucgacaccucccucagcggcuucaagcugaaggacugcgugauguacgccuccgcggugguccugcucauccugaugaccgcccgcaccguguacgacgacggggcccggcgcguguggacgcugaugaacguccucacccugguguacaagguguacuacggcaacgcccuggaccaggccaucagcaugugggcgcucaucaucuccgucaccagcaacuacuccgggguggugaccacggucauguuccuggcccggggcaucguguucaugugcguggaguacugccccaucuucuucaucaccggcaacacccugcagugcaucaugcucgucuacugcuuccugggguacuucugcacgugcuacuucggccuguucugccuccugaaccgcuacuuccggcugacccucgggguguacgacuaccuggugagcacccaggaguuccgcuacaugaacucccagggccugcugcccccgaagaacagcaucggggccuucaagcucaacaucaagcugcucggcgucggcgggaagcccugcaucaagguggccaccguccagugaggacuagucccuguucccagagcccacuuuuuuuucuuuuuuugaaauaaaauagccugucuuucagaucucaaaggcucuuuucagagccaccaaaaaaaaaaaaaaaaaaaaaaaaaaaaaaaaaaaaaaaaaaaaaaaaaaaaaaaaaaaaaaaaaaaaaaaaaaaaaaaaaaaaaaaaaaaaaaaaaaaaa

SEQ ID NO: 20350 - RNA, 1148 nt, Artificial Sequence
  SARS-CoV-2__MT873456.1__non-structural protein 6 (NSP6) mRNA gc
aggagagucccgcagucggcguccagcggcucugcuuguucgugugugugucguugcaggccuuauucaagcuuaccaugagcgccgugaagcgcaccaucaagggcacccaccacuggcugcuccugacgauccugaccucccuccugguccuggugcagagcacccaguggucccucuucuucuuccuguacgagaacgccuuccugcccuucgcgauggggaucaucgccaugagcgccuucgccaugauguucgugaagcacaagcacgccuuccucugccuguuccugcucccgucccuggcgaccgucgccuacuucaacaugguguacaugcccgccagcugggugaugcggaucaugacguggcuggacauggucgacaccucccucagcggcuucaagcugaaggacugcgugauguacgccuccgcggugguccugcucauccugaugaccgcccgcaccguguacgacgacggggcccggcgcguguggacgcugaugaacguccucacccugguguacaagguguacuacggcaacgcccugaaccaggccaucagcaugugggcgcucaucaucuccgucaccagcaacuacuccgggguggugaccacggucauguuccuggcccggggcaucguguucaugugcguggaguacugccccaucuucuucaucaccggcaacacccugcagugcaucaugcucgucuacugcuuccugggguacuucugcacgugcuacuucggccuguucugccuccugaaccgcuacuuccggcugacccucgggguguacgacuaccuggugagcacccaggaguuccgcuacaugaacucccagggccugcugcccccgaagaacagcaucgacgccuucaagcucaacaucaagcugcucggggucggcggcaagcccugcaucaagguggccaccguccagugaggacuagucccuguucccagagcccacuuuuuuuucuuuuuuugaaauaaaauagccugucuuucagaucucaaaggcucuuuucagagccaccaaaaaaaaaaaaaaaaaaaaaaaaaaaaaaaaaaaaaaaaaaaaaaaaaaaaaaaaaaaaaaaaaaaaaaaaaaaaaaaaaaaaaaaaaaaaaaaaaaaaa

SEQ ID NO: 20351 - RNA, 1148 nt, Artificial Sequence
  SARS-CoV-2__MT876554.1__non-structural protein 6 (NSP6) mRNA gc
aggagagucccgcagucggcguccagcggcucugcuuguucgugugugugucguugcaggccuuauucaagcuuaccaugagcgccgugaagcgcaccaucaagggcacccaccacuggcugcuccugacgauccugaccucccuccuguuccugguccagagcacccaguggucccucuucuucuuccuguacgagaacgccuuccugcccuucgcgauggggaucaucgccaugagcgccuucgccaugauguucgugaagcacaagcacgccuuccucugccuguuccugcucccgucccuggcgaccguggccuacuucaacauggucuacaugcccgccagcugggugaugcggaucaugacguggcuggacaugguggacaccucccucagcggcuucaagcugaaggacugcgucauguacgccuccgcgguggugcugcucauccugaugaccgcccgcaccgucuacgacgacggggcccggcgcguguggacgcugaugaacgugcucacccuggucuacaagguguacuacggcaacgcccuggaccaggccaucagcaugugggcgcucaucaucuccgugaccagcaacuacuccggggucgugaccacggugauguuccuggcccggggcaucgucuucaugugcguggaguacugccccaucuucuucaucaccggcaacacccugcagugcaucaugcucguguacugcuuccugggguacuucugcacgugcuacuucggccuguucugccuccugaaccgcuacuuccggcugacccucggggucuacgacuaccuggugagcacccaggaguuccgcuacaugaacucccagggccugcugcccccgaagaacagcaucgacgccuucaagcucaacaucaagcugcucggggugggcggcaagcccugcaucaaggucgccaccgugcagugaggacuagucccuguucccagagcccacuuuuuuuucuuuuuuugaaauaaaauagccugucuuucagaucucaaaggcucuuuucagagccaccaaaaaaaaaaaaaaaaaaaaaaaaaaaaaaaaaaaaaaaaaaaaaaaaaaaaaaaaaaaaaaaaaaaaaaaaaaaaaaaaaaaaaaaaaaaaaaaaaaaaa

SEQ ID NO: 20352 - RNA, 1148 nt, Artificial Sequence
  SARS-CoV-2__MT876555.1__non-structural protein 6 (NSP6) mRNA gc
aggagagucccgcagucggcguccagcggcucugcuuguucgugugugugucguugcaggccuuauucaagcuuaccaugagcgccgugaagcgcaccaucaagggcacccaccacuggcugcuccugacgauccugaccuccauccucguccuggugcagagcacccaguggucccuguucuucuuccucuacgagaacgccuuccugcccuucgcgauggggaucaucgccaugagcgccuucgccaugauguucgugaagcacaagcacgccuuccugugccucuuccugcugccgucccucgcgaccgucgccuacuucaacaugguguacaugcccgccagcugggugaugcggaucaugacguggcuggacauggucgacaccucccugagcggcuucaagcucaaggacugcgugauguacgccuccgcggugguccugcugauccucaugaccgcccgcaccguguacgacgacggggcccggcgcguguggacgcugaugaacguccugacccucguguacaagguguacuacggcaacgcccuggaccaggccaucagcaugugggcgcugaucaucuccgucaccagcaacuacuccgggguggugaccacggucauguuccucgcccggggcaucguguucaugugcguggaguacugccccaucuucuucaucaccggcaacacccugcagugcaucaugcuggucuacugcuuccucggguacuucugcacgugcuacuucggccuguucugccugcucaaccgcuacuuccggcugacccuggggguguacgacuaccucgugagcacccaggaguuccgcuacaugaacucccagggccugcugcccccgaagaacagcaucgacgccuucaagcucaacaucaagcugcugggggucggcggcaagcccugcaucaagguggccaccguccagugaggacuagucccuguucccagagcccacuuuuuuuucuuuuuuugaaauaaaauagccugucuuucagaucucaaaggcucuuuucagagccaccaaaaaaaaaaaaaaaaaaaaaaaaaaaaaaaaaaaaaaaaaaaaaaaaaaaaaaaaaaaaaaaaaaaaaaaaaaaaaaaaaaaaaaaaaaaaaaaaaaaaa

SEQ ID NO: 20353 - RNA, 1148 nt, Artificial Sequence
  SARS-CoV-2__MT877304.1__non-structural protein 6 (NSP6) mRNA gc
aggagagucccgcagucggcguccagcggcucugcuuguucgugugugugucguugcaggccuuauucaagcuuaccaugagcgccgugaagcgcaccaucaagggcacccaccacuggcugcuccugacgauccugaccucccuccugguccuggugcagagcacccaguggucccucuucuucuuccuguacgagaacgccuuccugcccuucgcgauggggaucaucgccaugagcgccuucgccaugauguucaucaagcacaagcacgccuuccucugccuguuccugcucccgucccuggcgaccguggccuacuucaacauggucuacaugcccgccagcugggugaugcggaucaugacguggcuggacaugguggacaccucccucagcggcuucaagcugaaggacugcgucauguacgccuccgcgguggugcugcucauccugaugaccgcccgcaccgucuacgacgacggggcccggcgcguguggacgcugaugaacgugcucacccuggucuacaagguguacuacggcaacgcccuggaccaggccaucagcaugugggcgcucaucaucuccgugaccagcaacuacuccggggucgugaccacggugauguuccuggcccggggcaucgucuucaugugcguggaguacugccccaucuucuucaucaccggcaacacccugcagugcaucaugcucguguacugcuuccugggguacuucugcacgugcuacuucggccuguucugccuccugaaccgcuacuuccggcugacccucggggucuacgacuaccuggugagcacccaggaguuccgcuacaugaacucccagggccugcugcccccgaagaacagcaucgacgccuucaagcucaacaucaagcugcucggggugggcggcaagcccugcaucaaggucgccaccgugcagugaggacuagucccuguucccagagcccacuuuuuuuucuuuuuuugaaauaaaauagccugucuuucagaucucaaaggcucuuuucagagccaccaaaaaaaaaaaaaaaaaaaaaaaaaaaaaaaaaaaaaaaaaaaaaaaaaaaaaaaaaaaaaaaaaaaaaaaaaaaaaaaaaaaaaaaaaaaaaaaaaaaaa

SEQ ID NO: 20354 - RNA, 1148 nt, Artificial Sequence
  SARS-CoV-2__MT873803.1__non-structural protein 6 (NSP6) mRNA gc
aggagagucccgcagucggcguccagcggcucugcuuguucgugugugugucguugcaggccuuauucaagcuuaccaugagcgccgugaagcgcaccaucaagggcacccaccacuggcugcuccugacgauccugaccucccuccugguccuggugcagagcacccaguggucccucuucuucuuccuguacgagaacgccuuccugcccuucgcgauggggaucaucgccaugagcgccuucgccaugauguucgugaagcacaagcacgccuuccucugccuguuccugcucccgucccuggcgaccgucgccuacuucaacaugguguacaugcccgccagcugggugaugcggaucaugacguggcuggacauggucgacaccucccucagcggcuucaagcugaaggacugcgugauguacgccuccgcggugguccugcucauccugaugaccgcccgcaccguguacgacgacggggugcggcgcgucuggacgcugaugaacgugcucacccugguguacaaggucuacuacggcaacgcccuggaccaggccaucagcaugugggcccucaucaucuccgugaccagcaacuacuccgggguggucaccacggugauguuccuggcgcggggcaucguguucaugugcgucgaguacugccccaucuucuucaucaccggcaacacccugcagugcaucaugcucguguacugcuuccugggguacuucugcacgugcuacuucggccuguucugccuccugaaccgcuacuuccggcugacccucgggguguacgacuaccuggucagcacccaggaguuccgcuacaugaacucccagggccugcugcccccgaagaacagcaucgacgccuucaagcucaacaucaagcugcucggggugggcggcaagcccugcaucaaggucgccaccgugcagugaggacuagucccuguucccagagcccacuuuuuuuucuuuuuuugaaauaaaauagccugucuuucagaucucaaaggcucuuuucagagccaccaaaaaaaaaaaaaaaaaaaaaaaaaaaaaaaaaaaaaaaaaaaaaaaaaaaaaaaaaaaaaaaaaaaaaaaaaaaaaaaaaaaaaaaaaaaaaaaaaaaaa

SEQ ID NO: 20355 - RNA, 1148 nt, Artificial Sequence
  SARS-CoV-2__MT856453.1__non-structural protein 6 (NSP6) mRNA gc
aggagagucccgcagucggcguccagcggcucugcuuguucgugugugugucguugcaggccuuauucaagcuuaccaugagcgccgugaagcgcaccaucaagggcacccaccacuggcugcuccugacgauccugaccucccuccugguccuggugcagagcacccaguggucccucuucuucuuccuguacgagaacgccuuccugcccuucgcgauggggaucaucgccaugagcgccuucgccaugauguucgugaagcacaagcacgccuuccucugccuguuccugcucccgucccuggcgaccgucgccuacuucaacaugguguacaugcccgccagcugggugaugcggaucaugacguggcuggacauggucgacaccucccucagcggcuucaagcugaaggacugcgugauguacgccuccgcggugguccugcucacccugaugaccgcccgcacgguguacgacgacggggcccggcgcguguggacccugaugaacguccucacccugguguacaagguguacuacggcaacgcccuggaccaggccaucagcaugugggcgcucaucaucuccgucaccagcaacuacuccgggguggugacgaccgucauguuccuggcccggggcaucguguucaugugcguggaguacugccccaucuucuucaucaccggcaacacccugcagugcaucaugcucgucuacugcuuccugggguacuucugcacgugcuacuucggccuguucugccuccugaaccgcuacuuccggcugacccucgggguguacgacuaccuggugagcacccaggaguuccgcuacaugaacucccagggccugcugcccccgaagaacagcaucgacgccuucaagcucaacaucaagcugcucggggucggcggcaagcccugcaucaagguggccaccguccagugaggacuagucccuguucccagagcccacuuuuuuuucuuuuuuugaaauaaaauagccugucuuucagaucucaaaggcucuuuucagagccaccaaaaaaaaaaaaaaaaaaaaaaaaaaaaaaaaaaaaaaaaaaaaaaaaaaaaaaaaaaaaaaaaaaaaaaaaaaaaaaaaaaaaaaaaaaaaaaaaaaaaa

SEQ ID NO: 20356 - RNA, 1148 nt, Artificial Sequence
  SARS-CoV-2__MT856455.1__non-structural protein 6 (NSP6) mRNA gc
aggagagucccgcagucggcguccagcggcucugcuuguucgugugugugucguugcaggccuuauucaagcuuaccaugagcgccgugaagcgcaccaucaagggcacccaccacuggcugcuccugacgauccugaccucccuccugguccuggugcagagcacccaguggucccucuucuucuuccuguacgagaacgccuuccugcccuucgcgauggggaucaucgccaugagcgccuucgccaugauguucgugaagcacaagcacgccuuccucugccuguuccugcucccgucccuggcgaccgucgccuacuucaacaugguguacaugcccgccagcugggugaugcggaucaugacguggcuggacauggucgacaccucccucagcggcuucaagcugaaggacugcgugauguacgccuccgcggugguccugcucauccugaugaccgcccgcaccguguacgacgacggggcccggcgcguguggacgcugaugaacguccucacccugguguacaagguguacuacggcaacgcccuggaccaggccaucagcaugugggcgcucaucaucuccgucaccagcaacuacuccgggguggugaccacggucauguuccuggcccggggcaucguguucaugugcguggaguacugccccaucuucuucaucaccggcaacacccugcagugcgucaugcucguguacugcuuccugggguacuucugcacgugcuacuucggccuguucugccuccugaaccgcuacuuccggcugacccucgggguguacgacuaccuggucagcacccaggaguuccgcuacaugaacucccagggccugcugcccccgaagaacagcaucgacgccuucaagcucaacaucaagcugcucggggugggcggcaagcccugcaucaaggucgccaccgugcagugaggacuagucccuguucccagagcccacuuuuuuuucuuuuuuugaaauaaaauagccugucuuucagaucucaaaggcucuuuucagagccaccaaaaaaaaaaaaaaaaaaaaaaaaaaaaaaaaaaaaaaaaaaaaaaaaaaaaaaaaaaaaaaaaaaaaaaaaaaaaaaaaaaaaaaaaaaaaaaaaaaaaa

SEQ ID NO: 20357 - RNA, 1148 nt, Artificial Sequence
  SARS-CoV-2__MT846438.1__non-structural protein 6 (NSP6) mRNA gc
aggagagucccgcagucggcguccagcggcucugcuuguucgugugugugucguugcaggccuuauucaagcuuaccaugagcgccgugaagcgcaccaucaagggcacccaccacuggcugcuccugacgauccugaccucccuccugguccuggugcagagcacccaguggucccucuucuucuuccuguacgagaacgccuuccugcccuucgcgauggggaucaucgugaugagcgccuucgccaugauguucgucaagcacaagcacgccuuccucugccuguuccugcucccgucccuggccaccguggcguacuucaacaugguguacaugcccgccagcugggucaugcggaucaugacguggcuggacaugguggacaccucccucagcggcuucaagcugaaggacugcgugauguacgccuccgccgucgugcugcucauccugaugaccgcgcgcaccguguacgacgacggggcccggcgcgucuggacgcugaugaacgugcucacccugguguacaaggucuacuacggcaacgcccuggaccaggccaucagcaugugggcccucaucaucuccgugaccagcaacuacuccgggguggucaccacggugauguuccuggcgcggggcaucguguucaugugcgucgaguacugccccaucuucuucaucaccggcaacacccugcagugcaucaugcucguguacugcuuccugggguacuucugcacgugcuacuucggccuguucugccuccugaaccgcuacuuccggcugacccucgggguguacgacuaccuggucagcacccaggaguuccgcuacaugaacucccagggccugcugcccccgaagaacagcaucgacgccuucaagcucaacaucaagcugcucggggugggcggcaagcccugcaucaaggucgccaccgugcagugaggacuagucccuguucccagagcccacuuuuuuuucuuuuuuugaaauaaaauagccugucuuucagaucucaaaggcucuuuucagagccaccaaaaaaaaaaaaaaaaaaaaaaaaaaaaaaaaaaaaaaaaaaaaaaaaaaaaaaaaaaaaaaaaaaaaaaaaaaaaaaaaaaaaaaaaaaaaaaaaaaaaa

SEQ ID NO: 20358 - RNA, 1148 nt, Artificial Sequence
  SARS-CoV-2__MT846506.1__non-structural protein 6 (NSP6) mRNA gc
aggagagucccgcagucggcguccagcggcucugcuuguucgugugugugucguugcaggccuuauucaagcuuaccaugagcgccgugaagcgcaccaucaagggcacccaccacuggcugcuccugacgauccugaccucccuccugguccuggugcagagcacccaguggucccucuucuucuuccuguacgagaacgccuuccugcccuucgcgauggggaucaucgccaugagcgccuucgccaugauguucgugaagcacaagcacgccuuccucugccuguuccugcucccgucccuggcgaccgucgccuacuucaacaugguguacaugcccgccagcugggugaugcggaucaugacguggcuggacauggucgacaccucccucagcggcuucaagcugaaggacugcgugauguacgccuccgcggugguccugcucauccugaugaccgcccgcaccguguacgacgacggggcccggcgcguguggacgcugaugaacguccucacccugguguacaagguguacuacggcaacgcccuggaccaggccaucagcaugugggcgcucaucaucuccgucaccagcaacuacuccgggguggugaccacggucauguuccuggcccggggcaucguguucaugugcguggaguacugccccaucuucuucaucaccggcaacacccugcagugcaucaugcucgucuacugcuuccugggguacuucugcacgugcuacuucggccuguucugccuccugaaccgcuacuuccggcugacccucgggguguacgacuaccuggugagcacccaggaguuccgcuacaugaacucccagggccugcugcccccgaagaacagcaucgaggccuucaagcucaacaucaagcugcucggggucggcggcaagcccugcaucaagguggccaccguccagugaggacuagucccuguucccagagcccacuuuuuuuucuuuuuuugaaauaaaauagccugucuuucagaucucaaaggcucuuuucagagccaccaaaaaaaaaaaaaaaaaaaaaaaaaaaaaaaaaaaaaaaaaaaaaaaaaaaaaaaaaaaaaaaaaaaaaaaaaaaaaaaaaaaaaaaaaaaaaaaaaaaaa

SEQ ID NO: 20359 - RNA, 1148 nt, Artificial Sequence
  SARS-CoV-2__MT846514.1__non-structural protein 6 (NSP6) mRNA gc
aggagagucccgcagucggcguccagcggcucugcuuguucgugugugugucguugcaggccuuauucaagcuuaccaugagcgccgugaagcgcaccaucaagggcacccaccacuggcugcuccugacgauccugaccucccuccugguccuggugcagagcacccaguggucccucuucuucuuccuguacgagaacgccuuccugcccuucgcgauggggaucaucgccaugagcgccuucgccaugauguucgugaagcacaagcacgccuuccucugccuguuccugcucccgucccuggcgaccgucgccuacuucaacaugguguacaugcccgccagcugggugaugcggaucaugacguggcuggacauggucgacaccucccucagcggcuucaagcugaaggacugcgugauguacgccuccgcggugguccugcucauccugaugaccgcccgcaccguguacgacgacggggcccggcgcguguggacgcugaugaacguccucacccugguguacaagguguacuacggcaacgcccuggaccaggccaucagcaugugggcgcucaucaucuccgucaccagcaacuacuccgggguggugaccacggucauguuccuggcccggggcaucguguucaugugcguggaguacugccccaucuucuucaucaccggcaacacccugcagugcaucaugcucgucuacugcuuccugggguacuucugcacgugcuacuucggccuguucugccuccugaaccgcuacuuccggcugacccucgggguguacgacuaccuggugagcacccaggaguuccgcuacaugaacucccagggccugcugcccccgaacaacagcaucgacgccuucaagcucaacaucaagcugcucggggucggcggcaagcccugcaucaagguggccaccguccagugaggacuagucccuguucccagagcccacuuuuuuuucuuuuuuugaaauaaaauagccugucuuucagaucucaaaggcucuuuucagagccaccaaaaaaaaaaaaaaaaaaaaaaaaaaaaaaaaaaaaaaaaaaaaaaaaaaaaaaaaaaaaaaaaaaaaaaaaaaaaaaaaaaaaaaaaaaaaaaaaaaaaa

SEQ ID NO: 20360 - RNA, 1148 nt, Artificial Sequence
  SARS-CoV-2__MT843314.1__non-structural protein 6 (NSP6) mRNA gc
aggagagucccgcagucggcguccagcggcucugcuuguucgugugugugucguugcaggccuuauucaagcuuaccaugagcgccgugaagcgcaccaucaagggcacccaccacuggcugcuccugacgauccugaccucccuccugguccuggugcagagcacccaguggucccucuucuucuuccuguacgagaacgccuuccugcccuucgugauggggaucaucgcgaugagcgccuucgccaugauguucgucaagcacaagcacgccuuccucugccuguuccugcucccgucccuggccaccguggcguacuucaacaugguguacaugcccgccagcugggucaugcggaucaugacguggcuggacaugguggacaccucccucagcggcuucaagcugaaggacugcgugauguacgccuccgccgucgugcugcucauccugaugaccgcgcgcaccguguacgacgacggggcccggcgcgucuggacgcugaugaacgugcucacccugguguacaaggucuacuacggcaacgcccuggaccaggccaucagcaugugggcccucaucaucuccgugaccagcaacuacuccgggguggucaccacggugauguuccuggcgcggggcaucguguucaugugcgucgaguacugccccaucuucuucaucaccggcaacacccugcagugcaucaugcucguguacugcuuccugggguacuucugcacgugcuacuucggccuguucugccuccugaaccgcuacuuccggcugacccucgggguguacgacuaccuggucagcacccaggaguuccgcuacaugaacucccagggccugcugcccccgaagaacagcaucgacgccuucaagcucaacaucaagcugcucggggugggcggcaagcccugcaucaaggucgccaccgugcagugaggacuagucccuguucccagagcccacuuuuuuuucuuuuuuugaaauaaaauagccugucuuucagaucucaaaggcucuuuucagagccaccaaaaaaaaaaaaaaaaaaaaaaaaaaaaaaaaaaaaaaaaaaaaaaaaaaaaaaaaaaaaaaaaaaaaaaaaaaaaaaaaaaaaaaaaaaaaaaaaaaaaa

SEQ ID NO: 20361 - RNA, 1148 nt, Artificial Sequence
  SARS-CoV-2__MT831149.1__non-structural protein 6 (NSP6) mRNA gc
aggagagucccgcagucggcguccagcggcucugcuuguucgugugugugucguugcaggccuuauucaagcuuaccaugagcgccgugaagcgcaccaucaagggcacccaccacuggcugcuccugacgauccugaccucccuccugguccuggugcagagcacccaguggucccucuucuucuuccuguacgagaacgccuuccugcccuucgcgauggggaucaucgccaugagcgccuucgccaugauguucgugaagcacaagcacgccuuccucugccuguuccugcucccgucccuggcgaccgucgccuacuucaacaugguguacaugcccgccagcugggugaugcggaucaugacguggcuggacauggucgacaccucccucagcggcuucaagcugaaggacugcgugauguacgccuccgcggugguccugcucauccugaugaccgcccgcaccguguacgacgacggggcccggcgcguguggacgcugaugaacguccucacccugguguacaagguguacuacggcaacgcccuggaccaggccaucagcaugugggcguucaucaucuccgucaccagcaacuacuccgggguggugaccacggucauguuccucgcccggggcaucguguucaugugcguggaguacugccccaucuucuucaucaccggcaacacccugcagugcaucaugcuggucuacugcuuccucggguacuucugcacgugcuacuucggccuguucugccugcucaaccgcuacuuccggcugacccuggggguguacgacuaccucgugagcacccaggaguuccgcuacaugaacucccagggccugcugcccccgaagaacagcaucgacgccuucaagcucaacaucaagcugcugggggucggcggcaagcccugcaucaagguggccaccguccagugaggacuagucccuguucccagagcccacuuuuuuuucuuuuuuugaaauaaaauagccugucuuucagaucucaaaggcucuuuucagagccaccaaaaaaaaaaaaaaaaaaaaaaaaaaaaaaaaaaaaaaaaaaaaaaaaaaaaaaaaaaaaaaaaaaaaaaaaaaaaaaaaaaaaaaaaaaaaaaaaaaaaa

SEQ ID NO: 20362 - RNA, 1148 nt, Artificial Sequence
  SARS-CoV-2__MT831152.1__non-structural protein 6 (NSP6) mRNA gc
aggagagucccgcagucggcguccagcggcucugcuuguucgugugugugucguugcaggccuuauucaagcuuaccaugagcgccgugaagcgcaccaucaacggcacccaccacuggcugcuccugacgauccugaccucccuccugguccuggugcagagcacccaguggucccucuucuucuuccuguacgagaacgccuuccugcccuucgcgauggggaucaucgccaugagcgccuucgccaugauguucgugaagcacaagcacgccuuccucugccuguuccugcucccgucccuggcgaccgucgccuacuucaacaugguguacaugcccgccagcugggugaugcggaucaugacguggcuggacauggucgacaccucccucagcggcuucaagcugaaggacugcgugauguacgccuccgcggugguccugcucauccugaugaccgcccgcaccguguacgacgacggggcccggcgcguguggacgcugaugaacguccucacccugguguacaagguguacuacggcaacgcccuggaccaggccaucagcaugugggcgcucaucaucuccgucaccagcaacuacuccgggguggugaccacggucauguuccuggcccggggcaucguguucaugugcguggaguacugccccaucuucuucaucaccggcaacacccugcagugcaucaugcucgucuacugcuuccugggguacuucugcacgugcuacuucggccuguucugccuccugaaccgcuacuuccggcugacccucgggguguacgacuaccuggugagcacccaggaguuccgcuacaugaacucccagggccugcugcccccgaagaacagcaucgacgccuucaagcucaacaucaagcugcucggggucggcggcaagcccugcaucaagguggccaccguccagugaggacuagucccuguucccagagcccacuuuuuuuucuuuuuuugaaauaaaauagccugucuuucagaucucaaaggcucuuuucagagccaccaaaaaaaaaaaaaaaaaaaaaaaaaaaaaaaaaaaaaaaaaaaaaaaaaaaaaaaaaaaaaaaaaaaaaaaaaaaaaaaaaaaaaaaaaaaaaaaaaaaaa

SEQ ID NO: 20363 - RNA, 1148 nt, Artificial Sequence
  SARS-CoV-2__MT831226.1__non-structural protein 6 (NSP6) mRNA gc
aggagagucccgcagucggcguccagcggcucugcuuguucgugugugugucguugcaggccuuauucaagcuuaccaugagcgccgugaagcgcaccaucaagggcacccaccacuggcugcuccugacgaaccugaccucccuccugguccuggugcagagcacccaguggucccucuucuucuuccuguacgagaacgccuuccugcccuucgcgauggggaucaucgccaugagcgccuucgccaugauguucgugaagcacaagcacgccuuccucugccuguuccugcucccgucccuggcgaccgucgccuacuucaacaugguguacaugcccgccagcugggugaugcggaucaugacguggcuggacauggucgacaccucccucagcggcuucaagcugaaggacugcgugauguacgccuccgcggugguccugcucauccugaugaccgcccgcaccguguacgacgacggggcccggcgcguguggacgcugaugaacguccucacccugguguacaagguguacuacggcaacgcccuggaccaggccaucagcaugugggcgcucaucaucuccgucaccagcaacuacuccgggguggugaccacggucauguuccuggcccggggcaucguguucaugugcguggaguacugccccaucuucuucaucaccggcaacacccugcagugcaucaugcucgucuacugcuuccugggguacuucugcacgugcuacuucggccuguucugccuccugaaccgcuacuuccggcugacccucgggguguacgacuaccuggugagcacccaggaguuccgcuacaugaacucccagggccugcugcccccgaagaacagcaucgacgccuucaagcucaacaucaagcugcucggggucggcggcaagcccugcaucaagguggccaccguccagugaggacuagucccuguucccagagcccacuuuuuuuucuuuuuuugaaauaaaauagccugucuuucagaucucaaaggcucuuuucagagccaccaaaaaaaaaaaaaaaaaaaaaaaaaaaaaaaaaaaaaaaaaaaaaaaaaaaaaaaaaaaaaaaaaaaaaaaaaaaaaaaaaaaaaaaaaaaaaaaaaaaaa

SEQ ID NO: 20364 - RNA, 1148 nt, Artificial Sequence
  SARS-CoV-2__MT831341.1__non-structural protein 6 (NSP6) mRNA gc
aggagagucccgcagucggcguccagcggcucugcuuguucgugugugugucguugcaggccuuauucaagcuuaccaugagcgccgugaagcgcaccaucaagggcacccaccacuggcugcuccugacgauccugaccucccuccugguccuggugcagagcacccaguggucccucuucuucuucuucuacgagaacgccuuccugcccuucgcgauggggaucaucgccaugagcgccuucgccaugauguucgugaagcacaagcacgccuuccugugccucuuccugcugccgucccucgcgaccgucgccuacuucaacaugguguacaugcccgccagcugggugaugcggaucaugacguggcuggacauggucgacaccucccugagcggcuucaagcucaaggacugcgugauguacgccuccgcggugguccugcugauccucaugaccgcccgcaccguguacgacgacggggcccggcgcguguggacgcugaugaacguccugacccucuucuacaagguguacuacggcaacgcccuggaccaggccaucagcaugugggcgcugaucaucuccgugaccagcaacuacuccggggucgugaccacggugauguuccucgcccggggcaucgucuucaugugcguggaguacugccccaucuucuucaucaccggcaacacccugcagugcaucaugcugguguacugcuuccucggguacuucugcacgugcuacuucggccuguucugccugcucaaccgcuacuuccggcugacccugggggucuacgacuaccucgugagcacccaggaguuccgcuacaugaacucccagggccugcugcccccgaagaacagcaucgacgccuucaagcucaacaucaagcugcugggggugggcggcaagcccugcaucaaggucgccaccgugcagugaggacuagucccuguucccagagcccacuuuuuuuucuuuuuuugaaauaaaauagccugucuuucagaucucaaaggcucuuuucagagccaccaaaaaaaaaaaaaaaaaaaaaaaaaaaaaaaaaaaaaaaaaaaaaaaaaaaaaaaaaaaaaaaaaaaaaaaaaaaaaaaaaaaaaaaaaaaaaaaaaaaaa

SEQ ID NO: 20365 - RNA, 1148 nt, Artificial Sequence
  SARS-CoV-2__MT831729.1__non-structural protein 6 (NSP6) mRNA gc
aggagagucccgcagucggcguccagcggcucugcuuguucgugugugugucguugcaggccuuauucaagcuuaccaugagcgccgugaagcgcaccaucaagggcacccaccacuggcugcuccugacgauccugaccucccuccugguccuggugcagagcacccaguggucccucuucuucuuccuguacgagaacgccuuccugcccuucgcgauggggaucaucgccaugagcgccuucgccaugauguucgugaagcacaagcacgccuuccucugccuguuccugcucccgucccuggcgaccgucgccuacuucaacaugguguacaugcccgccagcugggugaugcggaucaugacguggcuggacauggucgacaccucccucagcggcuucaagcugaaggacugcgugauguacguguccgccgucgugcugcucauccugaugaccgcgcgcaccguguacgacgacggggcccggcgcgucuggacgcugaugaacgugcucacccugguguacaaggucuacuacggcaacgcccuggaccaggccaucagcaugugggcccucaucaucuccgugaccagcaacuacuccgggguggucaccacggugauguuccuggcgcggggcaucguguucaugugcgucgaguacugccccaucuucuucaucaccggcaacacccugcagugcaucaugcucguguacugcuuccugggguacuucugcacgugcuacuucggccuguucugccuccugaaccgcuacuuccggcugacccucgggguguacgacuaccuggucagcacccaggaguuccgcuacaugaacucccagggccugcugcccccgaagaacagcaucgacgccuucaagcucaacaucaagcugcucggggugggcggcaagcccugcaucaaggucgccaccgugcagugaggacuagucccuguucccagagcccacuuuuuuuucuuuuuuugaaauaaaauagccugucuuucagaucucaaaggcucuuuucagagccaccaaaaaaaaaaaaaaaaaaaaaaaaaaaaaaaaaaaaaaaaaaaaaaaaaaaaaaaaaaaaaaaaaaaaaaaaaaaaaaaaaaaaaaaaaaaaaaaaaaaaa

SEQ ID NO: 20366 - RNA, 1148 nt, Artificial Sequence
  SARS-CoV-2__MT834038.1__non-structural protein 6 (NSP6) mRNA gc
aggagagucccgcagucggcguccagcggcucugcuuguucgugugugugucguugcaggccuuauucaagcuuaccaugagcgccgugaagcgcaccaucaagggcacccaccacuggcugcuccugacgauccugaccucccuccugguccuggugcagagcacccaguggucccucuucuucuuccuguacgagaacgccuuccugcccuucgcgauggggaucaucgccaugagcgccuucgccaugauguucgugaagcacaagcacgccuuccucugccuguuccugcucccgucccuggcgaccgucgccuacuucaacaugguguacaugcccgccagcugggugaugcggaucaugacguggcuggacauggucgacaccucccucagcggcuucaagcugaaggacugcgggauguacgccuccgcgguggugcugcucauccugaugaccgcccgcaccgucuacgacgacggcgcccggcgcguguggacgcugaugaacgugcucacccuggucuacaagguguacuacgggaacgcccuggaccaggccaucagcaugugggcgcucaucaucuccgugaccagcaacuacuccggcgucgugaccacggugauguuccuggcccggggcaucgucuucaugugcguggaguacugccccaucuucuucaucaccgggaacacccugcagugcaucaugcucguguacugcuuccugggcuacuucugcacgugcuacuucgggcuguucugccuccugaaccgcuacuuccggcugacccucggcgucuacgacuaccuggugagcacccaggaguuccgcuacaugaacucccaggggcugcugcccccgaagaacagcaucgacgccuucaagcucaacaucaagcugcucggcgugggcgggaagcccugcaucaaggucgccaccgugcagugaggacuagucccuguucccagagcccacuuuuuuuucuuuuuuugaaauaaaauagccugucuuucagaucucaaaggcucuuuucagagccaccaaaaaaaaaaaaaaaaaaaaaaaaaaaaaaaaaaaaaaaaaaaaaaaaaaaaaaaaaaaaaaaaaaaaaaaaaaaaaaaaaaaaaaaaaaaaaaaaaaaaa

SEQ ID NO: 20367 - RNA, 1148 nt, Artificial Sequence
  SARS-CoV-2__MT834100.1__non-structural protein 6 (NSP6) mRNA gc
aggagagucccgcagucggcguccagcggcucugcuuguucgugugugugucguugcaggccuuauucaagcuuaccaugagcgccgugaagcgcaccaucaagggcaccuaccacuggcugcuccugacgauccugaccucccuccugguccuggugcagagcacccaguggucccucuucuucuuccuguacgagaacgccuuccugcccuucgcgauggggaucaucgccaugagcgccuucgccaugauguucgugaagcacaagcacgccuuccucugccuguuccugcucccgucccuggcgaccgucgccuacuucaacaugguguacaugcccgccagcugggugaugcggaucaugacguggcuggacauggucgacaccucccucagcggcuucaagcugaaggacugcgugauguacgccuccgcggugguccugcucauccugaugaccgcccgcaccguguacgacgacggggcccggcgcguguggacgcugaugaacguccucacccugguguacaagguguacuacggcaacgcccuggaccaggccaucagcaugugggcgcucaucaucuccgucaccagcaacuacuccgggguggugaccacggucauguuccuggcccggggcaucguguucaugugcguggaguacugccccaucuucuucaucaccggcaacacccugcagugcaucaugcucgucuacugcuuccugggguacuucugcacgugcuacuucggccuguucugccuccugaaccgcuacuuccggcugacccucgggguguacgacuaccuggugagcacccaggaguuccgcuacaugaacucccagggccugcugcccccgaagaacagcaucgacgccuucaagcucaacaucaagcugcucggggucggcggcaagcccugcaucaagguggccaccguccagugaggacuagucccuguucccagagcccacuuuuuuuucuuuuuuugaaauaaaauagccugucuuucagaucucaaaggcucuuuucagagccaccaaaaaaaaaaaaaaaaaaaaaaaaaaaaaaaaaaaaaaaaaaaaaaaaaaaaaaaaaaaaaaaaaaaaaaaaaaaaaaaaaaaaaaaaaaaaaaaaaaaaa

SEQ ID NO: 20368 - RNA, 1148 nt, Artificial Sequence
  SARS-CoV-2__MT834849.1__non-structural protein 6 (NSP6) mRNA gc
aggagagucccgcagucggcguccagcggcucugcuuguucgugugugugucguugcaggccuuauucaagcuuaccaugagcgccgugaagcgcaccaucaagggcacccaccacuggcugcuccugacgauccugaccucccuccugguccuggugcagagcacccaguggucccucuucuucuuccuguacgagaacgccuuccugcccuucgcgauggggaucaucgccaugagcgccuucgccaugauguucgugaagcacaagcacgccuuccucugccuguuccugcucccgucccuggcgaccgucgccuacuucaacaugguguacaugcccgccagcugggugaugcggaucaugacguggcuggacauggucgacaccucccucagcggcuucaagcugaaggacugcgugauguacgccuccgcggugguccugcucauccugaugaccgcccgcaccguguacgacgacggggcccggcgcguguggacgcugaugaacguccucacccuggccuacaagguguacuacggcaacgcccuggaccaggcgaucagcaugugggcccucaucaucuccgugaccagcaacuacuccggggucgugaccacggugauguuccuggcccggggcaucgucuucaugugcguggaguacugccccaucuucuucaucaccggcaacacccugcagugcaucaugcucguguacugcuuccugggguacuucugcacgugcuacuucggccuguucugccuccugaaccgcuacuuccggcugacccucggggucuacgacuaccuggugagcacccaggaguuccgcuacaugaacucccagggccugcugcccccgaagaacagcaucgacgccuucaagcucaacaucaagcugcucggggugggcggcaagcccugcaucaaggucgccaccgugcagugaggacuagucccuguucccagagcccacuuuuuuuucuuuuuuugaaauaaaauagccugucuuucagaucucaaaggcucuuuucagagccaccaaaaaaaaaaaaaaaaaaaaaaaaaaaaaaaaaaaaaaaaaaaaaaaaaaaaaaaaaaaaaaaaaaaaaaaaaaaaaaaaaaaaaaaaaaaaaaaaaaaaa

SEQ ID NO: 20369 - RNA, 1148 nt, Artificial Sequence
  SARS-CoV-2__MT825091.1__non-structural protein 6 (NSP6) mRNA gc
aggagagucccgcagucggcguccagcggcucugcuuguucgugugugugucguugcaggccuuauucaagcuuaccaugagcgccgugaagcgcaccaucaagggcacccaccacuggcugcuccugacgauccugaccucccuccugguccuggugcagagcacccaguggucccucuucuucuuccuguacgagaacgccuuccugcccuucgcgauggacaucaucgccauguacgccuucgccaugauguucgugaagcacaagaacgccuuccucuaccuguaccugcucccgagccuggcgaccgucgccuacuucaacaugguguacaugcuggccuccugggugaugcggaucaugacguggcucgacaugggggacaccagccuguccggcuucaagcugaaggacugcgucauguacgccagcgggguggugcuccugauccugaugaccgcgcgcaccgucuacgacgacggcgcccggcgcgugcucacgcugaugaacgugcugacccucgucuacaagguguacuacgggaacgcccuggaccaggccaucuccaugugggcccugaucaucagcgugaccuccaacuacagcggcgucgugaccacggugaugucccucgcgcgggacaucgucuucaugugcguggaguacugccccaucuucuucaucaccggcaacacccugcagugcaucaugcugguguacugcuuccucggguacagcuacacgugcuacuucggccuguucugccugcucaaccgcuacuuccggcugacccugggggucuacgacuaccucguguccacccaggaguuccgcuacaugaacagccagggccugcugccgcccaagaacuccaucgacgccuucaagcucaacaucaagcugcugggggugggcggcaagcccugcaucaaggucgccaccgugcagugaggacuagucccuguucccagagcccacuuuuuuuucuuuuuuugaaauaaaauagccugucuuucagaucucaaaggcucuuuucagagccaccaaaaaaaaaaaaaaaaaaaaaaaaaaaaaaaaaaaaaaaaaaaaaaaaaaaaaaaaaaaaaaaaaaaaaaaaaaaaaaaaaaaaaaaaaaaaaaaaaaaaa

SEQ ID NO: 20370 - RNA, 1148 nt, Artificial Sequence
  SARS-CoV-2__MT821674.1__non-structural protein 6 (NSP6) mRNA gc
aggagagucccgcagucggcguccagcggcucugcuuguucgugugugugucguugcaggccuuauucaagcuuaccaugagcgccgugaagcgcaccaucaagggcacccaccacuggcugcuccugacgauccugaccucccuccugguccuggugcagagcacccaguggucccucuucuucuuccuguacgagaacguguuccugcccuucgccauggggaucaucgcgaugagcgccuucgccaugauguucgucaagcacaagcacgccuuccucugccuguuccugcucccgucccuggccaccguggcguacuucaacaugguguacaugcccgccagcugggucaugcggaucaugacguggcuggacaugguggacaccucccucagcggcuucaagcugaaggacugcgugauguacgccuccgccgucgugcugcucauccugaugaccgcgcgcaccguguacgacgacggggcccggcgcgucuggacgcugaugaacgugcucacccugguguacaaggucuacuacggcaacgcccuggaccaggccaucagcaugugggcccucaucaucuccgugaccagcaacuacuccgggguggucaccacggugauguuccuggcgcggggcaucguguucaugugcgucgaguacugccccaucuucuucaucaccggcaacacccugcagugcaucaugcucguguacugcuuccugggguacuucugcacgugcuacuucggccuguucugccuccugaaccgcuacuuccggcugacccucgggguguacgacuaccuggucagcacccaggaguuccgcuacaugaacucccagggccugcugcccccgaagaacagcaucgacgccuucaagcucaacaucaagcugcucggggugggcggcaagcccugcaucaaggucgccaccgugcagugaggacuagucccuguucccagagcccacuuuuuuuucuuuuuuugaaauaaaauagccugucuuucagaucucaaaggcucuuuucagagccaccaaaaaaaaaaaaaaaaaaaaaaaaaaaaaaaaaaaaaaaaaaaaaaaaaaaaaaaaaaaaaaaaaaaaaaaaaaaaaaaaaaaaaaaaaaaaaaaaaaaaa

SEQ ID NO: 20371 - RNA, 1148 nt, Artificial Sequence
  SARS-CoV-2__MT821782.1__non-structural protein 6 (NSP6) mRNA gc
aggagagucccgcagucggcguccagcggcucugcuuguucgugugugugucguugcaggccuuauucaagcuuaccaugagcgccgugaagcgcaccaucaagggcacccaccacuggcugcuccugacgauccugaccuccuuccucguccuggugcagagcacccaguggucccuguucuucuuccucuacgagaacgccuuccugcccuucgcgauggggaucaucgccaugagcgccuucgccaugauguucgugaagcacaagcacgccuuccugugccucuuccugcugccgucccucgcgaccgucgccuacuucaacaugguguacaugcccgccagcugggugaugcggaucaugacguggcuggacauggucgacaccucccugagcggcuucaagcucaaggacugcgugauguacgccuccgcggugguccugcugauccucaugaccgcccgcaccguguacgacgacggggcccggcgcguguggacgcugaugaacguccugacccucguguacaagguguacuacggcaacgcccuggaccaggccaucagcaugugggcgcugaucaucuccgucaccagcaacuacuccgggguggugaccacggucauguuccucgcccggggcaucguguucaugugcguggaguacugccccaucuucuucaucaccggcaacacccugcagugcaucaugcuggucuacugcuuccucggguacuucugcacgugcuacuucggccuguucugccugcucaaccgcuacuuccggcugacccuggggguguacgacuaccucgugagcacccaggaguuccgcuacaugaacucccagggccugcugcccccgaagaacagcaucgacgccuucaagcucaacaucaagcugcugggggucggcggcaagcccugcaucaagguggccaccguccagugaggacuagucccuguucccagagcccacuuuuuuuucuuuuuuugaaauaaaauagccugucuuucagaucucaaaggcucuuuucagagccaccaaaaaaaaaaaaaaaaaaaaaaaaaaaaaaaaaaaaaaaaaaaaaaaaaaaaaaaaaaaaaaaaaaaaaaaaaaaaaaaaaaaaaaaaaaaaaaaaaaaaa

SEQ ID NO: 20372 - RNA, 1148 nt, Artificial Sequence
  SARS-CoV-2__MT821787.1__non-structural protein 6 (NSP6) mRNA gc
aggagagucccgcagucggcguccagcggcucugcuuguucgugugugugucguugcaggccuuauucaagcuuaccaugagcgccgugaagcgcaccaucaagggcacccaccacuggcugcuccugacgauccugaccucccuccugguccuggugcagagcacccaguggucccucuucuucuuccuguacgagaacgccuuccugcccuucgcgauggggaucaucgccaugagcgccuucgccaugauguucgugaagcacaagcacgccuuccucugccuguuccugcucccgucccuggcgaccgucguguacuucaacaugguguacaugcccgccagcugggucaugcggaucaugacguggcuggacaugguggacaccucccucagcggcuucaagcugaaggacugcgugauguacgccuccgccgucgugcugcucauccugaugaccgcgcgcaccguguacgacgacggggcccggcgcgucuggacgcugaugaacgugcucacccugguguacaaggucuacuacggcaacgcccuggaccaggccaucagcaugugggcccucaucaucuccgugaccagcaacuacuccgggguggucaccacggugauguuccuggcgcggggcaucguguucaugugcgucgaguacugccccaucuucuucaucaccggcaacacccugcagugcaucaugcucguguacugcuuccugggguacuucugcacgugcuacuucggccuguucugccuccugaaccgcuacuuccggcugacccucgggguguacgacuaccuggucagcacccaggaguuccgcuacaugaacucccagggccugcugcccccgaagaacagcaucgacgccuucaagcucaacaucaagcugcucggggugggcggcaagcccugcaucaaggucgccaccgugcagugaggacuagucccuguucccagagcccacuuuuuuuucuuuuuuugaaauaaaauagccugucuuucagaucucaaaggcucuuuucagagccaccaaaaaaaaaaaaaaaaaaaaaaaaaaaaaaaaaaaaaaaaaaaaaaaaaaaaaaaaaaaaaaaaaaaaaaaaaaaaaaaaaaaaaaaaaaaaaaaaaaaaa

SEQ ID NO: 20373 - RNA, 1148 nt, Artificial Sequence
  SARS-CoV-2__MT810523.1__non-structural protein 6 (NSP6) mRNA gc
aggagagucccgcagucggcguccagcggcucugcuuguucgugugugugucguugcaggccuuauucaagcuuaccaugagcgccgugaagcgcaccaucaagggcacccaccacuggcugcuccugacgauccugaccucccuccugguccuggugcagagcacccaguggucccucuucuucuuccuguacgagaacgccuuccugcccuucgcgauggggaucaucgccaugagcgccuucuccaugauguucgugaagcacaagcacgccuuccucugccuguuccugcucccgagccuggccaccgucgcguacuucaacaugguguacaugcccgccuccugggugaugcggaucaugacguggcuggacauggucgacaccagccucuccggcuucaagcugaaggacugcgugauguacgccagcgccgugguccugcucauccugaugaccgcgcgcaccguguacgacgacggggcccggcgcguguggacgcugaugaacguccucacccugguguacaagguguacuacggcaacgcccuggaccaggccaucuccaugugggcccucaucaucagcgucaccuccaacuacagcgggguggugaccacggucauguuccuggcgcggggcaucguguucaugugcguggaguacugccccaucuucuucaucaccggcaacacccugcagugcaucaugcucgucuacugcuuccugggguacuucugcacgugcuacuucggccuguucugccuccugaaccgcuacuuccggcugacccucgggguguacgacuaccugguguccacccaggaguuccgcuacaugaacagccagggccugcugcccccgaagaacuccaucgacgccuucaagcucaacaucaagcugcucggggucggcggcaagcccugcaucaagguggccaccguccagugaggacuagucccuguucccagagcccacuuuuuuuucuuuuuuugaaauaaaauagccugucuuucagaucucaaaggcucuuuucagagccaccaaaaaaaaaaaaaaaaaaaaaaaaaaaaaaaaaaaaaaaaaaaaaaaaaaaaaaaaaaaaaaaaaaaaaaaaaaaaaaaaaaaaaaaaaaaaaaaaaaaaa

SEQ ID NO: 20374 - RNA, 1148 nt, Artificial Sequence
  SARS-CoV-2__MT810568.1__non-structural protein 6 (NSP6) mRNA gc
aggagagucccgcagucggcguccagcggcucugcuuguucgugugugugucguugcaggccuuauucaagcuuaccaugagcgccgugaagcgcaccaucaagggcacccaccacuggcugcuccugacgauccugaccucccuccugguccuggugcagagcacccaguggucccucuucuucuuccuguacgagaacgccuuccugagcuucgcgauggggaucaucgccauguccgccuucgccaugauguucgugaagcacaagcacgccuuccucugccuguuccugcuccccagccuggcgaccgucgccuacuucaacaugguguacaugccggccuccugggugaugcggaucaugacguggcuggacauggucgacaccagccucuccggcuucaagcugaaggacugcgugauguacgccagcgcggugguccugcucauccugaugaccgcccgcaccguguacgacgacggggcccggcgcguguggacgcugaugaacguccucacccugguguacaagguguacuacggcaacgcccuggaccaggccaucuccaugugggcgcucaucaucagcgucaccuccaacuacagcgggguggugaccacggucauguuccuggcccggggcaucguguucaugugcguggaguacugccccaucuucuucaucaccggcaacacccugcagugcaucaugcucgucuacugcuuccugggguacuucugcacgugcuacuucggccuguucugccuccugaaccgcuacuuccggcugacccucgggguguacgacuaccugguguccacccaggaguuccgcuacaugaacagccagggccugcucccgcccaagaacuccaucgacgccuucaagcugaacaucaagcugcucggggucggcggcaagcccugcaucaagguggccaccguccagugaggacuagucccuguucccagagcccacuuuuuuuucuuuuuuugaaauaaaauagccugucuuucagaucucaaaggcucuuuucagagccaccaaaaaaaaaaaaaaaaaaaaaaaaaaaaaaaaaaaaaaaaaaaaaaaaaaaaaaaaaaaaaaaaaaaaaaaaaaaaaaaaaaaaaaaaaaaaaaaaaaaaa

SEQ ID NO: 20375 - RNA, 1148 nt, Artificial Sequence
  SARS-CoV-2__MT810731.1__non-structural protein 6 (NSP6) mRNA gc
aggagagucccgcagucggcguccagcggcucugcuuguucgugugugugucguugcaggccuuauucaagcuuaccaugagcgccgugaagcgcaccaucaagggcacccaccacuggcugcuccugacgauccugaccucccuccugguccuggugcagagcacccaguggucccucuucuucuuccuguacgagaacgccuuccugcccuucgcgauggggaucaucgccaugagcgccuucgccaugauguucgugaagcacaagcacgccuuccucugccuguuccugcucccgucccuggcgaccgucgccuacuucaacaugguguacaugcccgccagcugggugaugcggaucaugacguggcuggacauggucgacaccucccucuucggcuucaagcugaaggacugcgugauguacgccagcgcggugguccugcucauccugaugaccgcccgcaccguguacgacgacggggcccggcgcguguggacgcugaugaacguccucacccugguguacaagguguacuacggcaacgcccuggaccaggccaucuccaugugggcgcucaucaucagcgucaccuccaacuacagcgggguggugaccacggucauguuccuggcccggggcaucguguucaugugcguggaguacugccccaucuucuucaucaccggcaacacccugcagugcaucaugcucgucuacugcuuccugggguacuucugcacgugcuacuucggccuguucugccuccugaaccgcuacuuccggcugacccucgggguguacgacuaccugguguccacccaggaguuccgcuacaugaacagccagggccugcugcccccgaagaacuccaucgacgccuucaagcucaacaucaagcugcucggggucggcggcaagcccugcaucaagguggccaccguccagugaggacuagucccuguucccagagcccacuuuuuuuucuuuuuuugaaauaaaauagccugucuuucagaucucaaaggcucuuuucagagccaccaaaaaaaaaaaaaaaaaaaaaaaaaaaaaaaaaaaaaaaaaaaaaaaaaaaaaaaaaaaaaaaaaaaaaaaaaaaaaaaaaaaaaaaaaaaaaaaaaaaaa

SEQ ID NO: 20376 - RNA, 1148 nt, Artificial Sequence
  SARS-CoV-2__MT811234.1__non-structural protein 6 (NSP6) mRNA gc
aggagagucccgcagucggcguccagcggcucugcuuguucgugugugugucguugcaggccuuauucaagcuuaccaugagcgccgugaagcgcaccaucaagggcacccaccacuggcugcuccugacgauccugaccucccuccugguccuggugcagagcacccaguggucccucuucuucuuccuguacgagaacgccuuccugcccuucgcgauggggaucaucgccaugagcgccuucgccaugauguucgugaagcacaagcacgccuuccucugccuguuccugcucccgucccuggcgaccgucgccuacuucaacaugguguacaugcccgccagcuggcugaugcggaucaugacguggcucgacaugguggacaccucccugagcggcuucaagcugaaggacugcgucauguacgccuccgcgguggugcuccugauccugaugaccgcccgcaccgucuacgacgacggggcccggcgcguguggacgcucaugaacgugcugacccuggucuacaagguguacuacggcaacgcccucgaccaggccaucagcaugugggcgcugaucaucuccgugaccagcaacuacuccggggucgugaccacggugauguuccuggcccggggcaucgucuucaugugcguggaguacugccccaucuucuucaucaccggcaacacccuccagugcaucaugcugguguacugcuuccugggguacuucugcacgugcuacuucggccucuucugccugcugaaccgcuacuuccggcucacccugggggucuacgacuaccuggugagcacccaggaguuccgcuacaugaacucccagggccuccugcccccgaagaacagcaucgacgccuucaagcugaacaucaagcuccugggggugggcggcaagcccugcaucaaggucgccaccgugcagugaggacuagucccuguucccagagcccacuuuuuuuucuuuuuuugaaauaaaauagccugucuuucagaucucaaaggcucuuuucagagccaccaaaaaaaaaaaaaaaaaaaaaaaaaaaaaaaaaaaaaaaaaaaaaaaaaaaaaaaaaaaaaaaaaaaaaaaaaaaaaaaaaaaaaaaaaaaaaaaaaaaaa

SEQ ID NO: 20377 - RNA, 1148 nt, Artificial Sequence
  SARS-CoV-2__MT811513.1__non-structural protein 6 (NSP6) mRNA gc
aggagagucccgcagucggcguccagcggcucugcuuguucgugugugugucguugcaggccuuauucaagcuuaccaugagcgccgugaagcgcaccaucaagggcacccaccacuggcugcuccugacgauccugaccucccuccugguccuggugcagagcacccagugguuccucuucuucuuccuguacgagaacgccuuccugcccuucgcgauggggaucaucgccauguccgccuucgccaugauguucgugaagcacaagcacgccuuccucugccuguuccugcucccgagccuggcgaccgucgccuacuucaacaugguguacaugcccgccuccugggugaugcggaucaugacguggcuggacauggucgacaccagccucuccggcuucaagcugaaggacugcgugauguacgccagcgcggugguccugcucauccugaugaccgcccgcaccguguacgacgacggggcccggcgcguguggacgcugaugaacguccucacccugguguacaagguguacuacggcaacgcccuggaccaggccaucuccaugugggcgcucaucaucagcgucaccuccaacuacagcgggguggugaccacggucauguuccuggcccggggcaucguguucaugugcguggaguacugccccaucuucuucaucaccggcaacacccugcagugcaucaugcucgucuacugcuuccugggguacuucugcacgugcuacuucggccuguucugccuccugaaccgcuacuuccggcugacccucgggguguacgacuaccugguguccacccaggaguuccgcuacaugaacagccagggccugcugcccccgaagaacuccaucgacgccuucaagcucaacaucaagcugcucggggucggcggcaagcccugcaucaagguggccaccguccagugaggacuagucccuguucccagagcccacuuuuuuuucuuuuuuugaaauaaaauagccugucuuucagaucucaaaggcucuuuucagagccaccaaaaaaaaaaaaaaaaaaaaaaaaaaaaaaaaaaaaaaaaaaaaaaaaaaaaaaaaaaaaaaaaaaaaaaaaaaaaaaaaaaaaaaaaaaaaaaaaaaaaa

SEQ ID NO: 20378 - RNA, 1148 nt, Artificial Sequence
  SARS-CoV-2__MT811530.1__non-structural protein 6 (NSP6) mRNA gc
aggagagucccgcagucggcguccagcggcucugcuuguucgugugugugucguugcaggccuuauucaagcuuaccaugagcgccgugaagcgcaccaucaagggcacccaccacuggcugcuccugacgauccugaccucccuccugguccuggugcagagcacccaguggucccucuucuucuuccuguacgagaacgccuuccugcccuucgcgauggggaucaucgccaugagcgccuucgccaugauguucgugaagcacaagcacgccuuccucugccuguuccugcucccgucccuggcgaccgucgccuacuucaacaugguguacaugcccgccagcugggugaugcggaucaugacguggcuggacauggucgacaccucccucagcggcuucaagcugaaggacugcgugauguacgccuccgcggugguccugcucauccugaugaccgcccgcaccguguacgacgacggggcccggcgcguguggacgcugaugaacguccucacccugguguacaagguguacuacggcaacgcccuggaccaggccaucagcaugugggcgcucaucaucuccgucaccagcaacuacuccgggguggugaccacggucauguuccuggcccggggcaucguguucaugugcguggaguacugccccaucuucuucaucaccggcaacacccugcagugcaucaugcucgucuacugcuuccugggguacuucugcacgugcuacuucggccuguucugccuccugaaccgcuacuuccggcugacccucgggguguacgacuaccuggugagcacccaggaguuccgcuacaugaacucccacggccugcugcccccgaagaacagcaucgacgccuucaagcucaacaucaagcugcucggggucggcggcaagcccugcaucaagguggccaccguccagugaggacuagucccuguucccagagcccacuuuuuuuucuuuuuuugaaauaaaauagccugucuuucagaucucaaaggcucuuuucagagccaccaaaaaaaaaaaaaaaaaaaaaaaaaaaaaaaaaaaaaaaaaaaaaaaaaaaaaaaaaaaaaaaaaaaaaaaaaaaaaaaaaaaaaaaaaaaaaaaaaaaaa

SEQ ID NO: 20379 - RNA, 1148 nt, Artificial Sequence
  SARS-CoV-2__MT811552.1__non-structural protein 6 (NSP6) mRNA gc
aggagagucccgcagucggcguccagcggcucugcuuguucgugugugugucguugcaggccuuauucaagcuuaccaugagcgccgugaagcgcaccaucaagggcacccaccacuggcugcuccugacgauccugaccucccuccugguccuggugcagagcacccaguggucccucuucuucuucuucuucuacgagaacgccuuccugcccuucgcgauggggaucaucgccaugagcgccuucgccaugauguucgugaagcacaagcacgccuuccugugccucuuccugcugccgucccucgcgaccgucgccuacuucaacaugguguacaugcccgccagcugggugaugcggaucaugacguggcuggacauggucgacaccucccugagcggcuucaagcucaaggacugcgugauguacgccuccgcggugguccugcugauccucaugaccgcccgcaccguguacgacgacggggcccggcgcguguggacgcugaugaacguccugacccucguguacaagguguacuacggcaacgcccuggaccaggccaucagcaugugggcgcugaucaucuccgucaccagcaacuacuccgggguggugaccacggucauguuccucgcccggggcaucguguucaugugcguggaguacugccccaucuucuucaucaccggcaacacccugcagugcaucaugcuggucuacugcuuccucggguacuucugcacgugcuacuucggccuguucugccugcucaaccgcuacuuccggcugacccuggggguguacgacuaccucgugagcacccaggaguuccgcuacaugaacucccagggccugcugcccccgaagaacagcaucgacgccuucaagcucaacaucaagcugcugggggucggcggcaagcccugcaucaagguggccaccgucugaggacuagucccuguucccagagcccacuuuuuuuucuuuuuuugaaauaaaauagccugucuuucagaucucaaaggcucuuuucagagccaccaaaaaaaaaaaaaaaaaaaaaaaaaaaaaaaaaaaaaaaaaaaaaaaaaaaaaaaaaaaaaaaaaaaaaaaaaaaaaaaaaaaaaaaaaaaaaaaaaaaaa

SEQ ID NO: 20380 - RNA, 1148 nt, Artificial Sequence
  SARS-CoV-2__MT800794.1__non-structural protein 6 (NSP6) mRNA gc
aggagagucccgcagucggcguccagcggcucugcuuguucgugugugugucguugcaggccuuauucaagcuuaccaugagcgccgugaagcgcaccaucaagggcacccaccacuggcugcuccugacgauccugaccucccuccugguccuggugcagagcacccaguggucccucuucuucuuccuguacgagaacgccuuccugcccuucgcgauggggaucaucgccaugagcgccuucgccaugauguucgugaagcacaagcacgccuuccucugccuguuccugcucccgucccuggcgaccgucgccuacuucaacaugguguacaugcccgccagcugggugaugcggaucaugacguggcuggacauggucgacaccucccucagcggcuucaagcugaaggacugcgugauguacgccuccgcggugguccugcucauccugaugaccgcccgcaccguguacgacgacggggcccggcgcguguggacguucaugaacguccugacccucguguacaagguguacuacggcaacgcccuggaccaggccaucagcaugugggcgcugaucaucuccgucaccagcaacuacuccgggguggugaccacggucauguuccucgcccggggcaucguguucaugugcguggaguacugccccaucuucuucaucaccggcaacacccugcagugcaucaugcuggucuacugcuuccucggguacuucugcacgugcuacuucggccuguucugccugcucaaccgcuacuuccggcugacccuggggguguacgacuaccucgugagcacccaggaguuccgcuacaugaacucccagggccugcugcccccgaagaacagcaucgacgccuucaagcucaacaucaagcugcugggggucggcggcaagcccugcaucaagguggccaccguccagugaggacuagucccuguucccagagcccacuuuuuuuucuuuuuuugaaauaaaauagccugucuuucagaucucaaaggcucuuuucagagccaccaaaaaaaaaaaaaaaaaaaaaaaaaaaaaaaaaaaaaaaaaaaaaaaaaaaaaaaaaaaaaaaaaaaaaaaaaaaaaaaaaaaaaaaaaaaaaaaaaaaaa

SEQ ID NO: 20381 - RNA, 1148 nt, Artificial Sequence
  SARS-CoV-2__MT786438.1__non-structural protein 6 (NSP6) mRNA gc
aggagagucccgcagucggcguccagcggcucugcuuguucgugugugugucguugcaggccuuauucaagcuuaccaugagcgccgugaagcgcaccaucaagggcaccuaccacuggcugcuccugacgauccugaccucccuccugguccuggugcagagcacccaguggucccucuucuucuucuucuacgagaacgccuuccugcccuucgcgauggggaucaucgccaugagcgccuucgccaugauguucgugaagcacaagcacgccuuccugugccucuuccugcugccgucccucgcgaccgucgccuacuucaacaugguguacaugcccgccagcugggugaugcggaucaugacguggcuggacauggucgacaccucccugagcggcuucaagcucaaggacugcgugauguacgccuccgcggugguccugcugauccucaugaccgcccgcaccguguacgacgacggggcccggcgcguguggacgcugaugaacguccugacccucguguacaagguguacuacggcaacgcccuggaccaggccaucagcaugugggcgcugaucaucuccgucaccagcaacuacuccgggguggugaccacggucauguuccucgcccggggcaucguguucaugugcguggaguacugccccaucuucuucaucaccggcaacacccugcagugcaucaugcuggucuacugcuuccucggguacuucugcacgugcuacuucggccuguucugccugcucaaccgcuacuuccggcugacccuggggguguacgacuaccucgugagcacccaggaguuccgcuacaugaacucccagggccugcugcccccgaagaacagcaucgacgccuucaagcucaacaucaagcugcugggggucggcggcaagcccugcaucaagguggccaccguccagugaggacuagucccuguucccagagcccacuuuuuuuucuuuuuuugaaauaaaauagccugucuuucagaucucaaaggcucuuuucagagccaccaaaaaaaaaaaaaaaaaaaaaaaaaaaaaaaaaaaaaaaaaaaaaaaaaaaaaaaaaaaaaaaaaaaaaaaaaaaaaaaaaaaaaaaaaaaaaaaaaaaaa

SEQ ID NO: 20382 - RNA, 1148 nt, Artificial Sequence
  SARS-CoV-2__MT786845.1__non-structural protein 6 (NSP6) mRNA gc
aggagagucccgcagucggcguccagcggcucugcuuguucgugugugugucguugcaggccuuauucaagcuuaccaugagcgccgugaagcgcaccaucaagggcacccaccacuggcugcuccugacgauccugaccucccuccugguccuggugcagagcacccaguggucccucuucuucuuccuguacgagaacgccuuccugcccuucgcgauggggaucaucgccaugagcgccuucgccaugauguucgugaagcacaagcacgccuuccucugccuguuccugcucccgucccuggcgaccgucgccuacuucaacaugguguacaugcccgccagcugggugaugcggaucaugacguggcuggacauggucgacaccucccucagcggcuucaagcugaaggacugcgugauguacgccuccgcggugguccugcucauccugaugaccgcccgcaccguguacgacgacggggcccggcgcguguggacgcugaugaacguccucacccugguguacaagguguacuacggcaacgcccuggaccaggccaucagcaugugggcgcucaucaucuccgucaccagcaacuacuccgggguggugaccacggucauguuccuggcccggggcaucguguucaugugcguggaguacugccccaucuucuucaucaccggcaacacccugcagugcaucaugcucgucuacugcuuccugggguacuucugcacgugcuacuucggccuguucugccuccugaaccgcuacuuccggcugacccucgggguguacgacuaccuggugagcacccaggaguuccgcuacaugaacucccagggccuguucccgcccaagaacagcaucgacgccuucaagcucaacaucaagcugcugggggucggcggcaagcccugcaucaagguggccaccguccagugaggacuagucccuguucccagagcccacuuuuuuuucuuuuuuugaaauaaaauagccugucuuucagaucucaaaggcucuuuucagagccaccaaaaaaaaaaaaaaaaaaaaaaaaaaaaaaaaaaaaaaaaaaaaaaaaaaaaaaaaaaaaaaaaaaaaaaaaaaaaaaaaaaaaaaaaaaaaaaaaaaaaa

SEQ ID NO: 20383 - RNA, 1148 nt, Artificial Sequence
  SARS-CoV-2__MT764170.1__non-structural protein 6 (NSP6) mRNA gc
aggagagucccgcagucggcguccagcggcucugcuuguucgugugugugucguugcaggccuuauucaagcuuaccaugagcgccgugaagcgcaccaucaagggcacccaccacuggcugcuccugacgauccugaccucccuccugguccuggugcagagcacccaguggucccucuucuucuuccuguacgagaacgccuuccugcccuucgcgauggggaucaucgccaugagcgccuucgccaugauguucgugaagcacaagcacgccuuccucugccuguuccugcucccgucccuggcgaccgucgccuacuucaacaugguguacaugcccgccagcugggugaugcggaucaugacguggcuggacauggucgacaccucccucagcggcuucaagcugaaggacugcgugauguacgccuccgcggugguccugcucauccugaugaccgcccgcaccguguacgacgacggggcccggcgcguguggacgcugaugaacguccucacccugguguacaagguguacuacggcaacgcccuggaccaggccaucagcaugugggcgcucaucaucuccgucaccagcaacuacuccgggguggugaccacggucaucuuccuggcccggggcaucguguucaugugcguggaguacugccccaucuucuucaucaccggcaacacccugcagugcaucaugcucgucuacugcuuccugggguacuucugcacgugcuacuucggccuguucugccuccugaaccgcuacuuccggcugacccucgggguguacgacuaccuggugagcacccaggaguuccgcuacaugaacucccagggccugcugcccccgaagaacagcaucgacgccuucaagcucaacaucaagcugcucggggucggcggcaagcccugcaucaagguggccaccguccagugaggacuagucccuguucccagagcccacuuuuuuuucuuuuuuugaaauaaaauagccugucuuucagaucucaaaggcucuuuucagagccaccaaaaaaaaaaaaaaaaaaaaaaaaaaaaaaaaaaaaaaaaaaaaaaaaaaaaaaaaaaaaaaaaaaaaaaaaaaaaaaaaaaaaaaaaaaaaaaaaaaaaa

SEQ ID NO: 20384 - RNA, 1148 nt, Artificial Sequence
  SARS-CoV-2__MT755837.1__non-structural protein 6 (NSP6) mRNA gc
aggagagucccgcagucggcguccagcggcucugcuuguucgugugugugucguugcaggccuuauucaagcuuaccaugagcgccgugaagcgcaccaucaagggcacccaccacuggcugcuccugacgauccugaccucccuccugguccuggugcagagcacccaguggucccucuucuucuuccuguacgagaacgccuuccugcccuucgcgauggggaucaucgccaugagcgccuucgccaugauguucgugaagcacaagcacgccuuccucugccuguuccugcucccgucccuggcgaccgucgccuacuucaacaugguguacaugcccgccagcugggugaugcggaucaugacguggcuggacauggucgacaccucccucagcggcuucaagcugaaggacugcgugauguacgccuccgcggugguccugcucauccugaugaccgcccgcaccguguacgacgacggggcccggcgcguguggacgcugaugaacguccucacccugguguacaagguguacuacggcaacgcccuggaccaggccaucagcaugugggcgcucaucaucuccgucaccagcaacuacuccgggguggugaccacggucauguuccugacccggggcaucguguucaugugcguggaguacugccccaucuucuucaucaccggcaacacccugcagugcaucaugcucgucuacugcuuccugggguacuucugcacgugcuacuucggccuguucugccuccugaaccgcuacuuccggcugacccucgggguguacgacuaccuggugagcacccaggaguuccgcuacaugaacucccagggccugcugcccccgaagaacagcaucgacgccuucaagcucaacaucaagcugcucggggucggcggcaagcccugcaucaagguggccaccguccagugaggacuagucccuguucccagagcccacuuuuuuuucuuuuuuugaaauaaaauagccugucuuucagaucucaaaggcucuuuucagagccaccaaaaaaaaaaaaaaaaaaaaaaaaaaaaaaaaaaaaaaaaaaaaaaaaaaaaaaaaaaaaaaaaaaaaaaaaaaaaaaaaaaaaaaaaaaaaaaaaaaaaa

SEQ ID NO: 20385 - RNA, 1148 nt, Artificial Sequence
  SARS-CoV-2__MT755955.1__non-structural protein 6 (NSP6) mRNA gc
aggagagucccgcagucggcguccagcggcucugcuuguucgugugugugucguugcaggccuuauucaagcuuaccaugagcgccgugaagcgcaccaucaagggcacccaccacuggcugcuccugacgauccugaccucccuccugguccuggugcagagcacccaguggucccucuucuucuuccuguacgagaacgccuuccugcccuucgcgauggggaucaucgccaugagcgccuucgccaugauguucgugaagcacaagcacgccuuccucugccuguuccugcucccgucccuggcgaccgucgccuacuucaacaugguguacaugcccgccagcugggugaugcggaucaugacguggcuggacauggucgacaccucccucagcggcuucaagcugaaggacugcgugauguacgccuccgcggugguccugcucauccugaugaccgcccgcaccguguacgacgacggggcccggcgcguguggacgcugaugaacguccucacccugguguacaagguguacuacggcaacgcccuggaccaggccaucagcaugugggcgcucaucaucuccgucaccagcaacuacuccgggguggugaccacggucauguuccuggcccggggcaucguguucaugugcguggaguacugccccaucuucuucaucaccggcaacacccugcagugcaucaugcucgucuacugcuuccugggguacuucugcacgugcuacuucggccuguucugccuccugaaccgcuacuuccggcugacccucgggguguacgacuaccuggugagcacccaggaguuccgcuacaugaacucccagggccugcugcccccgaagaacagcaucgacgccuucgagcucaacaucaagcugcucggggucggcggcaagcccugcaucaagguggccaccguccagugaggacuagucccuguucccagagcccacuuuuuuuucuuuuuuugaaauaaaauagccugucuuucagaucucaaaggcucuuuucagagccaccaaaaaaaaaaaaaaaaaaaaaaaaaaaaaaaaaaaaaaaaaaaaaaaaaaaaaaaaaaaaaaaaaaaaaaaaaaaaaaaaaaaaaaaaaaaaaaaaaaaaa

SEQ ID NO: 20386 - RNA, 1148 nt, Artificial Sequence
  SARS-CoV-2__MT757073.1__non-structural protein 6 (NSP6) mRNA gc
aggagagucccgcagucggcguccagcggcucugcuuguucgugugugugucguugcaggccuuauucaagcuuaccaugagcgccgugaagcgcaccaucaagggcacccaccacuggcugcuccugacgauccugaccucccuccugguccuggugcagagcacccaguggucccucuucuucuuccuguacgagaacgccuuccugcccuucgcgauggggaucaucgccaugagcgccuucgccaugauguucgugaagcacaagcacgccuuccucugccuguuccugcucccguccuucgcgaccgucgccuacuucaacaugguguacaugcccgccagcugggugaugcggaucaugacguggcuggacauggucgacaccucccugagcggcuucaagcucaaggacugcgugauguacgccuccgcggugguccugcugauccucaugaccgcccgcaccguguacgacgacggggcccggcgcguguggacgcugaugaacguccugacccucguguacaagguguacuacggcaacgcccuggaccaggccaucagcaugugggcgcugaucaucuccgucaccagcaacuacuccgggguggugaccacggucauguuccucgcccggggcaucguguucaugugcguggaguacugccccaucuucuucaucaccggcaacacccugcagugcaucaugcuggucuacugcuuccucggguacuucugcacgugcuacuucggccuguucugccugcucaaccgcuacuuccggcugacccuggggguguacgacuaccucgugagcacccaggaguuccgcuacaugaacucccagggccugcugcccccgaagaacagcaucgacgccuucaagcucaacaucaagcugcugggggucggcggcaagcccugcaucaagguggccaccguccagugaggacuagucccuguucccagagcccacuuuuuuuucuuuuuuugaaauaaaauagccugucuuucagaucucaaaggcucuuuucagagccaccaaaaaaaaaaaaaaaaaaaaaaaaaaaaaaaaaaaaaaaaaaaaaaaaaaaaaaaaaaaaaaaaaaaaaaaaaaaaaaaaaaaaaaaaaaaaaaaaaaaaa

SEQ ID NO: 20387 - RNA, 1148 nt, Artificial Sequence
  SARS-CoV-2__MT745644.1__non-structural protein 6 (NSP6) mRNA gc
aggagagucccgcagucggcguccagcggcucugcuuguucgugugugugucguugcaggccuuauucaagcuuaccaugagcgccgccaagcgcaccaucaagggcacccaccacuggcugcuccugacgauccugaccucccuccuggugcugguccagagcacccaguggucccucuucuucuuccuguacgagaacgcguuccugcccuucgccauggggaucaucgccaugagcgccuucgccaugauguucgugaagcacaagcacgcguuccucugccuguuccugcucccgucccuggccaccguggccuacuucaacauggucuacaugcccgccagcugggugaugcggaucaugacguggcuggacaugguggacaccucccucagcggcuucaagcugaaggacugcgucauguacgcguccgccguggugcugcucauccugaugaccgcccgcaccgucuacgacgacggggcccggcgcguguggacgcugaugaacgugcucacccuggucuacaagguguacuacggcaacgcccuggaccaggcgaucagcaugugggcccucaucaucuccgugaccagcaacuacuccggggucgugaccacggugauguuccuggcccggggcaucgucuucaugugcguggaguacugccccaucuucuucaucaccggcaacacccugcagugcaucaugcucguguacugcuuccugggguacuucugcacgugcuacuucggccuguucugccuccugaaccgcuacuuccggcugacccucggggucuacgacuaccuggugagcacccaggaguuccgcuacaugaacucccagggccugcugcccccgaagaacagcaucgacgccuucaagcucaacaucaagcugcucggggugggcggcaagcccugcaucaaggucgccaccgugcagugaggacuagucccuguucccagagcccacuuuuuuuucuuuuuuugaaauaaaauagccugucuuucagaucucaaaggcucuuuucagagccaccaaaaaaaaaaaaaaaaaaaaaaaaaaaaaaaaaaaaaaaaaaaaaaaaaaaaaaaaaaaaaaaaaaaaaaaaaaaaaaaaaaaaaaaaaaaaaaaaaaaaa

SEQ ID NO: 20388 - RNA, 1148 nt, Artificial Sequence
  SARS-CoV-2__MT750188.1__non-structural protein 6 (NSP6) mRNA gc
aggagagucccgcagucggcguccagcggcucugcuuguucgugugugugucguugcaggccuuauucaagcuuaccaugagcgccgugaagcgcaccaucaagggcacccaccacuggcugcuccugacgauccugaccucccuccugguccuggugcagagcacccaguggucccucuucuucuuccuguacgagaacgccuuccugcccuucgcgauggggaucaucgccaugagcgccuucgccaugauguucgugaagcacaagcacgccuuccucugccuguuccugcucccgucccuggcgaccaucgccuacuucaacauggucuacaugcccgccagcugggugaugcggaucaugacguggcuggacaugguggacaccucccucagcggcuucaagcugaaggacugcgucauguacgccuccgcgguggugcugcucauccugaugaccgcccgcaccgucuacgacgacggggcccggcgcguguggacgcugaugaacgugcucacccuggucuacaagguguacuacggcaacgcccuggaccaggccaucagcaugugggcgcucaucaucuccgugaccagcaacuacuccggggucgugaccacggugauguuccuggcccggggcaucgucuucaugugcguggaguacugccccaucuucuucaucaccggcaacacccugcagugcaucaugcucguguacugcuuccugggguacuucugcacgugcuacuucggccuguucugccuccugaaccgcuacuuccggcugacccucggggucuacgacuaccuggugagcacccaggaguuccgcuacaugaacucccagggccugcugcccccgaagaacagcaucgacgccuucaagcucaacaucaagcugcucggggugggcggcaagcccugcaucaaggucgccaccgugcagugaggacuagucccuguucccagagcccacuuuuuuuucuuuuuuugaaauaaaauagccugucuuucagaucucaaaggcucuuuucagagccaccaaaaaaaaaaaaaaaaaaaaaaaaaaaaaaaaaaaaaaaaaaaaaaaaaaaaaaaaaaaaaaaaaaaaaaaaaaaaaaaaaaaaaaaaaaaaaaaaaaaaa

SEQ ID NO: 20389 - RNA, 1148 nt, Artificial Sequence
  SARS-CoV-2__MT740392.1__non-structural protein 6 (NSP6) mRNA gc
aggagagucccgcagucggcguccagcggcucugcuuguucgugugugugucguugcaggccuuauucaagcuuaccaugagcgccgugaagcgcaccaucaagggcacccaccacuggcugcuccugacgauccugaccucccuccugguccuggugcagagcacccaguggucccucuucuucuuccuguacgagaacgccuuccugcccuucgcgauggggaucaucgccaugagcgccuucgccaugauguucgugaagcacaagcacgccuuccucugccuguuccugcucccgucccuggcgaccgucgccuacuucaacaugguguacaugcccgccagcugggugaugcggaucaugacguggcuggacauggucgacaccucccucagcggcuucaagcugaaggacugcgugauguacgccuccgcgcuggugcuccugauccugaugaccgcccgcaccgucuacgacgacggggcccggcgcguguggacgcucaugaacgugcugacccuggucuacaagguguacuacggcaacgcccucgaccaggccaucagcaugugggcgcugaucaucuccgugaccagcaacuacuccggggucgugaccacggugauguuccuggcccggggcaucgucuucaugugcguggaguacugccccaucuucuucaucaccggcaacacccuccagugcaucaugcugguguacugcuuccugggguacuucugcacgugcuacuucggccucuucugccugcugaaccgcuacuuccggcucacccugggggucuacgacuaccuggugagcacccaggaguuccgcuacaugaacucccagggccuccugcccccgaagaacagcaucgacgccuucaagcugaacaucaagcuccugggggugggcggcaagcccugcaucaaggucgccaccgugcagugaggacuagucccuguucccagagcccacuuuuuuuucuuuuuuugaaauaaaauagccugucuuucagaucucaaaggcucuuuucagagccaccaaaaaaaaaaaaaaaaaaaaaaaaaaaaaaaaaaaaaaaaaaaaaaaaaaaaaaaaaaaaaaaaaaaaaaaaaaaaaaaaaaaaaaaaaaaaaaaaaaaaa

SEQ ID NO: 20390 - RNA, 1148 nt, Artificial Sequence
  SARS-CoV-2__MT738101.1__non-structural protein 6 (NSP6) mRNA gc
aggagagucccgcagucggcguccagcggcucugcuuguucgugugugugucguugcaggccuuauucaagcuuaccaugagcgccgugaagcgcaccaucaagggcacccaccacuggcugcuccugaucauccugacgucccuccugguccuggugcagagcacccaguggucccucuucuucuuccuguacgagaacgccuuccugcccuucgcgauggggaucaucgccaugagcgccuucgccaugauguucgugaagcacaagcacgccuuccucugccuguuccugcucccgucccuggcgaccgucgccuacuucaacaugguguacaugcccgccagcugggugaugcggaucaugaccuggcuggacauggucgacacgucccucagcggcuucaagcugaaggacugcgugauguacgccuccgcggugguccugcucauccugaugaccgcccgcaccguguacgacgacggggcccggcgcguguggacccugaugaacguccucacgcugguguacaagguguacuacggcaacgcccuggaccaggccaucagcaugugggcgcucaucaucuccgucaccagcaacuacuccgggguggugaccaccgucauguuccuggcccggggcaucguguucaugugcguggaguacugccccaucuucuucaucacgggcaacacccugcagugcaucaugcucgucuacugcuuccugggguacuucugcacgugcuacuucggccuguucugccuccugaaccgcuacuuccggcugacccucgggguguacgacuaccuggugagcacccaggaguuccgcuacaugaacucccagggccugcugcccccgaagaacagcaucgacgccuucaagcucaacaucaagcugcucggggucggcggcaagcccugcaucaagguggccaccguccagugaggacuagucccuguucccagagcccacuuuuuuuucuuuuuuugaaauaaaauagccugucuuucagaucucaaaggcucuuuucagagccaccaaaaaaaaaaaaaaaaaaaaaaaaaaaaaaaaaaaaaaaaaaaaaaaaaaaaaaaaaaaaaaaaaaaaaaaaaaaaaaaaaaaaaaaaaaaaaaaaaaaaa

SEQ ID NO: 20391 - RNA, 1148 nt, Artificial Sequence
  SARS-CoV-2__MT706176.1__non-structural protein 6 (NSP6) mRNA gc
aggagagucccgcagucggcguccagcggcucugcuuguucgugugugugucguugcaggccuuauucaagcuuaccaugagcgccgugaagcgcaccauccggggcacccaccacuggcugcuccugacgauccugaccucccuccugguccuggugcagagcacccaguggucccucuucuucuuccuguacgagaacgccuuccugcccuucgcgauggggaucaucgccaugagcgccuucgccaugauguucgugaagcacaagcacgccuuccucugccuguuccugcucccgucccuggcgaccgucgccuacuucaacaugguguacaugcccgccagcugggugaugcgcaucaugacguggcuggacauggucgacaccucccucagcggcuucaagcugaaggacugcgugauguacgccuccgcggugguccugcucauccugaugaccgcccggaccguguacgacgacggggcccgccggguguggacgcugaugaacguccucacccugguguacaagguguacuacggcaacgcccuggaccaggccaucagcaugugggcgcucaucaucuccgucaccagcaacuacuccgggguggugaccacggucauguuccuggcccgcggcaucguguucaugugcguggaguacugccccaucuucuucaucaccggcaacacccugcagugcaucaugcucgucuacugcuuccugggguacuucugcacgugcuacuucggccuguucugccuccugaaccgguacuuccgccugacccucgggguguacgacuaccuggugagcacccaggaguuccgguacaugaacucccagggccugcugcccccgaagaacagcaucgacgccuucaagcucaacaucaagcugcucggggucggcggcaagcccugcaucaagguggccaccguccagugaggacuagucccuguucccagagcccacuuuuuuuucuuuuuuugaaauaaaauagccugucuuucagaucucaaaggcucuuuucagagccaccaaaaaaaaaaaaaaaaaaaaaaaaaaaaaaaaaaaaaaaaaaaaaaaaaaaaaaaaaaaaaaaaaaaaaaaaaaaaaaaaaaaaaaaaaaaaaaaaaaaaa

SEQ ID NO: 20392 - RNA, 1148 nt, Artificial Sequence
  SARS-CoV-2__MT706225.1__non-structural protein 6 (NSP6) mRNA gc
aggagagucccgcagucggcguccagcggcucugcuuguucgugugugugucguugcaggccuuauucaagcuuaccaugagcgccgugaagcgcaccaucaagggcacccaccacuggcugcuccugacgauccugaccucccuccugguccuggugcagagcacccaguggucccucuucuucuuccuguacgagaacgccuuccugcccuucgcgauggggaucaucgccaugagcgccuucgccaugauguucgugaagcacaagcacgccuuccucugccuguuccugcucccgucccuggcgaccgucgccuacuucaacaugguguacaugcccgccagcugggugaugcggaucaugacguggcuggacauggucgacaccucccucagcggcuucaagcugaaggacugcgugauguacgccuccgcggugguccugcucauccugaugaccgcccgcaccguguacgacgacggggcccggcgcguguggacgcugaugaacguccucacccugguguacaagguguacuacggcaacgcccuggaccaggccaucagcaugugggcgcucaucaucuccgucaccagcaacuacuccgggguggugaccacggucauguuccuggcccggggcaucguguucaugugcguggaguacugccccaucuucuucaucaccggcaacaccuuccagugcaucaugcuggucuacugcuuccucggguacuucugcacgugcuacuucggccuguucugccugcucaaccgcuacuuccggcugacccuggggguguacgacuaccucgugagcacccaggaguuccgcuacaugaacucccagggccugcugcccccgaagaacagcaucgacgccuucaagcucaacaucaagcugcugggggucggcggcaagcccugcaucaagguggccaccguccagugaggacuagucccuguucccagagcccacuuuuuuuucuuuuuuugaaauaaaauagccugucuuucagaucucaaaggcucuuuucagagccaccaaaaaaaaaaaaaaaaaaaaaaaaaaaaaaaaaaaaaaaaaaaaaaaaaaaaaaaaaaaaaaaaaaaaaaaaaaaaaaaaaaaaaaaaaaaaaaaaaaaaa

SEQ ID NO: 20393 - RNA, 1148 nt, Artificial Sequence
  SARS-CoV-2__MT703973.1__non-structural protein 6 (NSP6) mRNA gc
aggagagucccgcagucggcguccagcggcucugcuuguucgugugugugucguugcaggccuuauucaagcuuaccaugagcgccgugaagcgcaccaucaagggcacccaccacuggcugcucaucacgauccugaccucccugcucguccuggugcagagcacccaguggucccuguucuucuuccucuacgagaacgccuuccugcccuucgcgauggggaucaucgccaugagcgccuucgccaugauguucgugaagcacaagcacgccuuccugugccucuuccugcugccgucccucgcgaccgucgccuacuucaacaugguguacaugcccgccagcugggugaugcggaucaugacguggcuggacauggucgacaccucccugagcggcuucaagcucaaggacugcgugauguacgccuccgcggugguccugcugauccucaugaccgcccgcaccguguacgacgacggggcccggcgcguguggacgcugaugaacguccugacccucguguacaagguguacuacggcaacgcccuggaccaggccaucagcaugugggcgcugaucaucuccgucaccagcaacuacuccgggguggugaccacggucauguuccucgcccggggcaucguguucaugugcguggaguacugccccaucuucuucaucaccggcaacacccugcagugcaucaugcuggucuacugcuuccucggguacuucugcacgugcuacuucggccuguucugccugcucaaccgcuacuuccggcugacccuggggguguacgacuaccucgugagcacccaggaguuccgcuacaugaacucccagggccugcugcccccgaagaacagcaucgacgccuucaagcucaacaucaagcugcugggggucggcggcaagcccugcaucaagguggccaccguccagugaggacuagucccuguucccagagcccacuuuuuuuucuuuuuuugaaauaaaauagccugucuuucagaucucaaaggcucuuuucagagccaccaaaaaaaaaaaaaaaaaaaaaaaaaaaaaaaaaaaaaaaaaaaaaaaaaaaaaaaaaaaaaaaaaaaaaaaaaaaaaaaaaaaaaaaaaaaaaaaaaaaaa

SEQ ID NO: 20394 - RNA, 1148 nt, Artificial Sequence
  SARS-CoV-2__MT704049.1__non-structural protein 6 (NSP6) mRNA gc
aggagagucccgcagucggcguccagcggcucugcuuguucgugugugugucguugcaggccuuauucaagcuuaccaugagcgccgugaagcgcaccaucaagggcacccaccacuggcugcuccugacgauccugaccucccuccugguccuggugcagagcacccaguggucccucuucuucuuccuguacgagaacgccuuccugcccuucgcgauggggaucaucgccaugagcgccuucgccaugauguucgugaagcacaagcacgccuuccucugccuguuccugcucccgucccuggcgaccgucgccuacuucaacaugguguacaugcccgccagcugggugaugcggaucaugacguggcuggacauggucgacaccucccucagcggcuucaagcugaaggacugcgugauguacgccuccgcggugguccugcucauccugaugaccgcccgcaccguguacgacgacggggcccggcgcguguggacgcugaugaacguccucacccugguguacaagguguacuacggcaacgcccuggaccaggccaucagcaugugggcgcucaucaucuccgucaccagcaacuacuccgggguggugaccacggucauguuccuggcccggggcaucguguucaugugcguggaguacugccccaucuucuucaucgccggcaacacccugcagugcaucaugcucgucuacugcuuccugggguacuucugcacgugcuacuucggccuguucugccuccugaaccgcuacuuccggcugacccucgggguguacgacuaccuggugagcacccaggaguuccgcuacaugaacucccagggccugcugcccccgaagaacagcaucgacgccuucaagcucaacaucaagcugcucggggucggcggcaagcccugcaucaagguggccaccguccagugaggacuagucccuguucccagagcccacuuuuuuuucuuuuuuugaaauaaaauagccugucuuucagaucucaaaggcucuuuucagagccaccaaaaaaaaaaaaaaaaaaaaaaaaaaaaaaaaaaaaaaaaaaaaaaaaaaaaaaaaaaaaaaaaaaaaaaaaaaaaaaaaaaaaaaaaaaaaaaaaaaaaa

SEQ ID NO: 20395 - RNA, 1148 nt, Artificial Sequence
  SARS-CoV-2__MT678839.1__non-structural protein 6 (NSP6) mRNA gc
aggagagucccgcagucggcguccagcggcucugcuuguucgugugugugucguugcaggccuuauucaagcuuaccaugagcgccgugaagcgcaccaucaagggcacccaccacuggcugcuccugacgauccugaccucccuccugguccuggugcagagcacccaguggucccucuucuucuucuucuacgagaacgccuuccugcccuucgcgauggggaucaucgccaugagcgccuucgccaugauguucgugaagcacaagcacgccuuccugugccucuuccugcugccgucccucgcgaccgucgccuacuucaacaugguguacaugcccgccagcugggugaugcggaucaugacguggcuggacauggucaucaccucccugagcggcuucaagcucaaggacugcgugauguacgccuccgcggugguccugcugauccucaugaccgcccgcaccguguacgacgacggggcccggcgcguguggacgcugaugaacguccugacccucguguacaagguguacuacggcaacgcccuggaccaggccaucagcaugugggcgcugaucaucuccgucaccagcaacuacuccgggguggugaccacggucauguuccucgcccggggcaucguguucaugugcguggaguacugccccaucuucuucaucaccggcaacacccugcagugcaucaugcuggucuacugcuuccucggguacuucugcacgugcuacuucggccuguucugccugcucaaccgcuacuuccggcugacccuggggguguacgacuaccucgugagcacccaggaguuccgcuacaugaacucccagggccugcugcccccgaagaacagcaucgacgccuucaagcucaacaucaagcugcugggggucggcggcaagcccugcaucaagguggccaccguccagugaggacuagucccuguucccagagcccacuuuuuuuucuuuuuuugaaauaaaauagccugucuuucagaucucaaaggcucuuuucagagccaccaaaaaaaaaaaaaaaaaaaaaaaaaaaaaaaaaaaaaaaaaaaaaaaaaaaaaaaaaaaaaaaaaaaaaaaaaaaaaaaaaaaaaaaaaaaaaaaaaaaaa

SEQ ID NO: 20396 - RNA, 1148 nt, Artificial Sequence
  SARS-CoV-2__MT664169.1__non-structural protein 6 (NSP6) mRNA gc
aggagagucccgcagucggcguccagcggcucugcuuguucgugugugugucguugcaggccuuauucaagcuuaccaugagcgccgugaagcgcaccaucaagggcacccaccacuggcugcuccugacgauccugaccucccuccugguccuggugcagagcacccaguggucccucuucuucuuccuguacgagaacgccuuccugcccuucgcgauggggaccaucgccaugagcgccuucgccaugauguucgugaagcacaagcacgccuuccucugccuguuccugcucccgucccuggcgacggucgccuacuucaacaugguguacaugcccgccagcugggugaugcggaucaugaccuggcuggacauggucgacaccucccucagcggcuucaagcugaaggacugcgugauguacgccuccgcggugguccugcucauccugaugaccgcccgcacgguguacgacgacggggcccggcgcguguggacccugaugaacguccucacccugguguacaagguguacuacggcaacgcccuggaccaggccaucagcaugugggcgcucaucaucuccgucaccagcaacuacuccgggguggugacgaccgucauguuccuggcccggggcaucguguucaugugcguggaguacugccccaucuucuucaucaccggcaacacccugcagugcaucaugcucgucuacugcuuccugggguacuucugcacgugcuacuucggccuguucugccuccugaaccgcuacuuccggcugacccucgggguguacgacuaccuggugagcacccaggaguuccgcuacaugaacucccagggccugcugcccccgaagaacagcaucgacgccuucaagcucaacaucaagcugcucggggucggcggcaagcccugcaucaagguggccaccguccagugaggacuagucccuguucccagagcccacuuuuuuuucuuuuuuugaaauaaaauagccugucuuucagaucucaaaggcucuuuucagagccaccaaaaaaaaaaaaaaaaaaaaaaaaaaaaaaaaaaaaaaaaaaaaaaaaaaaaaaaaaaaaaaaaaaaaaaaaaaaaaaaaaaaaaaaaaaaaaaaaaaaaa

SEQ ID NO: 20397 - RNA, 1148 nt, Artificial Sequence
  SARS-CoV-2__MT646087.1__non-structural protein 6 (NSP6) mRNA gc
aggagagucccgcagucggcguccagcggcucugcuuguucgugugugugucguugcaggccuuauucaagcuuaccaugagcgccgugaagcgcaccaucaagggcacccaccacuggcugcuccugacgauccugaccucccuccugguccuggugcagagcacccaguggucccucuucuucuuccuguacgagaacgccuuccugcccuucgcgauggggaucaucgccaugagcgccuucgccaugauguucgugaagcacaagcacgccuuccucugccuguuccugcucccgucccuggcgaccgucgccuacuucaacaugguguacaugcccgccagcugggugaugcggaucaugacguggcuggacauggucgacaccucccucagcggcuucaagcugaaggacugcgugauguacgccuccgcggugguccugcucauccugaugaccgcccgcaccguguacgacgacggggcccggcgcguguggacgcugaucaacguccucacccugguguacaagguguacuacggcaacgcccuggaccaggccaucagcaugugggcgcucaucaucuccgucaccagcaacuacuccgggguggugaccacggucauguuccuggcccggggcaucguguucaugugcguggaguacugccccaucuucuucaucaccggcaacacccugcagugcaucaugcucgucuacugcuuccugggguacuucugcacgugcuacuucggccuguucugccuccugaaccgcuacuuccggcugacccucgggguguacgacuaccuggugagcacccaggaguuccgcuacaugaacucccagggccugcugcccccgaagaacagcaucgacgccuucaagcucaacaucaagcugcucggggucggcggcaagcccugcaucaagguggccaccguccagugaggacuagucccuguucccagagcccacuuuuuuuucuuuuuuugaaauaaaauagccugucuuucagaucucaaaggcucuuuucagagccaccaaaaaaaaaaaaaaaaaaaaaaaaaaaaaaaaaaaaaaaaaaaaaaaaaaaaaaaaaaaaaaaaaaaaaaaaaaaaaaaaaaaaaaaaaaaaaaaaaaaaa

SEQ ID NO: 20398 - RNA, 1148 nt, Artificial Sequence
  SARS-CoV-2__MT641533.1__non-structural protein 6 (NSP6) mRNA gc
aggagagucccgcagucggcguccagcggcucugcuuguucgugugugugucguugcaggccuuauucaagcuuaccaugagcgccgugaagcgcaccaucaagggcacccaccacuggcugcuccugacgauccugaccucccuccugguccuggugcagagcacccaguggucccucuucuucuuccuguacgagaacgccuuccugcccuucgcgauggggaucaucgccaugagcgccuucgccaugauguucgugaagcacaagcacgccuuccucugccuguuccugcucccgucccuggcgaccgucgccuacuucaacaugguguacaugcccgccagcugggugaugcggaucaugacguggcuggacauggucgacaccucccucagcggcuucaagcugaaggacugcgugauguacgccuccgcggugguccugcucauccugaugaccgcccgcaccguguacgacgacggggcccggcgcguguggacgcugaugaacguccucacccugguguacaagguguacuacggcaacgcccuggaccaggccaucuacaugugggcgcucaucaucagcgucaccuccaacuacagcgggguggugaccacggucauguuccuggcccggggcaucguguucaugugcguggaguacugccccaucuucuucaucaccggcaacacccugcagugcaucaugcucgucuacugcuuccugggguacuucugcacgugcuacuucggccuguucugccuccugaaccgcuacuuccggcugacccucgggguguacgacuaccugguguccacccaggaguuccgcuacaugaacagccagggccugcugcccccgaagaacuccaucgacgccuucaagcucaacaucaagcugcucggggucggcggcaagcccugcaucaagguggccaccguccagugaggacuagucccuguucccagagcccacuuuuuuuucuuuuuuugaaauaaaauagccugucuuucagaucucaaaggcucuuuucagagccaccaaaaaaaaaaaaaaaaaaaaaaaaaaaaaaaaaaaaaaaaaaaaaaaaaaaaaaaaaaaaaaaaaaaaaaaaaaaaaaaaaaaaaaaaaaaaaaaaaaaaa

SEQ ID NO: 20399 - RNA, 1148 nt, Artificial Sequence
  SARS-CoV-2__MT641630.1__non-structural protein 6 (NSP6) mRNA gc
aggagagucccgcagucggcguccagcggcucugcuuguucgugugugugucguugcaggccuuauucaagcuuaccaugagcgccgugaagcgcaccaucaagggcacccaccacuggcugcuccugacgauccugaccucccuccugguccuggugcagagcacccaguggucccucuucuucuuccuguacgagaacgccuuccugcccuucgcgauggggaucaucgccaugagcgccuucgccaugauguucgugaagcacaagcacgccuuccucugccuguuccugcucccgucccuggcgaccgucgccuacuucaacaugguguacaugcccgccagcugggugaugcggaucaugacguggcuggacauggucgacaccucccucagcggcuucaagcugaaggacugcgugauguacgccuccgcggugguccugcucauccugaugaccgcccgcaccguguacgacgacggggcccggcgcguguggacgcugaugaacguccucacccugguguacaagguguacuacggcaacgcccuggaccaggccaucagcaugugggcgcucaucaucuccgucaccagcaacuacuccgggguggugaccacggucauguuccuggcccggggcaucguguucaugugcguggaguaccgccccaucuucuucaucaccggcaacacccugcagugcaucaugcucgucuacugcuuccugggguacuucugcacgugcuacuucggccuguucugccuccugaaccgguacuuccgccugacccucgggguguacgacuaccuggugagcacccaggaguuccgguacaugaacucccagggccugcugcccccgaagaacagcaucgacgccuucaagcucaacaucaagcugcucggggucggcggcaagcccugcaucaagguggccaccguccagugaggacuagucccuguucccagagcccacuuuuuuuucuuuuuuugaaauaaaauagccugucuuucagaucucaaaggcucuuuucagagccaccaaaaaaaaaaaaaaaaaaaaaaaaaaaaaaaaaaaaaaaaaaaaaaaaaaaaaaaaaaaaaaaaaaaaaaaaaaaaaaaaaaaaaaaaaaaaaaaaaaaaa

SEQ ID NO: 20400 - RNA, 1148 nt, Artificial Sequence
  SARS-CoV-2__MT641677.1__non-structural protein 6 (NSP6) mRNA gc
aggagagucccgcagucggcguccagcggcucugcuuguucgugugugugucguugcaggccuuauucaagcuuaccaugagcgccgugaagcgcaccaucaagggcacccaccacuggcugcuccugacgauccugaccucccuccugguccuggugcagagcacccaguggucccucuucuucuuccuguacgagaacgccuuccugcccuucgcgauggggaucaucgccaugagcgccuucgccaugauguucgugaagcacaagcacgccuuccucugccuguuccugcucccgucccuggcgaccgucgccuacuucaacaugguguacaugcccgccagcugggugaugcggaucaugacguggcuggacauggucgacaccucccucagcggcuucaagcugaaggacugcgugauguacgccuccgcggugguccugcucauccugaugaccgcccgcaccguguacgacgacggggcccggcgcguguggacgcugaugaacguccucacccugguguacaagguguacuacggcaacgcccuggaccaggccaucagcaugugggcgcucaucaucuccgucaccagcaacuacuccgggguggugaccacggucauguuccuggcccgggugaucguguucaugugcgucgaguacugccccaucuucuucaucaccggcaacacccugcagugcaucaugcucguguacugcuuccugggcuacuucugcacgugcuacuucgggcuguucugccuccugaaccgcuacuuccggcugacccucggcguguacgacuaccuggucagcacccaggaguuccgcuacaugaacucccaggggcugcugcccccgaagaacagcaucgacgccuucaagcucaacaucaagcugcucggcgucgggggcaagcccugcaucaagguggccaccgugcagugaggacuagucccuguucccagagcccacuuuuuuuucuuuuuuugaaauaaaauagccugucuuucagaucucaaaggcucuuuucagagccaccaaaaaaaaaaaaaaaaaaaaaaaaaaaaaaaaaaaaaaaaaaaaaaaaaaaaaaaaaaaaaaaaaaaaaaaaaaaaaaaaaaaaaaaaaaaaaaaaaaaaa

SEQ ID NO: 20401 - RNA, 1148 nt, Artificial Sequence
  SARS-CoV-2__MT642305.1__non-structural protein 6 (NSP6) mRNA gc
aggagagucccgcagucggcguccagcggcucugcuuguucgugugugugucguugcaggccuuauucaagcuuaccaugagcgccgugaagcgcaccaucaagggcacccaccacuggcugcuccugacgauccugaccucccuccugguccuggugcagagcacccaguggucccucuucuucuucuucuacgagaacgccuuccugcccuucgcgauggggaucaucgccaugagcgccuucgccaugauguucgugaagcacaagcacgccuuccugugccucuuccugcugccgucccucgcgaccgucgccuacuucaacaugguguacaugcccgccagcugggugaugcggaucaugacguggcuggacauggucgacaccucccugagcggcuucaagcucaaggacugcgugauguacgccuccgcggugguccugcugauccucaugaccgcccgcaccguguacgacgacggggcccggcgcguguggacgcugaugaacguccugacccucguguacaaguucuacuacggcaacgcccuggaccaggccaucagcaugugggcgcugaucaucuccgugaccagcaacuacuccggggucgugaccacggugauguuccucgcccggggcaucgucuucaugugcguggaguacugccccaucuucuucaucaccggcaacacccugcagugcaucaugcugguguacugcuuccucggguacuucugcacgugcuacuucggccuguucugccugcucaaccgcuacuuccggcugacccugggggucuacgacuaccucgugagcacccaggaguuccgcuacaugaacucccagggccugcugcccccgaagaacagcaucgacgccuucaagcucaacaucaagcugcugggggugggcggcaagcccugcaucaaggucgccaccgugcagugaggacuagucccuguucccagagcccacuuuuuuuucuuuuuuugaaauaaaauagccugucuuucagaucucaaaggcucuuuucagagccaccaaaaaaaaaaaaaaaaaaaaaaaaaaaaaaaaaaaaaaaaaaaaaaaaaaaaaaaaaaaaaaaaaaaaaaaaaaaaaaaaaaaaaaaaaaaaaaaaaaaaa

SEQ ID NO: 20402 - RNA, 1148 nt, Artificial Sequence
  SARS-CoV-2__MT635270.1__non-structural protein 6 (NSP6) mRNA gc
aggagagucccgcagucggcguccagcggcucugcuuguucgugugugugucguugcaggccuuauucaagcuuaccaugagcgccgugaagcgcaccaucaagggcacccaccacuggcugcuccugacgauccugaccucccuccugguccuggugcagagcacccaguggucccucuucuucuuccuguacgagaacgccuuccugcccuucgcgauggggaucaucgccaugagcgccuucgccaugauguucgugaagcacaagcacgccuuccucugccuguuccugcucccgucccuggcgaccgucgccuacuucaacaugguguacaugcccgccagcugggugaugcggaucaugacguggcuggacauggucgacaccucccucagcggcuucaagcugaaggacugcgugauguacgccuccgcggugguccugcucauccugaugaccgcccgcaccguguacgacgacggggcccggcgcguguggacgcugaugaacguccucacccugguguacaagguguacuacggcaacgcccuggaccaggccaucagcaugugggcgcucaucaucuccgucaccagcaacuacuccgggguggugaccacggucauguuccuggcccggggcaucuucuucaugugcguggaguacugccccaucuucuucaucaccggcaacacccugcagugcaucaugcucguguacugcuuccugggguacuucugcacgugcuacuucggccuguucugccuccugaaccgcuacuuccggcugacccucggggucuacgacuaccuggugagcacccaggaguuccgcuacaugaacucccagggccugcugcccccgaagaacagcaucgacgccuucaagcucaacaucaagcugcucggggugggcggcaagcccugcaucaaggucgccaccgugcagugaggacuagucccuguucccagagcccacuuuuuuuucuuuuuuugaaauaaaauagccugucuuucagaucucaaaggcucuuuucagagccaccaaaaaaaaaaaaaaaaaaaaaaaaaaaaaaaaaaaaaaaaaaaaaaaaaaaaaaaaaaaaaaaaaaaaaaaaaaaaaaaaaaaaaaaaaaaaaaaaaaaaa

SEQ ID NO: 20403 - RNA, 1148 nt, Artificial Sequence
  SARS-CoV-2__MT627427.1__non-structural protein 6 (NSP6) mRNA gc
aggagagucccgcagucggcguccagcggcucugcuuguucgugugugugucguugcaggccuuauucaagcuuaccaugagcgccgugaagcgcaccaucaagggcacccaccacuggcugcuccugacgauccugaccucccuccugguccuggugcagagcacccaguggucccucuucuucuucuucuacgagaacgccuuccugcccuucagcauggggaucaucgcgauguccgccuucgccaugauguucgugaagcacaagcacgccuuccugugccucuuccugcugccgagccucgccaccgucgcguacuucaacaugguguacaugcccgccuccugggugaugcggaucaugacguggcuggacauggucgacaccagccuguccggcuucaagcucaaggacugcgugauguacgccagcgccgugguccugcugauccucaugaccgcgcgcaccguguacgacgacggggcccggcgcguguggacgcugaugaacguccugacccucguguacaagguguacuacggcaacgcccuggaccaggccaucuccaugugggcccugaucaucagcgucaccuccaacuacagcgggguggugaccacggucauguuccucgcgcggggcaucguguucaugugcguggaguacugccccaucuucuucaucaccggcaacacccugcagugcaucaugcuggucuacugcuuccucggguacuucugcacgugcuacuucggccuguucugccugcucaaccgcuacuuccggcugacccuggggguguacgacuaccucguguccacccaggaguuccgcuacaugaacagccagggccugcugcccccgaagaacuccaucgacgccuucaagcucaacaucaagcugcugggggucggcggcaagcccugcaucaagguggccaccguccagugaggacuagucccuguucccagagcccacuuuuuuuucuuuuuuugaaauaaaauagccugucuuucagaucucaaaggcucuuuucagagccaccaaaaaaaaaaaaaaaaaaaaaaaaaaaaaaaaaaaaaaaaaaaaaaaaaaaaaaaaaaaaaaaaaaaaaaaaaaaaaaaaaaaaaaaaaaaaaaaaaaaaa

SEQ ID NO: 20404 - RNA, 1148 nt, Artificial Sequence
  SARS-CoV-2__MT632596.1__non-structural protein 6 (NSP6) mRNA gc
aggagagucccgcagucggcguccagcggcucugcuuguucgugugugugucguugcaggccuuauucaagcuuaccaugagcgccgugaagcgcaccaucaagggcacccaccacuggcugcuccugacgauccugaccucccuccugguccuggugcagagcacccaguggucccucuucuucuuccuguacgagaacgccuuccugcccuucgcgauggggaucaucgccaugagcgccuucgccaugauguucgugaagcacaagcacgccuuccucugccuguuccugcucccgucccuggcgaccgucgccuacuucaacaugguguacaugcccgccagcugggugaugcggaucaugacguggcuggacauggucgacaccucccucagcggcuucaagcugaaggacugcgugauguacgccuccgcggugguccugcucauccugaugaccgcccgcaccguguacgacgacggggcccggcgcguguggacgcugaugaacguccucacccugguguacaagguguacuacggcaacgcccuggaccaggccaucagcaugugggcgcucaucaucuccgucaccagcaacuacuccgggguggugaccacggucauguuccuggcccggggcaucguguucaugugcguggaguacugccccaucuucuucaucaccggcaacacccugcagugcaucaugcucgucuacugcuuccugggguacuucugcacgugcuacuucggccuguucugccuccugaaccgcuacuuccggcugacccucgggguguacgacuaccuggugagcacccaggaguuccgcuacaugaacucccagggccugcugcccccgaagaacagcaucgacgccuucaagcucaacgucaagcugcucggggugggcggcaagcccugcaucaaggucgccaccgugcagugaggacuagucccuguucccagagcccacuuuuuuuucuuuuuuugaaauaaaauagccugucuuucagaucucaaaggcucuuuucagagccaccaaaaaaaaaaaaaaaaaaaaaaaaaaaaaaaaaaaaaaaaaaaaaaaaaaaaaaaaaaaaaaaaaaaaaaaaaaaaaaaaaaaaaaaaaaaaaaaaaaaaa

SEQ ID NO: 20405 - RNA, 1148 nt, Artificial Sequence
  SARS-CoV-2__MT632820.1__non-structural protein 6 (NSP6) mRNA gc
aggagagucccgcagucggcguccagcggcucugcuuguucgugugugugucguugcaggccuuauucaagcuuaccaugagcgccgugaagcgcaccaucaagggcacccaccacuggcugcuccugacgauccugaccucccuccugguccuggugcagagcacccaguggucccucuucuucuuccuguacgagaacgccuuccugcccuucgcgauggggaucaucgccaugagcgccuucgccaugauguucgugaagcacaagcacgccuuccucugccuguuccugcucccgucccuggcgaccgucgccuacuucaacaugguguacaugcccgccagcugggugaugcggaucaugacguggcuggacauggucgacaccucccucagcggcuucaagcugaaggacugcgugauguacgccuccgcggugguccugcucauccugaugaccgcccgcaccguguacgacgacggggcccggcgcguguggacgcugaugaacguccucacccugguguacaagguguacuacggcaacgcccuggaccaggccaucagcaugugggcgcucaucaucuccgucaccagcaacuacuccgggguggugaccacggucauguuccuggcccggggcaucguguucaugugcguggaguacugccccaucuucuucaucaccggcaacacccugcgcugcaucaugcucgucuacugcuuccugggguacuucugcacgugcuacuucggccuguucugccuccugaaccgguacuuccgccugacccucgggguguacgacuaccuggugagcacccaggaguuccgguacaugaacucccagggccugcugcccccgaagaacagcaucgacgccuucaagcucaacaucaagcugcucggggucggcggcaagcccugcaucaagguggccaccguccagugaggacuagucccuguucccagagcccacuuuuuuuucuuuuuuugaaauaaaauagccugucuuucagaucucaaaggcucuuuucagagccaccaaaaaaaaaaaaaaaaaaaaaaaaaaaaaaaaaaaaaaaaaaaaaaaaaaaaaaaaaaaaaaaaaaaaaaaaaaaaaaaaaaaaaaaaaaaaaaaaaaaaa

SEQ ID NO: 20406 - RNA, 1148 nt, Artificial Sequence
  SARS-CoV-2__MT614531.1__non-structural protein 6 (NSP6) mRNA gc
aggagagucccgcagucggcguccagcggcucugcuuguucgugugugugucguugcaggccuuauucaagcuuaccaugagcgccgugaagcgcaccaucaagggcacccaccacuggcugcuccugacgauccugaccucccuccugguccuggugcagagcacccaguggucccucuucuucuuccuguacgagaacgccuuccugcccuucgcgauggggaucaucgccaugagcgccuucgccaccauguucgugaagcacaagcacgccuuccucugccuguuccugcucccgucccuggcgacggucgccuacuucaacaugguguacaugcccgccagcugggugaugcggaucaugaccuggcuggacauggucgacaccucccucagcggcuucaagcugaaggacugcgugauguacgccuccgcggugguccugcucauccugaugaccgcccgcacgguguacgacgacggggcccggcgcguguggacccugaugaacguccucacccugguguacaagguguacuacggcaacgcccuggaccaggccaucagcaugugggcgcucaucaucuccgucaccagcaacuacuccgggguggugacgaccgucauguuccuggcccggggcaucguguucaugugcguggaguacugccccaucuucuucaucaccggcaacacccugcagugcaucaugcucgucuacugcuuccugggguacuucugcacgugcuacuucggccuguucugccuccugaaccgcuacuuccggcugacccucgggguguacgacuaccuggugagcacccaggaguuccgcuacaugaacucccagggccugcugcccccgaagaacagcaucgacgccuucaagcucaacaucaagcugcucggggucggcggcaagcccugcaucaagguggccaccguccagugaggacuagucccuguucccagagcccacuuuuuuuucuuuuuuugaaauaaaauagccugucuuucagaucucaaaggcucuuuucagagccaccaaaaaaaaaaaaaaaaaaaaaaaaaaaaaaaaaaaaaaaaaaaaaaaaaaaaaaaaaaaaaaaaaaaaaaaaaaaaaaaaaaaaaaaaaaaaaaaaaaaaa

SEQ ID NO: 20407 - RNA, 1148 nt, Artificial Sequence
  SARS-CoV-2__MT609566.1__non-structural protein 6 (NSP6) mRNA gc
aggagagucccgcagucggcguccagcggcucugcuuguucgugugugugucguugcaggccuuauucaagcuuaccaugagcgccgugaagcgcaccaucaagggcacccaccacuggcugcuccugacgauccugaccucccuccugguccuggugcagagcacccaguggucccucuucuucuuccuguacgagaacgccuuccugcccuucgcgauggggaucaucgccaugagcgccuucgccaugauguucgugaagcacaagcacgccuuccucugccuguuccugcucccgucccuggcgaccgucgccuacuucaacaugguguacaugcccgccagcugggugaugcggaucaugacguggcuggacauggucgacaccucccucagcggcuucaagcugaaggacugcgugauguacgccuccgcggugguccugcucauccugaugaccgugcgcaccguguacgacgacggggcccggcgcgucuggacgcugaugaacgugcucacccugguguacaaggucuacuacggcaacgcccuggaccaggccaucagcaugugggcccucaucaucuccgugaccagcaacuacuccgggguggucaccacggugauguuccuggcgcggggcaucguguucaugugcgucgaguacugccccaucuucuucaucaccggcaacacccugcagugcaucaugcucguguacugcuuccugggguacuucugcacgugcuacuucggccuguucugccuccugaaccgcuacuuccggcugacccucgggguguacgacuaccuggucagcacccaggaguuccgcuacaugaacucccagggccugcugcccccgaagaacagcaucgacgccuucaagcucaacaucaagcugcucggggugggcggcaagcccugcaucaaggucgccaccgugcagugaggacuagucccuguucccagagcccacuuuuuuuucuuuuuuugaaauaaaauagccugucuuucagaucucaaaggcucuuuucagagccaccaaaaaaaaaaaaaaaaaaaaaaaaaaaaaaaaaaaaaaaaaaaaaaaaaaaaaaaaaaaaaaaaaaaaaaaaaaaaaaaaaaaaaaaaaaaaaaaaaaaaa

SEQ ID NO: 20408 - RNA, 1148 nt, Artificial Sequence
  SARS-CoV-2__MT585032.1__non-structural protein 6 (NSP6) mRNA gc
aggagagucccgcagucggcguccagcggcucugcuuguucgugugugugucguugcaggccuuauucaagcuuaccaugagcgccgugaagcgcaccaucaagggcacccaccacuggcugcuccugacgauccugaccucccuccugguccuggugcagagcacccaguggucccucuucuucuuccuguacgagaacgccuuccugcccuucgcgauggggaucaucgccaugagcgccuucgccaugauguucgugaagcacaagcacgccuuccucugccuguuccugcucccgucccuggcgaccgucgccuacuucaacaugguguacaugcccgccagcugggugaugcggaucaugacguggcuggacauggucgacaccucccucagcggcuucaagcugaaggacugcgugauguacgccuccgcggugguccugcucauccugaugaccgcccgcaccguguacgacgacggggcccggcgcguguggacgcugaugaacguccucacccugguguacaagguguacuacggcagcgcccuggaccaggccaucuccaugugggcgcucaucaucagcgucaccuccaacuacagcgggguggugaccacggucauguuccuggcccggggcaucguguucaugugcguggaguacugccccaucuucuucaucaccggcaacacccugcagugcaucaugcucgucuacugcuuccugggguacuucugcacgugcuacuucggccuguucugccuccugaaccgcuacuuccggcugacccucgggguguacgacuaccugguguccacccaggaguuccgcuacaugaacagccagggccugcugcccccgaagaacuccaucgacgccuucaagcucaacaucaagcugcucggggucggcggcaagcccugcaucaagguggccaccguccagugaggacuagucccuguucccagagcccacuuuuuuuucuuuuuuugaaauaaaauagccugucuuucagaucucaaaggcucuuuucagagccaccaaaaaaaaaaaaaaaaaaaaaaaaaaaaaaaaaaaaaaaaaaaaaaaaaaaaaaaaaaaaaaaaaaaaaaaaaaaaaaaaaaaaaaaaaaaaaaaaaaaaa

SEQ ID NO: 20409 - RNA, 1148 nt, Artificial Sequence
  SARS-CoV-2__MT585090.1__non-structural protein 6 (NSP6) mRNA gc
aggagagucccgcagucggcguccagcggcucugcuuguucgugugugugucguugcaggccuuauucaagcuuaccaugagcgccgugaagcgcaccaucaagggcacccaccacuggcugcuccugacgauccugaccucccuccugguccuggugcagagcacccaguggucccucuucuucuuccuguacgagaacgccuuccugcccuucgcgauggggaucaucgccaugagcgccuucgccaugauguucgugaagcacaagcacgccuuccucugccuguuccugcucccgucccuggcgaccgucgccuacuucaacaugguguacaugcccgccagcugggugaugcggaucaugacguggcugggcauggucgacaccucccucagcggguucaagcugaaggacugcgugauguacgccuccgcggugguccugcucauccugaugaccgcccgcaccguguacgacgacggcgcccggcgcguguggacgcugaugaacguccucacccugguguacaagguguacuacgggaacgcccuggaccaggccaucagcaugugggcgcucaucaucuccgucaccagcaacuacuccggcguggugaccacggucauguuccuggcccggggcaucguguucaugugcguggaguacugccccaucuucuucaucaccgggaacacccugcagugcaucaugcucgucuacugcuuccugggcuacuucugcacgugcuacuucgggcuguucugccuccugaaccgcuacuuccggcugacccucggcguguacgacuaccuggugagcacccaggaguuccgcuacaugaacucccaggggcugcugcccccgaagaacagcaucgacgccuucaagcucaacaucaagcugcucggcgucggcgggaagcccugcaucaagguggccaccguccagugaggacuagucccuguucccagagcccacuuuuuuuucuuuuuuugaaauaaaauagccugucuuucagaucucaaaggcucuuuucagagccaccaaaaaaaaaaaaaaaaaaaaaaaaaaaaaaaaaaaaaaaaaaaaaaaaaaaaaaaaaaaaaaaaaaaaaaaaaaaaaaaaaaaaaaaaaaaaaaaaaaaaa

SEQ ID NO: 20410 - RNA, 1148 nt, Artificial Sequence
  SARS-CoV-2__MT576056.1__non-structural protein 6 (NSP6) mRNA gc
aggagagucccgcagucggcguccagcggcucugcuuguucgugugugugucguugcaggccuuauucaagcuuaccaugagcgccgugaagcgcaccaucaagggcacccaccacuggcugcuccugacgauccugaccucccuccugguccuggugcagagcacccaguggucccucuucuucuuccuguacgagaacgccuuccugcccuucgcgauggggaucaucgccaugagcgccuucgccaugauguucgugaagcacaagcacgccuuccucugccuguuccugcucccgucccuggcgaccgucgccuacuucaacaugguguacaugcccgccagcugggugaugcggaucaugacguggcuggacauggucgacaccucccucagcggcuucaagcugaaggacugcgugauguacgccuccgcggugguccugcucauccugaugaccgcccgcaccguguacgacgacggggcccggcgcguguggacgcugaugaacguccucacccugguguacaagguguacuacggcaacgcccuggaccaggccaccagcaugugggcgcucaucaucuccgucaccagcaacuacuccgggguggugacgaccgucauguuccuggcccggggcaucguguucaugugcguggaguacugccccaucuucuucaucaccggcaacacccugcagugcaucaugcucgucuacugcuuccugggguacuucugcacgugcuacuucggccuguucugccuccugaaccgcuacuuccggcugacccucgggguguacgacuaccuggugagcacccaggaguuccgcuacaugaacucccagggccugcugcccccgaagaacagcaucgacgccuucaagcucaacaucaagcugcucggggucggcggcaagcccugcaucaagguggccaccguccagugaggacuagucccuguucccagagcccacuuuuuuuucuuuuuuugaaauaaaauagccugucuuucagaucucaaaggcucuuuucagagccaccaaaaaaaaaaaaaaaaaaaaaaaaaaaaaaaaaaaaaaaaaaaaaaaaaaaaaaaaaaaaaaaaaaaaaaaaaaaaaaaaaaaaaaaaaaaaaaaaaaaaa

SEQ ID NO: 20411 - RNA, 1148 nt, Artificial Sequence
  SARS-CoV-2__MT520221.1__non-structural protein 6 (NSP6) mRNA gc
aggagagucccgcagucggcguccagcggcucugcuuguucgugugugugucguugcaggccuuauucaagcuuaccaugagcgccgugaagcgcaccaucaagggcacccaccacuggcugcuccugacgauccugaccucccuccugguccuggugcagagcacccaguggucccucuucuucuuccuguacgagaacgccuuccugcccuucgcgauggggaucaucgccaugagcgccuucgccaugauguucgugaagcacaagcacgccuuccucugccuguuccugcucccgucccuggcgaccgucgccuacuucaacaugguguacaugcccgccagcugggugaugcggaucaugacguggcuggacauggucgacaccucccucagcggcuucaagcugaaggacugcgugauguacgccuccgcggugguccugcucauccugaugaccgcccgcaccguguacgacgacggggcccggcgcguguggacgcugaugaacguccucacccugguguacaagguguacuacggcaacgcccuggaccaggccaucagcaugugggcgcucaucaucuccgucaccagcaacuacuccgggguggugaccacggucauguucagcgcccggggcaucguguucaugugcguggaguacugccccaucuucuucaucaccggcaacacccugcagugcaucaugcuggucuacugcuuccucggguacuucugcacgugcuacuucggccuguucugccugcucaaccgcuacuuccggcugacccuggggguguacgacuaccucguguccacccaggaguuccgcuacaugaacagccagggccugcugcccccgaagaacuccaucgacgccuucaagcucaacaucaagcugcugggggucggcggcaagcccugcaucaagguggccaccguccagugaggacuagucccuguucccagagcccacuuuuuuuucuuuuuuugaaauaaaauagccugucuuucagaucucaaaggcucuuuucagagccaccaaaaaaaaaaaaaaaaaaaaaaaaaaaaaaaaaaaaaaaaaaaaaaaaaaaaaaaaaaaaaaaaaaaaaaaaaaaaaaaaaaaaaaaaaaaaaaaaaaaaa

SEQ ID NO: 20412 - RNA, 1148 nt, Artificial Sequence
  SARS-CoV-2__MT520402.1__non-structural protein 6 (NSP6) mRNA gc
aggagagucccgcagucggcguccagcggcucugcuuguucgugugugugucguugcaggccuuauucaagcuuaccaugagcgccgugaagcgcaccaucaagggcacccaccacuggcugcuccugacgauccugaccucccuccugguccuggugcagagcacccaguggucccucuucuucuuccuguacgagaacgccuuccugcccuucgcgauggggaucaucgccaugagcgccuucgccaugauguucgugaagcacaagcacgccuuccucugccuguuccugcucccgucccuggcgaccgucgccuacuucaacaugguguacaugcccgccagcugggugaugcggaucaugacguggcuggacauggucgacaccucccucagcggcuucaagcugaaggacugcgugauguacgccuccgcggugguccugcucauccugaugaccgcccgcaccguguacgacgacggggcccggcgcguguggacgcugaugaacguccucacccugguguacaagguguacuacggcaacgcccuggaccaggccaucagcaugugggcgcucaucaucuccgucaccagcaacuacuccgggguggugaccacggucauguuccuggcccggggcgugguguucaugugcgucgaguacugccccaucuucuucaucaccggcaacacccugcagugcaucaugcucguguacugcuuccugggguacuucugcacgugcuacuucggccuguucugccuccugaaccgcuacuuccggcugacccucgggguguacgacuaccuggucagcacccaggaguuccgcuacaugaacucccagggccugcugcccccgaagaacagcaucgacgccuucaagcucaacaucaagcugcucggggugggcggcaagcccugcaucaaggucgccaccgugcagugaggacuagucccuguucccagagcccacuuuuuuuucuuuuuuugaaauaaaauagccugucuuucagaucucaaaggcucuuuucagagccaccaaaaaaaaaaaaaaaaaaaaaaaaaaaaaaaaaaaaaaaaaaaaaaaaaaaaaaaaaaaaaaaaaaaaaaaaaaaaaaaaaaaaaaaaaaaaaaaaaaaaa

SEQ ID NO: 20413 - RNA, 1148 nt, Artificial Sequence
  SARS-CoV-2__MT520437.1__non-structural protein 6 (NSP6) mRNA gc
aggagagucccgcagucggcguccagcggcucugcuuguucgugugugugucguugcaggccuuauucaagcuuaccaugagcgccgugaagcgcaccaucaagggcacccaccacuggcugcuccugacgauccugaccucccuccugguccuggugcagagcacccaguggucccucuucuucuucuucuacgagaacgccuuccugcccuucgcgauggggaucaucgccaugagcgccuucgccaugauguucgugaagcacaagcacgccuuccugugccucuuccugcugccgucccucgcgaccgucgccuacuucaacaugguguacaugcccgccagcugggugaugcggaucaugacguggcuggacauggucgacaccucccugagcggcuucaagcucaaggacugcgugauguacgccuccgcggugguccugcugauccucaugaccgcccgcaccguguacgacgacggggcccggcgcguguggacgcugaugaacguccugacccucguguacaagguguacuacggcaacgcccuggaccaggccaucagcaugugggcgcugaucaucuccgucaccagcaacuacuccgggguggugaccacggucauguuccucgcccggagcaucguguucaugugcguggaguacugccccaucuucuucaucaccggcaacacccugcagugcaucaugcuggucuacugcuuccucggcuacuucugcacgugcuacuucgggcuguucugccugcucaaccgcuacuuccggcugacccugggcguguacgacuaccucguguccacccaggaguuccgcuacaugaacagccaggggcugcugcccccgaagaacuccaucgacgccuucaagcucaacaucaagcugcugggcgucgggggcaagcccugcaucaagguggccaccguccagugaggacuagucccuguucccagagcccacuuuuuuuucuuuuuuugaaauaaaauagccugucuuucagaucucaaaggcucuuuucagagccaccaaaaaaaaaaaaaaaaaaaaaaaaaaaaaaaaaaaaaaaaaaaaaaaaaaaaaaaaaaaaaaaaaaaaaaaaaaaaaaaaaaaaaaaaaaaaaaaaaaaaa

SEQ ID NO: 20414 - RNA, 1148 nt, Artificial Sequence
  SARS-CoV-2__MT558680.1__non-structural protein 6 (NSP6) mRNA gc
aggagagucccgcagucggcguccagcggcucugcuuguucgugugugugucguugcaggccuuauucaagcuuaccaugagcgccgugaagcgcaccaucaagggcacccaccacuggcugcuccugacgauccugaccucccuccugguccuggugcagagcacccaguggucccucuucuucuuccuguacgagaacgccuuccugcccuucgcgauggggaucaucgccaugagcgccuucgccaugauguucgugaagcacaagcacgccuuccucugccuguuccugcucccgucccuggcgaccgucgccuacuucaacaugguguacaugcccgccagcugggugaugcggaucaugacguggcuggacauggucgacaccucccucagcggcuucaagcugaaggacugcgugauguacgccuccgcggugguccugcucauccugaugaccgcccgcaccguguacgacgacggggcccggcgcguguggacgcugaugaacguccucacccugguguacaagguguacuacggcaacgcccuggaccaggccaucagcaugugggcgcucaucaucuccgucaccagcaacuacuccgggguggugaccacggucauguuccuggcccggggcaucguguucaugugcguggaguacugccccaucuucuucaucaccggcaacacccugcagugcaucaugcucgucuacugcuuccugggguacuucugcacgugcuacuucggccuguucugccuccugaaccgcuacuuccggcugacccucgggguguacgacuaccuggugagcacccaggaguuccgcuacaugaacucccagggccugcugcccccgaagaacagcaucgacgccuucaagcucaacaucaagcugcucggggucggcggcaagcccugcaucaagguggccaucguccagugaggacuagucccuguucccagagcccacuuuuuuuucuuuuuuugaaauaaaauagccugucuuucagaucucaaaggcucuuuucagagccaccaaaaaaaaaaaaaaaaaaaaaaaaaaaaaaaaaaaaaaaaaaaaaaaaaaaaaaaaaaaaaaaaaaaaaaaaaaaaaaaaaaaaaaaaaaaaaaaaaaaaa

SEQ ID NO: 20415 - RNA, 1148 nt, Artificial Sequence
  SARS-CoV-2__MT539174.1__non-structural protein 6 (NSP6) mRNA gc
aggagagucccgcagucggcguccagcggcucugcuuguucgugugugugucguugcaggccuuauucaagcuuaccaugagcgccgugaagcgcaccaucaagggcacccaccacuggcugcuccugacgauccugaccucccuccugguccuggugcagagcacccaguggucccucuucuucuuccuguacgagaacgccuuccugcccuucgcgauggggaucaucgccaugagcgccuucgccaugauguucgugaagcacaagcacgccuuccucugccuguuccugcucccgucccuggcgaccgucgccuacuucaacaugguguacaugcccgccagcugggugaugcggaucaugacguggcuggacauggucgacaccucccucagcggcuucaagcugaagaacugcgugauguacgccuccgcggugguccugcucauccugaugaccgcccgcaccguguacgacgacggggcccggcgcguguggacgcugaugaacguccucacccugguguacaagguguacuacggcaacgcccuggaccaggccaucagcaugugggcgcucaucaucuccgucaccagcaacuacuccgggguggugaccacggucauguuccuggcccggggcaucguguucaugugcguggaguacugccccaucuucuucaucaccggcaacacccugcagugcaucaugcucgucuacugcuuccugggguacuucugcacgugcuacuucggccuguucugccuccugaaccgcuacuuccggcugacccucgggguguacgacuaccuggugagcacccaggaguuccgcuacaugaacucccagggccugcugcccccgaagaacagcaucgacgccuucaagcucaacaucaagcugcucggggucggcggcaagcccugcaucaagguggccaccguccagugaggacuagucccuguucccagagcccacuuuuuuuucuuuuuuugaaauaaaauagccugucuuucagaucucaaaggcucuuuucagagccaccaaaaaaaaaaaaaaaaaaaaaaaaaaaaaaaaaaaaaaaaaaaaaaaaaaaaaaaaaaaaaaaaaaaaaaaaaaaaaaaaaaaaaaaaaaaaaaaaaaaaa

SEQ ID NO: 20416 - RNA, 1148 nt, Artificial Sequence
  SARS-CoV-2__MT461620.1__non-structural protein 6 (NSP6) mRNA gc
aggagagucccgcagucggcguccagcggcucugcuuguucgugugugugucguugcaggccuuauucaagcuuaccaugagcgccgugaagcgcaucaucaagggcacccaccacuggcugcuccugaccauccugacgucccuccugguccuggugcagagcacccaguggucccucuucuucuuccuguacgagaacgccuuccugcccuucgcgauggggaucaucgccaugagcgccuucgccaugauguucgugaagcacaagcacgccuuccucugccuguuccugcucccgucccuggcgaccgucgccuacuucaacaugguguacaugcccgccagcugggugaugcggaucaugaccuggcuggacauggucgacacgucccucagcggcuucaagcugaaggacugcgugauguacgccuccgcggugguccugcucauccugaugaccgcccgcaccguguacgacgacggggcccggcgcguguggacccugaugaacguccucacgcugguguacaagguguacuacggcaacgcccuggaccaggccaucagcaugugggcgcucaucaucuccgucaccagcaacuacuccgggguggugaccaccgucauguuccuggcccggggcaucguguucaugugcguggaguacugccccaucuucuucaucacgggcaacacccugcagugcaucaugcucgucuacugcuuccugggguacuucugcacgugcuacuucggccuguucugccuccugaaccgcuacuuccggcugacccucgggguguacgacuaccuggugagcacccaggaguuccgcuacaugaacucccagggccugcugcccccgaagaacagcaucgacgccuucaagcucaacaucaagcugcucggggucggcggcaagcccugcaucaagguggccaccguccagugaggacuagucccuguucccagagcccacuuuuuuuucuuuuuuugaaauaaaauagccugucuuucagaucucaaaggcucuuuucagagccaccaaaaaaaaaaaaaaaaaaaaaaaaaaaaaaaaaaaaaaaaaaaaaaaaaaaaaaaaaaaaaaaaaaaaaaaaaaaaaaaaaaaaaaaaaaaaaaaaaaaaa

SEQ ID NO: 20417 - RNA, 1148 nt, Artificial Sequence
  SARS-CoV-2__MT461630.1__non-structural protein 6 (NSP6) mRNA gc
aggagagucccgcagucggcguccagcggcucugcuuguucgugugugugucguugcaggccuuauucaagcuuaccaugagcgccgugaagcgcaccaucaagggcacccaccacuggcugcuccugacgauccugaccucccuccugguccuggugcagagcacccaguggucccucuucuucuuccuguacgagaacgccuuccugcccuucgcgauggggaucaucgccaugagcgccuucgccaugauguucgugaagcacaagcacgccuuccucugccuguuccugcucccgucccuggcgaccgucgccuacuucaacaugguguacaugcccgccagcugggugaugcggaucaugacguggcuggacauggucgacaccucccucagcggcuucaagcugaaggacugcgugauguacgccuccgcggugguccugcucauccugaugaccgcccgcaccguguacgacgacggggcccggcgcguguggacgcugaugaacguccucacccugguguacaagguguacuacggcaacgcccuggaccaggccaucagcaugugggcgcucaucaucuccgucaccagcaacuacuccgggguggugaccacggucauguuccuggcccggggcaucguguucaugugcguggaguacugccccaucuucuucaucaccggcaacacccugcagugcaucaugcucgucuacugcuuccugggguacuucugcacgugcuacuucggccuguucugccuccugaaccgcuacuuccggcugacccucgggguguacgacuaccuggugagcacccaggaguuccgcuacaugaacucccagggccugcugcccccgaagaacagcaucgacgccuucaagcucaacaucaagcugcucggggucuccggcaagcccugcaucaagguggccaccguccagugaggacuagucccuguucccagagcccacuuuuuuuucuuuuuuugaaauaaaauagccugucuuucagaucucaaaggcucuuuucagagccaccaaaaaaaaaaaaaaaaaaaaaaaaaaaaaaaaaaaaaaaaaaaaaaaaaaaaaaaaaaaaaaaaaaaaaaaaaaaaaaaaaaaaaaaaaaaaaaaaaaaaa

SEQ ID NO: 20418 - RNA, 1148 nt, Artificial Sequence
  SARS-CoV-2__MT451074.1__non-structural protein 6 (NSP6) mRNA gc
aggagagucccgcagucggcguccagcggcucugcuuguucgugugugugucguugcaggccuuauucaagcuuaccaugagcgccgugaagcgcaccaucaagggcacccaccacuggcugcuccugacgauccugaccucccuccugguccuggugcagagcacccaguggucccucuucuucuucuucuacgagaacgccuuccugcccuucgcgauggggaucaucgccaugagcgccuucgccaugauguucgugaagcacaagcacgccuuccugugccucuuccugcugccgucccucgcgaccgucgccuacuucaacaugguguacaugcccgccagcugggugaugcggaucaugacguggcuggacauggucgacaccucccugagcggcuucaagcucaaggacugcgugauguacgccuccgcggugguccugcugauccucaugaccgcccgcaccguguacgacgacguggcccggcgcgucuggacgcugaugaacgugcugacccucguguacaaggucuacuacgggaacgcccuggaccaggccaucagcaugugggcgcugaucaucuccgugaccagcaacuacuccggcguggucaccacggugauguuccucgcccgggggaucguguucaugugcgucgaguacugccccaucuucuucaucaccggcaacacccugcagugcaucaugcugguguacugcuuccucggcuacuucugcacgugcuacuucgggcuguucugccugcucaaccgcuacuuccggcugacccugggcguguacgacuaccucgucagcacccaggaguuccgcuacaugaacucccaggggcugcugcccccgaagaacagcaucgacgccuucaagcucaacaucaagcugcugggcgucgggggcaagcccugcaucaagguggccaccgugcagugaggacuagucccuguucccagagcccacuuuuuuuucuuuuuuugaaauaaaauagccugucuuucagaucucaaaggcucuuuucagagccaccaaaaaaaaaaaaaaaaaaaaaaaaaaaaaaaaaaaaaaaaaaaaaaaaaaaaaaaaaaaaaaaaaaaaaaaaaaaaaaaaaaaaaaaaaaaaaaaaaaaaa

SEQ ID NO: 20419 - RNA, 1148 nt, Artificial Sequence
  SARS-CoV-2__MT434803.1__non-structural protein 6 (NSP6) mRNA gc
aggagagucccgcagucggcguccagcggcucugcuuguucgugugugugucguugcaggccuuauucaagcuuaccaugagcgccgugaagcgcaccaucaagggcacccaccacuggcugcuccugacgauccugaccucccuccugguccuggugcagagcacccaguggucccucuucuucuuccuguacgagaacgccuuccugcccuucgcgauggggaucaucgccaugagcgccuucgccaugauguucgugaagcacaagcacgccuuccucugccuguuccugcucccgucccuggcgaccgucgccuacuucaacaugguguacaugcccgccagcugggugaugcggaucaugacguggcuggacauggucgacaccucccucagcuccuucaagcugaaggacugcgugauguacgccagcgcggugguccugcucauccugaugaccgcccgcaccguguacgacgacggcgcccggcgcguguggacgcugaugaacguccucacccugguguacaagguguacuacgggaacgcccuggaccaggccaucuccaugugggcgcucaucaucagcgucaccuccaacuacagcggcguggugaccacggucauguuccuggcccgggggaucguguucaugugcguggaguacugccccaucuucuucaucaccggcaacacccugcagugcaucaugcucgucuacugcuuccugggcuacuucugcacgugcuacuucgggcuguucugccuccugaaccgcuacuuccggcugacccucggcguguacgacuaccugguguccacccaggaguuccgcuacaugaacagccaggggcugcugcccccgaagaacuccaucgacgccuucaagcucaacaucaagcugcucggcgucgggggcaagcccugcaucaagguggccaccguccagugaggacuagucccuguucccagagcccacuuuuuuuucuuuuuuugaaauaaaauagccugucuuucagaucucaaaggcucuuuucagagccaccaaaaaaaaaaaaaaaaaaaaaaaaaaaaaaaaaaaaaaaaaaaaaaaaaaaaaaaaaaaaaaaaaaaaaaaaaaaaaaaaaaaaaaaaaaaaaaaaaaaaa

SEQ ID NO: 20420 - RNA, 1148 nt, Artificial Sequence
  SARS-CoV-2__MT434813.1__non-structural protein 6 (NSP6) mRNA gc
aggagagucccgcagucggcguccagcggcucugcuuguucgugugugugucguugcaggccuuauucaagcuuaccaugagcgccgugaagcgcaccaucaagggcacccaccacuggcugcuccugacgauccugaccucccuccugguccuggugcagagcacccaguggucccucuucuucuuccuguacgagaacgccuuccugcccuucgcgauggggaucaucgccaugagcgccuucgccaugauguucgugaagcacaagcacgccuuccucugccuguuccugcucccgucccuggcgaccgucgccuacuucagcaugguguacaugcccgccuccugggugaugcggaucaugacguggcuggacauggucgacaccagccucuccggcuucaagcugaaggacugcgugauguacgccagcgcggugguccugcucauccugaugaccgcccgcaccguguacgacgacggggcccggcgcguguggacgcugaugaacguccucacccugguguacaagguguacuacggcaacgcccuggaccaggccaucuccaugugggcgcucaucaucagcgucaccuccaacuacagcgggguggugaccacggucauguuccuggcccggggcaucguguucaugugcguggaguacugccccaucuucuucaucaccggcaacacccugcagugcaucaugcucgucuacugcuuccugggguacuucugcacgugcuacuucggccuguucugccuccugaaccgcuacuuccggcugacccucgggguguacgacuaccugguguccacccaggaguuccgcuacaugaacagccagggccugcugcccccgaagaacuccaucgacgccuucaagcucaacaucaagcugcucggggucggcggcaagcccugcaucaagguggccaccguccagugaggacuagucccuguucccagagcccacuuuuuuuucuuuuuuugaaauaaaauagccugucuuucagaucucaaaggcucuuuucagagccaccaaaaaaaaaaaaaaaaaaaaaaaaaaaaaaaaaaaaaaaaaaaaaaaaaaaaaaaaaaaaaaaaaaaaaaaaaaaaaaaaaaaaaaaaaaaaaaaaaaaaa

SEQ ID NO: 20421 - RNA, 1148 nt, Artificial Sequence
  SARS-CoV-2__MT385437.1__non-structural protein 6 (NSP6) mRNA gc
aggagagucccgcagucggcguccagcggcucugcuuguucgugugugugucguugcaggccuuauucaagcuuaccaugagcgccgugaagcgcaccaucaagggcacccaccacuggcugcuccugacgauccugaccucccuccugguccuggugcagagcacccaguggucccucuucuucuuccuguacgagaacgccuuccugcccuucgcgauggggaucaucgccaugagcgccuucgccaugauguucgugaagcacaagcacgccuuccucugccuguuccugcucccgucccuggcgaccgucgccuacuucaacaugguguacaugcccgccagcugggugaugcggaucaugacguggcuggacauggucgacaccucccucagcggcuucaagcugaaggacugcgugauguacgccuccgcggugguccugcucauccugaugaccgcccgcaccguguacgacgacagcgcccggcgcguguggacgcugaugaacguccucacccugguguacaagguguacuacgggaacgcccuggaccaggccaucuccaugugggcgcucaucaucagcgucaccuccaacuacagcggcguggugaccacggucauguuccuggcccgggggaucguguucaugugcguggaguacugccccaucuucuucaucaccggcaacacccugcagugcaucaugcucgucuacugcuuccugggcuacuucugcacgugcuacuucgggcuguucugccuccugaaccgcuacuuccggcugacccucggcguguacgacuaccugguguccacccaggaguuccgcuacaugaacagccaggggcugcugcccccgaagaacuccaucgacgccuucaagcucaacaucaagcugcucggcgucgggggcaagcccugcaucaagguggccaccguccagugaggacuagucccuguucccagagcccacuuuuuuuucuuuuuuugaaauaaaauagccugucuuucagaucucaaaggcucuuuucagagccaccaaaaaaaaaaaaaaaaaaaaaaaaaaaaaaaaaaaaaaaaaaaaaaaaaaaaaaaaaaaaaaaaaaaaaaaaaaaaaaaaaaaaaaaaaaaaaaaaaaaaa

SEQ ID NO: 20422 - RNA, 1148 nt, Artificial Sequence
  SARS-CoV-2__MT358678.1__non-structural protein 6 (NSP6) mRNA gc
aggagagucccgcagucggcguccagcggcucugcuuguucgugugugugucguugcaggccuuauucaagcuuaccaugagcgccgugaagcgcaccaucaagggcacccaccacuggcugcuccugacgauccugaccucccuccugguccuggugcagagcacccaguggucccucuucuucuuccuguacgagaacgccuuccugcccuucgcgauggggaucaucgccaugagcgccuucgccaugauguucgugaagcacaagcacgccuuccucugccuguuccugcucccgucccuggcgaccgucgccuacuucaacaugguguacaugcccgccagcugggugaugcggaucaugacguggcuggacauggucgacaccucccucagcggcuucaagcugaaggacugcgugauguacgccuccgcggugguccugcucauccugaugaccgcccgcaccguguacgacgacggggcccggcgcguguggacgcugaugaacguccucacccugguguacaagguguacuacggcaacgcccuggaccaggccaucagcaugugggcgcucaucaucuccgucaccagcaacuacuccgggguggugaccacggucauguuccuggcccggggcaucguguucaugugcguggaguacugccccaucuucuucaucaccggcaacacccugcagugcaucaugcucgucuacugcuuccugggguacuucugcacgugcuacuucggccuguucugccuccugaaccgcuacuuccggcugacccucgggguguacgacuaccuggugagcacccaggaguuccgcuacaugaacucccugggccuccugcccccgaagaacagcaucgacgccuucaagcugaacaucaagcuccugggggucggcggcaagcccugcaucaagguggccaccguccagugaggacuagucccuguucccagagcccacuuuuuuuucuuuuuuugaaauaaaauagccugucuuucagaucucaaaggcucuuuucagagccaccaaaaaaaaaaaaaaaaaaaaaaaaaaaaaaaaaaaaaaaaaaaaaaaaaaaaaaaaaaaaaaaaaaaaaaaaaaaaaaaaaaaaaaaaaaaaaaaaaaaaa

SEQ ID NO: 20423 - RNA, 1148 nt, Artificial Sequence
  SARS-CoV-2__MT358402.1__non-structural protein 6 (NSP6) mRNA gc
aggagagucccgcagucggcguccagcggcucugcuuguucgugugugugucguugcaggccuuauucaagcuuaccaugagcgccgugaagcgcaccaucaagggcacccaccacuggcugcuccugacgauccugaccucccuccugguccuggugcagagcacccaguggucccucuucuucuuccuguacgagaacgccuuccugcccuucgcgauggggaucaccgccaugagcgccuucgccaugauguucgugaagcacaagcacgccuuccucugccuguuccugcucccgucccuggcgacggucgccuacuucaacaugguguacaugcccgccagcugggugaugcggaucaugaccuggcuggacauggucgacaccucccucagcggcuucaagcugaaggacugcgugauguacgccuccgcggugguccugcucauccugaugaccgcccgcacgguguacgacgacggggcccggcgcguguggacccugaugaacguccucacccugguguacaagguguacuacggcaacgcccuggaccaggccaucagcaugugggcgcucaucaucuccgucaccagcaacuacuccgggguggugacgaccgucauguuccuggcccggggcaucguguucaugugcguggaguacugccccaucuucuucaucaccggcaacacccugcagugcaucaugcucgucuacugcuuccugggguacuucugcacgugcuacuucggccuguucugccuccugaaccgcuacuuccggcugacccucgggguguacgacuaccuggugagcacccaggaguuccgcuacaugaacucccagggccugcugcccccgaagaacagcaucgacgccuucaagcucaacaucaagcugcucggggucggcggcaagcccugcaucaagguggccaccguccagugaggacuagucccuguucccagagcccacuuuuuuuucuuuuuuugaaauaaaauagccugucuuucagaucucaaaggcucuuuucagagccaccaaaaaaaaaaaaaaaaaaaaaaaaaaaaaaaaaaaaaaaaaaaaaaaaaaaaaaaaaaaaaaaaaaaaaaaaaaaaaaaaaaaaaaaaaaaaaaaaaaaaa

SEQ ID NO: 20424 - RNA, 1148 nt, Artificial Sequence
  SARS-CoV-2__MT326071.1__non-structural protein 6 (NSP6) mRNA gc
aggagagucccgcagucggcguccagcggcucugcuuguucgugugugugucguugcaggccuuauucaagcuuaccaugagcgccgugaagcgcaccaucaagggcacccaccacuggcugcuccugacgauccugaccucccuccugguccuggugcagagcacccaguggucccucuucuucuuccuguacgagaacgccuuccugcccuucgcgauggggaucaucgccaugagcgccuucgccaugauguucgugaagcacaagcacgccuuccucugccuguuccugcucccgucccuggcgaccgucgccuacuucaacaugguguacaugcccgccagcugggugaugcggaucaugacguggcuggacaccucccucagcggcuucaagcugaaggacugcgucauguacgccuccgcgguggugcugcucauccugaugaccgcccgcaccgucuacgacgacggggcccggcgcguguggacgcugaugaacgugcucacccuggucuacaagguguacuacggcaacgcccuggaccaggccaucagcaugugggcgcucaucaucuccgugaccagcaacuacuccggggucgugaccacggugauguuccuggcccggggcaucgucuucaugugcguggaguacugccccaucuucuucaucaccggcaacacccugcagugcaucaugcucguguacugcuuccugggguacuucugcacgugcuacuucggccuguucugccuccugaaccgcuacuuccggcugacccucggggucuacgacuaccuggugagcacccaggaguuccgcuacaugaacucccagggccugcugcccccgaagaacagcaucgacgccuucaagcucaacaucaagcugcucggggugggcggcaagcccugcaucaaggucgccaccgugcaguccaagaugugaggacuagucccuguucccagagcccacuuuuuuuucuuuuuuugaaauaaaauagccugucuuucagaucucaaaggcucuuuucagagccaccaaaaaaaaaaaaaaaaaaaaaaaaaaaaaaaaaaaaaaaaaaaaaaaaaaaaaaaaaaaaaaaaaaaaaaaaaaaaaaaaaaaaaaaaaaaaaaaaaaaaa

SEQ ID NO: 20425 - RNA, 1148 nt, Artificial Sequence
  SARS-CoV-2__MT326117.1__non-structural protein 6 (NSP6) mRNA gc
aggagagucccgcagucggcguccagcggcucugcuuguucgugugugugucguugcaggccuuauucaagcuuaccaugagcgccgugaagcgcaccaucaagggcacccaccacuggcugcuccugacgauccugaccucccuccugguccuggugcagagcacccaguggucccucuucuucuucuucuacgagaacgccuuccugcccuucgcgauggggaucaucgccaugagcgccuucgccaugauguucgugaagcacaagcacgccuuccugugccucuuccugcugccgucccucgcgaccgucgccuacuucaacaugguguacaugcccgccagcugggugaugcggaucaugacguggcuggacauggucgacaccucccugagcggcuucaagcucaaggacugcgugauguacgccuccgcggugguccugcugauccucaugaccgcccgcaccguguacgacgacggggcccggcgcguguggacgcugaugaacguccugacccucguguacaagguguacuacggcaacgcccuggaccaggccaucagcaugugggcgcugaucaucuccgucaccagcaacuacuccgggguggugaccacggucauguuccucgcccggggcaucgugaugugcguggaguacugccccaucuucuucaucaccggcaacacccugcagugcaucaugcuggucuacugcuuccucggguacuucugcacgugcuacuucggccuguucugccugcucaaccgcuacuuccggcugacccuggggguguacgacuaccucgugagcacccaggaguuccgcuacaugaacucccagggccugcugcccccgaagaacagcaucgacgccuucaagcucaacaucaagcugcugggggucggcggcaagcccugcaucaagguggccaccguccaguccugaggacuagucccuguucccagagcccacuuuuuuuucuuuuuuugaaauaaaauagccugucuuucagaucucaaaggcucuuuucagagccaccaaaaaaaaaaaaaaaaaaaaaaaaaaaaaaaaaaaaaaaaaaaaaaaaaaaaaaaaaaaaaaaaaaaaaaaaaaaaaaaaaaaaaaaaaaaaaaaaaaaaa

SEQ ID NO: 20426 - RNA, 584 nt, Artificial Sequence
  MERS-CoV/MERS-CoV-Jeddah-human-1__KF958702.1__ORF3 protein mRNA gc
aggagagucccgcagucggcguccagcggcucugcuuguucgugugugugucguugcaggccuuauucaagcuuaccaugcgcgugcagcggcccccgacccugcuccuggucuucagccugucccuccuggugaccgccuucagcaagccccuguacgugcccgagcacugccagaacuacuccggcugcaugcuccgcgccugcaucaagacggcgcaggccgacaccgccgggcuguacaccaacuuccggaucgacguccccagcgccgaguccaccggcacgcagagcguguccguggaccgcgagagcaccuccacccacgacgggccgaacgagcacgucaccaucgugaaccugcucgacgugggcuacagcgucaacugaggacuagucccuguucccagagcccacuuuuuuuucuuuuuuugaaauaaaauagccugucuuucagaucucaaaggcucuuuucagagccaccaaaaaaaaaaaaaaaaaaaaaaaaaaaaaaaaaaaaaaaaaaaaaaaaaaaaaaaaaaaaaaaaaaaaaaaaaaaaaaaaaaaaaaaaaaaaaaaaaaaaa

SEQ ID NO: 20427 - RNA, 584 nt, Artificial Sequence
  MERS-CoV/Al-Hasa_4_2013__KF186564.1__ORF3 protein mRNA gc
aggagagucccgcagucggcguccagcggcucugcuuguucgugugugugucguugcaggccuuauucaagcuuaccaugcgcgugcagcggcccccgacccugcuccuggucuucagccugucccuccuggugaccgccuucagcaagccccuguacgugcccgagcacugccagaacuacuccggcugcaugcuccgcgccugcaucaagacggcgcaggccgacaccgccgggcuguacaccaacagccggaucgacguccccuccgccgagagcaccggcacgcaguccgugagcguggaccgcgaguccaccagcacccacgacgggccgaccgagcacgucacguccgugaaccuguucgacgugggcuacagcgucaacugaggacuagucccuguucccagagcccacuuuuuuuucuuuuuuugaaauaaaauagccugucuuucagaucucaaaggcucuuuucagagccaccaaaaaaaaaaaaaaaaaaaaaaaaaaaaaaaaaaaaaaaaaaaaaaaaaaaaaaaaaaaaaaaaaaaaaaaaaaaaaaaaaaaaaaaaaaaaaaaaaaaaa

SEQ ID NO: 20428 - RNA, 584 nt, Artificial Sequence
  MERS-CoV/Riyadh_14_2013__KJ156934.1__ORF3 protein mRNA gc
aggagagucccgcagucggcguccagcggcucugcuuguucgugugugugucguugcaggccuuauucaagcuuaccaugcgcgugcagcggcccccgacccugcuccuggucuucagccugucccuccuggugaucgccuucagcaagccccuguacgugcccgagcacugccagaacuacuccggcugcaugcuccgcgccugcaucaagaccgcgcaggccgacacggccgggcuguacaccaacuuccggaucgacguccccagcgccgaguccaccggcacccagagcguguccguggaccgcgagagcacguccacccacgacgggccgaccgagcacgucaccagcgugaaccuguucgacgugggcuacuccgucaacugaggacuagucccuguucccagagcccacuuuuuuuucuuuuuuugaaauaaaauagccugucuuucagaucucaaaggcucuuuucagagccaccaaaaaaaaaaaaaaaaaaaaaaaaaaaaaaaaaaaaaaaaaaaaaaaaaaaaaaaaaaaaaaaaaaaaaaaaaaaaaaaaaaaaaaaaaaaaaaaaaaaaa

SEQ ID NO: 20429 - RNA, 584 nt, Artificial Sequence
  MERS-CoV/England 1__NC_038294.1__ORF3 protein mRNA gc
aggagagucccgcagucggcguccagcggcucugcuuguucgugugugugucguugcaggccuuauucaagcuuaccaugcgcgugcagcggcccccgacccugcuccuggucuucagccugucccuccuggugaccgccuucagcaagccccuguacgugcccgagcacugccagaacuacuccggcugcaugcuccgcgccugcaucaagacggcgcaggccgacaccgccgggcuguacaccaacuuccggaucgacguccccagcgccgaguccaccggcacgcagagcguguccguggaccgcgagagcaccuccacccacgacgggccgaccgagcacgucacgagcgugaaccuguucgacgugggcuacuccgucaacugaggacuagucccuguucccagagcccacuuuuuuuucuuuuuuugaaauaaaauagccugucuuucagaucucaaaggcucuuuucagagccaccaaaaaaaaaaaaaaaaaaaaaaaaaaaaaaaaaaaaaaaaaaaaaaaaaaaaaaaaaaaaaaaaaaaaaaaaaaaaaaaaaaaaaaaaaaaaaaaaaaaaa

SEQ ID NO: 20430 - RNA, 1097 nt, Artificial Sequence
  SARS-CoV/Tor2__NC_004718.3__ORF3a protein mRNA gc
aggagagucccgcagucggcguccagcggcucugcuuguucgugugugugucguugcaggccuuauucaagcuuaccauggaccuguucaugcgcuucuucacccuccggagcaucaccgcccagcccgugaagaucgacaacgccuccccggcgagcacgguccacgccaccgccaccaucccccugcaggccucccugcccuucggcuggcucgugaucgggguggccuuccuggcggucuuccagagcgccaccaagaucaucgcccugaacaagcgcuggcagcucgcccuguacaagggcuuccaguucaucugcaaccugcuccugcuguucgugacgaucuacucccaccuccugcugguggcggccgggauggaggcccaguuccucuaccuguacgcccugaucuacuuccuccagugcaucaacgccugccggaucaucaugcgcugcuggcugugcuggaagugcaagagcaagaacccccugcucuacgacgcgaacuacuucgucugcuggcacacccacaacuacgacuacugcaucccguacaacuccgugaccgacaccaucguggucacggagggcgacgggaucagcacccccaagcugaaggaggacuaccagaucggcggcuacuccgaggaccggcacagcggggugaaggacuacguggucgugcacggcuacuucaccgagguguacuaccagcuggaguccacccagaucacgaccgacaccgggaucgagaacgccaccuucuucaucuucaacaagcucgucaaggacccgcccaacgugcagauccacacgaucgacggcagcuccgggguggccaaccccgccauggaccccaucuacgacgagcccaccaccaccacgagcgucccccugugaggacuagucccuguucccagagcccacuuuuuuuucuuuuuuugaaauaaaauagccugucuuucagaucucaaaggcucuuuucagagccaccaaaaaaaaaaaaaaaaaaaaaaaaaaaaaaaaaaaaaaaaaaaaaaaaaaaaaaaaaaaaaaaaaaaaaaaaaaaaaaaaaaaaaaaaaaaaaaaaaaaaa

SEQ ID NO: 20431 - RNA, 602 nt, Artificial Sequence
  HCoV/OC43__NC_006213.1__ORF3 protein mRNA gc
aggagagucccgcagucggcguccagcggcucugcuuguucgugugugugucguugcaggccuuauucaagcuuaccauggacaucuggcgccccgagaagaaguaccugcgguacaucaacggcuucaacgugagcgagcucgaggacgccugcuucaaguucaacuaccaguucccgaaggucggguacugccgcgugcccucccacgccuggugccggaaccagggccgcuucugcgcgaccuucacccuguacggcaagagcaagcacuacgacaaguacuucggggugaucaacggguucacggccuucgccaacaccgucgaggacgccgugaacaagcugguguuccucgccgucgacuucaucaccuggcggcgccaggagcugaacguguacggcugaggacuagucccuguucccagagcccacuuuuuuuucuuuuuuugaaauaaaauagccugucuuucagaucucaaaggcucuuuucagagccaccaaaaaaaaaaaaaaaaaaaaaaaaaaaaaaaaaaaaaaaaaaaaaaaaaaaaaaaaaaaaaaaaaaaaaaaaaaaaaaaaaaaaaaaaaaaaaaaaaaaaa

SEQ ID NO: 20432 - RNA, 602 nt, Artificial Sequence
  HCoV/HKU1__NC_006577.2__ORF3 protein mRNA gc
aggagagucccgcagucggcguccagcggcucugcuuguucgugugugugucguugcaggccuuauucaagcuuaccauggacguguggcgccccagcuacacccacucccuggucauccgggaguucggcgugaccaaccucgaggaccugugccugaaguacaacuacugccagccgaucgugggguacugcaucgucccccucaacguguggugccgcaaguucggcaaguucgccagccacuucacgcugcggucccacgacaucagccacuccaacaacuucgggguggucaccagcuucaccaccuacggcaacacgguguccgaggccgugagccgccuggucgaguccgcgagcgaguucaucguguggcgggccgaggcccucaacaaguacgggugaggacuagucccuguucccagagcccacuuuuuuuucuuuuuuugaaauaaaauagccugucuuucagaucucaaaggcucuuuucagagccaccaaaaaaaaaaaaaaaaaaaaaaaaaaaaaaaaaaaaaaaaaaaaaaaaaaaaaaaaaaaaaaaaaaaaaaaaaaaaaaaaaaaaaaaaaaaaaaaaaaaaa

SEQ ID NO: 20433 - RNA, 932 nt, Artificial Sequence
  HCoV/229E/BN1/GER/2015__KU291448.1__ORF3 protein mRNA gc
aggagagucccgcagucggcguccagcggcucugcuuguucgugugugugucguugcaggccuuauucaagcuuaccauggcccugggccucuucacccugcaguucgugagcgccgucaaccagucccugaucaagagcaagguguccgcggaggugagccgccaggucauccaggacgugaaggacgggaccgugacguucaaccuccuggccuacacccugaugucccucuucgucguguacuucgcccuguucaaggcccggagccaccgcggccgguccgcccugaucguguucaagauccucauccuguucgucuacgugccccugcucuacuggagccaggcguacaucgacgccacccugaucgccgugauccugcucgggcgcuucuuccacaccgccuggcacugcuggcuguacaagacgugggacuucaucgucuucaacgugaccacccugugcuacgugcagggcaagugcugguuccucgagaacaaggcgcugaagccguucgucugcuucuacgggggcgaccaguuccuguacaucggcgaccggaucgugaccuaccucuccacgaacgaccuguacguggcccugcgcgggcggaucgacaaggaccucagccugucccgcaaggucgagcuguacaacggcgagugcguguaccucuucugcgagcaccccgccguggggaucgucaacaccgacuucaagcuggagauccacugaggacuagucccuguucccagagcccacuuuuuuuucuuuuuuugaaauaaaauagccugucuuucagaucucaaaggcucuuuucagagccaccaaaaaaaaaaaaaaaaaaaaaaaaaaaaaaaaaaaaaaaaaaaaaaaaaaaaaaaaaaaaaaaaaaaaaaaaaaaaaaaaaaaaaaaaaaaaaaaaaaaaa

SEQ ID NO: 20434 - RNA, 950 nt, Artificial Sequence
  HCoV/NL63/RPTEC/2004__JX504050.1__ORF3 protein mRNA gc
aggagagucccgcagucggcguccagcggcucugcuuguucgugugugugucguugcaggccuuauucaagcuuaccaugcccuucggcgggcuguuccagcucacccuggagagcaccaucaacaaguccguggccaaccugaagcucccgccccacgacgucacggugcugcgcgacaaccugaagcccgugaccacccucagcaccaucacggccuaccugcuggucucccucuucgugaccuacuucgcgcuguucaagccccugaccgcccggggccgcguggccugcuucguccucaagcugcugacccucuucguguacgugccgcugcugguccucuucgggauguaccuggacagcuucaucaucuucuccacgcugcuguuccgguucauccacgugggcuacuacgccuaccuguacaagaacuucagcuucgugcuguucaacgucaccaagcucugcuucguguccgggaagugcugguaccuggagcagagcuucuacgagaaccgcuucgccgcgaucuacggcggcgaccacuacgugguccucgggggcgagaccaucaccuucguguccuucgacgaccucuacguggccauccgggggagcugcgagaagaaccugcagcugaugcgcaaggucgaccucuacaacggcgccgugaucuacaucuucgccgaggagcccguggucgggaucguguacuccagccagcuguacgaggacgugcccuccaucaacugaggacuagucccuguucccagagcccacuuuuuuuucuuuuuuugaaauaaaauagccugucuuucagaucucaaaggcucuuuucagagccaccaaaaaaaaaaaaaaaaaaaaaaaaaaaaaaaaaaaaaaaaaaaaaaaaaaaaaaaaaaaaaaaaaaaaaaaaaaaaaaaaaaaaaaaaaaaaaaaaaaaaa

SEQ ID NO: 20435 - RNA, 1097 nt, Artificial Sequence
  Bat SARS-like CoV/WIV1__KF367457.1__ORF3 protein mRNA gc
aggagagucccgcagucggcguccagcggcucugcuuguucgugugugugucguugcaggccuuauucaagcuuaccauggaccuguucaugcgcaucuucacccucggccccaucaccgcccagccggggaagaucgacaacgccagccccgcguccacggugcacgccaccgccaccaucccccugcaggccagccugcccuucggcuggcucgucaucgggguggccuuccuggcgguguuccaguccgccaccaagaucaucagccugaacaagcgguggcagcucgcccuguacaagggcuuccaguucaucugcaaccugcuccugcuguucgucacgaucuacucccaccuccugcugguggccgcggggauggaggcccaguuccucuaccuguacgcccugaucuacuuccuccagugcaucaacgccugccgcaucaucaugcggugcuggcugugcuggaagugcaagagcaagaacccgcugcucuacgacgccaacuacuucgugugcuggcacacccacaacuacgacuacugcauccccuacaacuccgucaccgacaccaucguggugacggcgggcgacggcaucagcacccccaagcugaaggaggacuaccagaucgggggcuacuccgagaacuggcacagcggggucaaggacuacguggugguccacggcuacuucaccgagguguacuaccagcuggaguccacccagaucacgaccgacaccgggaucgagaacgccaccuucuucaucuucaacaagcucgugaaggacccgcccaacguccagauccacacgaucgacggcagcuccggcguggugaaccccgccauggaccccaucuacgacgagcccaccaccaccacgagcgucccgcugugaggacuagucccuguucccagagcccacuuuuuuuucuuuuuuugaaauaaaauagccugucuuucagaucucaaaggcucuuuucagagccaccaaaaaaaaaaaaaaaaaaaaaaaaaaaaaaaaaaaaaaaaaaaaaaaaaaaaaaaaaaaaaaaaaaaaaaaaaaaaaaaaaaaaaaaaaaaaaaaaaaaaa

SEQ ID NO: 20436 - RNA, 935 nt, Artificial Sequence
  BatCoV/HKU9-1 BF_005I__NC_009021.1__ORF3 protein mRNA gc
aggagagucccgcagucggcguccagcggcucugcuuguucgugugugugucguugcaggccuuauucaagcuuaccaugaaccuguacaaccucgugcgcgacgcccugcggcccagcuacgccaccgucuccccgagcguggacgagcccaccguggacaacaacuucgucgcgcuguccugcuacgccacgcucagcgugcugcuguacuaccuccagcgcgugaagcagcccuaccuguccaugcuguuccacauccucuucugccugagccaggucugcauggugaucuggcugaucuucuccgccaacuucuacgugagccucuucgcccagugcaugcuggucgugugcgcccugggcugcuuccucgagcggaccauccuguccaucaagcugcgcagcauggcgcccuucauguccauggccgacaacuucgccaucaucaagacgaccugcaacaacuacguguucccggucgagcggagcuccgacaaccucguggugcugaccaccagccgcgggaucuacuccaacggcgucuucaugaagggggccaucaccgugagcgacaacgcgcugguggucucccucuucaagagccacucccugcugcucgaccggguggagcacggcuacgacuacaccguguucaucuacaucaacagcgucauccugcagaacaucaagcccacggugagcguggucaacaccgaguucaccgacguggagcugugaggacuagucccuguucccagagcccacuuuuuuuucuuuuuuugaaauaaaauagccugucuuucagaucucaaaggcucuuuucagagccaccaaaaaaaaaaaaaaaaaaaaaaaaaaaaaaaaaaaaaaaaaaaaaaaaaaaaaaaaaaaaaaaaaaaaaaaaaaaaaaaaaaaaaaaaaaaaaaaaaaaaa

SEQ ID NO: 20437 - RNA, 947 nt, Artificial Sequence
  PEDV/NPL-PEDv/2013/P10__KJ778616.1__ORF3 protein mRNA gc
aggagagucccgcagucggcguccagcggcucugcuuguucgugugugugucguugcaggccuuauucaagcuuaccauguuccugggccucuuccaguacaccaucgacaccguggucaaggacgugagcaaguccgccaaccugagccuggacgccgugcaggagcucgagcugaacgucgugcccauccgccaggcguccaacgugacgggguuccuguucaccagcgucuucaucuacuucuucgcccucuucaaggccuccagccugcggcgcaacuacaucaugcuggccgcccgguucgcggugaucgugcucuacugcccgcugcuguacuacugcggcgccuuccucgacgccaccaucaucugcugcacccugaucgggcgccugugccucgucugcuucuacuccuggcgguacaagaacgcccuguucaucaucuucaacacgaccacccugagcuuccucaacggcaaggcggccuacuacgacgggaaguccaucgugauccuggagggcggcgaccacuacaucaccuucgggaacagcuucguggccuucgucuccagcaucgaccuguaccucgccauccgcggccggcaggaggccgaccugcagcugcuccgcacgguggagcugcuggacgggaagaagcucuacguguucucccagcaccagaucgucggcaucaccaacgcggccuucgacagcauccagcuggacgaguacgccaccaucuccgagugaggacuagucccuguucccagagcccacuuuuuuuucuuuuuuugaaauaaaauagccugucuuucagaucucaaaggcucuuuucagagccaccaaaaaaaaaaaaaaaaaaaaaaaaaaaaaaaaaaaaaaaaaaaaaaaaaaaaaaaaaaaaaaaaaaaaaaaaaaaaaaaaaaaaaaaaaaaaaaaaaaaaa

SEQ ID NO: 20438 - RNA, 1100 nt, Artificial Sequence
  SARS-CoV-2/Wuhan-Hu-1__NC_045512.2/MN908947.2/EPI_ISL_402128__ORF 3 protein mRNA gc R9949
aggagagucccgcagucggcguccagcggcucugcuuguucgugugugugucguugcaggccuuauucaagcuuaccauggaccuguucaugcgcaucuucaccaucggcaccgugacgcucaagcagggggagaucaaggacgccacccccagcgacuucguccgggccaccgcgaccaucccgauccaggccucccugcccuucggcuggcugaucguggggguggcccuccuggccgucuuccagagcgccuccaagaucaucacgcugaagaagcgcuggcagcucgcgcugagcaagggcgugcacuucgugugcaaccugcuccugcuguucgucaccguguacucccaccuccugcugguggccgccgggcucgaggcccccuuccuguaccuguacgcgcucgucuacuuccugcagagcaucaacuucgugcggaucaucaugcgccuguggcucugcuggaagugccgguccaagaacccccugcuguacgacgccaacuacuuccucugcuggcacaccaacugcuacgacuacugcaucccguacaacagcgugaccuccagcaucgucaucacguccggcgacggcaccaccagccccaucuccgagcacgacuaccagaucgggggcuacaccgagaagugggagagcggggugaaggacugcgugguccugcacuccuacuucacgagcgacuacuaccagcuguacuccacccagcucagcaccgacaccggcguggagcacgugacguucuucaucuacaacaagaucgucgacgagcccgaggagcacgugcagauccacaccaucgacggguccagcggcguggucaaccccgugauggagccgaucuacgacgagcccaccaccacgaccagcgugccccugugaggacuagucccuguucccagagcccacuuuuuuuucuuuuuuugaaauaaaauagccugucuuucagaucucaaaggcucuuuucagagccaccaaaaaaaaaaaaaaaaaaaaaaaaaaaaaaaaaaaaaaaaaaaaaaaaaaaaaaaaaaaaaaaaaaaaaaaaaaaaaaaaaaaaaaaaaaaaaaaaaaaaa

SEQ ID NO: 20439 - RNA, 1100 nt, Artificial Sequence
  SARS-CoV-2__MT919525.1__ORF3a protein mRNA gc
aggagagucccgcagucggcguccagcggcucugcuuguucgugugugugucguugcaggccuuauucaagcuuaccauggaccuguucaugcgcaucuucaccaucggcaccgugacgcucaagcagggggagaucaaggacgccacccccagcgacuucguccgggccaccgcgaccaucccgauccaggccucccugcccuucggcuggcugaucguggggguggcccuccuggccgucuuccagagcgccuccaagaucaucacgcugaagaagcgcuggcagcucgcgcugagcaagggcgugcacuucgugugcaaccugcuccugcuguucgucaccguguacucccaccuccugcugguggccgccgggcucgaggcccccuuccuguaccuguacgcgcucgucuacuuccugcagagcaucaacuucgugcggaucaucaugcgccuguggcucugcuggaagugccgguccaagaacccccugcuguacgacgccaacuacuuccucugcuggcacaccaacugcuacgacuacugcaucccguacaacagcgugaccuccagcaucgucaucacguccggcgacggcaccaccagccccaucuccgaguacgacuaccagaucgggggcuacaccgagaagugggagagcggggugaaggacugcgugguccugcacuccuacuucacgagcgacuacuaccagcuguacuccacccagcucagcaccgacaccggcguggagcacgugacguucuucaucuacaacaagaucgucgacgagcccgaggagcacgugcagauccacaccaucgacggguccagcggcguggucaaccccgugauggagccgaucuacgacgagcccaccaccacgaccagcgugccccugugaggacuagucccuguucccagagcccacuuuuuuuucuuuuuuugaaauaaaauagccugucuuucagaucucaaaggcucuuuucagagccaccaaaaaaaaaaaaaaaaaaaaaaaaaaaaaaaaaaaaaaaaaaaaaaaaaaaaaaaaaaaaaaaaaaaaaaaaaaaaaaaaaaaaaaaaaaaaaaaaaaaaa

SEQ ID NO: 20440 - RNA, 1100 nt, Artificial Sequence
  SARS-CoV-2__MT919995.1__ORF3a protein mRNA gc
aggagagucccgcagucggcguccagcggcucugcuuguucgugugugugucguugcaggccuuauucaagcuuaccauggaccuguucaugcgcaucuucaccaucggcaccgugacgcucaagcagggggagaucaaggacgccacccccagcgacuucguccgggccaccgcgaccaucccgauccaggccucccugcccuucguguggcugaucgugggcgucgcccuccuggccguguuccacagcgccuccaagaucaucacgcugaagaagcgcuggcagcucgcgcugagcaagggggugcacuucgucugcaaccugcuccugcuguucgugaccguguacucccaccuccugcuggucgccgccggccucgaggcccccuuccuguaccuguacgcgcucguguacuuccugcagagcaucaacuucgugcggaucaucaugcgccuguggcucugcuggaagugccgguccaagaacccccugcuguacgacgccaacuacuuccucugcuggcacaccaacugcuacgacuacugcaucccguacaacagcgucaccuccagcaucgugaucacguccggggacggcaccaccagccccaucuccgagcacgacuaccagaucggcggguacaccgagaagugggagagcggcgugaaggacugcgucgugcugcacuccuacuucacgagcgacuacuaccagcuguacuccacccagcucagcaccgacaccgggguggagcacgucacguucuucaucuacaacaagaucguggacgagcccgaggagcacgugcagauccacaccaucgacggcuccagcggggucgugaaccccgugauggagccgaucuacgacgagcccaccaccacgaccagcgucccccugugaggacuagucccuguucccagagcccacuuuuuuuucuuuuuuugaaauaaaauagccugucuuucagaucucaaaggcucuuuucagagccaccaaaaaaaaaaaaaaaaaaaaaaaaaaaaaaaaaaaaaaaaaaaaaaaaaaaaaaaaaaaaaaaaaaaaaaaaaaaaaaaaaaaaaaaaaaaaaaaaaaaaa

SEQ ID NO: 20441 - RNA, 1100 nt, Artificial Sequence
  SARS-CoV-2__MT919996.1__ORF3a protein mRNA gc
aggagagucccgcagucggcguccagcggcucugcuuguucgugugugugucguugcaggccuuauucaagcuuaccauggaccuguucaugcgcaucuucaccaucggcaccgugacgcucaagcagggggagaucaaggacgccacccccagcgacuucguccgggccaccgcgaccaucccgauccaggccucccugcccuucggcuggcugaucguggggguggcccuccuggccgucuuccacagcgccuccaagaucaucacgcugaagaagcgcuggcagcucgcgcugagcaagggcgugcacuucgugugcaaccugcuccugcuguucgucaccguguacucccaccuccugcugguggccgccgggcucgaggcccccuuccuguaccuguacgcgcucgucuacuuccugcagagcaucaacuucgugcggaucaucaugcgccuguggcucugcuggaagugccgguccaagaacccccugcuguacgacgccaacuacuuccucugcuggcacaccaacugcuacgacuacugcaucccguacaacagcgugaccuccagcaucgucaucacguccggcgacggcaccaccagccccaucuccgagcacgacuaccagaucgggggcuacaccgagaagugggagagcggggugaaggacugcgugguccugcacuccuacuucacgagcgacuacuaccagcuguacuccacccagcucagcaccgacaccggcguggagcacgugacguucuucaucuacaacaagaucgucgacgagcccgaggagcacgugcagauccacaccaucgacggguccagcggcguggucaaccccgugauggagccgaucuacgacgagcccaccaccacgaccagcgugccccugugaggacuagucccuguucccagagcccacuuuuuuuucuuuuuuugaaauaaaauagccugucuuucagaucucaaaggcucuuuucagagccaccaaaaaaaaaaaaaaaaaaaaaaaaaaaaaaaaaaaaaaaaaaaaaaaaaaaaaaaaaaaaaaaaaaaaaaaaaaaaaaaaaaaaaaaaaaaaaaaaaaaaa

SEQ ID NO: 20442 - RNA, 1100 nt, Artificial Sequence
  SARS-CoV-2__MT920030.1__ORF3a protein mRNA gc
aggagagucccgcagucggcguccagcggcucugcuuguucgugugugugucguugcaggccuuauucaagcuuaccauggaccuguucaugcgcaucuucaccaucggcaccgugacgcucaagcagggggagaucaaggacgccacccccagcgacuucguccgggccaccgcgaccaucccgauccaggccucccugcccuucggcuggcugaucguggggguggcccuccuggccgucuuccagagcgccuccaagaucaucacgcugaagaagcgcuggcagcucgcgcugagcaagggcgugcacuucgugugcaaccugcuccugcuguucgucaccguguacucccaccuccugcugguggccgccgggcucgaggcccccuuccuguaccuguacgcgcucgucuacuuccugcagagcaucaacuucgugcggaucaucaugcgccuguggcucugcuggaagugccgguccaagaacccccugcuguacgacgccaacuacuuccucugcuggcacaccaacugcuacgacuacugcaucccguacaacagcgugaccuccagcaucgucaucacguccggcgacggcaccaccagccccaucuccgagcacgacuaccagaucgggggcuacaccgagaagugggagagcggggugaaggacugcgugguccugcacuccuacuucacgagcgacuacuaccagcuguacuccacccagcucagcaccgacaccggcguggagcacgugacguucuucaucuacaacaagaucgucgacgagcccgaggagcacgugcagauccacaccaucgacguguccagcggggucgugaaccccgugauggagccgaucuacgacgagcccaccaccacgaccagcgucccccugugaggacuagucccuguucccagagcccacuuuuuuuucuuuuuuugaaauaaaauagccugucuuucagaucucaaaggcucuuuucagagccaccaaaaaaaaaaaaaaaaaaaaaaaaaaaaaaaaaaaaaaaaaaaaaaaaaaaaaaaaaaaaaaaaaaaaaaaaaaaaaaaaaaaaaaaaaaaaaaaaaaaaa

SEQ ID NO: 20443 - RNA, 1100 nt, Artificial Sequence
  SARS-CoV-2__MT913045.1__ORF3a protein mRNA gc
aggagagucccgcagucggcguccagcggcucugcuuguucgugugugugucguugcaggccuuauucaagcuuaccauggaccuguucaugcgcaucuucaccaucggcaccgugacgcucaagcagggggagaucaaggacgccacccccagcgacuucguccgggccaccgcgaccaucccgauccaggccucccugcccuucggcuggcugaucguggggguggcccuccuggccgucuuccacagcgccuccaagaucaucacgcugaagaagcgcuggcagcucgcgcugagcaagggcgugcacuucgugugcaacuuccugcuccuguucgucaccguguacucccaccuccugcugguggccgccgggcuggaggcccccuuccucuaccuguacgcgcuggucuacuuccuccagagcaucaacuucgugcggaucaucaugcgccuguggcugugcuggaagugccgguccaagaacccccuccuguacgacgccaacuacuuccugugcuggcacaccaacugcuacgacuacugcaucccguacaacagcgugaccuccagcaucgucaucacguccggcgacggcaccaccagccccaucuccgagcacgacuaccagaucgggggcuacaccgagaagugggagagcggggugaaggacugcgugguccuccacuccuacuucacgagcgacuacuaccagcuguacuccacccagcugagcaccgacaccggcguggagcacgugacguucuucaucuacaacaagaucgucgacgagcccgaggagcacgugcagauccacaccaucgacggguccagcggcguggucaaccccgugauggagccgaucuacgacgagcccaccaccacgaccagcgugccccucugaggacuagucccuguucccagagcccacuuuuuuuucuuuuuuugaaauaaaauagccugucuuucagaucucaaaggcucuuuucagagccaccaaaaaaaaaaaaaaaaaaaaaaaaaaaaaaaaaaaaaaaaaaaaaaaaaaaaaaaaaaaaaaaaaaaaaaaaaaaaaaaaaaaaaaaaaaaaaaaaaaaaa

SEQ ID NO: 20444 - RNA, 1100 nt, Artificial Sequence
  SARS-CoV-2__MT913078.1__ORF3a protein mRNA gc
aggagagucccgcagucggcguccagcggcucugcuuguucgugugugugucguugcaggccuuauucaagcuuaccauggaccuguucaugcgcaucuucaccaucggcaccgugacgcucaagcagggggagaucaaggacgccacccccagcgacuucguccgggccaccgcgaccaucccgauccaggccucccugcccuucggcuggcugaucgugggggccgcccuccuggccguguuccacagcgcguccaagaucaucacgcugaagaagcgcuggcagcucgcccugagcaagggcguccacuucgugugcaaccugcuccugcuguucgugaccgucuacucccaccuccugcugguggccgccgggcucgaggcgcccuuccuguaccuguacgcccucguguacuuccugcagagcaucaacuucguccggaucaucaugcgccuguggcucugcuggaagugccgguccaagaacccccugcuguacgacgccaacuacuuccucugcuggcacaccaacugcuacgacuacugcaucccguacaacagcgugaccuccagcaucgugaucacguccggcgacggcaccaccagccccaucuccgagcacgacuaccagaucgggggcuacaccgagaagugggagagcggggucaaggacugcguggugcugcacuccuacuucacgagcgacuacuaccagcuguacuccacccagcucagcaccgacaccggcgucgagcacgugacguucuucaucuacaacaagaucguggacgagcccgaggagcacguccagauccacaccaucgacggguccagcggcguggugaaccccgucauggagccgaucuacgacgagcccaccaccacgaccagcgugccccugugaggacuagucccuguucccagagcccacuuuuuuuucuuuuuuugaaauaaaauagccugucuuucagaucucaaaggcucuuuucagagccaccaaaaaaaaaaaaaaaaaaaaaaaaaaaaaaaaaaaaaaaaaaaaaaaaaaaaaaaaaaaaaaaaaaaaaaaaaaaaaaaaaaaaaaaaaaaaaaaaaaaaa

SEQ ID NO: 20445 - RNA, 1094 nt, Artificial Sequence
  SARS-CoV-2__MT913086.1__ORF3a protein mRNA gc
aggagagucccgcagucggcguccagcggcucugcuuguucgugugugugucguugcaggccuuauucaagcuuaccauggaccuguucaugcgcaucuucaccaucggcaccgugacgcucaagcagggggagaucaaggacgccacccccagcgacuucguccgggccaccgcgaccauccaggccucccugccguucggcuggcugaucguggggguggcccuccuggccgucuuccacagcgccuccaagaucaucacgcugaagaagcgcuggcagcucgcgcugagcaagggcgugcacuucgugugcaaccugcuccugcuguucgucaccguguacucccaccuccugcugguggccgccgggcucgaggcccccuuccuguaccuguacgcgcucgucuacuuccugcagagcaucaacuucgugcggaucaucaugcgccuguggcucugcuggaagugccgguccaagaacccccugcuguacgacgccaacuacuuccucugcuggcacaccaacugcuacgacuacugcauccccuacaacagcgugaccuccagcaucgucaucacguccggcgacggcaccaccagcccgaucuccgagcacgacuaccagaucgggggcuacaccgagaagugggagagcggggugaaggacugcgugguccugcacuccuacuucacgagcgacuacuaccagcuguacuccacccagcucagcaccgacaccggcguggagcacgugacguucuucaucuacaacaagaucgucgacgagcccgaggagcacgugcagauccacaccaucgacggguccagcggcguggucaaccccgugauggagcccaucuacgacgagccgaccaccacgaccagcgugccccugugaggacuagucccuguucccagagcccacuuuuuuuucuuuuuuugaaauaaaauagccugucuuucagaucucaaaggcucuuuucagagccaccaaaaaaaaaaaaaaaaaaaaaaaaaaaaaaaaaaaaaaaaaaaaaaaaaaaaaaaaaaaaaaaaaaaaaaaaaaaaaaaaaaaaaaaaaaaaaaaaaaaaa

SEQ ID NO: 20446 - RNA, 1100 nt, Artificial Sequence
  SARS-CoV-2__MT913089.1__ORF3a protein mRNA gc
aggagagucccgcagucggcguccagcggcucugcuuguucgugugugugucguugcaggccuuauucaagcuuaccauggaccuguucaugcgcaucuucaccaucggcaccgugacgcucaagcagggggagaucaaggacgccacccccagcgacuucguccgggccaccgcgaccaucccgauccaggccucccugcccuucggcuggcugaucguggggguggcccuccuggccgucuuccagagcgccuccaagaucaucacgcugaagaagcgcuggcagcucgcgcugagcaagggcgugcacuucgugugcaaccugcuccugcuguucgucaccguguacuccuaccuccugcugguggccgccgggcucgaggcccccuuccuguaccuguacgcgcucgucuacuuccugcagagcaucaacuucgugcggaucaucaugcgccuguggcucugcuggaagugccgguccaagaacccccugcuguacgacgccaacuacuuccucugcuggcacaccaacugcuacgacuacugcaucccguacaacagcgugaccuccagcaucgucaucacguccggcgacggcaccaccagccccaucuccgagcacgacuaccagaucgggggcuacaccgagaagugggagagcggggugaaggacugcgugguccugcacuccuacuucacgagcgacuacuaccagcuguacuccacccagcucagcaccgacaccggcguggagcacgugacguucuucaucuacaacaagaucgucgacgagcccgaggagcacgugcagauccacaccaucgacggguccagcggcguggucaaccccgugauggagccgaucuacgacgagcccaccaccacgaccagcgugccccugugaggacuagucccuguucccagagcccacuuuuuuuucuuuuuuugaaauaaaauagccugucuuucagaucucaaaggcucuuuucagagccaccaaaaaaaaaaaaaaaaaaaaaaaaaaaaaaaaaaaaaaaaaaaaaaaaaaaaaaaaaaaaaaaaaaaaaaaaaaaaaaaaaaaaaaaaaaaaaaaaaaaaa

SEQ ID NO: 20447 - RNA, 1100 nt, Artificial Sequence
  SARS-CoV-2__MT913110.1__ORF3a protein mRNA gc
aggagagucccgcagucggcguccagcggcucugcuuguucgugugugugucguugcaggccuuauucaagcuuaccauggaccuguucaugcgcaucuucaccaucggcaccgugacgcucaagcagggggagaucaaggacagcacccccuccgacuucguccgggccaccgccaccaucccgauccaggcgagccugcccuucggcuggcugaucguggggguggcccuccuggccuucuuccacuccgccagcaagaucaucacgcugaagaagcgcuggcagcucgcccuguccaagggcguccacuucgugugcaaccugcuccugcuguucgugaccgucuacagccaccuccugcugguggcggccgggcucgaggcccccuuccuguaccuguacgcccucguguacuuccugcaguccaucaacuucguccggaucaucaugcgccuguggcucugcuggaagugccggagcaagaacccccugcuguacgacgcgaacuacuuccucugcuggcacaccaacugcuacgacuacugcaucccguacaacuccgugaccagcuccaucgugaucacgagcggcgacggcaccaccucccccaucagcgagcacgacuaccagaucgggggcuacaccgagaagugggaguccggggucaaggacugcguggugcugcacagcuacuucacguccgacuacuaccagcuguacagcacccagcucuccaccgacaccggcgucgagcacgugacguucuucaucuacaacaagaucguggacgagcccgaggagcacguccagauccacaccaucgacgggagcagcggcguggugaaccccgucauggagccgaucuacgacgagcccaccaccacgaccuccgugccccugugaggacuagucccuguucccagagcccacuuuuuuuucuuuuuuugaaauaaaauagccugucuuucagaucucaaaggcucuuuucagagccaccaaaaaaaaaaaaaaaaaaaaaaaaaaaaaaaaaaaaaaaaaaaaaaaaaaaaaaaaaaaaaaaaaaaaaaaaaaaaaaaaaaaaaaaaaaaaaaaaaaaaa

SEQ ID NO: 20448 - RNA, 1100 nt, Artificial Sequence
  SARS-CoV-2__MT913118.1__ORF3a protein mRNA gc
aggagagucccgcagucggcguccagcggcucugcuuguucgugugugugucguugcaggccuuauucaagcuuaccauggaccuguucaugcgcaucuucaccaucggcaccgugacgcucaagcagggggagaucaaggacgccacccccagcgacuucguccgggccaccgcgaccaucccgauccaggccucccugcccuucggcuggcugaucguggggguggcccuccuggccgucuuccacagcgccuccaagaucaucacgcugaagaagcgcuggcagcucgcgcugagcaagggcgugcacuucgugugcaaccugcuccugcugcucgucaccguguacucccaccuccugcugguggccgccgggcuggaggcccccuuccuguaccucuacgcgcuggucuacuuccugcagagcaucaacuucgugcggaucaucaugcgccucuggcugugcuggaagugccgguccaagaacccccugcucuacgacgccaacuacuuccugugcuggcacaccaacugcuacgacuacugcaucccguacaacagcgugaccuccagcaucgucaucacguccggcgacggcaccaccagccccaucuccgagcacgacuaccagaucgggggcuacaccgagaagugggagagcggggugaaggacugcgugguccugcacuccuacuucacgagcgacuacuaccagcucuacuccacccagcugagcaccgacaccggcguggagcacgugacguucuucaucuacaacaagaucgucgacgagcccgaggagcacgugcagauccacaccaucgacggguccagcggcguggucaaccccgugauggagccgaucuacgacgagcccaccaccacgaccagcgugccccugugaggacuagucccuguucccagagcccacuuuuuuuucuuuuuuugaaauaaaauagccugucuuucagaucucaaaggcucuuuucagagccaccaaaaaaaaaaaaaaaaaaaaaaaaaaaaaaaaaaaaaaaaaaaaaaaaaaaaaaaaaaaaaaaaaaaaaaaaaaaaaaaaaaaaaaaaaaaaaaaaaaaaa

SEQ ID NO: 20449 - RNA, 1100 nt, Artificial Sequence
  SARS-CoV-2__MT913122.1__ORF3a protein mRNA gc
aggagagucccgcagucggcguccagcggcucugcuuguucgugugugugucguugcaggccuuauucaagcuuaccauggaccuguucaugcgcaucuucaccaucggcaccgugacgcucaagcagggggagaucaaggacgccacccccagcgacuucguccgggccaccgcgaccaucccgauccaggccucccugcccuucggcuggcugaucguggggguggcccuccuggccgucuuccacagcgccuccaagaucaucacgcugaagaagcgcuggcagcucgcgcugagcaagggcgugcacuucgugugcaaccugcuccugcuguucgucaccguguacucccaccuccugcugguggccgccgggcucgaggcccccuuccuguaccuguacgcgcucgucuacuuccugcagagcaucaacuucgugcggaucaucaugcgccuguggcucugcuggaagugccgguccaagaacccccugcuguacgacgccaacuacuuccucugcuggcacaccaacugcuacgacuacugcaucccguacaacagcgugaccuccagcaucgucaucacguccggcgacggcaccaccagccccaucuccgagcacgacuaccacaucgggggcuacaccgagaagugggagagcggggugaaggacugcgugguccugcacuccuacuucacgagcgacuacuaccagcuguacuccacccagcucagcaccgacaccggcguggagcacgugacguucuucaucuacaacaagaucgucgacgagcccgaggagcacgugcagauccacaccaucgacggguccagcggcguggucaaccccgugauggagccgaucuacgacgagcccaccaccacgaccagcgugccccugugaggacuagucccuguucccagagcccacuuuuuuuucuuuuuuugaaauaaaauagccugucuuucagaucucaaaggcucuuuucagagccaccaaaaaaaaaaaaaaaaaaaaaaaaaaaaaaaaaaaaaaaaaaaaaaaaaaaaaaaaaaaaaaaaaaaaaaaaaaaaaaaaaaaaaaaaaaaaaaaaaaaaa

SEQ ID NO: 20450 - RNA, 1100 nt, Artificial Sequence
  SARS-CoV-2__MT913127.1__ORF3a protein mRNA gc
aggagagucccgcagucggcguccagcggcucugcuuguucgugugugugucguugcaggccuuauucaagcuuaccauggaccuguucaugcgcaucuucaccaucggcaccgugacgcucaagcagggggagaucaaggacgccacccccagcgacuucguccgggccaccgcgaccaucccgauccaggccucccugcccuucggcuggcugaucguggggguggcccuccuggccgucuuccagagcgccuccaagaucaucacgcugaagaagcgcuggcagcucgcgcugagcaagggcgugcacuucgugugcaaccugcuccugcuguucgucaccguguacucccaccuccugcugguggccgccgggcucgaggcccccuucuucuaccuguacgcgcuggucuacuuccuccagagcaucaacuucgugcggaucaucaugcgccuguggcugugcuggaagugccgguccaagaacccccuccuguacgacgccaacuacuuccugugcuggcacaccaacugcuacgacuacugcaucccguacaacagcgugaccuccagcaucgucaucacguccggcgacggcaccaccagccccaucuccgagcacgacuaccagaucgggggcuacaccgagaagugggagagcggggugaaggacugcgugguccuccacuccuacuucacgagcgacuacuaccagcuguacuccacccagcugagcaccgacaccggcguggagcacgugacguucuucaucuacaacaagaucgucgacgagcccgaggagcacgugcagauccacaccaucgacggguccagcggcguggucaaccccgugauggagccgaucuacgacgagcccaccaccacgaccagcgugccccucugaggacuagucccuguucccagagcccacuuuuuuuucuuuuuuugaaauaaaauagccugucuuucagaucucaaaggcucuuuucagagccaccaaaaaaaaaaaaaaaaaaaaaaaaaaaaaaaaaaaaaaaaaaaaaaaaaaaaaaaaaaaaaaaaaaaaaaaaaaaaaaaaaaaaaaaaaaaaaaaaaaaaa

SEQ ID NO: 20451 - RNA, 1100 nt, Artificial Sequence
  SARS-CoV-2__MT913129.1__ORF3a protein mRNA gc
aggagagucccgcagucggcguccagcggcucugcuuguucgugugugugucguugcaggccuuauucaagcuuaccauggaccuguucaugcgcaucuucaccaucggcaccgugacgcucaagcagggggagaucaaggacgccacccccagcgacuucguccgggccaccgcgaccaucccgauccaggccucccugcccuucggcuggcugaucguggggguggcccuccuggccgucuuccacagcgccuccaagaucaucacgcugaagaagcgcuggcagcucgcgcugagcaagggcgugcacuucgugugcaaccugcuccugcuguucgucaccguguacucccaccuccugcugguggccgccgggcucgaggcccccuuccuguaccuguacgcgcucgucuacuuccugcagagcaucaacuucgugcggaucaucaugcgccuguggcucugcuggaagugccgguccaagaacccccugcuguacgacgccaacuacuuccucugcuggcacaccaacugcuacgacuacugcaucccguacaacagccugaccuccagcaucgugaucacguccggcgacggcaccaccagccccaucuccgagcacgacuaccagaucgggggcuacaccgagaagugggagagcggggucaaggacugcguggugcugcacuccuacuucacgagcgacuacuaccagcucuacuccacccagcugagcaccgacaccggcgucgagcacgugacguucuucaucuacaacaagaucguggacgagcccgaggagcacguccagauccacaccaucgacggguccagcggcguggugaaccccgucauggagccgaucuacgacgagcccaccaccacgaccagcgugccccugugaggacuagucccuguucccagagcccacuuuuuuuucuuuuuuugaaauaaaauagccugucuuucagaucucaaaggcucuuuucagagccaccaaaaaaaaaaaaaaaaaaaaaaaaaaaaaaaaaaaaaaaaaaaaaaaaaaaaaaaaaaaaaaaaaaaaaaaaaaaaaaaaaaaaaaaaaaaaaaaaaaaaa

SEQ ID NO: 20452 - RNA, 1100 nt, Artificial Sequence
  SARS-CoV-2__MT913131.1__ORF3a protein mRNA gc
aggagagucccgcagucggcguccagcggcucugcuuguucgugugugugucguugcaggccuuauucaagcuuaccauggaccuguucaugcgcaucuucaccaucggcaccgugacgcucaagcagggggagaucaaggacgccacccccagcgacuucguccgggccaccgcgaccaucccgauccaggccucccugcccuucggcuggcugaucguggggguggcccuccuggccgucuuccacagcgccuccaagaucaucacgcugaagaagcgcuggcagcucgcgcugagcaagggcgugcacuucgugugcaaccugcuccugcuguucgucaucguguacucccaccuccugcugguggccgccgggcucgaggcccccuuccuguaccuguacgcgcucgucuacuuccugcagagcaucaacuucgugcggaucaucaugcgccuguggcucugcuggaagugccgguccaagaacccccugcuguacgacgccaacuacuuccucugcuggcacaccaacugcuacgacuacugcaucccguacaacagcgugaccuccagcaucgucaucaccuccggcgacggcacgaccagccccaucuccgagcacgacuaccagaucgggggcuacaccgagaagugggagagcggggugaaggacugcgugguccugcacuccuacuucaccagcgacuacuaccagcuguacuccacgcagcucagcaccgacaccggcguggagcacgugaccuucuucaucuacaacaagaucgucgacgagcccgaggagcacgugcagauccacacgaucgacggguccagcggcguggucaaccccgugauggagccgaucuacgacgagcccaccaccaccacgagcgugccccugugaggacuagucccuguucccagagcccacuuuuuuuucuuuuuuugaaauaaaauagccugucuuucagaucucaaaggcucuuuucagagccaccaaaaaaaaaaaaaaaaaaaaaaaaaaaaaaaaaaaaaaaaaaaaaaaaaaaaaaaaaaaaaaaaaaaaaaaaaaaaaaaaaaaaaaaaaaaaaaaaaaaaa

SEQ ID NO: 20453 - RNA, 1100 nt, Artificial Sequence
  SARS-CoV-2__MT913141.1__ORF3a protein mRNA gc
aggagagucccgcagucggcguccagcggcucugcuuguucgugugugugucguugcaggccuuauucaagcuuaccauggaccuguucaugcgcaucuucaccaucggcaccgugacgcucaagcagggggagaucaaggacgccacccccagcgacuucguccgggccaccgcgaccaucccgauccccgccucccugcccuucggcuggcugaucguggggguggcccuccuggccgucuuccagagcgccuccaagaucaucacgcugaagaagcgcuggcagcucgcgcugagcaagggcgugcacuucgugugcaaccugcuccugcuguucgucaccguguacucccaccuccugcugguggccgccgggcucgaggcccccuuccuguaccuguacgcgcucgucuacuuccugcagagcaucaacuucgugcggaucaucaugcgccuguggcucugcuggaagugccgguccaagaacccgcugcuguacgacgccaacuacuuccucugcuggcacaccaacugcuacgacuacugcauccccuacaacagcgugaccuccagcaucgucaucacguccggcgacggcaccaccagccccaucuccgagcacgacuaccagaucgggggcuacaccgagaagugggagagcggggugaaggacugcgugguccugcacuccuacuucacgagcgacuacuaccagcuguacuccacccagcucagcaccgacaccggcguggagcacgugacguucuucaucuacaacaagaucgucgacgagcccgaggagcacgugcagauccacaccaucgacggguccagcggcguggucaacccggugauggagcccaucuacgacgagcccaccaccacgaccagcgugccccugugaggacuagucccuguucccagagcccacuuuuuuuucuuuuuuugaaauaaaauagccugucuuucagaucucaaaggcucuuuucagagccaccaaaaaaaaaaaaaaaaaaaaaaaaaaaaaaaaaaaaaaaaaaaaaaaaaaaaaaaaaaaaaaaaaaaaaaaaaaaaaaaaaaaaaaaaaaaaaaaaaaaaa

SEQ ID NO: 20454 - RNA, 1100 nt, Artificial Sequence
  SARS-CoV-2__MT907515.1__ORF3a protein mRNA gc
aggagagucccgcagucggcguccagcggcucugcuuguucgugugugugucguugcaggccuuauucaagcuuaccauggaccuguucaugcgcaucuucaccaucggcaccgugacgcucaagcagggggagaucaaggacgccacccccagcgacuucguccgggccaccgcgaccaucccgauccaggccucccugcccuucggcuggcugaucguggggguggcccuccuggccgucuuccagagcgccuccaagaucaucacgcugaagaagcgcuggcagcucgcgcugagcaagggcgugcacuucgugugcaaccugcuccugcuguucgucaccguguacucccaccuccugcugguggccgccgggcucgaggcccccuuccuguaccuguacgcgcucgucuacuuccugcagagcaucaacuucgugcggaucaucaugcgccuguggcucugcuggaagugccgguccaagaacccccugcuguacgacgccaacuacuuccucugcuggcacaccaacugcuacgacuacugcaucccguacaacagcgugaccuccagcaucgucaucacguccggcgacggcaccaccagccccaucuccgagcacgacuaccagaucgggggcuacaccgagaagugggagagcguggugaaggacugcgucgugcugcacuccuacuucacgagcgacuacuaccagcuguacuccacccagcucagcaccgacaccgggguggagcacgucacguucuucaucuacaacaagaucguggacgagcccgaggagcacgugcagauccacaccaucgacggcuccagcggggucgugaaccccgugauggagccgaucuacgacgagcccaccaccacgaccagcgucccccugugaggacuagucccuguucccagagcccacuuuuuuuucuuuuuuugaaauaaaauagccugucuuucagaucucaaaggcucuuuucagagccaccaaaaaaaaaaaaaaaaaaaaaaaaaaaaaaaaaaaaaaaaaaaaaaaaaaaaaaaaaaaaaaaaaaaaaaaaaaaaaaaaaaaaaaaaaaaaaaaaaaaaa

SEQ ID NO: 20455 - RNA, 1100 nt, Artificial Sequence
  SARS-CoV-2__MT907518.1__ORF3a protein mRNA gc
aggagagucccgcagucggcguccagcggcucugcuuguucgugugugugucguugcaggccuuauucaagcuuaccauggaccuguucaugcgcaucuucaccaucggcaccgugacgcucaagcagggggagaucaaggacgccacccccagcgacuucguccgggccaccgcgaccaucccgauccaggccucccugcccuucggcuggcugaucguggggguggcccuccuggccgucuuccagagcgccuccaagaucaucacgcugaagaagcgcuggcagcucgcgcugagcaagggcgugcacuucgugugcaaccugcuccugcuguucgucaccguguacucccaccuccugcugguggccgccgggcucgaggcccccuuccuguaccuguacagccucgucuacuuccugcaguccaucaacuucgugcggaucaucaugcgccuguggcucugcuggaagugccggagcaagaacccccugcuguacgacgcgaacuacuuccucugcuggcacaccaacugcuacgacuacugcaucccguacaacuccgugaccagcuccaucgucaucacgagcggcgacggcaccaccucccccaucagcgagcacgacuaccagaucgggggcuacaccgagaagugggaguccggggugaaggacugcgugguccugcacagcuacuucacguccgacuacuaccagcuguacagcacccagcucuccaccgacaccggcguggagcacgugacguucuucaucuacaacaagaucgucgacgagcccgaggagcacgugcagauccacaccaucgacgggagcagcggcguggucaaccccgugauggagccgaucuacgacgagcccaccaccacgaccuccgugccccugugaggacuagucccuguucccagagcccacuuuuuuuucuuuuuuugaaauaaaauagccugucuuucagaucucaaaggcucuuuucagagccaccaaaaaaaaaaaaaaaaaaaaaaaaaaaaaaaaaaaaaaaaaaaaaaaaaaaaaaaaaaaaaaaaaaaaaaaaaaaaaaaaaaaaaaaaaaaaaaaaaaaaa

SEQ ID NO: 20456 - RNA, 1100 nt, Artificial Sequence
  SARS-CoV-2__MT911811.1__ORF3a protein mRNA gc
aggagagucccgcagucggcguccagcggcucugcuuguucgugugugugucguugcaggccuuauucaagcuuaccauggaccuguucaugcgcaucuucaccaucggcaccgugacgcucaagcagggggagaucaaggacgccacccccagcgacuucguccgggccaccgcgaccaucccgauccaggccucccugcccuucggccgccugaucguggggguggcccuccuggccgucuuccacagcgccuccaagaucaucacgcugaagaagcgguggcagcucgcgcugagcaagggcgugcacuucgugugcaaccugcuccugcuguucgucaucguguacucccaccuccugcugguggccgccgggcucgaggcccccuuccuguaccuguacgcgcucgucuacuuccugcagagcaucaacuucgugcgcaucaucaugcggcuguggcucugcuggaagugccgcuccaagaacccccugcuguacgacgccaacuacuuccucugcuggcacaccaacugcuacgacuacugcaucccguacaacagcgugaccuccagcaucgucaucaccuccggcgacggcacgaccagccccaucuccgagcacgacuaccagaucgggggcuacaccgagaagugggagagcggggugaaggacugcgugguccugcacuccuacuucaccagcgacuacuaccagcuguacuccacgcagcucagcaccgacaccggcguggagcacgugaccuucuucaucuacaacaagaucgucgacgagcccgaggagcacgugcagauccacacgaucgacggguccagcggcguggucaaccccgugauggagccgaucuacgacgagcccaccaccaccacgagcgugccccugugaggacuagucccuguucccagagcccacuuuuuuuucuuuuuuugaaauaaaauagccugucuuucagaucucaaaggcucuuuucagagccaccaaaaaaaaaaaaaaaaaaaaaaaaaaaaaaaaaaaaaaaaaaaaaaaaaaaaaaaaaaaaaaaaaaaaaaaaaaaaaaaaaaaaaaaaaaaaaaaaaaaaa

SEQ ID NO: 20457 - RNA, 1100 nt, Artificial Sequence
  SARS-CoV-2__MT483876.1__ORF3a protein mRNA gc
aggagagucccgcagucggcguccagcggcucugcuuguucgugugugugucguugcaggccuuauucaagcuuaccauggaccuguucaugcgcaucuucaccaucggcaccgugacgcucaagcagggggagaucaaggacgccacccccagcgacuucguccgggccaccgcgaccaucccgauccaggccucccugcccuucggcuggcugaucguggggguggcccuccuggccgucuuccagagcgccuccaagaucaucacgcugaagaagcgcuggcagcucgcgcugagcaagggcgugcacuucgugugcaaccugcuccugcuguucgucaccguguacucccaccuccugcugguggccgccgggcucgaggcccccuuccuguaccuguacgcgcucgucuacuuccugcagagcaucaacuucgugcggaucaucaugcgccuguggcucugcuggaagugccgguccaagaacccccugcuguacgacgccaacuacuuccucugcuggcacaccaacugcuacgacuacugcaucccguacaacagcgugaccuccagcaucgucaucacguccggcgacggcaccaccagccccaucuccgagcacgacuaccagaucgggggcuacaccgagaagugggagagcggggugaaggacugcgugguccugcacuccuacuucacgagcgacuacuaccagcuguacuccacccagcucagcaccggcaccgggguggagcacgugacguucuucaucuacaacaagaucgucgacgagcccgaggagcacgugcagauccacaccaucgacggcuccagcggcguggucaaccccgugauggagccgaucuacgacgagcccaccaccacgaccagcgugccccugugaggacuagucccuguucccagagcccacuuuuuuuucuuuuuuugaaauaaaauagccugucuuucagaucucaaaggcucuuuucagagccaccaaaaaaaaaaaaaaaaaaaaaaaaaaaaaaaaaaaaaaaaaaaaaaaaaaaaaaaaaaaaaaaaaaaaaaaaaaaaaaaaaaaaaaaaaaaaaaaaaaaaa

SEQ ID NO: 20458 - RNA, 1100 nt, Artificial Sequence
  SARS-CoV-2__MT893659.1__ORF3a protein mRNA gc
aggagagucccgcagucggcguccagcggcucugcuuguucgugugugugucguugcaggccuuauucaagcuuaccauggaccuguucaugcgcaucuucaccaucggcaccgugacgcucaagcagggggagaucaaggacgccacccccagcgacuucguccgggccaccgcgaccaucccgauccaggccucccugcccuucggcuggcugaucguggggguggcccuccuggccgucuuccacagcgccuccaagaucaucacgcugaagaagcgcuggcagcucgcgcugagcaagggcgugcacuucgugugcaaccugcuccugcuguucgucaccguguacucccaccuccugcugguggccgccgggcucgaggcccccuuccuguaccuguacgcgcucgucuacuuccugcagagcaucaacuucgugcggaucaucaugcgccuguggcucugcuggaagugccgguccaagaacccccugcuguacgacgccaacuacuuccucugcuggcacaccaacugcuacgacuacugcaucccguacaacagcgugaccuccagcaucgucaucacguccggcgacggcaccaccagccccaucuccgagcacgacuaccagaucgggggcuacaccgagaagugggagagcggggugaaggacugcgugcugcugcacuccuacuucacgagcgacuacuaccagcucuacuccacccagcugagcaccgacaccggcgucgagcacgugacguucuucaucuacaacaagaucguggacgagcccgaggagcacguccagauccacaccaucgacggguccagcggcguggugaaccccgucauggagccgaucuacgacgagcccaccaccacgaccagcgugccccugugaggacuagucccuguucccagagcccacuuuuuuuucuuuuuuugaaauaaaauagccugucuuucagaucucaaaggcucuuuucagagccaccaaaaaaaaaaaaaaaaaaaaaaaaaaaaaaaaaaaaaaaaaaaaaaaaaaaaaaaaaaaaaaaaaaaaaaaaaaaaaaaaaaaaaaaaaaaaaaaaaaaaa

SEQ ID NO: 20459 - RNA, 1100 nt, Artificial Sequence
  SARS-CoV-2__MT893667.1__ORF3a protein mRNA gc
aggagagucccgcagucggcguccagcggcucugcuuguucgugugugugucguugcaggccuuauucaagcuuaccauggaccuguucaugcgcaucuucaccaucggcaccgugacguucaagcagggggagaucaaggacgccacccccagcgacuucguccgggccaccgcgaccaucccgauccaggccucccuccccuucggcuggcugaucguggggguggcccugcucgccgucuuccagagcgccuccaagaucaucacgcugaagaagcgcuggcagcuggcgcucagcaagggcgugcacuucgugugcaaccugcugcuccuguucgucaccguguacucccaccuccugcugguggccgccgggcuggaggcccccuuccucuaccuguacgcgcuggucuacuuccuccagagcaucaacuucgugcggaucaucaugcgccuguggcugugcuggaagugccgguccaagaacccccuccuguacgacgccaacuacuuccugugcuggcacaccaacugcuacgacuacugcaucccguacaacagcgugaccuccagcaucgucaucacguccggcgacggcaccaccagccccaucuccgagcacgacuaccagaucgggggcuacaccgagaagugggagagcggggugaaggacugcgugguccuccacuccuacuucacgagcgacuacuaccagcuguacuccacccagcugagcaccgacaccggcguggagcacgugacguucuucaucuacaacaagaucgucgacgagcccgaggagcacgugcagauccacaccaucgacggguccagcggcguggucaaccccgugauggagccgaucuacgacgagcccaccaccacgaccagcgugccccucugaggacuagucccuguucccagagcccacuuuuuuuucuuuuuuugaaauaaaauagccugucuuucagaucucaaaggcucuuuucagagccaccaaaaaaaaaaaaaaaaaaaaaaaaaaaaaaaaaaaaaaaaaaaaaaaaaaaaaaaaaaaaaaaaaaaaaaaaaaaaaaaaaaaaaaaaaaaaaaaaaaaaa

SEQ ID NO: 20460 - RNA, 1100 nt, Artificial Sequence
  SARS-CoV-2__MT893675.1__ORF3a protein mRNA gc
aggagagucccgcagucggcguccagcggcucugcuuguucgugugugugucguugcaggccuuauucaagcuuaccauggaccuguucaugcgcaucuucaccaucggcaccgugacgcucaagcagggggagaucaaggacgccacccccagcgacuucguccgggccaccgcgaccaucccgauccaggccucccugcccuucggcuggcugaucguggggguggcccuccuggccgucuuccagagcgccuccaagaucaucacgcugaagaagcgcuggcagcucgcgcugagcaagggcgugcacuucgugugcaaccugcuccugcuguucgucaccguguacucccaccuccugcugguggccgccgggcucgaggcccccuuccuguaccuguacgcgcucgucuacuuccugcagagcaucaacuucgugcggaucaucaugcgccuguggcucugcuggaagugccgguccaagaacccccugcuguacgacgccaacuacuuccucugcuggcacaccaacugcuacgacuacugcaucccguacaacagcgugaccuccagcaucgucaucacguccggcgacggcaucaccagccccaucuccgagcacgacuaccagaucgggggcuacaccgagaagugggagagcggggugaaggacugcgugguccugcacuccuacuucaccagcgacuacuaccagcuguacuccacgcagcucagcaccgacaccggcguggagcacgugaccuucuucaucuacaacaagaucgucgacgagcccgaggagcacgugcagauccacacgaucgacggguccagcggcguggucaaccccgugauggagccgaucuacgacgagcccaccaccaccacgagcgugccccugugaggacuagucccuguucccagagcccacuuuuuuuucuuuuuuugaaauaaaauagccugucuuucagaucucaaaggcucuuuucagagccaccaaaaaaaaaaaaaaaaaaaaaaaaaaaaaaaaaaaaaaaaaaaaaaaaaaaaaaaaaaaaaaaaaaaaaaaaaaaaaaaaaaaaaaaaaaaaaaaaaaaaa

SEQ ID NO: 20461 - RNA, 1100 nt, Artificial Sequence
  SARS-CoV-2__MT897460.1__ORF3a protein mRNA gc
aggagagucccgcagucggcguccagcggcucugcuuguucgugugugugucguugcaggccuuauucaagcuuaccauggaccuguucaugcgcaucuucaccaucggcaccgugacgcucaaccagggggagaucaaggacgccacccccagcgacuucguccgggccaccgcgaccaucccgauccaggccucccugcccuucggcuggcugaucguggggguggcccuccuggccgucuuccacagcgccuccaagaucaucacgcugaagaagcgcuggcagcucgcgcugagcaagggcgugcacuucgugugcaaccugcuccugcuguucgucaccguguacucccaccuccugcugguggccgccgggcucgaggcccccuuccuguaccuguacgcgcucgucuacuuccugcagagcaucaacuucgugcggaucaucaugcgccuguggcucugcuggaagugccgguccaagaacccccugcuguacgacgccaacuacuuccucugcuggcacaccaacugcuacgacuacugcaucccguacaacagcgugaccuccagcaucgucaucacguccggcgacggcaccaccagccccaucuccgagcacgacuaccagaucgggggcuacaccgagaagugggagagcggggugaaggacugcgugguccugcacuccuacuucacgagcgacuacuaccagcuguacuccacccagcucagcaccgacaccggcguggagcacgugacguucuucaucuacaacaagaucgucgacgagcccgaggagcacgugcagauccacaccaucgacggguccagcggcguggucaaccccgugauggagccgaucuacgacgagcccaccaccacgaccagcgugccccugugaggacuagucccuguucccagagcccacuuuuuuuucuuuuuuugaaauaaaauagccugucuuucagaucucaaaggcucuuuucagagccaccaaaaaaaaaaaaaaaaaaaaaaaaaaaaaaaaaaaaaaaaaaaaaaaaaaaaaaaaaaaaaaaaaaaaaaaaaaaaaaaaaaaaaaaaaaaaaaaaaaaaa

SEQ ID NO: 20462 - RNA, 1094 nt, Artificial Sequence
  SARS-CoV-2__MT890280.1__ORF3a protein mRNA gc
aggagagucccgcagucggcguccagcggcucugcuuguucgugugugugucguugcaggccuuauucaagcuuaccauggaccuguucaugcgcaucuucaccaucggcaccgugacgcucaagcagggggagaucaaggacgccacccccagcgacuucguccgggccaccgcgaccaucccgauccaggccucccugcccuucggcuggcugaucguggggguggcccuccuggccgucuuccagagcgccuccaagaucaucacgcugaagaagcgcuggcagcucgcgcugagcaagggcgugcacuucgugugcaaccugcuccugcuguucgucaccguguacucccaccuccugcugguggccgccgggcucgaggcccccuuccuguacgcgcuggucuacuuccuccagagcaucaacuucgugcggaucaucaugcgccuguggcugugcuggaagugccgguccaagaacccccuccuguacgacgccaacuacuuccugugcuggcacaccaacugcuacgacuacugcaucccguacaacagcgugaccuccagcaucgucaucacguccggcgacggcaccaccagccccaucuccgagcacgacuaccagaucgggggcuacaccgagaagugggagagcggggugaaggacugcgugguccuccacuccuacuucacgagcgacuacuaccagcuguacuccacccagcugagcaccgacaccggcguggagcacgugacguucuucaucuacaacaagaucgucgacgagcccgaggagcacgugcagauccacaccaucgacggguccagcggcguggucaaccccgugauggagccgaucuacgacgagcccaccaccacgaccagcgugccccucugaggacuagucccuguucccagagcccacuuuuuuuucuuuuuuugaaauaaaauagccugucuuucagaucucaaaggcucuuuucagagccaccaaaaaaaaaaaaaaaaaaaaaaaaaaaaaaaaaaaaaaaaaaaaaaaaaaaaaaaaaaaaaaaaaaaaaaaaaaaaaaaaaaaaaaaaaaaaaaaaaaaaa

SEQ ID NO: 20463 - RNA, 1100 nt, Artificial Sequence
  SARS-CoV-2__MT890290.1__ORF3a protein mRNA gc
aggagagucccgcagucggcguccagcggcucugcuuguucgugugugugucguugcaggccuuauucaagcuuaccauggaccuguucaugcgcaucuucaccaucggcaccgugacgcucaagcagggggagaucaaggacgccacccccagcgacuucguccgggccaccgcgaccaucccgauccaggccucccugcccuucggcuggcugaucguggggguggcccuccuggccgucuuccacagcgccuccaagaucaucacgcugaagaagcgcuggcagcucgcgcugagcaagggcgugcacuucgugugcaaccugcuccugcuguucgucaccguguacucccaccuccugcugguggccgccgggcucgaggcccccuuccuguaccuguacgcgcucgucuacuuccugcagagcaucaacuucgugcggaucaucaugcgccuguggcucugcuggaagugccgguccaagaacccccugcuguacgacgccaacuacuuccucugcuggcacaccaacugcuacgacuacugcaucccguacaacagcgugaccuccagcaucgucaucacguccggcgacggcaccaccagccccaucuccgagcacgacuaccagaucgggggcuacaccgagaagugggagagcggggugaaggacugcgugguccugcacuccuacuucacgagcgacuacuaccaccuguacuccacccagcucagcaccgacaccggcguggagcacgugacguucuucaucuacaacaagaucgucgacgagcccgaggagcacgugcagauccacaccaucgacggguccagcggcguggucaaccccgugauggagccgaucuacgacgagcccaccaccacgaccagcgugccccugugaggacuagucccuguucccagagcccacuuuuuuuucuuuuuuugaaauaaaauagccugucuuucagaucucaaaggcucuuuucagagccaccaaaaaaaaaaaaaaaaaaaaaaaaaaaaaaaaaaaaaaaaaaaaaaaaaaaaaaaaaaaaaaaaaaaaaaaaaaaaaaaaaaaaaaaaaaaaaaaaaaaaa

SEQ ID NO: 20464 - RNA, 1100 nt, Artificial Sequence
  SARS-CoV-2__MT890292.1__ORF3a protein mRNA gc
aggagagucccgcagucggcguccagcggcucugcuuguucgugugugugucguugcaggccuuauucaagcuuaccauggaccuguucaugcgcaucuucaccaucggcaccgugacgcucaagcagggggagaucaaggacgccacccccagcgacuucguccgggccaccgcgaccaucccgauccaggccucccugcccuucggcuggcugaucguggggguggcccuccuggccgucuuccacagcgccuccaagaucaucacgcugaagaagcgcuggcagcucgcgcugagcaagggcgugcacuucgugugcaaccugcuccugcuguucgucaccguguacucccaccuccugcugguggccgccgggcucgaggcccccuuccuguaccuguacgcgcucgucuacuuccugcagagcaucaacuucgugcggaucaucaugcgccuguggcucugcuggaagugccgguccaagaacccccugcuguacgacgccaacuacuuccucugcuggcacaccaacugcuacgacuacugcaucccguacaacagcgugaccuccagcaucgucaucacguccugcgacggcaccaccagccccaucuccgagcacgacuaccagaucggcggguacaccgagaagugggagagcggcgugaaggacugcgugguccugcacuccuacuucacgagcgacuacuaccagcuguacuccacccagcucagcaccgacaccgggguggagcacgugacguucuucaucuacaacaagaucgucgacgagcccgaggagcacgugcagauccacaccaucgacggcuccagcgggguggucaaccccgugauggagccgaucuacgacgagcccaccaccacgaccagcgugccccugugaggacuagucccuguucccagagcccacuuuuuuuucuuuuuuugaaauaaaauagccugucuuucagaucucaaaggcucuuuucagagccaccaaaaaaaaaaaaaaaaaaaaaaaaaaaaaaaaaaaaaaaaaaaaaaaaaaaaaaaaaaaaaaaaaaaaaaaaaaaaaaaaaaaaaaaaaaaaaaaaaaaaa

SEQ ID NO: 20465 - RNA, 1100 nt, Artificial Sequence
  SARS-CoV-2__MT890294.1__ORF3a protein mRNA gc
aggagagucccgcagucggcguccagcggcucugcuuguucgugugugugucguugcaggccuuauucaagcuuaccauggaccuguucaugcgcaucuucaccaucggcaccgugacgcucaagcagggggagaucaaggacgccacccccagccacuucguccgggccaccgcgaccaucccgauccaggccucccugcccuucggcuggcugaucguggggguggcccuccuggccgucuuccacagcgccuccaagaucaucacgcugaagaagcgcuggcagcucgcgcugagcaagggcgugcacuucgugugcaaccugcuccugcuguucgucaccguguacucccaccuccugcugguggccgccgggcucgaggcccccuuccuguaccuguacgcgcucgucuacuuccugcagagcaucaacuucgugcggaucaucaugcgccuguggcucugcuggaagugccgguccaagaacccccugcuguacgacgccaacuacuuccucugcuggcacaccaacugcuacgacuacugcaucccguacaacagcgugaccuccagcaucgucaucacguccggcgacggcaccaccagccccaucuccgagcacgacuaccagaucgggggcuacaccgagaagugggagagcggggugaaggacugcgugguccugcacuccuacuucacgagcgacuacuaccagcuguacuccacccagcucagcaccgacaccggcguggagcacgugacguucuucaucuacaacaagaucgucgacgagcccgaggagcacgugcagauccacaccaucgacggguccagcggcguggucaaccccgugauggagccgaucuacgacgagcccaccaccacgaccagcgugccccugugaggacuagucccuguucccagagcccacuuuuuuuucuuuuuuugaaauaaaauagccugucuuucagaucucaaaggcucuuuucagagccaccaaaaaaaaaaaaaaaaaaaaaaaaaaaaaaaaaaaaaaaaaaaaaaaaaaaaaaaaaaaaaaaaaaaaaaaaaaaaaaaaaaaaaaaaaaaaaaaaaaaaa

SEQ ID NO: 20466 - RNA, 1100 nt, Artificial Sequence
  SARS-CoV-2__MT890296.1__ORF3a protein mRNA gc
aggagagucccgcagucggcguccagcggcucugcuuguucgugugugugucguugcaggccuuauucaagcuuaccauggaccuguucaugcgcaucuucaccaucggcaccgugacgcucaagcagggggagaucaaggacgccacccccagcgacuucguccgggccaccgcgaccaucccgauccaggccucccugcccuucggcuggcugaucguggggguggcccuccuggccgucuuccacagcgccuccaagaucaucacgcugaagaagcgcuggcagcucgcgcugagcaagggcgugcacuucgugugcaaccugcuccugcuguucgucaccguguacucccaccuccugcugguggccgccgggcucgaggcccccuuccuguaccuguacgcgcucgucuacuuccugcagagcaucaacuucgugcggaucaucaugcgccugugguucugcuggaagugccgguccaagaacccccuccuguacgacgccaacuacuuccugugcuggcacaccaacugcuacgacuacugcaucccguacaacagcgugaccuccagcaucgucaucacguccggcgacggcaccaccagccccaucuccgagcacgacuaccagaucgggggcuacaccgagaagugggagagcggggugaaggacugcgugguccuccacuccuacuucacgagcgacuacuaccagcuguacuccacccagcugagcaccgacaccggcguggagcacgugacguucuucaucuacaacaagaucgucgacgagcccgaggagcacgugcagauccacaccaucgacggguccagcggcguggucaaccccgugauggagccgaucuacgacgagcccaccaccacgaccagcgugccccucugaggacuagucccuguucccagagcccacuuuuuuuucuuuuuuugaaauaaaauagccugucuuucagaucucaaaggcucuuuucagagccaccaaaaaaaaaaaaaaaaaaaaaaaaaaaaaaaaaaaaaaaaaaaaaaaaaaaaaaaaaaaaaaaaaaaaaaaaaaaaaaaaaaaaaaaaaaaaaaaaaaaaa

SEQ ID NO: 20467 - RNA, 1100 nt, Artificial Sequence
  SARS-CoV-2__MT890320.1__ORF3a protein mRNA gc
aggagagucccgcagucggcguccagcggcucugcuuguucgugugugugucguugcaggccuuauucaagcuuaccauggaccuguucaugcgcaucuucaccaucggcaccgugacgcucaagcagggggagaucaaggacgccacccccagcgacuucguccgggccaccgcgaccaucccgauccaggccucccugcccuucggcuggcugaucguggggguggcccuccuggccgucuuccacagcgccuccaagaucaucacgcugaagaagcgcuggcagcucgcgcugagcaagggcgugcacuucgugugcaaccugcuccugcuguucgucaccguguacucccaccuccugcugguggccgccgggcucgaggcccuguuccuguaccucuacgcgcuggucuacuuccugcagagcaucaacuucgugcggaucaucaugcgccucuggcugugcuggaagugccgguccaagaacccccugcucuacgacgccaacuacuuccugugcuggcacaccaacugcuacgacuacugcauccccuacaacagcgugaccuccagcaucgucaucacguccggcgacggcaccaccagcccgaucuccgagcacgacuaccagaucgggggcuacaccgagaagugggagagcggggugaaggacugcgugguccugcacuccuacuucacgagcgacuacuaccagcucuacuccacccagcugagcaccgacaccggcguggagcacgugacguucuucaucuacaacaagaucgucgacgagcccgaggagcacgugcagauccacaccaucgacggguccagcggcguggucaaccccgugauggagcccaucuacgacgagccgaccaccacgaccagcgugccccugugaggacuagucccuguucccagagcccacuuuuuuuucuuuuuuugaaauaaaauagccugucuuucagaucucaaaggcucuuuucagagccaccaaaaaaaaaaaaaaaaaaaaaaaaaaaaaaaaaaaaaaaaaaaaaaaaaaaaaaaaaaaaaaaaaaaaaaaaaaaaaaaaaaaaaaaaaaaaaaaaaaaaa

SEQ ID NO: 20468 - RNA, 1100 nt, Artificial Sequence
  SARS-CoV-2__MT890355.1__ORF3a protein mRNA gc
aggagagucccgcagucggcguccagcggcucugcuuguucgugugugugucguugcaggccuuauucaagcuuaccauggaccuguucaugcgcaucuucaccaucggcaccgugacgcucaagcagggggagaucaaggacgccacccccagcgacuucguccgggccaccgcgaccaucccgauccaggccucccugcccuucggcuggcugaucguggggguggccuuccucgccgucuuccacagcgccuccaagaucaucacgcugaagaagcgcuggcagcuggcgcucagcaagggcgugcacuucgugugcaaccugcugcuccuguucgucaccguguacucccaccuccugcugguggccgccgggcuggaggcccccuuccucuaccuguacgcgcuggucuacuuccuccagagcaucaacuucgugcggaucaucaugcgccuguggcugugcuggaagugccgguccaagaacccccuccuguacgacgccaacuacuuccugugcuggcacaccaacugcuacgacuacugcaucccguacaacagcgugaccuccagcaucgucaucacguccggcgacggcaccaccagccccaucuccgagcacgacuaccagaucgggggcuacaccgagaagugggagagcggggugaaggacugcgugguccuccacuccuacuucacgagcgacuacuaccagcuguacuccacccagcugagcaccgacaccggcguggagcacgugacguucuucaucuacaacaagaucgucgacgagcccgaggagcacgugcagauccacaccaucgacggguccagcggcguggucaaccccgugauggagccgaucuacgacgagcccaccaccacgaccagcgugccccucugaggacuagucccuguucccagagcccacuuuuuuuucuuuuuuugaaauaaaauagccugucuuucagaucucaaaggcucuuuucagagccaccaaaaaaaaaaaaaaaaaaaaaaaaaaaaaaaaaaaaaaaaaaaaaaaaaaaaaaaaaaaaaaaaaaaaaaaaaaaaaaaaaaaaaaaaaaaaaaaaaaaaa

SEQ ID NO: 20469 - RNA, 1100 nt, Artificial Sequence
  SARS-CoV-2__MT890356.1__ORF3a protein mRNA gc
aggagagucccgcagucggcguccagcggcucugcuuguucgugugugugucguugcaggccuuauucaagcuuaccauggaccuguucaugcgcaucuucaccaucggcaccgugacgcucaagcaggucgagaucaaggacgccacccccagcgacuucgugcgggccaccgcgaccaucccgauccaggccucccugcccuucggguggcugaucgugggcgucgcccuccuggccguguuccacagcgccuccaagaucaucacgcugaagaagcgcuggcagcucgcgcugagcaagggggugcacuucgucugcaaccugcuccugcuguucgugaccguguacucccaccuccugcuggucgccgccggccucgaggcccccuuccuguaccuguacgcgcucguguacuuccugcagagcaucaacuucgugcggaucaucaugcgccuguggcucugcuggaagugccgguccaagaacccccugcuguacgacgccaacuacuuccucugcuggcacaccaacugcuacgacuacugcaucccguacaacagcgucaccuccagcaucgugaucacguccggggacggcaccaccagccccaucuccgagcacgacuaccagaucggcggguacaccgagaagugggagagcggcgugaaggacugcgucgugcugcacuccuacuucacgagcgacuacuaccagcuguacuccacccagcucagcaccgacaccgggguggagcacgucacguucuucaucuacaacaagaucguggacgagcccgaggagcacgugcagauccacaccaucgacggcuccagcggggucgugaaccccgugauggagccgaucuacgacgagcccaccaccacgaccagcgucccccugugaggacuagucccuguucccagagcccacuuuuuuuucuuuuuuugaaauaaaauagccugucuuucagaucucaaaggcucuuuucagagccaccaaaaaaaaaaaaaaaaaaaaaaaaaaaaaaaaaaaaaaaaaaaaaaaaaaaaaaaaaaaaaaaaaaaaaaaaaaaaaaaaaaaaaaaaaaaaaaaaaaaaa

SEQ ID NO: 20470 - RNA, 1100 nt, Artificial Sequence
  SARS-CoV-2__MT892981.1__ORF3a protein mRNA gc
aggagagucccgcagucggcguccagcggcucugcuuguucgugugugugucguugcaggccuuauucaagcuuaccauggaccuguucaugcgcaucuucaccaucggcaccgugacgcucaagcagggggagaucaaggacgccacccccagcgacuucguccgggccaccgcgaccaucccgauccaggcccugcugcccuucggcuggcucaucguggggguggcccugcuggccgucuuccacuccgccagcaagaucaucacgcucaagaagcgcuggcagcuggcgcuguccaagggcgugcacuucgugugcaaccuccugcugcuguucgucaccguguacagccaccuccugcucguggccgccgggcuggaggcccccuuccuguaccucuacgcgcuggucuacuuccugcaguccaucaacuucgugcggaucaucaugcgccucuggcugugcuggaagugccggagcaagaacccccugcucuacgacgccaacuacuuccugugcuggcacaccaacugcuacgacuacugcaucccguacaacuccgugaccagcuccaucgucaucacgagcggcgacggcaccaccucccccaucagcgagcacgacuaccagaucgggggcuacaccgagaagugggaguccggggugaaggacugcgugguccugcacagcuacuucacguccgacuacuaccagcucuacagcacccagcuguccaccgacaccggcguggagcacgugacguucuucaucuacaacaagaucgucgacgagcccgaggagcacgugcagauccacaccaucgacgggagcuccggcguggucaaccccgugauggagccgaucuacgacgagcccaccaccacgaccagcgugccccugugaggacuagucccuguucccagagcccacuuuuuuuucuuuuuuugaaauaaaauagccugucuuucagaucucaaaggcucuuuucagagccaccaaaaaaaaaaaaaaaaaaaaaaaaaaaaaaaaaaaaaaaaaaaaaaaaaaaaaaaaaaaaaaaaaaaaaaaaaaaaaaaaaaaaaaaaaaaaaaaaaaaaa

SEQ ID NO: 20471 - RNA, 1100 nt, Artificial Sequence
  SARS-CoV-2__MT892985.1__ORF3a protein mRNA gc
aggagagucccgcagucggcguccagcggcucugcuuguucgugugugugucguugcaggccuuauucaagcuuaccauggaccuguucaugcgcaucuucaccaucggcaccgugacgcucaagcagggggagaucaaggacgccacccccagcgacuucguccgggccaccgcgaccaucccgauccaggccucccugcccuucggcuggcugaucguggggguggcccuccuggccgucuuccagagcgccuccaagaucaucacgcugaagaagcgcuggcagcucgcgcugagcaagggcgugcacuucgugugcaaccugcuccugcuguucgucaccguguacucccaccuccugcugguggccgccgggcucgaggcccccuuccuguaccuguacgcgcucgucuacuuccugcagagcaucaacuucgugcggaucaucaugcgccuguggcucugcuggaagugccgguccaagaacccccugcuguacgacgccaacuacuuccucugcuggcacaccaacugcuacgacuacugcaucccguacaacagcgugaccuccagcaucgucaucacguccggcgacggcaccaccagccccaucuccgagcacgacuaccagaucgggggcuacaccgagaagugggagagcggggugaaggacugcgugguccugcacuccuacuucacgagcgacuacuaccagcuguacuccacccagcucagcaccgacaccggcguggagcacgugacguucuucaucuacaacaagaucgucgacgagcccgaggagcacgugcagauccacaccaucgacggguccagcggcguggucaaccccgugauggagagcaucuacgacgagccgaccaccacgaccuccgugccccugugaggacuagucccuguucccagagcccacuuuuuuuucuuuuuuugaaauaaaauagccugucuuucagaucucaaaggcucuuuucagagccaccaaaaaaaaaaaaaaaaaaaaaaaaaaaaaaaaaaaaaaaaaaaaaaaaaaaaaaaaaaaaaaaaaaaaaaaaaaaaaaaaaaaaaaaaaaaaaaaaaaaaa

SEQ ID NO: 20472 - RNA, 1100 nt, Artificial Sequence
  SARS-CoV-2__MT892988.1__ORF3a protein mRNA gc
aggagagucccgcagucggcguccagcggcucugcuuguucgugugugugucguugcaggccuuauucaagcuuaccauggaccuguucaugcgcaucuucaccaucggcaccgugacgcucaagcagggggagaucaaggacgccacccccagcgacuucguccgggccaccgcgaccaucccgauccaggccucccugcccuucggcuggcugaucguggggguggcccuccuggccgucuuccagagcgccuccaagaucaucacgcugaagaagcgcuggcagcucgcgcugagcaagggcgugcacuucgugugcaaccugcuccugcuguucgucaccguguacucccaccuccugcugguggccgccgggcucgaggcccccuuccuguaccuguacgcgcucgucuacuuccugcagagcaucaacuucgugcggaucaucaugcgccuguggcucugcuggaagugccgguccaagaacccccugaucuacgacgccaacuacuuccugugcuggcacaccaacugcuacgacuacugcaucccguacaacagcgugaccuccagcaucgucaucacguccggcgacggcaccaccagccccaucuccgagcacgacuaccagaucgggggcuacaccgagaagugggagagcggggugaaggacugcgugguccuccacuccuacuucacgagcgacuacuaccagcuguacuccacccagcugagcaccgacaccggcguggagcacgugacguucuucaucuacaacaagaucgucgacgagcccgaggagcacgugcagauccacaccaucgacggguccagcggcguggucaaccccgugauggagccgaucuacgacgagcccaccaccacgaccagcgugccccucugaggacuagucccuguucccagagcccacuuuuuuuucuuuuuuugaaauaaaauagccugucuuucagaucucaaaggcucuuuucagagccaccaaaaaaaaaaaaaaaaaaaaaaaaaaaaaaaaaaaaaaaaaaaaaaaaaaaaaaaaaaaaaaaaaaaaaaaaaaaaaaaaaaaaaaaaaaaaaaaaaaaaa

SEQ ID NO: 20473 - RNA, 1100 nt, Artificial Sequence
  SARS-CoV-2__MT892993.1__ORF3a protein mRNA gc
aggagagucccgcagucggcguccagcggcucugcuuguucgugugugugucguugcaggccuuauucaagcuuaccauggaccuguucaugcgcaucuucaccaucggcaccgugacgcucaagcagggggagaucaaggacgccacccccagcgacuucguccgggccaccgcgaccaucccgauccaggccucccugcccuucggcuggcugaucguggggguggcccucuucgccgucuuccagagcgccuccaagaucaucacgcugaagaagcgcuggcagcuggcgcucagcaagggcgugcacuucgugugcaaccugcugcuccuguucgucaccguguacucccaccuccugcugguggccgccgggcuggaggcccccuuccucuaccuguacgcgcuggucuacuuccuccagagcaucaacuucgugcggaucaucaugcgccuguggcugugcuggaagugccgguccaagaacccccuccuguacgacgccaacuacuuccugugcuggcacaccaacugcuacgacuacugcaucccguacaacagcgugaccuccagcaucgucaucacguccggcgacggcaccaccagccccaucuccgagcacgacuaccagaucgggggcuacaccgagaagugggagagcggggugaaggacugcgugguccuccacuccuacuucacgagcgacuacuaccagcuguacuccacccagcugagcaccgacaccggcguggagcacgugacguucuucaucuacaacaagaucgucgacgagcccgaggagcacgugcagauccacaccaucgacggguccagcggcguggucaaccccgugauggagccgaucuacgacgagcccaccaccacgaccagcgugccccucugaggacuagucccuguucccagagcccacuuuuuuuucuuuuuuugaaauaaaauagccugucuuucagaucucaaaggcucuuuucagagccaccaaaaaaaaaaaaaaaaaaaaaaaaaaaaaaaaaaaaaaaaaaaaaaaaaaaaaaaaaaaaaaaaaaaaaaaaaaaaaaaaaaaaaaaaaaaaaaaaaaaaa

SEQ ID NO: 20474 - RNA, 1100 nt, Artificial Sequence
  SARS-CoV-2__MT893011.1__ORF3a protein mRNA gc
aggagagucccgcagucggcguccagcggcucugcuuguucgugugugugucguugcaggccuuauucaagcuuaccauggaccuguucaugcgcaucuucaccaucggcaccgugacgcucaagcagggggagaucaaggacgccacccccagcgacuucguccgggccaccgcgaccaucccgauccaggccucccugcccuucggcuggcugaucguggggguggcccuccuggccgucuuccagagcgccuccaagaucaucacgcugaagaagcgcuggcagcucgcgcugagcaagggcgugcacuucgugugcaaccugcuccugcuguucgucaccguguacucccaccuccugcugguggccgccgggcucgaggcccccuuccuguaccuguacgcgcucgucuacuuccugcagagcaucaacuucgugcggaucaucaugcgccuguggcucugcuggaagugccgguccaagaacccccuguucuacgacgccaacuacuuccugugcuggcacaccaacugcuacgacuacugcaucccguacaacagcgugaccuccagcaucgucaucacguccggcgacggcaccaccagccccaucuccgagcacgacuaccagaucgggggcuacaccgagaagugggagagcggggugaaggacugcgugguccuccacuccuacuucacgagcgacuacuaccagcuguacuccacccagcugagcaccgacaccggcguggagcacgugacguucuucaucuacaacaagaucgucgacgagcccgaggagcacgugcagauccacaccaucgacguguccagcggggucgugaaccccgugauggagccgaucuacgacgagcccaccaccacgaccagcgucccccucugaggacuagucccuguucccagagcccacuuuuuuuucuuuuuuugaaauaaaauagccugucuuucagaucucaaaggcucuuuucagagccaccaaaaaaaaaaaaaaaaaaaaaaaaaaaaaaaaaaaaaaaaaaaaaaaaaaaaaaaaaaaaaaaaaaaaaaaaaaaaaaaaaaaaaaaaaaaaaaaaaaaaa

SEQ ID NO: 20475 - RNA, 1100 nt, Artificial Sequence
  SARS-CoV-2__MT883503.1__ORF3a protein mRNA gc
aggagagucccgcagucggcguccagcggcucugcuuguucgugugugugucguugcaggccuuauucaagcuuaccauggaccuguucaugcgcaucuucaccaucggcaccgugacgcucaagcagggggagaucaaggacgccacccccagcgacuucguccgggccaccgcgaccaucccgauccaggccucccugcccuucggcuggcugaucguggggguggcccuccuggccgucuuccagagcgccuccaagaucaucacgcugaagaagcgcuggcagcucgcgcugagcaagggcgugcacuucgugugcaaccugcuccugcuguucgucaccguguacucccaccuccugcugguggccgccgggcucgaggcccccuuccuguaccuguacgcgcucgucuacuuccugcagagcaucaacuucgugcggaucaucaugcgccuguggcucugcuggaagugccgguccaagaacccccugcuguacgacgccaacuacuuccucugcuggcacaccaacugcuacgacuacugcaucccguacaacagcgugaccuccagcaucgucaucacguccggcgacggcaccaccagccccaucuccgagcacgacuaccagaucgggggcuacaccgagaagugggagagcggggugaaggacugcgugguccugcacuccuacuucacgagcgacuacuaccagcuguacuccacccagcucagcaccgacaccggcguggagcacgugacguucuucaucuacaacaagaucgucgacgagcuggaggagcacgugcagauccacaccaucgacggguccagcggcguggucaaccccgugauggagcccaucuacgacgagccgaccaccacgaccagcgugccccugugaggacuagucccuguucccagagcccacuuuuuuuucuuuuuuugaaauaaaauagccugucuuucagaucucaaaggcucuuuucagagccaccaaaaaaaaaaaaaaaaaaaaaaaaaaaaaaaaaaaaaaaaaaaaaaaaaaaaaaaaaaaaaaaaaaaaaaaaaaaaaaaaaaaaaaaaaaaaaaaaaaaaa

SEQ ID NO: 20476 - RNA, 1100 nt, Artificial Sequence
  SARS-CoV-2__MT886294.1__ORF3a protein mRNA gc
aggagagucccgcagucggcguccagcggcucugcuuguucgugugugugucguugcaggccuuauucaagcuuaccauggaccuguucaugcgcaucuucaccaucggcaccgugacgcucaagcagggggagaucaaggacgccacccccagcgacuucguccgggccaccgcgaccaucccgauccaggccucccugcccuucggcuggcugaucguggggguggcccuccuggccgucuuccagagcgccuccaagaucaucacgcugaagaagcgcuggcagcucgcgcugagcaagggcgugcacuucgugugcaaccugcuccugcuguucgucaccguguacucccaccuccugcugguggccgccgggcucgaggcccccuuccuguaccuguacgcgcucgucuacuuccugcagagcaucaacuucgugcggaucaucaugcgccuguggcucugcuggaagugccgguccaagaacccccugcuguacgacgccaacuacuuccucugcuggcacaccaacugcuacgacuacugcgugccguacaacagcgucaccuccagcaucgugaucacguccggcgacggcaccaccagccccaucuccgagcacgacuaccagaucgggggcuacaccgagaagugggagagcggggugaaggacugcgucgugcugcacuccuacuucacgagcgacuacuaccagcuguacuccacccagcucagcaccgacaccggcguggagcacgucacguucuucaucuacaacaagaucguggacgagcccgaggagcacgugcagauccacaccaucgacggguccagcggcgucgugaaccccgugauggagccgaucuacgacgagcccaccaccacgaccagcgucccccugugaggacuagucccuguucccagagcccacuuuuuuuucuuuuuuugaaauaaaauagccugucuuucagaucucaaaggcucuuuucagagccaccaaaaaaaaaaaaaaaaaaaaaaaaaaaaaaaaaaaaaaaaaaaaaaaaaaaaaaaaaaaaaaaaaaaaaaaaaaaaaaaaaaaaaaaaaaaaaaaaaaaaa

SEQ ID NO: 20477 - RNA, 1100 nt, Artificial Sequence
  SARS-CoV-2__MT886301.1__ORF3a protein mRNA gc
aggagagucccgcagucggcguccagcggcucugcuuguucgugugugugucguugcaggccuuauucaagcuuaccauggaccuguucaugcgcaucuucaccaucggcaccgugacgcucaagcagggggagaucaaggacgccacccccagcgacuucguccgggccaccgcgaccaucccgauccaggccucccugcccuucggcuggcugaucguggggguggcccuccuggccgucuuccagagcgccuccaagaucaucacgcugaagaaccgcuggcagcucgcgcugagcaagggcgugcacuucgugugcaaccugcuccugcuguucgucaccguguacucccaccuccugcugguggccgccgggcucgaggcccccuuccuguaccuguacgcgcucgucuacuuccugcagagcaucaacuucgugcggaucaucaugcgccuguggcucugcuggaagugccgguccaagaacccccugcuguacgacgccaacuacuuccucugcuggcacaccaacugcuacgacuacugcaucccguacaacagcgugaccuccagcaucgucaucacguccggcgacggcaccaccagccccaucuccgagcacgacuaccagaucgggggcuacaccgagaagugggagagcggggugaaggacugcgugguccugcacuccuacuucacgagcgacuacuaccagcuguacuccacccagcucagcaccgacaccggcguggagcacgugacguucuucaucuacaacaagaucgucgacgagcccgaggagcacgugcagauccacaccaucgacggguccagcggcguggucaaccccgugauggagccgaucuacgacgagcccaccaccacgaccagcgugccccugugaggacuagucccuguucccagagcccacuuuuuuuucuuuuuuugaaauaaaauagccugucuuucagaucucaaaggcucuuuucagagccaccaaaaaaaaaaaaaaaaaaaaaaaaaaaaaaaaaaaaaaaaaaaaaaaaaaaaaaaaaaaaaaaaaaaaaaaaaaaaaaaaaaaaaaaaaaaaaaaaaaaaa

SEQ ID NO: 20478 - RNA, 1100 nt, Artificial Sequence
  SARS-CoV-2__MT886348.1__ORF3a protein mRNA gc
aggagagucccgcagucggcguccagcggcucugcuuguucgugugugugucguugcaggccuuauucaagcuuaccauggaccuguucaugcgcaucuucaccaucggcaccgugacgcucaagcagggggagaucaaggacgccacccccagcgacuucguccgggccaccgcgaccaucccgauccaggccucccugcccuucggcuggcugaucguggggguggcccuccuggccgucuuccacagcgccuccaagaucaucacgcugaagaagcgcuggcagcucgcgcugagcaagggcgugcacuucgugugcaaccugcuccugcuguucgucaccguguacucccaccuccugcugguggccgccggguucgaggcccccuuccucuaccuguacgcgcuggucuacuuccuccagagcaucaacuucgugcggaucaucaugcgccuguggcugugcuggaagugccgguccaagaacccccuccuguacgacgccaacuacuuccugugcuggcacaccaacugcuacgacuacugcaucccguacaacagcgugaccuccagcaucgucaucacguccggcgacggcaccaccagccccaucuccgagcacgacuaccagaucgggggcuacaccgagaagugggagagcggggugaaggacugcgugguccuccacuccuacuucacgagcgacuacuaccagcuguacuccacccagcugagcaccgacaccggcguggagcacgugacguucuucaucuacaacaagaucgucgacgagcccgaggagcacgugcagauccacaccaucgacggguccagcggcguggucaaccccgugauggagccgaucuacgacgagcccaccaccacgaccagcgugccccucugaggacuagucccuguucccagagcccacuuuuuuuucuuuuuuugaaauaaaauagccugucuuucagaucucaaaggcucuuuucagagccaccaaaaaaaaaaaaaaaaaaaaaaaaaaaaaaaaaaaaaaaaaaaaaaaaaaaaaaaaaaaaaaaaaaaaaaaaaaaaaaaaaaaaaaaaaaaaaaaaaaaaa

SEQ ID NO: 20479 - RNA, 1100 nt, Artificial Sequence
  SARS-CoV-2__MT886385.1__ORF3a protein mRNA gc
aggagagucccgcagucggcguccagcggcucugcuuguucgugugugugucguugcaggccuuauucaagcuuaccauggaccuguucaugcgcaucuucaccaucggcaccgugacgcucaagcagggggagaucaaggacgccacccccagcgacuucguccgggccaccgcgaccaucccgauccaggccucccugcccuucggcuggcugaucguggggguggcccuccuggccgucuuccacagcgccuccaagaucaucacgcugaagaagcgcuggcagcucgcgcugagcaagggcgugcacuucgugugcaaccugcuccugcuguucgucaccguguacucccaccuccugcugguggccgccgggcucgaggccagcuuccuguaccuguacgcgcucgucuacuuccugcaguccaucaacuucgugcggaucaucaugcgccuguggcucugcuggaagugccggagcaagaacccccugcuguacgacgccaacuacuuccucugcuggcacaccaacugcuacgacuacugcauccccuacaacuccgugaccagcuccaucgucaucacgagcggcgacggcaccaccuccccgaucagcgagcacgacuaccagaucgggggcuacaccgagaagugggaguccggggugaaggacugcgugguccugcacagcuacuucacguccgacuacuaccagcuguacagcacccagcucuccaccgacaccggcguggagcacgugacguucuucaucuacaacaagaucgucgacgagcccgaggagcacgugcagauccacaccaucgacgggagcagcggcguggucaaccccgugauggagcccaucuacgacgagccgaccaccacgaccuccgugccccugugaggacuagucccuguucccagagcccacuuuuuuuucuuuuuuugaaauaaaauagccugucuuucagaucucaaaggcucuuuucagagccaccaaaaaaaaaaaaaaaaaaaaaaaaaaaaaaaaaaaaaaaaaaaaaaaaaaaaaaaaaaaaaaaaaaaaaaaaaaaaaaaaaaaaaaaaaaaaaaaaaaaaa

SEQ ID NO: 20480 - RNA, 1100 nt, Artificial Sequence
  SARS-CoV-2__MT873050.1__ORF3a protein mRNA gc
aggagagucccgcagucggcguccagcggcucugcuuguucgugugugugucguugcaggccuuauucaagcuuaccauggaccuguucaugcgcaucuucaccaucggcaccgugacgcucaagcagggggagaucaaggacgccacccccagcgacuucguccgggccaccgcgaccaucccgauccaggccucccugcccuucggcuggcugaucguggggguggcccuccuggccgucuuccagagcgccuccaagaucaucacgcugaagaagcgcuggcagcucgcgcugagcaagggcgugcacuucgugugcaaccugcuccugcuguucgucaccguguacucccaccuccugcugguggccgccgggcucgaggcccccuuccuguacuucuacgcgcuggucuacuuccuccagagcaucaacuucgugcggaucaucaugcgccuguggcugugcuggaagugccgguccaagaacccccuccuguacgacgccaacuacuuccugugcuggcacaccaacugcuacgacuacugcaucccguacaacagcgugaccuccagcaucgucaucacguccggcgacggcaucaccagccccaucuccgagcacgacuaccagaucgggggcuacaccgagaagugggagagcggggugaaggacugcgugguccuccacuccuacuucaccagcgacuacuaccagcuguacuccacgcagcugagcaccgacaccggcguggagcacgugaccuucuucaucuacaacaagaucgucgacgagcccgaggagcacgugcagauccacacgaucgacggguccagcggcguggucaaccccgugauggagccgaucuacgacgagcccaccaccaccacgagcgugccccucugaggacuagucccuguucccagagcccacuuuuuuuucuuuuuuugaaauaaaauagccugucuuucagaucucaaaggcucuuuucagagccaccaaaaaaaaaaaaaaaaaaaaaaaaaaaaaaaaaaaaaaaaaaaaaaaaaaaaaaaaaaaaaaaaaaaaaaaaaaaaaaaaaaaaaaaaaaaaaaaaaaaaa

SEQ ID NO: 20481 - RNA, 1100 nt, Artificial Sequence
  SARS-CoV-2__MT873062.1__ORF3a protein mRNA gc
aggagagucccgcagucggcguccagcggcucugcuuguucgugugugugucguugcaggccuuauucaagcuuaccauggaccuguucgugcgcaucuucaccaucggcaccgucacgcucaagcagggggagaucaaggacgccacccccagcgacuucgugcgggccaccgcgaccaucccgauccaggccucccugcccuucggcuggcugaucgugggggucgcccuccuggccguguuccacagcgccuccaagaucaucacgcugaagaagcgcuggcagcucgcgcugagcaagggcgugcacuucgucugcaaccugcuccugcuguucgugaccguguacucccaccuccugcuggucgccgccgggcucgaggcccccuuccuguaccuguacgcgcucguguacuuccugcagagcaucaacuucgugcggaucaucaugcgccuguggcucugcuggaagugccgguccaagaacccccugcuguacgacgccaacuacuuccucugcuggcacaccaacugcuacgacuacugcaucccguacaacagcgucaccuccagcaucgugaucacguccggcgacggcaccaccagccccaucuccgagcacgacuaccagaucgggggcuacaccgagaagugggagagcggggugaaggacugcgucgugcugcacuccuacuucacgagcgacuacuaccagcuguacuccacccagcucagcaccgacaccggcguggagcacgucacguucuucaucuacaacaagaucguggacgagcccgaggagcacgugcagauccacaccaucgacggguccagcggcgucgugaaccccgugauggagccgaucuacgacgagcccaccaccacgaccagcgucccccugugaggacuagucccuguucccagagcccacuuuuuuuucuuuuuuugaaauaaaauagccugucuuucagaucucaaaggcucuuuucagagccaccaaaaaaaaaaaaaaaaaaaaaaaaaaaaaaaaaaaaaaaaaaaaaaaaaaaaaaaaaaaaaaaaaaaaaaaaaaaaaaaaaaaaaaaaaaaaaaaaaaaaa

SEQ ID NO: 20482 - RNA, 1100 nt, Artificial Sequence
  SARS-CoV-2__MT873078.1__ORF3a protein mRNA gc
aggagagucccgcagucggcguccagcggcucugcuuguucgugugugugucguugcaggccuuauucaagcuuaccauggaccuguucaugcgcaucuucaccaucggcaccgugacgcucaagcagggggagaucaaggacgccacccccagcgacuucguccgggccaccgcgaccaucccgauccaggccucccugcccuucggcuggcugaucguggggguggcccuccuggccgucuuccacagcgccuccaagaucaucacgcugaagaagcgcuggcagcucgcgcugagcaagggcgugcacuucgugugcaaccugcuccugcuguucgucaccguguacucccaccuccugcugguggccgccgggcucgaggcccccuuccuguaccuguacgcgcucgucuacuuccugcagagcaucaacuucgugcggaucaucaugcgccuguggcucugcugcaagugccgguccaagaacccccugcuguacgacgccaacuacuuccucugcuggcacaccaacugcuacgacuacugcaucccguacaacagcgugaccuccagcaucgucaucacguccggcgacggcaccaccagccccaucuccgagcacgacuaccagaucgggggcuacaccgagaagugggagagcggggugaaggacugcgugguccugcacuccuacuucacgagcgacuacuaccagcuguacuccacccagcucagcaccgacaccggcguggagcacgugacguucuucaucuacaacaagaucgucgacgagcccgaggagcacgugcagauccacaccaucgacggguccagcggcguggucaaccccgugauggagccgaucuacgacgagcccaccaccacgaccagcgugccccugugaggacuagucccuguucccagagcccacuuuuuuuucuuuuuuugaaauaaaauagccugucuuucagaucucaaaggcucuuuucagagccaccaaaaaaaaaaaaaaaaaaaaaaaaaaaaaaaaaaaaaaaaaaaaaaaaaaaaaaaaaaaaaaaaaaaaaaaaaaaaaaaaaaaaaaaaaaaaaaaaaaaaa

SEQ ID NO: 20483 - RNA, 1100 nt, Artificial Sequence
  SARS-CoV-2__MT873085.1__ORF3a protein mRNA gc
aggagagucccgcagucggcguccagcggcucugcuuguucgugugugugucguugcaggccuuauucaagcuuaccauggaccuguucaugcgcaucuucaccaucggcaccgugacgcucaagcagggggagaucaaggacgccacccccagcgacuucguccgggccaccgcgaccaucccgauccaggccucccugcccuucggcuggcugaucguggggguggcccuccuggccgucuuccacagcgccuccaagaucaucacgcugaagaagcgcuggcagcucgcgcugagcaagggcgugcacuucgugugcaaccugcuccugcuguucgucaccguguacucccacuuccuccugguggccgccgggcuggaggcccccuuccucuaccuguacgcgcuggucuacuuccuccagagcaucaacuucgugcggaucaucaugcgccuguggcugugcuggaagugccgguccaagaacccccuccuguacgacgccaacuacuuccugugcuggcacaccaacugcuacgacuacugcaucccguacaacagcgugaccuccagcaucgucaucacguccggcgacggcaccaccagccccaucuccgagcacgacuaccagaucgggggcuacaccgagaagugggagagcggggugaaggacugcgugguccuccacuccuacuucacgagcgacuacuaccagcuguacuccacccagcugagcaccgacaccggcguggagcacgugacguucuucaucuacaacaagaucgucgacgagcccgaggagcacgugcagauccacaccaucgacggguccagcggcguggucaaccccgugauggagccgaucuacgacgagcccaccaccacgaccagcgugccccucugaggacuagucccuguucccagagcccacuuuuuuuucuuuuuuugaaauaaaauagccugucuuucagaucucaaaggcucuuuucagagccaccaaaaaaaaaaaaaaaaaaaaaaaaaaaaaaaaaaaaaaaaaaaaaaaaaaaaaaaaaaaaaaaaaaaaaaaaaaaaaaaaaaaaaaaaaaaaaaaaaaaaa

SEQ ID NO: 20484 - RNA, 1097 nt, Artificial Sequence
  SARS-CoV-2__MT873087.1__ORF3a protein mRNA gc
aggagagucccgcagucggcguccagcggcucugcuuguucgugugugugucguugcaggccuuauucaagcuuaccauggaccuguucaugcgcaucuucaccaucggcaccgugacgcucaagcagggggagaucaaggacgccacccccagcgacuucguccgggccaccgcgaccaucccgauccaggccucccugcccuucggcuggcugaucguggggguggcccuccuggccgucuuccacagcgccuccaagaucaucacgcugaagaagcgcuggcagcucgcgcugagcaagggcgugcacuucgugugcaaccugcuccugcuguucgucaccguguacucccaccuccugcugguggccgccgggcucgaggcccccuuccuguaccuguacgcgcucgucuacuuccugcagagcaucaacuucgugcggaucaucaugcgccuguggcucugcuggaagugccgguccaagaacccccugcuguacgacgccaacuacuuccucugcuggcacaccaacugcuacgacuacugcaucccguacaacagcgugaccuccagcaucgucaucacguccggcgacggcaccaccagccccaucuccgagcacgacuaccagaucgggggcuacaccgagaagugggagagcggggugaaggacugcgugguccugcacuccuacuucacgagcgacuacuaccagcuguacuccacccagcucagcaccgacaccggcguggagcacgugacguucuucaucuacaacaagaucgucgacgagcccgaggagcacgugcagauccacaccaucgacggguccagcggcgugaaccccgucauggagccgaucuacgacgagcccaccaccacgaccagcgugccccugugaggacuagucccuguucccagagcccacuuuuuuuucuuuuuuugaaauaaaauagccugucuuucagaucucaaaggcucuuuucagagccaccaaaaaaaaaaaaaaaaaaaaaaaaaaaaaaaaaaaaaaaaaaaaaaaaaaaaaaaaaaaaaaaaaaaaaaaaaaaaaaaaaaaaaaaaaaaaaaaaaaaaa

SEQ ID NO: 20485 - RNA, 1100 nt, Artificial Sequence
  SARS-CoV-2__MT873115.1__ORF3a protein mRNA gc
aggagagucccgcagucggcguccagcggcucugcuuguucgugugugugucguugcaggccuuauucaagcuuaccauggaccuguucaugcgcaucuucaccaucggcaccgugacgcucaagcagggggagaucaaggacgccacccccagcgacuucguccgggccaccgcgaccaucccgauccaggccucccugcccuucggcuggcugaucguggggguggcccuccuggccgucuuccacagcgccuccaagaucaucacgcugaagaagcgcuggcagcucgcgcugagcaagggcgugcacuucgugugcaaccugcuccugcuguucgucaccguguacucccaccuccugcugguggccgccgggcucgaggcccccuuccuguaccuguacgcgcucgucuacuuccugcagagcaucaacuucgugcggaucaucaugcgccuguggcucugcuggaagugccgguccaagaacccccugcuguacgacgccaacuacuuccucugcuggcacaccaacugcuacgacuacugcaucccguacaacagcgugaccuccagcaucaucaucacguccggcgacggcaccaccagccccaucuccgagcacgacuaccagaucgggggcuacaccgagaagugggagagcggggucaaggacugcguggugcugcacuccuacuucacgagcgacuacuaccagcuguacuccacccagcucagcaccgacaccggcgucgagcacgugacguucuucaucuacaacaagaucguggacgagcccgaggagcacguccagauccacaccaucgacggguccagcggcguggugaaccccgucauggagccgaucuacgacgagcccaccaccacgaccagcgugccccugugaggacuagucccuguucccagagcccacuuuuuuuucuuuuuuugaaauaaaauagccugucuuucagaucucaaaggcucuuuucagagccaccaaaaaaaaaaaaaaaaaaaaaaaaaaaaaaaaaaaaaaaaaaaaaaaaaaaaaaaaaaaaaaaaaaaaaaaaaaaaaaaaaaaaaaaaaaaaaaaaaaaaa

SEQ ID NO: 20486 - RNA, 1100 nt, Artificial Sequence
  SARS-CoV-2__MT873125.1__ORF3a protein mRNA gc
aggagagucccgcagucggcguccagcggcucugcuuguucgugugugugucguugcaggccuuauucaagcuuaccauggaccuguucaugcgcaucuucaccaucggcaccgugacgcucaagcagggggagaucaaggacgccacccccagcgacuucguccgggccaccgcgaccaucccgauccaggccucccugcccuucggcuggcugaucguggggguggcccuccuggccgucuuccacagcgccuccaagaucaucacgcugaagaagcgcuggcagcucgcgcugagcaagggcgugcacuucgugugcaaccugcuccugcuguucgucaccguguacucccaccuccugcugguggccgccgggcucgaggcccccuuccuguaccuguacgcgcucgucuacuuccugcagagcaucaacuucgugcggaucaucaugcgccuguggcucugcuggaagugccgguccaagaacccccugcuguacgacgccaacuacuuccucugcuggcacaccaacugcuacgacuacugcaucccguacaacagcgugaccuccagcaucgucaucacguccggcgacggcaccaccagccccaucuccgagcacgacuaccagaucgggggcuacaccgagaagugggagagcggggugaaggacugcgugguccugcacuccuacuucacgagcgacuacuaccagcuguacuccacccagcucagcaccgacaccggcguggagcacgugacguucuucaucuacaacaagaucgucgacgagcccgaggagcacgugcagauccacaccaucgacggguccagccgcguggucaaccccgugauggagccgaucuacgacgagcccaccaccacgaccagcgugccccugugaggacuagucccuguucccagagcccacuuuuuuuucuuuuuuugaaauaaaauagccugucuuucagaucucaaaggcucuuuucagagccaccaaaaaaaaaaaaaaaaaaaaaaaaaaaaaaaaaaaaaaaaaaaaaaaaaaaaaaaaaaaaaaaaaaaaaaaaaaaaaaaaaaaaaaaaaaaaaaaaaaaaa

SEQ ID NO: 20487 - RNA, 1100 nt, Artificial Sequence
  SARS-CoV-2__MT873139.1__ORF3a protein mRNA gc
aggagagucccgcagucggcguccagcggcucugcuuguucgugugugugucguugcaggccuuauucaagcuuaccauggaccuguucaugcgcaucuucaccaucggcaccgugacgcucaagcagggggagaucaaggacgccacccccagcgacuucguccgggccaccgcgaccaucccgauccaggccucccugcccuucggcuggcugaucguggggguggcccuccuggccgucuuccacagcgccuccaagaucaucacgcugaagaagcgcuggcagcucgcgcugagcaagggcgugcacuucgugugcaaccugcuccugcuguucgucaccguguacucccaccuccugcugguggccgucgggcucgaggcccccuuccuguaccuguacgcccucguguacuuccugcagagcaucaacuucgugcggaucaucaugcgccuguggcucugcuggaagugccgguccaagaacccccugcuguacgacgcgaacuacuuccucugcuggcacaccaacugcuacgacuacugcaucccguacaacagcgucaccuccagcaucgugaucacguccggcgacggcaccaccagccccaucuccgagcacgacuaccagaucgggggcuacaccgagaagugggagagcggggugaaggacugcgucgugcugcacuccuacuucacgagcgacuacuaccagcuguacuccacccagcucagcaccgacaccggcguggagcacgucacguucuucaucuacaacaagaucgccgacgagcccgaggagcacgugcagauccacaccaucgacggguccagcggcguggucaaccccgugauggagccgaucuacgacgagcccaccaccacgaccagcgugccccugugaggacuagucccuguucccagagcccacuuuuuuuucuuuuuuugaaauaaaauagccugucuuucagaucucaaaggcucuuuucagagccaccaaaaaaaaaaaaaaaaaaaaaaaaaaaaaaaaaaaaaaaaaaaaaaaaaaaaaaaaaaaaaaaaaaaaaaaaaaaaaaaaaaaaaaaaaaaaaaaaaaaaa

SEQ ID NO: 20488 - RNA, 1100 nt, Artificial Sequence
  SARS-CoV-2__MT873208.1__ORF3a protein mRNA gc
aggagagucccgcagucggcguccagcggcucugcuuguucgugugugugucguugcaggccuuauucaagcuuaccauggaccuguucaugcgcaucuucaccaucggcaccgugacgcucaagcagggggagaucaaggacgccacccccagcgacuucguccgggccaccgcgaccaucccgauccaggccucccugcccuucggcuggcugaucguggggguggcccuccuggccgucuuccacagcgccuccaagaucaucacgcugaagaagcgcuggcagcucgcgcugagcaagggcgugcacuucgugugcaaccugcuccugcuguucgucaccguguacucccaccuccugcugguggccgccgggcucgaggcccccuuccuguaccuguacgcgcucgucuacuuccugcagagcaucaacuucgugcggaucaucaugcgccuguggcucugcuggaagugccgguccaagaacccccugcuguacgacgccaacuacuuccucugcuggcacaccaacugcuacgacuacugcaucccgcacaacagcgugaccuccagcaucgucaucacguccggcgacggcaccaccagccccaucuccgagcacgacuaccagaucgggggcuacaccgagaagugggagagcggggugaaggacugcgugguccugcacuccuacuucacgagcgacuacuaccagcuguacuccacccagcucagcaccgacaccggcguggagcacgugacguucuucaucuacaacaagaucgucgacgagcccgaggagcacgugcagauccacaccaucgacggguccagcggcguggucaaccccgugauggagccgaucuacgacgagcccaccaccacgaccagcgugccccugugaggacuagucccuguucccagagcccacuuuuuuuucuuuuuuugaaauaaaauagccugucuuucagaucucaaaggcucuuuucagagccaccaaaaaaaaaaaaaaaaaaaaaaaaaaaaaaaaaaaaaaaaaaaaaaaaaaaaaaaaaaaaaaaaaaaaaaaaaaaaaaaaaaaaaaaaaaaaaaaaaaaaa

SEQ ID NO: 20489 - RNA, 1100 nt, Artificial Sequence
  SARS-CoV-2__MT873256.1__ORF3a protein mRNA gc
aggagagucccgcagucggcguccagcggcucugcuuguucgugugugugucguugcaggccuuauucaagcuuaccauggaccuguucaugcgcaucuucaccaucggcaccgugacgcucaagcagggggagaucaaggacgccacccccagcgacuucguccgggccaccgcgaccaucccgauccaggccucccugcccuucggcuggcugaucguggggguggcccuccuggccgucuuccacagcgccuccaagaucaucacgcugaagaagcgcuggcagcucgcgcugagcaagggcgugcacuucgugugcaaccugcuccugcuguucgucaccguguacucccaccuccugcugguggccgccgggcucgaggcccccuuccuguaccuguacagccucgucuacuuccugcaguccaucaacuucgugcggaucaucaugcgccuguggcucugcuggaagugccggagcaagaacccccugcuguacgacgcgaacuacuuccucugcuggcacaccaacugcuacgacuacugcaucccguacaacuccgugaccagcuccaucgucaucacgagcggcgacggcaccaccucccccaucagcgagcacgacuaccagaucgggggcuacaccgagaagugggaguccggggugaaggacugcgugguccugcacagcuacuucacguccgacuacuaccagcuguacagcacccagcucuccaccgacaccggcguggagcacgugacguucuucaucuacaacaagaucgucgacgagcccgaggagcacgugcagauccacaccaucgacgggagcagcggcguggucaaccccgugauggagccgaucuacgacgagcccaccaccacgaccuccgugccccugugaggacuagucccuguucccagagcccacuuuuuuuucuuuuuuugaaauaaaauagccugucuuucagaucucaaaggcucuuuucagagccaccaaaaaaaaaaaaaaaaaaaaaaaaaaaaaaaaaaaaaaaaaaaaaaaaaaaaaaaaaaaaaaaaaaaaaaaaaaaaaaaaaaaaaaaaaaaaaaaaaaaaa

SEQ ID NO: 20490 - RNA, 1100 nt, Artificial Sequence
  SARS-CoV-2__MT873272.1__ORF3a protein mRNA gc
aggagagucccgcagucggcguccagcggcucugcuuguucgugugugugucguugcaggccuuauucaagcuuaccauggaccuguucaugcgcaucuucaccaucggcaccgugacgcucaagcagggggagaucaaggacgccacccccagcgacuucguccgggccaccgcgaccaucccgauccaggccucccugcccuucggcuggcugaucguggggguggcccuccuggccgucuuccacagcgccuccaagaucaucacgcugaagaagcgcuggcagcucgcgcugagcaagggcgugcacuucgugugcaaccugcuccugcuguucgucaccguguacucccaccuccugcugguggccgccgggcucgaggcccccuuccuguaccuguacgcgcucgucuacuuccugcagagcaucaacuucgugcgggugaucaugcgccuguggcucugcuggaagugccgguccaagaacccccugcuguacgacgccaacuacuuccucugcuggcacaccaacugcuacgacuacugcaucccguacaacagcgucaccuccagcaucgugaucacguccggcgacggcaccaccagccccaucuccgagcacgacuaccagaucgggggcuacaccgagaagugggagagcggggugaaggacugcgucgugcugcacuccuacuucacgagcgacuacuaccagcuguacuccacccagcucagcaccgacaccggcguggagcacgucacguucuucaucuacaacaagaucguggacgagcccgaggagcacgugcagauccacaccaucgacggguccagcggcgucgugaaccccgugauggagccgaucuacgacgagcccaccaccacgaccagcgucccccugugaggacuagucccuguucccagagcccacuuuuuuuucuuuuuuugaaauaaaauagccugucuuucagaucucaaaggcucuuuucagagccaccaaaaaaaaaaaaaaaaaaaaaaaaaaaaaaaaaaaaaaaaaaaaaaaaaaaaaaaaaaaaaaaaaaaaaaaaaaaaaaaaaaaaaaaaaaaaaaaaaaaaa

SEQ ID NO: 20491 - RNA, 1100 nt, Artificial Sequence
  SARS-CoV-2__MT873280.1__ORF3a protein mRNA gc
aggagagucccgcagucggcguccagcggcucugcuuguucgugugugugucguugcaggccuuauucaagcuuaccauggaccuguucaugcgcaucuucaccaucggcaccgugacgcucaagcagggggagaucaaggacgccacccccagcgacuucguccgggccaccgcgaccaucccgauccaggccucccugcccuucggcuggcugaucguggggguggcccuccuggccgucuuccacagcgccuccaagaucaucacgcugaagaagcgcuggcagcucgcgcugagcaagggcgugcacuucgugugcaaccugcuccugcuguucgucaccguguacucccaccuccugcugguggccgccgggcucgaggcccccuuccuguaccuguacgcgcucgucuacuuccugcagagcaucaacuucgugcggaucaucaugcgccuguggcucugcuggaagugccgguccaagaacccccugcuguacgacgccaacuacuuccucugcuggcacaccaacugcuacgacuacugcaucccguacaacagcgugaccuccagcaucgucaucacguccggcgacggcaucaccagccccaucuccgagcacgacuaccagaucgggggcuacaccgagaagugggagagcggggugaaggacugcgugguccugcacuccuacuucaccagcgacuacuaccagcuguacuccacgcagcucagcaccgacaccggcguggagcacgugaccuucuucaucuacaacaagaucgucgacgagcccgaggagcacgugcagauccacacgaucgacggguccagcggcguggucaaccccgugauggagccgaucuacgacgagcccaccaccaccacgagcgugccccugugaggacuagucccuguucccagagcccacuuuuuuuucuuuuuuugaaauaaaauagccugucuuucagaucucaaaggcucuuuucagagccaccaaaaaaaaaaaaaaaaaaaaaaaaaaaaaaaaaaaaaaaaaaaaaaaaaaaaaaaaaaaaaaaaaaaaaaaaaaaaaaaaaaaaaaaaaaaaaaaaaaaaa

SEQ ID NO: 20492 - RNA, 1100 nt, Artificial Sequence
  SARS-CoV-2__MT873282.1__ORF3a protein mRNA gc
aggagagucccgcagucggcguccagcggcucugcuuguucgugugugugucguugcaggccuuauucaagcuuaccauggaccuguucaugcgcaucuucaccaucggcacccucacgcugaagcagggggagaucaaggacgccacccccagcgacuucgugcgggccaccgcgaccaucccgauccaggccucccugcccuucggcuggcucaucgucgggguggcccugcuggccguguuccagagcgccuccaagaucaucacgcucaagaagcgcuggcagcuggcgcugagcaagggcguccacuucgugugcaaccuccugcugcuguucgugaccgucuacucccaccuccugcucguggccgccgggcuggaggcccccuuccuguaccucuacgcgcugguguacuuccugcagagcaucaacuucguccggaucaucaugcgccucuggcugugcuggaagugccgguccaagaacccccugcucuacgacgccaacuacuuccugugcuggcacaccaacugcuacgacuacugcaucccguacaacagcgugaccuccagcaucgugaucacguccggcgacggcaccaccagccccaucuccgagcacgacuaccagaucgggggcuacaccgagaagugggagagcggggucaaggacugcguggugcugcacuccuacuucacgagcgacuacuaccagcucuacuccacccagcugagcaccgacaccggcgucgagcacgugacguucuucaucuacaacaagaucguggacgagcccgaggagcacguccagauccacaccaucgacggguccagcggcguggugaaccccgucauggagccgaucuacgacgagcccaccaccacgaccagcgugccccugugaggacuagucccuguucccagagcccacuuuuuuuucuuuuuuugaaauaaaauagccugucuuucagaucucaaaggcucuuuucagagccaccaaaaaaaaaaaaaaaaaaaaaaaaaaaaaaaaaaaaaaaaaaaaaaaaaaaaaaaaaaaaaaaaaaaaaaaaaaaaaaaaaaaaaaaaaaaaaaaaaaaaa

SEQ ID NO: 20493 - RNA, 1100 nt, Artificial Sequence
  SARS-CoV-2__MT873298.1__ORF3a protein mRNA gc
aggagagucccgcagucggcguccagcggcucugcuuguucgugugugugucguugcaggccuuauucaagcuuaccauggaccuguucaugcgcaucuucaccaucggcaccgugacgcucaagcagggggagaucaaggacgccacccccagcgacuucguccgggccaccgcgaccaucccgauccaggccucccugcccuucggcuggcugaucguggggguggcccuccuggccgucuuccacagcgccuccaagaucaucacgcugaagaagcgcuggcagcucgcgcugagcaagggcgugcacuucgugugcaaccugcuccugcuguucgucaccguguacucccaccuccugcugguggccgccgggcucgaggcgccccugcuguaccucuacgcccuggucuacuuccugcagagcaucaacuucgugcggaucaucaugcgccucuggcugugcuggaagugccgguccaagaacccccugcucuacgacgccaacuacuuccugugcuggcacaccaacugcuacgacuacugcaucccguacaacagcgugaccuccagcaucgucaucacguccggcgacggcaccaccagccccaucuccgagcacgacuaccagaucgggggcuacaccgagaagugggagagcggggugaaggacugcgugguccugcacuccuacuucacgagcgacuacuaccagcucuacuccacccagcugagcaccgacaccggcguggagcacgugacguucuucaucuacaacaagaucgucgacgagcccgaggagcacgugcagauccacaccaucgacggguccagcggcguggucaaccccgugauggagccgaucuacgacgagcccaccaccacgaccagcgugccccugugaggacuagucccuguucccagagcccacuuuuuuuucuuuuuuugaaauaaaauagccugucuuucagaucucaaaggcucuuuucagagccaccaaaaaaaaaaaaaaaaaaaaaaaaaaaaaaaaaaaaaaaaaaaaaaaaaaaaaaaaaaaaaaaaaaaaaaaaaaaaaaaaaaaaaaaaaaaaaaaaaaaaa

SEQ ID NO: 20494 - RNA, 1100 nt, Artificial Sequence
  SARS-CoV-2__MT873299.1__ORF3a protein mRNA gc
aggagagucccgcagucggcguccagcggcucugcuuguucgugugugugucguugcaggccuuauucaagcuuaccauggaccuguucaugcgcaucuucaccaucggcaccgugacgcucaagcagggggagaucaaggacgccacccccagcgacuucguccgggccaccgcgaccaucccgauccaggccucccugcccuucggcuggcugaucguggggguggcccuccuggccgucuuccacagcgccuccaagaucaucacgcugaagaagcgcuggcagcucgcgcugagcaagggcgugcacuucgugugcaaccugcuccugcuguucgucaccguguacucccaccuccugcugguggccgccgggcucgaggcccccuuccuguaccuguacgcgcucgucuacuuccugcagagcaucaacuucgugcggaucaucaugcgccuguggcucugcuggaagugccgguccaagaacccccugcuguacgacgccaacuacuuccucugcuggcacaccaacugcuacgacuacugcaucccguacaacagcgugaccuccagcaucgucaucacguccggcgacggcaagaccagccccaucuccgagcacgacuaccagaucgggggcuacaccgagaagugggagagcggggugaaggacugcgugguccugcacuccuacuucaccagcgacuacuaccagcuguacuccacgcagcucagcaccgacaccggcguggagcacgugaccuucuucaucuacaacaagaucgucgacgagcccgaggagcacgugcagauccacacgaucgacggguccagcggcguggucaaccccgugauggagccgaucuacgacgagcccaccaccaccacgagcgugccccugugaggacuagucccuguucccagagcccacuuuuuuuucuuuuuuugaaauaaaauagccugucuuucagaucucaaaggcucuuuucagagccaccaaaaaaaaaaaaaaaaaaaaaaaaaaaaaaaaaaaaaaaaaaaaaaaaaaaaaaaaaaaaaaaaaaaaaaaaaaaaaaaaaaaaaaaaaaaaaaaaaaaaa

SEQ ID NO: 20495 - RNA, 1100 nt, Artificial Sequence
  SARS-CoV-2__MT873363.1__ORF3a protein mRNA gc
aggagagucccgcagucggcguccagcggcucugcuuguucgugugugugucguugcaggccuuauucaagcuuaccauggaccuguucaugcgcaucuucaccaucggcaccgugacgcucaagcagggggagaucaaggacgccacccccagcuacuucguccgggccaccgcgaccaucccgauccaggccucccugcccuucggcuggcugaucguggggguggcccuccuggccgucuuccacagcgccuccaagaucaucacgcugaagaagcgcuggcagcucgcgcugagcaagggcgugcacuucgugugcaaccugcuccugcuguucgucaccguguacucccaccuccugcugguggccgccgggcucgaggcccccuuccuguaccuguacgcgcucgucuacuuccugcagagcaucaacuucgugcggaucaucaugcgccuguggcucugcuggaagugccgguccaagaacccccugcuguacgacgccaacuacuuccucugcuggcacaccaacugcuacgacuacugcaucccguacaacagcgugaccuccagcaucgucaucacguccggcgacggcaccaccagccccaucuccgagcacgacuaccagaucgggggcuacaccgagaagugggagagcggggugaaggacugcgugguccugcacuccuacuucacgagcgacuacuaccagcuguacuccacccagcucagcaccgacaccggcguggagcacgugacguucuucaucuacaacaagaucgucgacgagcccgaggagcacgugcagauccacaccaucgacggguccagcggcguggucaaccccgugauggagccgaucuacgacgagcccaccaccacgaccagcgugccccugugaggacuagucccuguucccagagcccacuuuuuuuucuuuuuuugaaauaaaauagccugucuuucagaucucaaaggcucuuuucagagccaccaaaaaaaaaaaaaaaaaaaaaaaaaaaaaaaaaaaaaaaaaaaaaaaaaaaaaaaaaaaaaaaaaaaaaaaaaaaaaaaaaaaaaaaaaaaaaaaaaaaaa

SEQ ID NO: 20496 - RNA, 1100 nt, Artificial Sequence
  SARS-CoV-2__MT873375.1__ORF3a protein mRNA gc
aggagagucccgcagucggcguccagcggcucugcuuguucgugugugugucguugcaggccuuauucaagcuuaccauggaccuguucaugcgcaucuucaccaucggcaccgugacgcucaagcagggggagaucaaggacgccacccccagcgacuucguccgggccaccgcgaccaucccgauccaggccucccugcccuucggcuggcugaucguggggguggcccuccuggccgucuuccacagcgccuccaagaucaucacgcugaagaagcgcuggcagcucgcgcugagcaagggcgugcacuucgugugcaaccugcuccugcuguucgucaccguguacucccacauccuccugguggccgccgggcuggaggcccccuuccucuaccuguacgcgcuggucuacuuccuccagagcaucaacuucgugcggaucaucaugcgccuguggcugugcuggaagugccgguccaagaacccccuccuguacgacgccaacuacuuccugugcuggcacaccaacugcuacgacuacugcaucccguacaacagcgugaccuccagcaucgucaucacguccggcgacggcaccaccagccccaucuccgagcacgacuaccagaucgggggcuacaccgagaagugggagagcggggugaaggacugcgugguccuccacuccuacuucacgagcgacuacuaccagcuguacuccacccagcugagcaccgacaccggcguggagcacgugacguucuucaucuacaacaagaucgucgacgagcccgaggagcacgugcagauccacaccaucgacggguccagcggcguggucaaccccgugauggagccgaucuacgacgagcccaccaccacgaccagcgugccccucugaggacuagucccuguucccagagcccacuuuuuuuucuuuuuuugaaauaaaauagccugucuuucagaucucaaaggcucuuuucagagccaccaaaaaaaaaaaaaaaaaaaaaaaaaaaaaaaaaaaaaaaaaaaaaaaaaaaaaaaaaaaaaaaaaaaaaaaaaaaaaaaaaaaaaaaaaaaaaaaaaaaaa

SEQ ID NO: 20497 - RNA, 1100 nt, Artificial Sequence
  SARS-CoV-2__MT876554.1__ORF3a protein mRNA gc
aggagagucccgcagucggcguccagcggcucugcuuguucgugugugugucguugcaggccuuauucaagcuuaccauggaccuguucaugcgcaucuucaccaucggcaccgugacgcucaagcagggggagaucaaggacgccacccccagcgacuucguccgggccaccgcgaccaucccgauccaggccucccugcccuucggcuggcugaucguggggguggcccuccuggccgucuuccagagcgccuccaagaucaucacgcugaagaagcgcuggcagcucgcgcugagcaagggcgugcacuucgugugcaaccugcuccugcuguucgucaccguguacucccaccuccugcugguggccgccgggcucgaggcccccuuccuguaccuguacgcgcucgucuacuuccugcagagcaucaacuucgugcggaucaucaugcgccuguggcucugcuggaagugccgguccaagaacccccugcuguacgacgccaacuacuuccucugccugcacaccaacugcuacgacuacugcaucccguacaacagcgugaccuccagcaucgucaucacguccggcgacggcaccaccagccccaucuccgagcacgacuaccagaucgggggcuacaccgagaagugggagagcggggugaaggacugcgugguccugcacuccuacuucacgagcgacuacuaccagcucuacuccacccagcugagcaccgacaccggcguggagcacgugacguucuucaucuacaacaagaucgucgacgagcccgaggagcacgugcagauccacaccaucgacggguccagcggcguggucaaccccgugauggagccgaucuacgacgagcccaccaccacgaccagcgugccccugugaggacuagucccuguucccagagcccacuuuuuuuucuuuuuuugaaauaaaauagccugucuuucagaucucaaaggcucuuuucagagccaccaaaaaaaaaaaaaaaaaaaaaaaaaaaaaaaaaaaaaaaaaaaaaaaaaaaaaaaaaaaaaaaaaaaaaaaaaaaaaaaaaaaaaaaaaaaaaaaaaaaaa

SEQ ID NO: 20498 - RNA, 1100 nt, Artificial Sequence
  SARS-CoV-2__MT872492.1__ORF3a protein mRNA gc
aggagagucccgcagucggcguccagcggcucugcuuguucgugugugugucguugcaggccuuauucaagcuuaccauggaccuguucaugcgcaucuucaccaucggcaccgugacgcucaagcagggggagaucaaggacgccacccccagcgacuucguccgggccaccgcgaccaucccgauccaggccucccugcccuucggcuggcugaucguggggguggcccuccuggccgucuuccagagcgccuccaagaucaucacgcugaagaagcgcuggcagcucgcgcugagcaagggcgugcacuucgugugcaaccugcuccugcuguucgucaccguguacucccaccuccugcugguggccgccgggcucgaggccagcuuccuguaccuguacgcgcucgucuacuuccugcaguccaucaacuucgugcggaucaucaugcgccuguggcucugcuggaagugccggagcaagaacccccugcuguacgacgccaacuacuuccucugcuggcacaccaacugcuacgacuacugcauccccuacaacuccgugaccagcuccaucgucaucacgagcggcgacggcaccaccuccccgaucagcgagcacgacuaccagaucgggggcuacaccgagaagugggaguccggggugaaggacugcgugguccugcacagcuacuucacguccgacuacuaccagcuguacagcacccagcucuccaccgacaccggcguggagcacgugacguucuucaucuacaacaagaucgucgacgagcccgaggagcacgugcagauccacaccaucgacgggagcagcggcguggucaaccccgugauggagcccaucuacgacgagccgaccaccacgaccuccgugccccugugaggacuagucccuguucccagagcccacuuuuuuuucuuuuuuugaaauaaaauagccugucuuucagaucucaaaggcucuuuucagagccaccaaaaaaaaaaaaaaaaaaaaaaaaaaaaaaaaaaaaaaaaaaaaaaaaaaaaaaaaaaaaaaaaaaaaaaaaaaaaaaaaaaaaaaaaaaaaaaaaaaaaa

SEQ ID NO: 20499 - RNA, 1100 nt, Artificial Sequence
  SARS-CoV-2__MT872494.1__ORF3a protein mRNA gc
aggagagucccgcagucggcguccagcggcucugcuuguucgugugugugucguugcaggccuuauucaagcuuaccaugggccuguucaugcgcaucuucaccaucgggaccgugacgcucaagcagggcgagaucaaggacgccacccccagcgacuucguccgggccaccgcgaccaucccgauccaggccucccugcccuucggguggcugaucgugggcguggcccuccuggccgucuuccagagcgccuccaagaucaucacgcugaagaagcgcuggcagcucgcgcugagcaagggggugcacuucgugugcaaccugcuccugcuguucgucaccguguacucccaccuccugcugguggccgccggccucgaggcccccuuccuguaccuguacgcgcucgucuacuuccugcagagcaucaacuucgugcggaucaucaugcgccuguggcucugcuggaagugccgguccaagaacccccugcuguacgacgccaacuacuuccucugcuggcacaccaacugcuacgacuacugcaucccguacaacagcgugaccuccagcaucgucaucacguccggcgacgggaccaccagccccaucuccgagcacgacuaccagaucggcggguacaccgagaagugggagagcggcgugaaggacugcgugguccugcacuccuacuucacgagcgacuacuaccagcuguacuccacccagcucagcaccgacaccgggguggagcacgugacguucuucaucuacaacaagaucgucgacgagcccgaggagcacgugcagauccacaccaucgacggcuccagcggcguggucaaccccgugauggagccgaucuacgacgagcccaccaccacgaccagcgugccccugugaggacuagucccuguucccagagcccacuuuuuuuucuuuuuuugaaauaaaauagccugucuuucagaucucaaaggcucuuuucagagccaccaaaaaaaaaaaaaaaaaaaaaaaaaaaaaaaaaaaaaaaaaaaaaaaaaaaaaaaaaaaaaaaaaaaaaaaaaaaaaaaaaaaaaaaaaaaaaaaaaaaaa

SEQ ID NO: 20500 - RNA, 1097 nt, Artificial Sequence
  SARS-CoV-2__MT846012.1__ORF3a protein mRNA gc
aggagagucccgcagucggcguccagcggcucugcuuguucgugugugugucguugcaggccuuauucaagcuuaccauggaccuguucaugcgcaucuucaccaucggcaccgugacgcucaagcagggggagaucaaggacgccacccccagcgacuucguccgggccaccgcgaccaucccgauccaggccucccugcccuucggcuggcugaucguggggguggcccuccuggccgucuuccagagcgccuccaagaucaucacgcugaagaagcgcuggcagcucgcgcugagcaagggcgugcacuucgugugcaaccugcuccugcuguucgucaccguguacucccaccuccugcugguggccgccgggcucgaggcccccuuccuguaccuguacgcgcucgucuacuuccugcagagcaucaacuucgugcggaucaucaugcgccuguggcucugcuggaagugccgguccaagaacccccugcuguacgacgccaacuacuuccucugcuggcacaccaacugcuacgacuacugcaucccguacaacagcgugaccuccagcaucgucaucacguccggcgacggcaccaccagccccaucuccgagcacgacuaccagaucgggggcuacaccgagaagugggagagcggggugaaggacugcgugguccugcacuccuacuucacgagcgacuacuaccagcuguacuccacccagcucagcaccgacaccggcguggagcacgugacguucuucaucuacaacaagaucgucgacgagcccgaggagcacgugcagauccacaccaucgacggguccagcggcguggaccccgucauggagccgaucuacgacgagcccaccaccacgaccagcgugccccugugaggacuagucccuguucccagagcccacuuuuuuuucuuuuuuugaaauaaaauagccugucuuucagaucucaaaggcucuuuucagagccaccaaaaaaaaaaaaaaaaaaaaaaaaaaaaaaaaaaaaaaaaaaaaaaaaaaaaaaaaaaaaaaaaaaaaaaaaaaaaaaaaaaaaaaaaaaaaaaaaaaaaa

SEQ ID NO: 20501 - RNA, 1100 nt, Artificial Sequence
  SARS-CoV-2__MT846420.1__ORF3a protein mRNA gc
aggagagucccgcagucggcguccagcggcucugcuuguucgugugugugucguugcaggccuuauucaagcuuaccauggaccuguucaugcgcaucuucaccaucggcaccgugacgcucaagcaggucgagaucaaggacgccacccccagcgacuucgugcgggccaccgcgaccaucccgauccaggccucccugcccuucggguggcugaucgugggcgucgcccuccuggccguguuccagagcgccuccaagaucaucacgcugaagaagcgcuggcagcucgcgcugagcaagggggugcacuucgucugcaaccugcuccugcuguucgugaccguguacucccaccuccugcuggucgccgccggccucgaggcccccuuccuguaccuguacgcgcucguguacuuccugcagagcaucaacuucgugcggaucaucaugcgccuguggcucugcuggaagugccgguccaagaacccccugcuguacgacgccaacuacuuccucugcuggcacaccaacugcuacgacuacugcaucccguacaacagcgucaccuccagcaucgugaucacguccggggacggcaccaccagccccaucuccgagcacgacuaccagaucggcggguacaccgagaagugggagagcggcgugaaggacugcgucgugcugcacuccuacuucacgagcgacuacuaccagcuguacuccacccagcucagcaccgacaccgggguggagcacgucacguucuucaucuacaacaagaucguggacgagcccgaggagcacgugcagauccacaccaucgacggcuccagcggggucgugaaccccgugauggagccgaucuacgacgagcccaccaccacgaccagcgucccccugugaggacuagucccuguucccagagcccacuuuuuuuucuuuuuuugaaauaaaauagccugucuuucagaucucaaaggcucuuuucagagccaccaaaaaaaaaaaaaaaaaaaaaaaaaaaaaaaaaaaaaaaaaaaaaaaaaaaaaaaaaaaaaaaaaaaaaaaaaaaaaaaaaaaaaaaaaaaaaaaaaaaaa

SEQ ID NO: 20502 - RNA, 1100 nt, Artificial Sequence
  SARS-CoV-2__MT846431.1__ORF3a protein mRNA gc
aggagagucccgcagucggcguccagcggcucugcuuguucgugugugugucguugcaggccuuauucaagcuuaccauggaccuguucaugcgcaucuucaccaucggcaccgugacgcucaagcagggggagaucaaggacgccacccccagcgacuucguccgggccaccgcgaccaucccgauccaggccucccugcccuucggcuggcugaucguggggguggcccuccuggccgucuuccacagcgccuccaagaucaucacgcugaagaagcgcuggcagcucgcgcugagcaagggcgugcacuucgugugcaaccugcuccugcuguucgucaccguguacucccaccuccugcugguggccgccgggcucgaggcccccuuccuguaccuguacgcgcucgucuacuuccugcagagcaucaacuucgugcggaucaucaugcgccuguggcucugcuggaagugccgguccaagaacccccugcuguacgacgccaacuacuuccucugcuggcacaccaacugcuacgacuacugcaucccguacaacagcgugaccuccagcaucgucaucacguccggcgacggcaccaccagccccaucuccgagcacgacuaccagaucgggggcuacaccgagaagugggagagcggggugaaggacugcgugguccugcacuccuacuucacgagcgacuacuaccagcuguacuccacccagcucagcaccgacaccggcguggagcacgugacguucuucaucuacaacaagaucgucgacgagcccgaggagcacgugcagauccacaccaucgacggguccagcggcguggucaaccccgugauggagccgaucuacgacgagagcaccaccacgaccuccgugccccugugaggacuagucccuguucccagagcccacuuuuuuuucuuuuuuugaaauaaaauagccugucuuucagaucucaaaggcucuuuucagagccaccaaaaaaaaaaaaaaaaaaaaaaaaaaaaaaaaaaaaaaaaaaaaaaaaaaaaaaaaaaaaaaaaaaaaaaaaaaaaaaaaaaaaaaaaaaaaaaaaaaaaa

SEQ ID NO: 20503 - RNA, 1100 nt, Artificial Sequence
  SARS-CoV-2__MT846433.1__ORF3a protein mRNA gc
aggagagucccgcagucggcguccagcggcucugcuuguucgugugugugucguugcaggccuuauucaagcuuaccauggaccuguucaugcgcaucuucaccaucggcaccgugacgcucaagcagggggagaucaaggacgccacccccagcgacuucguccgggccaccgcgaccaucccgauccaggccucccugcccuucggcuggcugaucguggggguggcccuccugagcgucuuccaguccgccagcaagaucaucacgcugaagaagcgcuggcagcucgcccuguccaagggcgugcacuucgugugcaaccugcuccugcuguucgucaccguguacagccaccuccugcugguggcggccgggcucgaggcccccuuccuguaccuguacgcccucgucuacuuccugcaguccaucaacuucgugcggaucaucaugcgccuguggcucugcuggaagugccggagcaagaacccccugcuguacgacgcgaacuacuuccucugcuggcacaccaacugcuacgacuacugcaucccguacaacuccgugaccagcuccaucgucaucacgagcggcgacggcaccaccucccccaucagcgagcacgacuaccagaucgggggcuacaccgagaagugggaguccggggugaaggacugcgugguccugcacagcuacuucacguccgacuacuaccagcuguacagcacccagcucuccaccgacaccggcguggagcacgugacguucuucaucuacaacaagaucgucgacgagcccgaggagcacgugcagauccacaccaucgacgggagcagcggcguggucaaccccgugauggagccgaucuacgacgagcccaccaccacgaccuccgugccccugugaggacuagucccuguucccagagcccacuuuuuuuucuuuuuuugaaauaaaauagccugucuuucagaucucaaaggcucuuuucagagccaccaaaaaaaaaaaaaaaaaaaaaaaaaaaaaaaaaaaaaaaaaaaaaaaaaaaaaaaaaaaaaaaaaaaaaaaaaaaaaaaaaaaaaaaaaaaaaaaaaaaaa

SEQ ID NO: 20504 - RNA, 1100 nt, Artificial Sequence
  SARS-CoV-2__MT846483.1__ORF3a protein mRNA gc
aggagagucccgcagucggcguccagcggcucugcuuguucgugugugugucguugcaggccuuauucaagcuuaccauggaccuguucaugcgcaucuucaccaucggcaccgugacguucaagcagggggagaucaaggacgccacccccagcgacuucguccgggccaccgcgaccaucccgauccaggccucccuccccuucggcuggcugaucguggggguggcccugcucgccgucuuccagagcgccuccaagaucaucacgcugaagaagcgcuggcagcuggcgcucagcaagggcgugcacuucgugugcaaccugcugcuccuguucgucaccguguacucccaccuccugcugguggccgccgggcuggaggcccccuuccucuaccuguacgcgcuggucuacuuccuccagagcaucaacuucgugcggaucaucaugcgccuguggcugugcuggaagugccgguccaagaacccccuccuguacgacgccaacuacuuccugugcuggcacaccaacugcuacgacuacugcaucccguacaacagcgugaccuccagcaucgucaucacguccggcgacggcaccaccagccccaucuccgagcacgacuaccagaucgggggcuacaccgagaagugggagagcggggugaaggacugcgugguccuccacuccuacuucacgagcgacuacuaccagcuguacuccacccagcugagcaccgacaccggcguggagcacgugacguucuucaucuacaacaagaucgucgacgagcccgaggagcacgugcagauccacaccaucgacggguccagcggcguggucaaccccgugauggagccgaucuacgacgagcccaugaccaccacgagcgugccccucugaggacuagucccuguucccagagcccacuuuuuuuucuuuuuuugaaauaaaauagccugucuuucagaucucaaaggcucuuuucagagccaccaaaaaaaaaaaaaaaaaaaaaaaaaaaaaaaaaaaaaaaaaaaaaaaaaaaaaaaaaaaaaaaaaaaaaaaaaaaaaaaaaaaaaaaaaaaaaaaaaaaaa

SEQ ID NO: 20505 - RNA, 1100 nt, Artificial Sequence
  SARS-CoV-2__MT846503.1__ORF3a protein mRNA gc
aggagagucccgcagucggcguccagcggcucugcuuguucgugugugugucguugcaggccuuauucaagcuuaccauggaccuguucaugcgcaucuucaccaucggcaccgugacgcucaagcagggggagaucaaggacgccacccccagcgacuucguccgggccaccgcgaccaucccgauccaggccucccugcccuucggcuggcugaucguggggguggcccuccuggccgucuuccacagcgccuccaagaucaucacgcugaagaagcgcuggcagcucgcgcugagcaagggcguguacuucgugugcaaccugcuccugcuguucgucaccguguacucccaccuccugcugguggccgccgggcucgaggcccccuuccuguaccuguacgcgcucgucuacuuccugcagagcaucaacuucgugcggaucaucaugcgccuguggcucugcuggaagugccgguccaagaacccccugcuguacgacgccaacuacuuccucugcuggcacaccaacugcuacgacuacugcaucccguacaacagcgugaccuccagcaucgucaucacguccggcgacggcaccaccagccccaucuccgagcacgacuaccagaucgggggcuacaccgagaagugggagagcggggugaaggacugcgugguccugcacuccuacuucacgagcgacuacuaccagcuguacuccacccagcucagcaccgacaccggcguggagcacgugacguucuucaucuacaacaagaucgucgacgagcccgaggagcacgugcagauccacaccaucgacggguccagcggcguggucaaccccgugauggagccgaucuacgacgagcccaccaccacgaccagcgugccccugugaggacuagucccuguucccagagcccacuuuuuuuucuuuuuuugaaauaaaauagccugucuuucagaucucaaaggcucuuuucagagccaccaaaaaaaaaaaaaaaaaaaaaaaaaaaaaaaaaaaaaaaaaaaaaaaaaaaaaaaaaaaaaaaaaaaaaaaaaaaaaaaaaaaaaaaaaaaaaaaaaaaaa

SEQ ID NO: 20506 - RNA, 1100 nt, Artificial Sequence
  SARS-CoV-2__MT846557.1__ORF3a protein mRNA gc
aggagagucccgcagucggcguccagcggcucugcuuguucgugugugugucguugcaggccuuauucaagcuuaccauggaccuguucaugcgcaucuucaccaucggcaccgugacgcucaagcagagcgagaucaaggacgccacccccuccgacuucguccgggccaccgcgaccaucccgauccaggccagccugcccuucggguggcugaucgugggcguggcccuccuggccgucuuccacuccgccagcaagaucaucacgcugaagaagcgcuggcagcucgcgcuguccaagggggugcacuucgugugcaaccugcuccugcuguucgucaccguguacagccaccuccugcugguggccgccggccucgaggcccccuuccuguaccuguacgcgcucgucuacuuccugcaguccaucaacuucgugcggaucaucaugcgccuguggcucugcuggaagugccggagcaagaacccccugcuguacgacgccaacuacuuccucugcuggcacaccaacugcuacgacuacugcaucccguacaacuccgugaccagcuccaucgucaucacgagcggggacggcaccaccucccccaucagcgagcacgacuaccagaucggcggguacaccgagaagugggaguccggcgugaaggacugcgugguccugcacagcuacuucacguccgacuacuaccagcuguacagcacccagcucuccaccgacaccgggguggagcacgugacguucuucaucuacaacaagaucgucgacgagcccgaggagcacgugcagauccacaccaucgacggcagcagcgggguggucaaccccgugauggagccgaucuacgacgagcccaccaccacgaccuccgugccccugugaggacuagucccuguucccagagcccacuuuuuuuucuuuuuuugaaauaaaauagccugucuuucagaucucaaaggcucuuuucagagccaccaaaaaaaaaaaaaaaaaaaaaaaaaaaaaaaaaaaaaaaaaaaaaaaaaaaaaaaaaaaaaaaaaaaaaaaaaaaaaaaaaaaaaaaaaaaaaaaaaaaaa

SEQ ID NO: 20507 - RNA, 1100 nt, Artificial Sequence
  SARS-CoV-2__MT846561.1__ORF3a protein mRNA gc
aggagagucccgcagucggcguccagcggcucugcuuguucgugugugugucguugcaggccuuauucaagcuuaccauggaccuguucaugcgcaucuucaccaucggcaccgugacgcucaagcagggggagaucaaggacgccacccccagcgacuucguccgggccaccgcgaccaucccgauccaggccucccugcccuucggcuggcugaucguggggguggcccuccuggccgucuuccagagcgccuccaagaucaucacgcugaagaagcgcuggcagcucgcgcugagcaagggcgugcacuucgugugcaaccugcuccugcuguucgucaccguguacucccaccuccugcugguggccgccgggcucgaggcccccuuccuguaccuguacgcgcucgucuacuuccugcagagcaucaacuucgugcggaucaucaugcgccugugccucugcuggaagugccgguccaagaacccccugcuguacgacgccaacuacuuccucugcuggcacaccaacugcuacgacuacugcaucccguacaacagcgugaccuccagcaucgucaucacguccggcgacggcaccaccagccccaucuccgagcacgacuaccagaucgggggcuacaccgagaagugggagagcggggugaaggacugcgugguccugcacuccuacuucacgagcgacuacuaccagcuguacuccacccagcucagcaccgacaccggcguggagcacgugacguucuucaucuacaacaagaucgucgacgagcccgaggagcacgugcagauccacaccaucgacggguccagcggcguggucaaccccgugauggagccgaucuacgacgagcccaccaccacgaccagcgugccccugugaggacuagucccuguucccagagcccacuuuuuuuucuuuuuuugaaauaaaauagccugucuuucagaucucaaaggcucuuuucagagccaccaaaaaaaaaaaaaaaaaaaaaaaaaaaaaaaaaaaaaaaaaaaaaaaaaaaaaaaaaaaaaaaaaaaaaaaaaaaaaaaaaaaaaaaaaaaaaaaaaaaaa

SEQ ID NO: 20508 - RNA, 1100 nt, Artificial Sequence
  SARS-CoV-2__MT846613.1__ORF3a protein mRNA gc
aggagagucccgcagucggcguccagcggcucugcuuguucgugugugugucguugcaggccuuauucaagcuuaccauggaccuguucaugcgcaucuucaccaucggcaccgugacgcucaagcagggggagaucaaggacgccacccccagcgacuucguccgggccaccgcgaccaucccgauccaggccucccugcccuucggcuggcugaucguggggguggcccuccuggccgucuuccagagcgccuccaagaucaucacgcugaagaagcgcuggcagcucgcgcugagcaagggcgugcacuucgugugcaaccugcuccugcuguucgucaccguguacucccaccuccugcugguggccgccgggcucgaggcccccuuccuguaccuguacgcgcucgucuacuuccugcagagcaucaacuucgugcggaucaucaugcgccugugccucugcuggaagugccgguccaagaacccccugcuguacgacgccaacuacuuccucugcuggcacaccaacugcuacgacuacugcaucccguacaacagcgugaccuccagcaucgucaucacguccggcgacggcaccaccagccccaucuccgagcacgacuaccagaucgggggcuacaccgagaagugggagagcggggugaaggacugcgugguccugcacuccuacuucacgagcgacuacuaccagcuguacuccacccagcucagcaccgacaccggcguggagcacgugacguucuucaucuacaacaagaucgucgacgagcccgaggagcacgugcagaucuacaccaucgacggguccagcggcguggucaaccccgugauggagccgaucuacgacgagcccaccaccacgaccagcgugccccugugaggacuagucccuguucccagagcccacuuuuuuuucuuuuuuugaaauaaaauagccugucuuucagaucucaaaggcucuuuucagagccaccaaaaaaaaaaaaaaaaaaaaaaaaaaaaaaaaaaaaaaaaaaaaaaaaaaaaaaaaaaaaaaaaaaaaaaaaaaaaaaaaaaaaaaaaaaaaaaaaaaaaa

SEQ ID NO: 20509 - RNA, 1100 nt, Artificial Sequence
  SARS-CoV-2__MT846636.1__ORF3a protein mRNA gc
aggagagucccgcagucggcguccagcggcucugcuuguucgugugugugucguugcaggccuuauucaagcuuaccauggaccuguucaugcgcaucuucaccaucggcaccgugacgcucaagcagggggagaucaaggacgccacccccagcgacuucguccgggccaccgcgaccaucccgauccaggccucccugcccuucggcuggcugaucguggggguggcccuccuggccgucuuccacagcgccuccaagaucaucacgcugaagaagcgcuggcagcucgcgcugagcaagggcgugcacuucgugugcaaccugcuccugcuguucgucaccguguacucccaccuccugcugguggccgccgggcucgaggcccccuuccuguaccuguacgcgcucgucuacuuccugcagagcaucaacuucgugcggaucaucaugcgccuguggcucugcuggaagugccgguccaagaacccccugcuguacgacgccaacuacuuccucugcuggcacaccaacugcuacgacuacugcaucccguacaacagcgugaccuccagcaucgucaucacgcugggcgacggcaccaccucccccaucagcgagcacgacuaccagaucgggggcuacaccgagaagugggaguccggggugaaggacugcgugguccugcacagcuacuucacguccgacuacuaccagcucuacagcacccagcuguccaccgacaccggcguggagcacgugacguucuucaucuacaacaagaucgucgacgagcccgaggagcacgugcagauccacaccaucgacgggagcuccggcguggucaaccccgugauggagccgaucuacgacgagcccaccaccacgaccagcgugccccugugaggacuagucccuguucccagagcccacuuuuuuuucuuuuuuugaaauaaaauagccugucuuucagaucucaaaggcucuuuucagagccaccaaaaaaaaaaaaaaaaaaaaaaaaaaaaaaaaaaaaaaaaaaaaaaaaaaaaaaaaaaaaaaaaaaaaaaaaaaaaaaaaaaaaaaaaaaaaaaaaaaaaa

SEQ ID NO: 20510 - RNA, 1100 nt, Artificial Sequence
  SARS-CoV-2__MT846666.1__ORF3a protein mRNA gc
aggagagucccgcagucggcguccagcggcucugcuuguucgugugugugucguugcaggccuuauucaagcuuaccauggaccuguucaugcgcaucuucaccaucggcaccgugacgcucaagcagggggagaucaaggacgccacccccagcuacuucguccgggccaccgcgaccaucccgauccaggccucccugcccuucggcuggcugaucguggggguggcccuccuggccgucuuccagagcgccuccaagaucaucacgcugaagaagcgcuggcagcucgcgcugagcaagggcgugcacuucgugugcaaccugcuccugcuguucgucaccguguacucccaccuccugcugguggccgccgggcucgaggcccccuuccuguaccuguacgcgcucgucuacuuccugcagagcaucaacuucgugcggaucaucaugcgccuguggcucugcuggaagugccgguccaagaacccccugcuguacgacgccaacuacuuccucugcuggcacaccaacugcuacgacuacugcaucccguacaacagcgugaccuccagcaucgucaucacguccggcgacggcaccaccagccccaucuccgagcacgacuaccagaucgggggcuacaccgagaagugggagagcggggugaaggacugcgugguccugcacuccuacuucacgagcgacuacuaccagcuguacuccacccagcucagcaccgacaccggcguggagcacgugacguucuucaucuacaacaagaucgucgacgagcccgaggagcacgugcagauccacaccaucgacggguccagcggcguggucaaccccgugauggagccgaucuacgacgagcccaccaccacgaccagcgugccccugugaggacuagucccuguucccagagcccacuuuuuuuucuuuuuuugaaauaaaauagccugucuuucagaucucaaaggcucuuuucagagccaccaaaaaaaaaaaaaaaaaaaaaaaaaaaaaaaaaaaaaaaaaaaaaaaaaaaaaaaaaaaaaaaaaaaaaaaaaaaaaaaaaaaaaaaaaaaaaaaaaaaaa

SEQ ID NO: 20511 - RNA, 1100 nt, Artificial Sequence
  SARS-CoV-2__MT846668.1__ORF3a protein mRNA gc
aggagagucccgcagucggcguccagcggcucugcuuguucgugugugugucguugcaggccuuauucaagcuuaccauggaccuguucaugcgcaucuucaccaucggcaccgugacgcucaagcagggggagaucaaggacgccacccccagcgacuucguccgggccaccgcgaccaucccgauccaggccucccugcccuucggcugguucaucguggggguggcccugcucgccgucuuccagagcgccuccaagaucaucacgcugaagaagcgcuggcagcuggcgcucagcaagggcgugcacuucgugugcaaccugcugcuccuguucgucaccguguacucccaccuccugcugguggccgccgggcuggaggcccccuuccucuaccuguacgcgcuggucuacuuccuccagagcaucaacuucgugcggaucaucaugcgccuguggcugugcuggaagugccgguccaagaacccccuccuguacgacgccaacuacuuccugugcuggcacaccaacugcuacgacuacugcaucccguacaacagcgugaccuccagcaucgucaucacguccggcgacggcaccaccagccccaucuccgagcacgacuaccagaucgggggcuacaccgagaagugggagagcggggugaaggacugcgugguccuccacuccuacuucacgagcgacuacuaccagcuguacuccacccagcugagcaccgacaccggcguggagcacgugacguucuucaucuacaacaagaucgucgacgagcccgaggagcacgugcagauccacaccaucgacggguccagcggcguggucaaccccgugauggagccgaucuacgacgagcccaccaccacgaccagcgugccccucugaggacuagucccuguucccagagcccacuuuuuuuucuuuuuuugaaauaaaauagccugucuuucagaucucaaaggcucuuuucagagccaccaaaaaaaaaaaaaaaaaaaaaaaaaaaaaaaaaaaaaaaaaaaaaaaaaaaaaaaaaaaaaaaaaaaaaaaaaaaaaaaaaaaaaaaaaaaaaaaaaaaaa

SEQ ID NO: 20512 - RNA, 1100 nt, Artificial Sequence
  SARS-CoV-2__MT846689.1__ORF3a protein mRNA gc
aggagagucccgcagucggcguccagcggcucugcuuguucgugugugugucguugcaggccuuauucaagcuuaccauggaccuguucaugcgcaucuucaccaucggcaccgugacgcucaagcagggggagaucaaggacgccacccccagcgacuucguccgggccaccgcgaccaucccgauccaggccucccugcccuucggcuggcugaucguggggguggcccuccuggccgucuuccagagcgccuccaagaucaucacgcugaagaagcgcuggcagcucgcgcugagcaagggcgugcacuucgugugcaaccugcuccugcuguucgucaccguguacucccaccuccugcugguggccgccgggcucgaggcccccuuccuguaccuguacgcgcucgucuacuuccugcagagcaucaacuucgugaucaucaucaugcggcuguggcucugcuggaagugccgcuccaagaacccccugcuguacgacgccaacuacuuccucugcuggcacaccaacugcuacgacuacugcaucccguacaacagcgugaccuccagcaucgucaucacguccggcgacggcaccaccagccccaucuccgagcacgacuaccagaucgggggcuacaccgagaagugggagagcggggugaaggacugcgugguccugcacuccuacuucacgagcgacuacuaccagcuguacuccacccagcucagcaccgacaccggcguggagcacgugacguucuucaucuacaacaagaucgucgacgagcccgaggagcacgugcagauccacaccaucgacggguccagcggcguggucaaccccgugauggagccgaucuacgacgagcccaccaccacgaccagcgugccccugugaggacuagucccuguucccagagcccacuuuuuuuucuuuuuuugaaauaaaauagccugucuuucagaucucaaaggcucuuuucagagccaccaaaaaaaaaaaaaaaaaaaaaaaaaaaaaaaaaaaaaaaaaaaaaaaaaaaaaaaaaaaaaaaaaaaaaaaaaaaaaaaaaaaaaaaaaaaaaaaaaaaaa

SEQ ID NO: 20513 - RNA, 1100 nt, Artificial Sequence
  SARS-CoV-2__MT847210.1__ORF3a protein mRNA gc
aggagagucccgcagucggcguccagcggcucugcuuguucgugugugugucguugcaggccuuauucaagcuuaccauggaccuguucaugcgcaucuucaccaucggcaccgugacgcucaagcagggggagaucaaggacgccacccccagcgacuucguccgggccaccgcgaccaucccgauccaggccucccugcccuucggcuggcugaucgugguggucgcccuccuggccguguuccagagcgccuccaagaucaucacgcugaagaagcgcuggcagcucgcgcugagcaagggggugcacuucgucugcaaccugcuccugcuguucgugaccguguacucccaccuccugcuggucgccgccggccucgaggcccccuuccuguaccuguacgcgcucguguacuuccugcagagcaucaacuucgugcggaucaucaugcgccuguggcucugcuggaagugccgguccaagaacccccugcuguacgacgccaacuacuuccucugcuggcacaccaacugcuacgacuacugcaucccguacaacagcgucaccuccagcaucgugaucacguccggggacggcaccaccagccccaucuccgagcacgacuaccagaucggcggguacaccgagaagugggagagcggcgugaaggacugcgucgugcugcacuccuacuucacgagcgacuacuaccagcuguacuccacccagcucagcaccgacaccgggguggagcacgucacguucuucaucuacaacaagaucguggacgagcccgaggagcacgugcagauccacaccaucgacggcuccagcggggucgugaaccccgugauggagccgaucuacgacgagcccaccaccacgaccagcgucccccugugaggacuagucccuguucccagagcccacuuuuuuuucuuuuuuugaaauaaaauagccugucuuucagaucucaaaggcucuuuucagagccaccaaaaaaaaaaaaaaaaaaaaaaaaaaaaaaaaaaaaaaaaaaaaaaaaaaaaaaaaaaaaaaaaaaaaaaaaaaaaaaaaaaaaaaaaaaaaaaaaaaaaa

SEQ ID NO: 20514 - RNA, 1100 nt, Artificial Sequence
  SARS-CoV-2__MT847211.1__ORF3a protein mRNA gc
aggagagucccgcagucggcguccagcggcucugcuuguucgugugugugucguugcaggccuuauucaagcuuaccauggaccuguucaugcgcaucuucaccaucggcaccgugacgcucaagcagggggagaucaaggacgccacccccagcgacuucguccgggccaccgcgaccaucccgauccaggccucccugcccuucggcuggcugaucguggggguggcccuccuggccgucuuccagagcgccuccaagaucaucacgcugaagaagcgcuggcagcucgcgcugagcaagggcgugcacuucgugugcaaccugcuccugcuguucgucaccguguacucccaccuccugcugguggccgccgggcucgaggcccccuuccuguaccuguacgcgcucgucuacuuccugcagagcaucaacuucgugcggaucaucaugcgccuguggcucugcuggaagugccgguccaagaacccccugcuguacgacgccaacuacuuccucugcuggcacaccaacugcuacgacuacugcaucccguacaacagcgugaccuccagcaucgucaucacgcugggcgacggcaccaccucccccaucagcgagcacgacuaccagaucgggggcuacaccgagaagugggaguccggggugaaggacugcgugguccugcacagcuacuucacguccgacuacuaccagcucuacagcacccagcuguccaccgacaccggcguggagcacgugacguucuucaucuacaacaagaucgucgacgagcccgaggagcacgugcagauccacaccaucgacgggagcuccggcguggucaaccccgugauggagccgaucuacgacgagcccaccaccacgaccagcgugccccugugaggacuagucccuguucccagagcccacuuuuuuuucuuuuuuugaaauaaaauagccugucuuucagaucucaaaggcucuuuucagagccaccaaaaaaaaaaaaaaaaaaaaaaaaaaaaaaaaaaaaaaaaaaaaaaaaaaaaaaaaaaaaaaaaaaaaaaaaaaaaaaaaaaaaaaaaaaaaaaaaaaaaa

SEQ ID NO: 20515 - RNA, 1100 nt, Artificial Sequence
  SARS-CoV-2__MT847220.1__ORF3a protein mRNA gc
aggagagucccgcagucggcguccagcggcucugcuuguucgugugugugucguugcaggccuuauucaagcuuaccauggaccuguucaugcgcaucuucaccaucggcaccgugacgcucaagcagggggagaucaaggacgccacccccagcgacuucguccgggccaccgcgaccaucccgauccaggccucccugcccuucggcuggcugaucguggggguggcccuccuggccgucuuccagagcgccuccaagaucaucacgcugaagaagcgcuggcagcucgcgcugagcaagggcgugcacuucgugugcaaccugcuccugcuguucgucaccguguacucccaccuccugcugguggccgccgggcucgaggcccccuuccuguaccuguacgcgcucgucuacuuccugcagagcaucaacuucgugcggaucaucaugcgccuguggcucugcuggaagugccgguccaagaacccccugcuguacgacgccaacuacuuccucugcuggcacaccaacugcuacuacuacugcaucccguacaacagcgugaccuccagcaucgucaucacguccggcgacggcaccaccagccccaucuccgagcacgacuaccagaucgggggcuacaccgagaagugggagagcggggugaaggacugcgugguccugcacuccuacuucacgagcgacuacuaccagcuguacuccacccagcucagcaccgacaccggcguggagcacgugacguucuucaucuacaacaagaucgucgacgagcccgaggagcacgugcagauccacaccaucgacggguccagcggcguggucaaccccgugauggagccgaucuacgacgagcccaccaccacgaccagcgugccccugugaggacuagucccuguucccagagcccacuuuuuuuucuuuuuuugaaauaaaauagccugucuuucagaucucaaaggcucuuuucagagccaccaaaaaaaaaaaaaaaaaaaaaaaaaaaaaaaaaaaaaaaaaaaaaaaaaaaaaaaaaaaaaaaaaaaaaaaaaaaaaaaaaaaaaaaaaaaaaaaaaaaaa

SEQ ID NO: 20516 - RNA, 1100 nt, Artificial Sequence
  SARS-CoV-2__MT847228.1__ORF3a protein mRNA gc
aggagagucccgcagucggcguccagcggcucugcuuguucgugugugugucguugcaggccuuauucaagcuuaccauggaccuguucaugcgcaucuucaccaucggcaccgugacgcucaagcagggggagaucaaggacgccacccccagcgacuucguccgggccaccgcgaccaucccgauccaggccucccugcccuucggcuggcugaucguggggguggcccuccuggccgucuuccagagcgccuccaagaucaucacgcugaagaagcgcuggcagcucgcgcugagcaagggcgugcacuucgugugcaaccugcuccugcuguucgucaccguguacucccaccuccugcugguggccgccgggcucgaggcccccuuccuguaccuguacgcgcucgucuacuuccugcagagcaucaacuucgugcggaucaucaugcgccuguggcucugcuggaagugccgguccaagaacccccugcuguacgacgccaacuacuuccucugcuggcacaccaacugcuacgacuacugcaucccguacaacagcgugaccuccagcaucgucaucacguccggcgacggcaccaccagccccaucuccgagcacgacuaccagaucgggggcuacaccgagaagugggagagcggggugaaggacugcgugguccugcacuccuacuucacgagcgacuacuaccagcuguacuccacccagcucagcaccgacaccggcguggagcacgugacguucuucaucuacaacaagaucgucgacgaccccgaggcccacgugcagauccacaccaucgacggguccagcggcguggucaaccccgugauggagccgaucuacgacgagcccaccaccacgaccagcgugccccugugaggacuagucccuguucccagagcccacuuuuuuuucuuuuuuugaaauaaaauagccugucuuucagaucucaaaggcucuuuucagagccaccaaaaaaaaaaaaaaaaaaaaaaaaaaaaaaaaaaaaaaaaaaaaaaaaaaaaaaaaaaaaaaaaaaaaaaaaaaaaaaaaaaaaaaaaaaaaaaaaaaaaa

SEQ ID NO: 20517 - RNA, 1100 nt, Artificial Sequence
  SARS-CoV-2__MT843309.1__ORF3a protein mRNA gc
aggagagucccgcagucggcguccagcggcucugcuuguucgugugugugucguugcaggccuuauucaagcuuaccauggaccuguucaugcgcaucuucaccaucggcaccgugacgcucaagcagggggagaucaaggacgccacccccagcgacuucguccgggccaccgcgaccaucccgauccaggccucccugcccuucggcuggcugaucguggggguggcccuccuggccgucuuccacagcgccuccaagaucaucacgcugaagaagcgcuggcagcucgcgcuguucaagggcgugcacuucgugugcaaccugcuccugcuguucgucaccguguacagccaccuccugcugguggccgccgggcucgaggcccccuuccuguaccuguacgcgcucgucuacuuccugcaguccaucaacuucgugcggaucaucaugcgccuguggcucugcuggaagugccggagcaagaacccccugcuguacgacgccaacuacuuccucugcuggcacaccaacugcuacgacuacugcaucccguacaacuccgugaccagcuccaucgucaucacgagcggcgacggcaccaccucccccaucagcgagcacgacuaccagaucgggggcuacaccgagaagugggaguccggggugaaggacugcgugguccugcacagcuacuucacguccgacuacuaccagcuguacagcacccagcucuccaccgacaccggcguggagcacgugacguucuucaucuacaacaagaucgucgacgagcccgaggagcacgugcagauccacaccaucgacgggagcuccggcguggucaaccccgugauggagccgaucuacgacgagcccaccaccacgaccagcgugccccugugaggacuagucccuguucccagagcccacuuuuuuuucuuuuuuugaaauaaaauagccugucuuucagaucucaaaggcucuuuucagagccaccaaaaaaaaaaaaaaaaaaaaaaaaaaaaaaaaaaaaaaaaaaaaaaaaaaaaaaaaaaaaaaaaaaaaaaaaaaaaaaaaaaaaaaaaaaaaaaaaaaaaa

SEQ ID NO: 20518 - RNA, 1100 nt, Artificial Sequence
  SARS-CoV-2__MT844023.1__ORF3a protein mRNA gc
aggagagucccgcagucggcguccagcggcucugcuuguucgugugugugucguugcaggccuuauucaagcuuaccauggaccuguucaugcgcaucuucaccaucggcaccgugacgcucaagcagggggagaucaaguacgccacccccagcgacuucguccgggccaccgcgaccaucccgauccaggccucccugcccuucggcuggcugaucguggggguggcccuccuggccgucuuccagagcgccuccaagaucaucacgcugaagaagcgcuggcagcucgcgcugagcaagggcgugcacuucgugugcaaccugcuccugcuguucgucaccguguacucccaccuccugcugguggccgccgggcucgaggcccccuuccuguaccuguacgcgcucgucuacuuccugcagagcaucaacuucgugcggaucaucaugcgccuguggcucugcuggaagugccgguccaagaacccccugcuguacgacgccaacuacuuccucugcuggcacaccaacugcuacgacuacugcaucccguacaacagcgugaccuccagcaucgucaucacguccggcgacggcaccaccagccccaucuccgagcacgacuaccagaucgggggcuacaccgagaagugggagagcggggugaaggacugcgugguccugcacuccuacuucacgagcgacuacuaccagcuguacuccacccagcucagcaccgacaccggcguggagcacgugacguucuucaucuacaacaagaucgucgacgagcccgaggagcacgugcagauccacaccaucgacggguccagcggcguggucaaccccgugauggagccgaucuacgacgagcccaccaccacgaccagcgugccccugugaggacuagucccuguucccagagcccacuuuuuuuucuuuuuuugaaauaaaauagccugucuuucagaucucaaaggcucuuuucagagccaccaaaaaaaaaaaaaaaaaaaaaaaaaaaaaaaaaaaaaaaaaaaaaaaaaaaaaaaaaaaaaaaaaaaaaaaaaaaaaaaaaaaaaaaaaaaaaaaaaaaaa

SEQ ID NO: 20519 - RNA, 1100 nt, Artificial Sequence
  SARS-CoV-2__MT844027.1__ORF3a protein mRNA gc
aggagagucccgcagucggcguccagcggcucugcuuguucgugugugugucguugcaggccuuauucaagcuuaccauggaccuguucaugcgcaucuucaccaucggcaccgugacgcucaagcagggggagaucaaggacgccacccccagcgacuucguccgggccaccgcgaccaucccgauccaggccucccugcccuucggcuggcugaucguggggguggcccuccuggccgucuuccacagcgccuccaagaucaucacgcugaagaagcgcuggcagcucgcgcugagcaagggcgugcacuucgugugcaaccugcuccugcuguucgucaccguguacucccaccuccugcugguggccgccgggcucgaggcccccuuccuguaccuguacgcgcucgucuacuuccugcagagcaucaacuucgugcggaucaucaugcgccuguggcucugcuggaagugccgguccaagaacccccugcuguacgacgccaacuacuuccucugcuggcacaccaacugcuacgacuacugcaucccguacaacagcgugaccuccagcaucgucaucacguccggcgacggcaccaccagccccaucuccgagcacgacuaccagaucgggggcuacaccgagaagugggagagcggggugaaggacugcgugguccugcacuccuacuucacgagcgacuacuaccagcuguacuccgcccagcucagcaccgacaccggcguggagcacgugaccuucuucaucuacaacaagaucgucgacgagcccgaggagcacgugcagauccacacgaucgacggguccagcggcguggucaaccccgugauggagccgaucuacgacgagcccaccaccaccacgagcgugccccugugaggacuagucccuguucccagagcccacuuuuuuuucuuuuuuugaaauaaaauagccugucuuucagaucucaaaggcucuuuucagagccaccaaaaaaaaaaaaaaaaaaaaaaaaaaaaaaaaaaaaaaaaaaaaaaaaaaaaaaaaaaaaaaaaaaaaaaaaaaaaaaaaaaaaaaaaaaaaaaaaaaaaa

SEQ ID NO: 20520 - RNA, 1100 nt, Artificial Sequence
  SARS-CoV-2__MT844038.1__ORF3a protein mRNA gc
aggagagucccgcagucggcguccagcggcucugcuuguucgugugugugucguugcaggccuuauucaagcuuaccauggaccuguucaugcgcaucuucaccaucggcaccgugacgcucaagcagggggagaucaaggacgccacccccagcgacuucguccgggccaccgcgaccaucccgauccaggccucccugcccuucggcuggcugaucguggggguggcccuccuggccgucuuccagagcgccuccaagaucaucacgcugaagaagcgcuggcagcucgcgcugagcaagggcguguacuucgugugcaaccugcuccugcuguucgucaccguguacucccaccuccugcugguggccgccgggcucgaggcccccuuccuguaccuguacgcgcucgucuacuuccugcagagcaucaacuucgugcggaucaucaugcgccuguggcucugcuggaagugccgguccaagaacccccugcuguacgacgccaacuacuuccucugcuggcacaccaacugcuacgacuacugcaucccguacaacagcgugaccuccagcaucgucaucacguccggcgacggcaccaccagccccaucuccgagcacgacuaccagaucgggggcuacaccgagaagugggagagcggggugaaggacugcgugguccugcacuccuacuucacgagcgacuacuaccagcuguacuccacccagcucagcaccgacaccggcguggagcacgugacguucuucaucuacaacaagaucgucgacgagcccgaggagcacgugcagauccacaccaucgacggguccagcggcguggucaaccccgugauggagccgaucuacgacgagcccaccaccacgaccagcgugccccugugaggacuagucccuguucccagagcccacuuuuuuuucuuuuuuugaaauaaaauagccugucuuucagaucucaaaggcucuuuucagagccaccaaaaaaaaaaaaaaaaaaaaaaaaaaaaaaaaaaaaaaaaaaaaaaaaaaaaaaaaaaaaaaaaaaaaaaaaaaaaaaaaaaaaaaaaaaaaaaaaaaaaa

SEQ ID NO: 20521 - RNA, 1100 nt, Artificial Sequence
  SARS-CoV-2__MT844046.1__ORF3a protein mRNA gc
aggagagucccgcagucggcguccagcggcucugcuuguucgugugugugucguugcaggccuuauucaagcuuaccauggaccuguucaugcgcaucuucaccaucggcaccgugacgcucaagcagggggagaucaaggacgccacccccagcgacuucguccgggccaccgcgaccaucccgauccaggccucccugcccuucggcuggcugaucguggggguggcccuccuggccgucuuccacagcgccuccaagaucaucacgcugaagaagcgcuggcagcucgcgcugagcaagggcgugcacuucgugugcaaccugcuccugcuguucgucaccuucuacucccaccuccugcugguggccgccgggcucgaggcccccuuccuguaccuguacgcgcucguguacuuccugcagagcaucaacuucguccggaucaucaugcgccuguggcucugcuggaagugccgguccaagaacccccugcuguacgacgccaacuacuuccucugcuggcacaccaacugcuacgacuacugcaucccguacaacagcgugaccuccagcaucgugaucacguccggcgacggcaccaccagccccaucuccgagcacgacuaccagaucgggggcuacaccgagaagugggagagcggggucaaggacugcguggugcugcacuccuacuucacgagcgacuacuaccagcuguacuccacccagcucagcaccgacaccggcgucgagcacgugacguucuucaucuacaacaagaucguggacgagcccgaggagcacguccagauccacaccaucgacggguccagcggcguggugaaccccgucauggagccgaucuacgacgagcccaccaccacgaccagcgugccccugugaggacuagucccuguucccagagcccacuuuuuuuucuuuuuuugaaauaaaauagccugucuuucagaucucaaaggcucuuuucagagccaccaaaaaaaaaaaaaaaaaaaaaaaaaaaaaaaaaaaaaaaaaaaaaaaaaaaaaaaaaaaaaaaaaaaaaaaaaaaaaaaaaaaaaaaaaaaaaaaaaaaaa

SEQ ID NO: 20522 - RNA, 1100 nt, Artificial Sequence
  SARS-CoV-2__MT831129.1__ORF3a protein mRNA gc
aggagagucccgcagucggcguccagcggcucugcuuguucgugugugugucguugcaggccuuauucaagcuuaccauggaccuguucaugcgcaucuucaccaucggcaccgugacgcucaagcagggggagaccaaggacgccacccccagcgacuucguccgggccaccuccacgaucccgauccaggcgagccugcccuucggcuggcugaucguggggguggcccuccuggccgucuuccaguccgccagcaagaucaucacccugaagaagcgcuggcagcucgcccuguccaagggcgugcacuucgugugcaaccugcuccugcuguucgucaccguguacagccaccuccugcugguggcggccgggcucgaggcccccuuccuguaccuguacgcccucgucuacuuccugcaguccaucaacuucgugcggaucaucaugcgccuguggcucugcuggaagugccggagcaagaacccccugcuguacgacgcgaacuacuuccucugcuggcacaccaacugcuacgacuacugcaucccguacaacuccgugacgagcuccaucgucaucaccagcggcgacggcaccaccucccccaucagcgagcacgacuaccagaucgggggcuacacggagaagugggaguccggggugaaggacugcgugguccugcacagcuacuucaccuccgacuacuaccagcuguacagcacccagcucuccaccgacacgggcguggagcacgugaccuucuucaucuacaacaagaucgucgacgagcccgaggagcacgugcagauccacaccaucgacgggagcagcggcguggucaaccccgugauggagccgaucuacgacgagcccaccacgaccaccuccgugccccugugaggacuagucccuguucccagagcccacuuuuuuuucuuuuuuugaaauaaaauagccugucuuucagaucucaaaggcucuuuucagagccaccaaaaaaaaaaaaaaaaaaaaaaaaaaaaaaaaaaaaaaaaaaaaaaaaaaaaaaaaaaaaaaaaaaaaaaaaaaaaaaaaaaaaaaaaaaaaaaaaaaaaa

SEQ ID NO: 20523 - RNA, 1100 nt, Artificial Sequence
  SARS-CoV-2__MT831140.1__ORF3a protein mRNA gc
aggagagucccgcagucggcguccagcggcucugcuuguucgugugugugucguugcaggccuuauucaagcuuaccauggaccuguucaugcgcaucuucaccaucggcaccgugacgcucaagcagggggagaccaaggacgccacccccagcgacuucguccgggccaccgcgacgaucccgauccaggccucccugcccuucggcuggcugaucguggggguggcccuccuggccgucuuccagagcgccuccaagaucaucacccugaagaagcgcuggcagcucgcgcugagcaagggcgugcacuucgugugcaaccugcuccugcuguucgucaccguguacucccaccuccugcugguggccgccgggcucgaggcccccuuccuguaccuguacgcgcucgucuacuuccugcagagcaucaacuucgugcggaucaucaugcgccuguggcucugcuggaagugccgguccaagaacccccugcuguacgacgccaacuacuuccucugcuggcacaccaacugcuacgacuacugcaucccguacaacagcgugacguccagcaucgucaucaccuccggcgacggcaccaccagccccaucuccgagcacgacuaccagaucgggggcuacacggagaagugggagagcggggugaaggacugcgugguccugcacuccuacuucaccagcgacuacuaccagcuguacuccacccagcucagcaccgacacgggcguggagcacgugaccuucuucaucuacaacaagaucgucgacgagcccgaggagcacgugcagauccacaccaucgacggguccagcggcguggucaaccccgugauggagccgaucuacgacgagcccaccacgaccaccagcgugccccugugaggacuagucccuguucccagagcccacuuuuuuuucuuuuuuugaaauaaaauagccugucuuucagaucucaaaggcucuuuucagagccaccaaaaaaaaaaaaaaaaaaaaaaaaaaaaaaaaaaaaaaaaaaaaaaaaaaaaaaaaaaaaaaaaaaaaaaaaaaaaaaaaaaaaaaaaaaaaaaaaaaaaa

SEQ ID NO: 20524 - RNA, 1100 nt, Artificial Sequence
  SARS-CoV-2__MT831162.1__ORF3a protein mRNA gc
aggagagucccgcagucggcguccagcggcucugcuuguucgugugugugucguugcaggccuuauucaagcuuaccauggaccuguucaugcgcaucuucaccaucggcaccgugacgcucaagcagggggagaucaaggacgccacccccagcgacuucguccgggccaccgcgaccaucccgauccaggccucccugcccuucggcuggcugaucgugagcguggcccuccuggccgucuuccacuccgccagcaagaucaucacgcugaagaagcgcuggcagcucgcgcuguccaagggggugcacuucgugugcaaccugcuccugcuguucgucaccguguacagccaccuccugcugguggccgccggccucgaggcccccuuccuguaccuguacgcgcucgucuacuuccugcaguccaucaacuucgugcggaucaucaugcgccuguggcucugcuggaagugccggagcaagaacccccugcuguacgacgccaacuacuuccucugcuggcacaccaacugcuacgacuacugcaucccguacaacuccgugaccagcuccaucgucaucacgagcggggacggcaccaccucccccaucagcgagcacgacuaccagaucggcggguacaccgagaagugggaguccggcgugaaggacugcgugguccugcacagcuacuucacguccgacuacuaccagcuguacagcacccagcucuccaccgacaccgggguggagcacgugacguucuucaucuacaacaagaucgucgacgagcccgaggagcacgugcagauccacaccaucgacggcagcagcgggguggucaaccccgugauggagccgaucuacgacgagcccaccaccacgaccuccgugccccugugaggacuagucccuguucccagagcccacuuuuuuuucuuuuuuugaaauaaaauagccugucuuucagaucucaaaggcucuuuucagagccaccaaaaaaaaaaaaaaaaaaaaaaaaaaaaaaaaaaaaaaaaaaaaaaaaaaaaaaaaaaaaaaaaaaaaaaaaaaaaaaaaaaaaaaaaaaaaaaaaaaaaa

SEQ ID NO: 20525 - RNA, 1100 nt, Artificial Sequence
  SARS-CoV-2__MT831177.1__ORF3a protein mRNA gc
aggagagucccgcagucggcguccagcggcucugcuuguucgugugugugucguugcaggccuuauucaagcuuaccauggaccuguucaugcgcaucuucaccaucggcaccgugacgcucaagcagggggagaucaaggacgccacccccagcgacuucguccgggccaccgcgaccaucccgauccaggccucccugcccuucggcuggcugaucguggggguggcccuccuggccgucuuccagagcgccuccaagaucaucacgcugaagaagcgcuggcagcucgcgcugagcaagggcgugcacuucgugugcaaccugcuccugcuguucgucaccguguacucccaccuccugcugguggccgccgggcucgaggcccccuuccuguaccuguacgcgcucgucuacuuccugcagagcaucaacuucgugcggaucaucaugcgccuguggcucugccggaagugccgcuccaagaacccccugcuguacgacgccaacuacuuccucugcuggcacaccaacugcuacgacuacugcaucccguacaacagcgugaccuccagcaucgucaucacguccggcgacggcaccaccagccccaucuccgagcacgacuaccagaucgggggcuacaccgagaagugggagagcggggugaaggacugcgugguccugcacuccuacuucacgagcgacuacuaccagcuguacuccacccagcucagcaccgacaccggcguggagcacgugacguucuucaucuacaacaagaucgucgacgagcccgaggagcacgugcagauccacaccaucgacggguccagcggcguggucaaccccgugauggagccgaucuacgacgagcccaccaccacgaccagcgugccccugugaggacuagucccuguucccagagcccacuuuuuuuucuuuuuuugaaauaaaauagccugucuuucagaucucaaaggcucuuuucagagccaccaaaaaaaaaaaaaaaaaaaaaaaaaaaaaaaaaaaaaaaaaaaaaaaaaaaaaaaaaaaaaaaaaaaaaaaaaaaaaaaaaaaaaaaaaaaaaaaaaaaaa

SEQ ID NO: 20526 - RNA, 1100 nt, Artificial Sequence
  SARS-CoV-2__MT831190.1__ORF3a protein mRNA gc
aggagagucccgcagucggcguccagcggcucugcuuguucgugugugugucguugcaggccuuauucaagcuuaccauggaccuguucaugcgcaucuucaccaucggcaccgugacgcucaagcaggacgagaucaaggacgccacccccagcgacuucguccgggccaccgcgaccaucccgauccaggccucccugcccuucggguggcugaucgugggcguggcccuccuggccgucuuccagagcgccuccaagaucaucacgcugaagaagcgcuggcagcucgcgcugagcaagggggugcacuucgugugcaaccugcuccugcuguucgucaccguguacucccaccuccugcugguggccgccggccucgaggcccccuuccuguaccuguacgcgcucgucuacuuccugcagagcaucaacuucgugcggaucaucaugcgccuguggcucugcuggaagugccgguccaagaacccccugcuguacgacgccaacuacuuccucugcuggcacaccaacugcuacgacuacugcaucccguacaacagcgugaccuccagcaucgucaucacguccggggacggcaccaccagccccaucuccgagcacgacuaccagaucggcggguacaccgagaagugggagagcggcgugaaggacugcgugguccugcacuccuacuucacgagcgacuacuaccagcuguacuccacccagcucagcaccgacaccgggguggagcacgugacguucuucaucuacaacaagaucgucgacgagcccgaggagcacgugcagauccacaccaucgacggcuccagcgggguggucaaccccgugauggagccgaucuacgacgagcccaccaccacgaccagcgugccccugugaggacuagucccuguucccagagcccacuuuuuuuucuuuuuuugaaauaaaauagccugucuuucagaucucaaaggcucuuuucagagccaccaaaaaaaaaaaaaaaaaaaaaaaaaaaaaaaaaaaaaaaaaaaaaaaaaaaaaaaaaaaaaaaaaaaaaaaaaaaaaaaaaaaaaaaaaaaaaaaaaaaaa

SEQ ID NO: 20527 - RNA, 1100 nt, Artificial Sequence
  SARS-CoV-2__MT831578.1__ORF3a protein mRNA gc
aggagagucccgcagucggcguccagcggcucugcuuguucgugugugugucguugcaggccuuauucaagcuuaccauggaccuguucaugcgcaucuucaccaucggcaccgugacgcucaagcagggggagaucaaggacgccacccccagcgacuucguccgggccaccgcgaccaucccgauccaggccucccugcccuucggcuggcugaucguggggguggcccuccuggccgucuuccagagcgccuccaagaucaucacgcugaagaagcgcuggcagcucgcgcugagcaagggcgugcacuucgugugcaaccugcuccugcuguucgucaccguguacucccaccuccugcugguggccgucgggcucgaggcccccuuccuguaccuguacgcccucguguacuuccugcagagcaucaacuucgugcggaucaucaugcgccuguggcucugcuggaagugccgguccaagaacccccugcuguacgacgcgaacuacuuccucugcuggcacaccaacugcuacgacuacugcaucccguacaacagcgucaccuccagcaucgugaucacguccggcgacggcaccaccagccccaucuccgagcacgacuaccagaucgggggcuacaccgagaagugggagagcggggugaaggacugcgucgugcugcacuccuacuucacgagcgacuacuaccagcuguacuccacccagcucagcaccgacaccggcguggagcacgucacguucuucaucuacaacaagaucguggacgagcccgaggagcacgugcagauccacaccaucgacggguccagcggcgucgugaaccccgugauggagccgaucuacgacgagcccaccaccacgaccagcgucccccugugaggacuagucccuguucccagagcccacuuuuuuuucuuuuuuugaaauaaaauagccugucuuucagaucucaaaggcucuuuucagagccaccaaaaaaaaaaaaaaaaaaaaaaaaaaaaaaaaaaaaaaaaaaaaaaaaaaaaaaaaaaaaaaaaaaaaaaaaaaaaaaaaaaaaaaaaaaaaaaaaaaaaa

SEQ ID NO: 20528 - RNA, 1100 nt, Artificial Sequence
  SARS-CoV-2__MT831593.1__ORF3a protein mRNA gc
aggagagucccgcagucggcguccagcggcucugcuuguucgugugugugucguugcaggccuuauucaagcuuaccauggaccuguucaugcgcaucuucaccaucggcaccgugacgcucaagcagggggagaucaaggacgccacccccagcgacuucguccgggccaccgcgaccaucccgauccaggccucccugcccuucggcuggcugaucguggggguggcccuccuggccgucuuccacagcgccuccaagaucaucacgcugaagaagcgcuggcagcucgcgcugagcaagggcgugcacuucgugugcaaccugcuccugcuguucgucaccguguacucccaccuccugcugguggccgccgggcucgaggcccccuuccuguaccuguacgcgcucgucuacuuccugcagagcaucaacuucgugcggaucaucaugcgccuguggcucugcuggaagugccgguccaagaacccccugcuguacgacgccaacuacuuccucugcuggcacaccaacugcuacgacuacugcaucccguacaacagcgugaccuccagcaucgucaucacguccguggacggcaccaccagccccaucuccgagcacgacuaccagaucggcggguacaccgagaagugggagagcggcgugaaggacugcgucgugcugcacuccuacuucacgagcgacuacuaccagcuguacuccacccagcucagcaccgacaccgggguggagcacgucacguucuucaucuacaacaagaucguggacgagcccgaggagcacgugcagauccacaccaucgacggcuccagcggggucgugaaccccgugauggagccgaucuacgacgagcccaccaccacgaccagcgucccccugugaggacuagucccuguucccagagcccacuuuuuuuucuuuuuuugaaauaaaauagccugucuuucagaucucaaaggcucuuuucagagccaccaaaaaaaaaaaaaaaaaaaaaaaaaaaaaaaaaaaaaaaaaaaaaaaaaaaaaaaaaaaaaaaaaaaaaaaaaaaaaaaaaaaaaaaaaaaaaaaaaaaaa

SEQ ID NO: 20529 - RNA, 1100 nt, Artificial Sequence
  SARS-CoV-2__MT831603.1__ORF3a protein mRNA gc
aggagagucccgcagucggcguccagcggcucugcuuguucgugugugugucguugcaggccuuauucaagcuuaccauggaccuguucaugcgcaucuucaccaucggcaccgugacgcucaagcagggggagaucaaggacgccacccccagcgacuucguccgggccaccgcgaccaucccgauccaggccucccugcccuucggcuggcugaucguggggguggcccuccuggccgucuuccagagcgccuccaagaucaucacgcugaagaagcgcuggcagcucgcgcugagcaagggcgugcacuucgugugcaaccugcuccugcuguucgucaccguguacucccaccuccugcugguggccgccguccucgaggcccccuuccuguaccuguacgcgcucguguacuuccugcagagcaucaacuucgugcggaucaucaugcgccuguggcucugcuggaagugccgguccaagaacccccugcuguacgacgccaacuacuuccucugcuggcacaccaacugcuacgacuacugcaucccguacaacagcgucaccuccagcaucgugaucacguccggggacggcaccaccagccccaucuccgagcacgacuaccagaucggcggguacaccgagaagugggagagcggcgugaaggacugcgucgugcugcacuccuacuucacgagcgacuacuaccagcuguacuccacccagcucagcaccgacaccgggguggagcacgucacguucuucaucuacaacaagaucguggacgagcccgaggagcacgugcagauccacaccaucgacggcuccagcggggucgugaaccccgugauggagccgaucuacgacgagcccaccaccacgaccagcgucccccugugaggacuagucccuguucccagagcccacuuuuuuuucuuuuuuugaaauaaaauagccugucuuucagaucucaaaggcucuuuucagagccaccaaaaaaaaaaaaaaaaaaaaaaaaaaaaaaaaaaaaaaaaaaaaaaaaaaaaaaaaaaaaaaaaaaaaaaaaaaaaaaaaaaaaaaaaaaaaaaaaaaaaa

SEQ ID NO: 20530 - RNA, 1100 nt, Artificial Sequence
  SARS-CoV-2__MT831635.1__ORF3a protein mRNA gc
aggagagucccgcagucggcguccagcggcucugcuuguucgugugugugucguugcaggccuuauucaagcuuaccauggaccuguucaugcgcaucuucaccaucggcaccgugacgcucaagcagggggagaucaaggacgccacccccagcgacuucguccgggccaccgcgaccaucccgauccaggccucccugcccuucggcuggcugaucguggggguggcccuccuggccuucuuccacagcgccuccaagaucaucacgcugaagaagcgcuggcagcucgcgcugagcaagggcguccacuucgugugcaaccugcuccugcuguucgugaccgucuacucccaccuccugcugguggccgccgggcucgaggcccccuuccuguaccuguacgcgcucguguacuuccugcagagcaucaacuucguccggaucaucaugcgccuguggcucugcuggaagugccgguccaagaacccccugcuguacgacgccaacuacuuccucugcuggcacaccaacugcuacgacuacugcaucccguacaacagcgugaccuccagcaucgugaucacguccggcgacggcaccaccagccccaucuccgagcacgacuaccagaucgggggcuacaccgagaagugggagagcggggucaaggacugcguggugcugcacuccuacuucacgagcgacuacuaccagcuguacuccacccagcucagcaccgacaccggcgucgagcacgugacguucuucaucuacaacaagaucguggacgagcccgaggagcacguccagauccacaccaucgacggguccagcggcguggugaaccccgucauggagccgaucuacgacgagcccaccaccacgaccagcgugccccugugaggacuagucccuguucccagagcccacuuuuuuuucuuuuuuugaaauaaaauagccugucuuucagaucucaaaggcucuuuucagagccaccaaaaaaaaaaaaaaaaaaaaaaaaaaaaaaaaaaaaaaaaaaaaaaaaaaaaaaaaaaaaaaaaaaaaaaaaaaaaaaaaaaaaaaaaaaaaaaaaaaaaa

SEQ ID NO: 20531 - RNA, 1100 nt, Artificial Sequence
  SARS-CoV-2__MT831646.1__ORF3a protein mRNA gc
aggagagucccgcagucggcguccagcggcucugcuuguucgugugugugucguugcaggccuuauucaagcuuaccauggaccuguucaugcgcaucuucaccaucggcaccgugacgcucaagcagggggagaucaaggacgccacccccagcgacuucguccgggccaccgcgaccaucccgauccaggccucccugcccuucggcuggcugaucguggggguggcccuccuggccgucuuccagagcgccuccaagaucaucacgcugaagaagcgcuggcagcucgcgcugagcaagggcgugcacuucgugugcaaccugcuccugcuguucgucaccguguacucccaccuccugcugguggccgccgggcucgaggcccccuuccuguaccuguacgcgcucgucuacuuccugcagagcaucaacuucgugcggaucaucaugcgccuguggcucugcuggaagugccgguccaagaacccccugcuguacgacgccaacuacuuccucugcuggcacaccaacugcuacgacuacugcaucccguacaacagcgugaccuccagcaucgucaucacguccggcgacggcaccaccagccccaucuccgagcacgacuaccagaucgggggcuacaccgagaagugggagagcggggugaaggacugcgugguccugcacuccuacuucacgagcgacuacuaccagcuguacuccacccagcucagcaccgacaccggcuucgagcacgugacguucuucaucuacaacaagaucguggacgagcccgaggagcacguccagauccacaccaucgacggguccagcggcguggugaaccccgucauggagccgaucuacgacgagcccaccaccacgaccagcgugccccugugaggacuagucccuguucccagagcccacuuuuuuuucuuuuuuugaaauaaaauagccugucuuucagaucucaaaggcucuuuucagagccaccaaaaaaaaaaaaaaaaaaaaaaaaaaaaaaaaaaaaaaaaaaaaaaaaaaaaaaaaaaaaaaaaaaaaaaaaaaaaaaaaaaaaaaaaaaaaaaaaaaaaa

SEQ ID NO: 20532 - RNA, 1100 nt, Artificial Sequence
  SARS-CoV-2__MT831682.1__ORF3a protein mRNA gc
aggagagucccgcagucggcguccagcggcucugcuuguucgugugugugucguugcaggccuuauucaagcuuaccauggaccuguucaugcgcaucuucaccaucggcaccgugacgcucaagcagggggagaucaaggacgccacccccagcgacuucguccgggccaccgcgaccaucccgauccaggccucccugcccuucggcuggcugaucguggggguggcccuccuggccgucuuccagagcgccuccaagaucaucacgcugaagaagcgcuggcagcucgcgcugagcaagggcgugcacuucgugugcaaccugcuccugcuguucgucaccguguacucccaccuccugcugguggccgccgggcucgaggcccccuuccuguaccuguacgcgcucgucuacuuccugcagagcaucaacuucgugcggaucaucaugcgccuguggcucugcuggaagugccgguccaagaacccccugcuguacgacgccaacuacuuccucagcuggcacaccaacugcuacgacuacugcaucccguacaacuccgugaccagcuccaucgucaucacgagcggcgacggcaccaccucccccaucagcgagcacgacuaccagaucgggggcuacaccgagaagugggaguccggggugaaggacugcgugguccugcacagcuacuucacguccgacuacuaccagcuguacagcacccagcucuccaccgacaccggcguggagcacgugacguucuucaucuacaacaagaucgucgacgagcccgaggagcacgugcagauccacaccaucgacgggagcagcggcguggucaaccccgugauggagccgaucuacgacgagcccaccaccacgaccuccgugccccugugaggacuagucccuguucccagagcccacuuuuuuuucuuuuuuugaaauaaaauagccugucuuucagaucucaaaggcucuuuucagagccaccaaaaaaaaaaaaaaaaaaaaaaaaaaaaaaaaaaaaaaaaaaaaaaaaaaaaaaaaaaaaaaaaaaaaaaaaaaaaaaaaaaaaaaaaaaaaaaaaaaaaa

SEQ ID NO: 20533 - RNA, 1100 nt, Artificial Sequence
  SARS-CoV-2__MT831729.1__ORF3a protein mRNA gc
aggagagucccgcagucggcguccagcggcucugcuuguucgugugugugucguugcaggccuuauucaagcuuaccauggaccuguucaugcgcaucuucaccaucggcaccgugauccucaagcagggggagaucaaggacgccacgcccagcgacuucguccgggccaccgcgaccaucccgauccaggccucccugcccuucggcuggcugaucguggggguggcccuccuggccgucuuccacagcgccuccaagaucaucacccugaagaagcgcuggcagcucgcgcugagcaagggcgugcacuucgugugcaaccugcuccugcuguucgucacgguguacucccaccuccugcugguggccgccgggcucgaggcccccuuccuguaccuguacgcgcucgucuacuuccugcagagcaucaacuucgugcggaucaucaugcgccuguggcucugcuggaagugccgguccaagaacccccugcuguacgacgccaacuacuuccucugcuggcacaccaacugcuacgacuacugcaucccguacaacagcgugaccuccagcaucgucaucaccuccggcgacggcacgaccagccccaucuccgagcacgacuaccagaucgggggcuacaccgagaagugggagagcggggugaaggacugcgugguccugcacuccuacuucaccagcgacuacuaccagcuguacuccacgcagcucagcaccgacaccggcguggagcacgugaccuucuucaucuacaacaagaucgucgacgagcccgaggagcacgugcagauccacacgaucgacggguccagcggcguggucaaccccgugauggagccgaucuacgacgagcccaccaccaccacgagcgugccccugugaggacuagucccuguucccagagcccacuuuuuuuucuuuuuuugaaauaaaauagccugucuuucagaucucaaaggcucuuuucagagccaccaaaaaaaaaaaaaaaaaaaaaaaaaaaaaaaaaaaaaaaaaaaaaaaaaaaaaaaaaaaaaaaaaaaaaaaaaaaaaaaaaaaaaaaaaaaaaaaaaaaaa

SEQ ID NO: 20534 - RNA, 1100 nt, Artificial Sequence
  SARS-CoV-2__MT831771.1__ORF3a protein mRNA gc
aggagagucccgcagucggcguccagcggcucugcuuguucgugugugugucguugcaggccuuauucaagcuuaccauggaccuguucaugcgcaucuucaccaucggcaccgugacgcucaagcagggggagaucaaggacgccacccccagcgacuucguccgggccaccgcgaccaucccgauccaggccuccuuccccuucggcuggcugaucguggggguggcccugcucgccgucuuccagagcgccuccaagaucaucacgcugaagaagcgcuggcagcuggcgcucagcaagggcgugcacuucgugugcaaccugcugcuccuguucgucaccguguacucccaccuccugcugguggccgccgggcuggaggcccccuuccucuaccuguacgcgcuggucuacuuccuccagagcaucaacuucgugcggaucaucaugcgccuguggcugugcuggaagugccgguccaagaacccccuccuguacgacgccaacuacuuccugugcuggcacaccaacugcuacgacuacugcaucccguacaacagcgugaccuccagcaucgucaucacguccggcgacggcaccaccagccccaucuccgagcacgacuaccagaucgggggcuacaccgagaagugggagagcggggugaaggacugcgugguccuccacuccuacuucacgagcgacuacuaccagcuguacuccacccagcugagcaccgacaccggcguggagcacgugacguucuucaucuacaacaagaucgucgacgagcccgaggagcacgugcagauccacaccaucgacggguccagcggcguggucaaccccgugauggagccgaucuacgacgagcccaccaccacgaccagcgugccccucugaggacuagucccuguucccagagcccacuuuuuuuucuuuuuuugaaauaaaauagccugucuuucagaucucaaaggcucuuuucagagccaccaaaaaaaaaaaaaaaaaaaaaaaaaaaaaaaaaaaaaaaaaaaaaaaaaaaaaaaaaaaaaaaaaaaaaaaaaaaaaaaaaaaaaaaaaaaaaaaaaaaaa

SEQ ID NO: 20535 - RNA, 1100 nt, Artificial Sequence
  SARS-CoV-2__MT831850.1__ORF3a protein mRNA gc
aggagagucccgcagucggcguccagcggcucugcuuguucgugugugugucguugcaggccuuauucaagcuuaccauggaccuguucaugcgcaucuucaccaucggcaccgugacgcucaagcagggggagaucaaggacgccacccccagcgacuucguccgggccaccgcgaccaucccgauccaggccucccugcccuucggcuggcugaucguggggguggcccuccugacggucuuccacagcgccuccaagaucaucacccugaagaagcgcuggcagcucgcccugagcaagggcgugcacuucgugugcaaccugcuccugcuguucgucaccguguacucccaccuccugcugguggcggccgggcucgaggcccccuuccuguaccuguacgcccucgucuacuuccugcagagcaucaacuucgugcggaucaucaugcgccuguggcucugcuggaagugccgguccaagaacccccugcuguacgacgcgaacuacuuccucugcuggcacaccaacugcuacgacuacugcaucccguacaacagcgugacguccagcaucgucaucaccuccggcgacggcaccaccagccccaucuccgagcacgacuaccagaucgggggcuacacggagaagugggagagcggggugaaggacugcgugguccugcacuccuacuucaccagcgacuacuaccagcuguacuccacccagcucagcaccgacacgggcguggagcacgugaccuucuucaucuacaacaagaucgucgacgagcccgaggagcacgugcagauccacaccaucgacggguccagcggcguggucaaccccgugauggagccgaucuacgacgagcccaccacgaccaccagcgugccccugugaggacuagucccuguucccagagcccacuuuuuuuucuuuuuuugaaauaaaauagccugucuuucagaucucaaaggcucuuuucagagccaccaaaaaaaaaaaaaaaaaaaaaaaaaaaaaaaaaaaaaaaaaaaaaaaaaaaaaaaaaaaaaaaaaaaaaaaaaaaaaaaaaaaaaaaaaaaaaaaaaaaaa

SEQ ID NO: 20536 - RNA, 1100 nt, Artificial Sequence
  SARS-CoV-2__MT833965.1__ORF3a protein mRNA gc
aggagagucccgcagucggcguccagcggcucugcuuguucgugugugugucguugcaggccuuauucaagcuuaccauggaccuguucaugcgcaucuucaccaucggcaccgugacgcucaagcagggggagaucaaguacgccacccccagcgacuucguccgggccaccgcgaccaucccgauccaggccucccugcccuucggcuggcugaucguggggguggcccuccuggccgucuuccacagcgccuccaagaucaucacgcugaagaagcgcuggcagcucgcgcugagcaagggcgugcacuucgugugcaaccugcuccugcuguucgucaccguguacucccaccuccugcugguggccgccgggcucgaggcccccuuccuguaccuguacgcgcucgucuacuuccugcagagcaucaacuucgugcggaucaucaugcgccuguggcucugcuggaagugccgguccaagaacccccugcuguacgacgccaacuacuuccucugcuggcacaccaacugcuacgacuacugcaucccguacaacagcgugaccuccagcaucgucaucacguccggcgacggcaccaccagccccaucuccgagcacgacuaccagaucgggggcuacaccgagaagugggagagcggggugaaggacugcgugguccugcacuccuacuucacgagcgacuacuaccagcuguacuccacccagcucagcaccgacaccggcguggagcacgugacguucuucaucuacaacaagaucgucgacgagcccgaggagcacgugcagauccacaccaucgacggguccagcggcguggucaaccccgugauggagccgaucuacgacgagcccaccaccacgaccagcgugccccugugaggacuagucccuguucccagagcccacuuuuuuuucuuuuuuugaaauaaaauagccugucuuucagaucucaaaggcucuuuucagagccaccaaaaaaaaaaaaaaaaaaaaaaaaaaaaaaaaaaaaaaaaaaaaaaaaaaaaaaaaaaaaaaaaaaaaaaaaaaaaaaaaaaaaaaaaaaaaaaaaaaaaa

SEQ ID NO: 20537 - RNA, 1100 nt, Artificial Sequence
  SARS-CoV-2__MT833976.1__ORF3a protein mRNA gc
aggagagucccgcagucggcguccagcggcucugcuuguucgugugugugucguugcaggccuuauucaagcuuaccauggaccuguucaugcgcaucuucaccaucggcaccgugacgcucaagcagggggagaucaaggacgccacccccagcgacuucguccgggccaccgcgaccaucccgauccaggccucccugcccuucggcuggcugaucguggggguggcccuccuggccgucuuccagagcgccuccaagaucaucacgcugaagaagcgcuggcagcucgcgcugagcaagggcgugcacuucgugugcaaccugcuccugcuguuccucaccgucuacucccaccuccugcugguggccgccgggcuggaggcccccuuccuguaccucuacgcgcugguguacuuccugcagagcaucaacuucguccggaucaucaugcgccucuggcugugcuggaagugccgguccaagaacccccugcucuacgacgccaacuacuuccugugcuggcacaccaacugcuacgacuacugcaucccguacaacagcgugaccuccagcaucgugaucacguccggcgacggcaccaccagccccaucuccgagcacgacuaccagaucgggggcuacaccgagaagugggagagcggggucaaggacugcguggugcugcacuccuacuucacgagcgacuacuaccagcucuacuccacccagcugagcaccgacaccggcgucgagcacgugacguucuucaucuacaacaagaucguggacgagcccgaggagcacguccagauccacaccaucgacggguccagcggcguggugaaccccgucauggagccgaucuacgacgagcccaccaccacgaccagcgugccccugugaggacuagucccuguucccagagcccacuuuuuuuucuuuuuuugaaauaaaauagccugucuuucagaucucaaaggcucuuuucagagccaccaaaaaaaaaaaaaaaaaaaaaaaaaaaaaaaaaaaaaaaaaaaaaaaaaaaaaaaaaaaaaaaaaaaaaaaaaaaaaaaaaaaaaaaaaaaaaaaaaaaaa

SEQ ID NO: 20538 - RNA, 1100 nt, Artificial Sequence
  SARS-CoV-2__MT833985.1__ORF3a protein mRNA gc
aggagagucccgcagucggcguccagcggcucugcuuguucgugugugugucguugcaggccuuauucaagcuuaccauggaccuguucaugcgcaucuucaccaucggcaccgugacgcucaagcagggggagaucaaggacgccacccccagcgacuucguccgggccaccgcgaccaucccgauccaggccucccugcccuucggcuggcugaucguggggguggcccuccuggccgucuuccagagcgccuccaagaucaucacgcugaagaagcgcuggcagcucgcgcugagcaagggcgugcacuucgugugcaaccugcuccugcuguucgucaccguguacucccaccuccugcugguggccgccgggcucgaggcccccuuccuguaccuguacgcgcucgucuacuuccugcagagcaucaacuucgugcggaucaucaugcgccuguggcucugcuggaagugccgguccaagaacccccugcuguacgacgccaacuacuuccucugcuggcacaccaacugcuacgacuacugcaucccguacaacagcgugaccuccagcaucgucaucacguccggcgacggcaccaccauccccaucagcgagcacgacuaccagaucgggggcuacaccgagaagugggaguccggggugaaggacugcgugguccugcacagcuacuucacguccgacuacuaccagcuguacagcacccagcucuccaccgacaccggcguggagcacgugacguucuucaucuacaacaagaucgucgacgagcccgaggagcacgugcagauccacaccaucgacgggagcuccggcguggucaaccccgugauggagccgaucuacgacgagcccaccaccacgaccagcgugccccugugaggacuagucccuguucccagagcccacuuuuuuuucuuuuuuugaaauaaaauagccugucuuucagaucucaaaggcucuuuucagagccaccaaaaaaaaaaaaaaaaaaaaaaaaaaaaaaaaaaaaaaaaaaaaaaaaaaaaaaaaaaaaaaaaaaaaaaaaaaaaaaaaaaaaaaaaaaaaaaaaaaaaa

SEQ ID NO: 20539 - RNA, 1100 nt, Artificial Sequence
  SARS-CoV-2__MT834019.1__ORF3a protein mRNA gc
aggagagucccgcagucggcguccagcggcucugcuuguucgugugugugucguugcaggccuuauucaagcuuaccauggaccuguucaugcgcaucuucaccaucggcaccgugacgcucaagcagggggagaucaaggacgccacccccagcgacuucguccgggccaccgcgaccaucccgauccaggccucccugcccuucggcuggcugaucguggggguggcccuccuggccgucuuccagagcgccuccaagaucaucacgcugaagaagcgcuggcagcucgcgcugagcaagggcgugcacuucgugugcaaccugcuguuccuguucgucaccguguacucccaccuccuccugguggccgccgggcuggaggcccccuuccucuaccuguacgcgcuggucuacuuccuccagagcaucaacuucgugcggaucaucaugcgccuguggcugugcuggaagugccgguccaagaacccccuccuguacgacgccaacuacuuccugugcuggcacaccaacugcuacgacuacugcaucccguacaacagcgugaccuccagcaucgucaucacguccggcgacggcaccaccagccccaucuccgagcacgacuaccagaucgggggcuacaccgagaagugggagagcggggugaaggacugcgugguccuccacuccuacuucacgagcgacuacuaccagcuguacuccacccagcugagcaccgacaccggcguggagcacgugacguucuucaucuacaacaagaucgucgacgagcccgaggagcacgugcagauccacaccaucgacggguccagcggcguggucaaccccgugauggagccgaucuacgacgagcccaccaccacgaccagcgugccccucugaggacuagucccuguucccagagcccacuuuuuuuucuuuuuuugaaauaaaauagccugucuuucagaucucaaaggcucuuuucagagccaccaaaaaaaaaaaaaaaaaaaaaaaaaaaaaaaaaaaaaaaaaaaaaaaaaaaaaaaaaaaaaaaaaaaaaaaaaaaaaaaaaaaaaaaaaaaaaaaaaaaaa

SEQ ID NO: 20540 - RNA, 1100 nt, Artificial Sequence
  SARS-CoV-2__MT834027.1__ORF3a protein mRNA gc
aggagagucccgcagucggcguccagcggcucugcuuguucgugugugugucguugcaggccuuauucaagcuuaccauggaccuguucaugcgcaucuucaccaucggcaccgugacgcucaagcagggggagaccaaggacgccacccccagcgacuucguccgggccaccgcgacgaucccgauccaggccucccugcccuucggcuggcugaucguggggguggcccuccuggccgucuuccagagcgccuccaagaucaucacccugaagaagcgcuggcagcucgcgcugagcaagggcgugcacuucgugugcaaccugcuguuccuguucgucaccguguacucccaccuccuccugguggccgccgggcuggaggcccccuuccucuaccuguacgcgcuggucuacuuccuccagagcaucaacuucgugcggaucaucaugcgccuguggcugugcuggaagugccgguccaagaacccccuccuguacgacgccaacuacuuccugugcuggcacaccaacugcuacgacuacugcaucccguacaacagcgugacguccagcaucgucaucaccuccggcgacggcaccaccagccccaucuccgagcacgacuaccagaucgggggcuacacggagaagugggagagcggggugaaggacugcgugguccuccacuccuacuucaccagcgacuacuaccagcuguacuccacccagcugagcaccgacacgggcguggagcacgugaccuucuucaucuacaacaagaucgucgacgagcccgaggagcacgugcagauccacaccaucgacggguccagcggcguggucaaccccgugauggagccgaucuacgacgagcccaccacgaccaccagcgugccccucugaggacuagucccuguucccagagcccacuuuuuuuucuuuuuuugaaauaaaauagccugucuuucagaucucaaaggcucuuuucagagccaccaaaaaaaaaaaaaaaaaaaaaaaaaaaaaaaaaaaaaaaaaaaaaaaaaaaaaaaaaaaaaaaaaaaaaaaaaaaaaaaaaaaaaaaaaaaaaaaaaaaaa

SEQ ID NO: 20541 - RNA, 1100 nt, Artificial Sequence
  SARS-CoV-2__MT834080.1__ORF3a protein mRNA gc
aggagagucccgcagucggcguccagcggcucugcuuguucgugugugugucguugcaggccuuauucaagcuuaccauggaccuguucaugcgcaucuucaccaucggcaccgugacgcucaagcagggggagaucaaggacgccacccccagcgacuucguccgggccaccgcgaccaucccgauccaggcgccccugcccuucggcuggcugaucguggggguggcccuccuggccgucuuccacuccgccagcaagaucaucacgcugaagaagcgcuggcagcucgcccuguccaagggcgugcacuucgugugcaaccugcuccugcuguucgucaccguguacagccaccuccugcugguggccgccgggcucgaggcccccuuccuguaccuguacgcgcucgucuacuuccugcaguccaucaacuucgugcggaucaucaugcgccuguggcucugcuggaagugccggagcaagaacccgcugcuguacgacgccaacuacuuccucugcuggcacaccaacugcuacgacuacugcauccccuacaacuccgugaccagcuccaucgucaucacgagcggcgacggcaccaccucccccaucagcgagcacgacuaccagaucgggggcuacaccgagaagugggaguccggggugaaggacugcgugguccugcacagcuacuucacguccgacuacuaccagcuguacagcacccagcucuccaccgacaccggcguggagcacgugacguucuucaucuacaacaagaucgucgacgagcccgaggagcacgugcagauccacaccaucgacgggagcuccggcguggucaacccggugauggagcccaucuacgacgagcccaccaccacgaccagcgugccccugugaggacuagucccuguucccagagcccacuuuuuuuucuuuuuuugaaauaaaauagccugucuuucagaucucaaaggcucuuuucagagccaccaaaaaaaaaaaaaaaaaaaaaaaaaaaaaaaaaaaaaaaaaaaaaaaaaaaaaaaaaaaaaaaaaaaaaaaaaaaaaaaaaaaaaaaaaaaaaaaaaaaaa

SEQ ID NO: 20542 - RNA, 1100 nt, Artificial Sequence
  SARS-CoV-2__MT834651.1__ORF3a protein mRNA gc
aggagagucccgcagucggcguccagcggcucugcuuguucgugugugugucguugcaggccuuauucaagcuuaccauggaccuguucaugcgcaucuucaccaucggcaccgugacgcucaagcagggggagaucaaggacgccacccccagcgacuucguccgggccaccgcgaccaucccgauccaggccucccugcccuucggcuggcugaucguggggguggcccuccuggccgucuuccagagcgccuccaagaucaucacgcugaagaagcgcuggcagcucgcgcugagcaagggcgugcacuucgugugcaaccugcuccugcuguucgucaccguguacucccaccuccugcugguggccgccgggcucgaggcccccuuccuguaccuguacgcgcucgucuacuuccugcagagcaucaacuucgugcggaucaucaugcgccuguggcucugcuggaagugccgguccaagaacccccugcuguacgacgccaacuacuuccucugcuggcacaccaacugcuacgacuacugcaucccguacaacagcgugaccuccagcaucgucaucacguccggcgacggcaccaccagccccaucuccgagcacgacuaccagaucgggggcuacaccgagaagugggagagcggggugaaggacugcgugguccugcacuccuacuucacgagcgacuacuaccagcuguacuccacccagcucagcaccgacaccggcguggagcacgugacguucuucaucuacaacaagaucgucgacgggcccgaggagcacgugcagauccacaccaucgacggcuccagcggcguggucaaccccgugauggagccgaucuacgacgagcccaccaccacgaccagcgugccccugugaggacuagucccuguucccagagcccacuuuuuuuucuuuuuuugaaauaaaauagccugucuuucagaucucaaaggcucuuuucagagccaccaaaaaaaaaaaaaaaaaaaaaaaaaaaaaaaaaaaaaaaaaaaaaaaaaaaaaaaaaaaaaaaaaaaaaaaaaaaaaaaaaaaaaaaaaaaaaaaaaaaaa

SEQ ID NO: 20543 - RNA, 1046 nt, Artificial Sequence
  SARS-CoV-2__MT834849.1__ORF3a protein mRNA gc
aggagagucccgcagucggcguccagcggcucugcuuguucgugugugugucguugcaggccuuauucaagcuuaccauggaccuguucaugcgcaucuucaccaucggcaccgugacgcucaagcagggggagaucaaggacgccacccccagcgacuucguccgggccaccgcgaccaucccgauccaggccucccugcccuucggcuggcugaucguggggguggcccuccuggccgucuuccacagcgccuccaagaucaucacgcugaagaagcgcuggcagcucgcgcugagcaagggcgugcacuucgugugcaaccugcuccugcuguucgucaccguguacucccaccuccugcugguggccgccgggcucgaggcccccuuccuguaccuguacgcgcucgucuacuuccugcagagcaucaacuucgugcggaucaucaugcgccuguggcucugcuggaagugccgguccaagaacccccugcuguacgacgccaacuacuuccucugcuggcacaccaacugcuacgacuacugcaucccguacaacagcgugaccuccagcaucgucaucacguccggcgacggcaccaccagccccaucuccgagcacgacuaccagaucgggggcuacaccgagaagugggagagcggggugaaggacugcgugguccugcacuccuacuucacgagcgacuacuaccagcuguacuccacccagcucagcaccgacaccggcguggagcacgugacguucuucaucuacaacaagaucgucgacgagcccgaggagcacgugcagauccacaccaucgacggguccagcggcgugauccagugaggacuagucccuguucccagagcccacuuuuuuuucuuuuuuugaaauaaaauagccugucuuucagaucucaaaggcucuuuucagagccaccaaaaaaaaaaaaaaaaaaaaaaaaaaaaaaaaaaaaaaaaaaaaaaaaaaaaaaaaaaaaaaaaaaaaaaaaaaaaaaaaaaaaaaaaaaaaaaaaaaaaa

SEQ ID NO: 20544 - RNA, 1100 nt, Artificial Sequence
  SARS-CoV-2__MT704820.1__ORF3a protein mRNA gc
aggagagucccgcagucggcguccagcggcucugcuuguucgugugugugucguugcaggccuuauucaagcuuaccauggaccuguucaugcgcaucuucaccaucggcaccgugacgcucaagcagggggagaucaaggacgccacccccagcgacuucguccgggccaccgcgaccaucccgauccaggccucccugcccuucggcuggcugaucuucgggguggcccuccuggccguguuccagagcgccuccaagaucaucacgcugaagaagcgcuggcagcucgcgcugagcaagggcguccacuucgugugcaaccugcuccugcuguucgugaccgucuacucccaccuccugcugguggccgccgggcucgaggcccccuuccuguaccuguacgcgcucguguacuuccugcagagcaucaacuucguccggaucaucaugcgccuguggcucugcuggaagugccgguccaagaacccccugcuguacgacgccaacuacuuccucugcuggcacaccaacugcuacgacuacugcaucccguacaacagcgugaccuccagcaucgugaucacguccggcgacggcaccaccagccccaucuccgagcacgacuaccagaucgggggcuacaccgagaagugggagagcggggucaaggacugcguggugcugcacuccuacuucacgagcgacuacuaccagcuguacuccacccagcucagcaccgacaccggcgucgagcacgugacguucuucaucuacaacaagaucguggacgagcccgaggagcacguccagauccacaccaucgacggguccagcggcguggugaaccccgucauggagccgaucuacgacgagcccaccaccacgaccagcgugccccugugaggacuagucccuguucccagagcccacuuuuuuuucuuuuuuugaaauaaaauagccugucuuucagaucucaaaggcucuuuucagagccaccaaaaaaaaaaaaaaaaaaaaaaaaaaaaaaaaaaaaaaaaaaaaaaaaaaaaaaaaaaaaaaaaaaaaaaaaaaaaaaaaaaaaaaaaaaaaaaaaaaaaa

SEQ ID NO: 20545 - RNA, 1091 nt, Artificial Sequence
  SARS-CoV-2__MT827206.1__ORF3a protein mRNA gc
aggagagucccgcagucggcguccagcggcucugcuuguucgugugugugucguugcaggccuuauucaagcuuaccauggaccuguucaugcgcaucuucaccaucggcaccgugacgcucaagcagggggagaucaaggacgccacccccagcgacuucguccgggccaccgcgaccaucccgauccaggccucccugcccuucggcuggcugaucguggggguggcccuccuggccgucuuccacagcgccuccaagaucaucacgcugaagaagcgcuggcagcucgcgcugagcaagggcgugcacuucgugugcaaccugcuccugcuguucgucaccguguacucccaccuccugcugguggccgccgggcucgaggcccccuuccuguaccuguacgcgcucgucuacuuccugcagagcaucaacuucgugcggaucaucaugcgccuguggcucugcuggaagugccgguccaagaacccccugcuguacgacgccaacuacuuccucugcuggcacaccaacugcuacgacuacugcaucccguacaacagcgugaccuccagcaucgucaucacguccggcgacggcaccaccagccccaucuccgagcacgacuaccagaucgggggcuacaccgagaagugggagagcggggugaaggacugcgugguccugcacuccuacuucacgagcgacuacuaccagcuguacuccacccagcucagcaccgacaccggcguggagcacgugacguucuucaucuacaacaagaucgucgacgagcccgaggagcacgugcagauccacaccaucgacggguccagcggcguggucauggagcccaucuacgacgagccgaccaccacgaccagcgugccccugugaggacuagucccuguucccagagcccacuuuuuuuucuuuuuuugaaauaaaauagccugucuuucagaucucaaaggcucuuuucagagccaccaaaaaaaaaaaaaaaaaaaaaaaaaaaaaaaaaaaaaaaaaaaaaaaaaaaaaaaaaaaaaaaaaaaaaaaaaaaaaaaaaaaaaaaaaaaaaaaaaaaaa

SEQ ID NO: 20546 - RNA, 1100 nt, Artificial Sequence
  SARS-CoV-2__MT827249.1__ORF3a protein mRNA gc
aggagagucccgcagucggcguccagcggcucugcuuguucgugugugugucguugcaggccuuauucaagcuuaccauggaccuguucaugcgcaucuucaccaucggcaccgugacgcucaagcagggggagaucaaggacgccacccccagcgacuucguccgggccaccgcgaccaucccgauccaggccucccugcccuucggcuggcugaucguggggguggcccuccuggccgucuuccacagcgccuccaagaucaucacgcugaagaagcgcuggcagcucgcgcugagcaagggcauccacuucgugugcaaccugcuccugcuguucgugaccgucuacucccaccuccugcugguggccgccgggcucgaggcccccuuccuguaccuguacgcgcucguguacuuccugcagagcaucaacuucguccggaucaucaugcgccuguggcucugcuggaagugccgguccaagaacccccugcuguacgacgccaacuacuuccucugcuggcacaccaacugcuacgacuacugcaucccguacaacagcgugaccuccagcaucgugaucacguccggcgacggcaccaccagccccaucuccgagcacgacuaccagaucgggggcuacaccgagaagugggagagcggggucaaggacugcguggugcugcacuccuacuucacgagcgacuacuaccagcuguacuccacccagcucagcaccgacaccggcgucgagcacgugacguucuucaucuacaacaagaucguggacgagcccgaggagcacguccagauccacaccaucgacggguccagcggcguggugaaccccgucauggagccgaucuacgacgagcccaccaccacgaccagcgugccccugugaggacuagucccuguucccagagcccacuuuuuuuucuuuuuuugaaauaaaauagccugucuuucagaucucaaaggcucuuuucagagccaccaaaaaaaaaaaaaaaaaaaaaaaaaaaaaaaaaaaaaaaaaaaaaaaaaaaaaaaaaaaaaaaaaaaaaaaaaaaaaaaaaaaaaaaaaaaaaaaaaaaaa

SEQ ID NO: 20547 - RNA, 1100 nt, Artificial Sequence
  SARS-CoV-2__MT821572.1__ORF3a protein mRNA gc
aggagagucccgcagucggcguccagcggcucugcuuguucgugugugugucguugcaggccuuauucaagcuuaccauggaccuguucaugcgcaucuucaccaucggcaccgugacgcucaagcagggggagaucaaggacgccacccccagcgacuucguccgggccaccgcgaccaucccgauccaggccucccugcccuucggcuggcugaucguggggguggcccuccuggccgucuuccacagcgccuccaagaucaucacgcugaagaagcgcuggcagcucgcgcugagcaagggcgugcacuucgugugcaaccugcuccugcuguucgucaccguguacucccaccuccugcugguggccgccgggcucgaggcccccuuccuguaccuguacgcgcucgucuacuuccugcagagcaucaacuucgugcggaucaucaugcgccuguggcucugcuggaagugccgguccaagaacccccugcuguacgacgccaacuacuuccucugcuggcacaccaacugcuacgacuacugcaucccguacaacagcgugaccuccagcaucgucaucacguccggcgacggcaccaccagccccaucuccgagcacgacuaccagaucgggggcuacaccgagaagugggagagcggggugaaggacugcgugguccugcacuccuacuucgccagcgacuacuaccagcuguacuccacgcagcucagcaccgacaccggcguggagcacgugaccuucuucaucuacaacaagaucgucgacgagcccgaggagcacgugcagauccacacgaucgacggguccagcggcguggucaaccccgugauggagccgaucuacgacgagcccaccaccaccacgagcgugccccugugaggacuagucccuguucccagagcccacuuuuuuuucuuuuuuugaaauaaaauagccugucuuucagaucucaaaggcucuuuucagagccaccaaaaaaaaaaaaaaaaaaaaaaaaaaaaaaaaaaaaaaaaaaaaaaaaaaaaaaaaaaaaaaaaaaaaaaaaaaaaaaaaaaaaaaaaaaaaaaaaaaaaa

SEQ ID NO: 20548 - RNA, 1100 nt, Artificial Sequence
  SARS-CoV-2__MT821581.1__ORF3a protein mRNA gc
aggagagucccgcagucggcguccagcggcucugcuuguucgugugugugucguugcaggccuuauucaagcuuaccauggaccuguucaugcgcaucuucaccaucggcaccgugacgcucaagcagggggagaucaaggacgccacccccagcgacuucguccgggccaccgcgaccaucccgauccaggccucccugcccuucggcuggcugaucguggggguggcccuccuggccgucuuccagagcgccuccaagaucaucacgcugaagaagcgcuggcagcucgcgcugagcaagggcgugcacuucgugugcaaccugcuccugcuguucgucaccguguacucccaccuccugcugguggccgccgggcucgaggcccccuuccuguaccuguacgcgcucgucuacuuccugcagagcaucaacuucgugcggaucaucaugcgccuguggcucugccggaagugccgcuccaagaacccccugcuguacgacgccaacuacuuccucugcuggcacaccaacugcuacgacuacugcaucccguacaacagcgugaccuccagcaucgucaucacguccggcgacggcaccaccagccccaucuccgagcacgacuaccagaucgggggcuacaccgagaagugggagagcggggugaaggacugcgugguccugcacuccuacuucacgagcgacuacuaccagcuguacuccacccagcucagcaccgacaccggcguggagcacgugacguucuucaucuacaacaagaucgucgacgagcccgaggagcacgugcagauccacaccaucgacggguccagcggcguggucaaccccgugauggagcugaucuacgacgagccgaccaccacgaccagcgugccccugugaggacuagucccuguucccagagcccacuuuuuuuucuuuuuuugaaauaaaauagccugucuuucagaucucaaaggcucuuuucagagccaccaaaaaaaaaaaaaaaaaaaaaaaaaaaaaaaaaaaaaaaaaaaaaaaaaaaaaaaaaaaaaaaaaaaaaaaaaaaaaaaaaaaaaaaaaaaaaaaaaaaaa

SEQ ID NO: 20549 - RNA, 1100 nt, Artificial Sequence
  SARS-CoV-2__MT821673.1__ORF3a protein mRNA gc
aggagagucccgcagucggcguccagcggcucugcuuguucgugugugugucguugcaggccuuauucaagcuuaccauggaccuguucaugcgcaucuucaccaucggcaccgugacgcucaagcagggggagaucaaggacgccacccccagcgacuucguccgggccaccgcgaccaucccgauccaggccucccugcccuucggcuggcugaucguggggguggcccuccuggccgucuuccagagcgccuccaagaucaucacgcugaagaagcgcuggcagcucgcgcugagcaagggcgugcacuucgugugcaaccugcuccugcuguucgucaccguguacucccaccuccugcugguggccgccgggcucgaggcccccuuccuguaccuguacgcgcucgucuacuuccugcagagcaucaacuucgugcggaucaucaugaugcuguggcucugcuggaagugccgcuccaagaacccccugcuguacgacgccaacuacuuccucugcuggcacaccaacugcuacgacuacugcaucccguacaacagcgugaccuccagcaucgucaucacguccggcgacggcaccaccagccccaucuccgagcacgacuaccagaucgggggcuacaccgagaagugggagagcggggugaaggacugcgugguccugcacuccuacuucacgagcgacuacuaccagcuguacuccacccagcucagcaccgacaccggcguggagcacgugacguucuucaucuacaacaagaucgucgacgagcccgaggagcacgugcagauccacaccaucgacggguccagcggcguggucaaccccgugauggagccgaucuacgacgagcccaccaccacgaccagcgugccccugugaggacuagucccuguucccagagcccacuuuuuuuucuuuuuuugaaauaaaauagccugucuuucagaucucaaaggcucuuuucagagccaccaaaaaaaaaaaaaaaaaaaaaaaaaaaaaaaaaaaaaaaaaaaaaaaaaaaaaaaaaaaaaaaaaaaaaaaaaaaaaaaaaaaaaaaaaaaaaaaaaaaaa

SEQ ID NO: 20550 - RNA, 1100 nt, Artificial Sequence
  SARS-CoV-2__MT821764.1__ORF3a protein mRNA gc
aggagagucccgcagucggcguccagcggcucugcuuguucgugugugugucguugcaggccuuauucaagcuuaccauggaccuguucaugcgcaucuucaccaucggcaccgugacgcucaagcagggggagaucaaggacgccacccccagcgacuucguccgggccaccgcgaccaucccgauccaggccucccugcccuucggcuggcugaucguggggguggcccuccuggccgucuuccagagcgccuccaagaucaucacgcugaagaagcgcuggcagcucgcgcugagcaagggcgugcacuucgugugcaaccugcuccugcuguucgucaccguguacucccaccuccugcugguggccgccgggcucgaggcccccuuccuguaccuguacgcgcucgucuacuuccugcagagcaucaacuucgugcggaucaucaugcgccuguggcucugcuggaagugccgguccaagaacccccugcuguacgacgccaacuacuuccucugcuggcacaccaacugcuacgacuacugcaucccguacaacagccugaccuccagcaucgugaucacguccggcgacggcaccaccagccccaucuccgagcacgacuaccagaucgggggcuacaccgagaagugggagagcggggucaaggacugcguggugcugcacuccuacuucacgagcgacuacuaccagcucuacuccacccagcugagcaccgacaccggcgucgagcacgugacguucuucaucuacaacaagaucguggacgagcccgaggagcacguccagauccacaccaucgacggguccagcggcguggugaaccccgucauggagccgaucuacgacgagcccaccaccacgaccagcgugccccugugaggacuagucccuguucccagagcccacuuuuuuuucuuuuuuugaaauaaaauagccugucuuucagaucucaaaggcucuuuucagagccaccaaaaaaaaaaaaaaaaaaaaaaaaaaaaaaaaaaaaaaaaaaaaaaaaaaaaaaaaaaaaaaaaaaaaaaaaaaaaaaaaaaaaaaaaaaaaaaaaaaaaa

SEQ ID NO: 20551 - RNA, 1100 nt, Artificial Sequence
  SARS-CoV-2__MT820461.1__ORF3a protein mRNA gc
aggagagucccgcagucggcguccagcggcucugcuuguucgugugugugucguugcaggccuuauucaagcuuaccauggaccuguucaugcgcaucuucaccaucggcaccgugacgcucaagcagggggagaucaaggacgccacccccagcgacuucguccgggccaccgcgaccaucccgauccaggccucccugcccuucggcuggcugaucguggggguggcccuccuggccgucuuccagagcgccuccaagaucaucacgcugaagaagcgcuggcagcucgcgcugagcgagggcgugcacuucgugugcaaccugcuccugcuguucgucaccguguacucccaccuccugcugguggccgccgggcucgaggcccccuuccuguaccuguacgcgcucgucuacuuccugcagagcaucaacuucgugcggaucaucaugcgccuguggcucugcuggaagugccgguccaagaacccccugcuguacgacgccaacuacuuccucugcuggcacaccaacugcuacgacuacugcaucccguacaacagcgugaccuccagcaucgucaucacguccggcgacggcaccaccagccccaucuccgagcacgacuaccagaucgggggcuacaccgagaagugggagagcggggugaaggacugcgugguccugcacuccuacuucacgagcgacuacuaccagcuguacuccacccagcucagcaccgacaccggcguggagcacgugacguucuucaucuacaacaagaucgucgacgagcccgaggagcacgugcagauccacaccaucgacggguccagcggcguggucaaccccgugauggagccgaucuacgacgagcccaccaccacgaccagcgugccccugugaggacuagucccuguucccagagcccacuuuuuuuucuuuuuuugaaauaaaauagccugucuuucagaucucaaaggcucuuuucagagccaccaaaaaaaaaaaaaaaaaaaaaaaaaaaaaaaaaaaaaaaaaaaaaaaaaaaaaaaaaaaaaaaaaaaaaaaaaaaaaaaaaaaaaaaaaaaaaaaaaaaaa

SEQ ID NO: 20552 - RNA, 1100 nt, Artificial Sequence
  SARS-CoV-2__MT820489.1__ORF3a protein mRNA gc
aggagagucccgcagucggcguccagcggcucugcuuguucgugugugugucguugcaggccuuauucaagcuuaccauggaccuguucaugcgcaucuucaccaucggcaccgugacgcucaagcagggggagaucaaggacgccacccccagcgacuucguccgggccaccgcgaccaucccgauccaggccucccugcccuucggcuggcugaucguggggguggcccuccuggccgucuuccacagcgccuccaagaucaucacgcugaagaagcgcuggcagcucgcgcugagcaagggcgugcacuucgugugcaaccugcuccugcuguucgucaccguguacucccaccuccugcugguggccgccgggcucgaggcccccuuccuguaccuguacgcgcucgucuacuuccugcagagcaucaacuucgugcggaucaucaugcgccuguggcucugcuggaagugccgguccaagaacccccugcuguacgacgccaacuacuuccucugcuggcacaccaacugcuacgacuacugcaucccguacaacagcgugaccucccugaucgucaucacgagcggcgacggcaccaccucccccaucagcgagcacgacuaccagaucgggggcuacaccgagaagugggaguccggggugaaggacugcgugguccugcacagcuacuucacguccgacuacuaccagcucuacagcacccagcuguccaccgacaccggcguggagcacgugacguucuucaucuacaacaagaucgucgacgagcccgaggagcacgugcagauccacaccaucgacgggagcuccggcguggucaaccccgugauggagccgaucuacgacgagcccaccaccacgaccagcgugccccugugaggacuagucccuguucccagagcccacuuuuuuuucuuuuuuugaaauaaaauagccugucuuucagaucucaaaggcucuuuucagagccaccaaaaaaaaaaaaaaaaaaaaaaaaaaaaaaaaaaaaaaaaaaaaaaaaaaaaaaaaaaaaaaaaaaaaaaaaaaaaaaaaaaaaaaaaaaaaaaaaaaaaa

SEQ ID NO: 20553 - RNA, 1100 nt, Artificial Sequence
  SARS-CoV-2__MT810504.1__ORF3a protein mRNA gc
aggagagucccgcagucggcguccagcggcucugcuuguucgugugugugucguugcaggccuuauucaagcuuaccauggaccuguucaugcgcaucuucaccaucggcaccgugacgcucaagcagggggagaucaaggacgccacccccagcgacuucguccgggccaccgcgaccauccugauccaggccucccugccguucggcuggcucaucguggggguggcccugcuggccgucuuccacagcgccuccaagaucaucacgcucaagaagcgcuggcagcuggcgcugagcaagggcgugcacuucgugugcaaccuccugcugcuguucgucaccguguacucccaccuccugcucguggccgccgggcuggaggcccccuuccuguaccucuacgcgcuggucuacuuccugcagagcaucaacuucgugcggaucaucaugcgccucuggcugugcuggaagugccgguccaagaacccccugcucuacgacgccaacuacuuccugugcuggcacaccaacugcuacgacuacugcauccccuacaacagcgugaccuccagcaucgucaucacguccggcgacggcaccaccagcccgaucuccgagcacgacuaccagaucgggggcuacaccgagaagugggagagcggggugaaggacugcgugguccugcacuccuacuucacgagcgacuacuaccagcucuacuccacccagcugagcaccgacaccggcguggagcacgugacguucuucaucuacaacaagaucgucgacgagcccgaggagcacgugcagauccacaccaucgacggguccagcggcguggucaaccccgugauggagcccaucuacgacgagccgaccaccacgaccagcgugccccugugaggacuagucccuguucccagagcccacuuuuuuuucuuuuuuugaaauaaaauagccugucuuucagaucucaaaggcucuuuucagagccaccaaaaaaaaaaaaaaaaaaaaaaaaaaaaaaaaaaaaaaaaaaaaaaaaaaaaaaaaaaaaaaaaaaaaaaaaaaaaaaaaaaaaaaaaaaaaaaaaaaaaa

SEQ ID NO: 20554 - RNA, 1100 nt, Artificial Sequence
  SARS-CoV-2__MT810687.1__ORF3a protein mRNA gc
aggagagucccgcagucggcguccagcggcucugcuuguucgugugugugucguugcaggccuuauucaagcuuaccauggaccuguucaugcgcaucuucaccaucggcaccgugacgcucaagcagggggagaucaaggacgccacccccagcgacuucguccgggccaccgcgaccaucccgauccaggccucccugcccuucggcuggcugaucguggggguggcccuccuggccgucuuccagagcgccuccaagaucaucacgcugaagaagcgcuggcagcucgcgcugagcaagggcgugcacuucgugugcaaccugcuccugcuguucgucaccguguacucccaccuccugcugguggccgccgggcucgaggcccccuuccuguaccuguacgcgcucgucuacuuccugcagagcaucaacuucgugcggaucaucaugcgccuguggcucugcuggaagugccgguccaagaacccccugcuguacgacgccaacuacuuccucugcuggcacaccaacugcuacgacuacugcaucccguacaacagcgugaccuccagcaucgucaucacguccggcgacggcaccaccagccccaucuccgagcacgaccaccagaucgggggcuacaccgagaagugggagagcggggugaaggacugcgugguccugcacuccuacuucacgagcgacuacuaccagcuguacuccacccagcucagcaccgacaccggcguggagcacgugacguucuucaucuacaacaagaucgucgacgagcccgaggagcacgugcagauccacaccaucgacggguccagcggcguggucaaccccgugauggagccgaucuacgacgagcccaccaccacgaccagcgugccccugugaggacuagucccuguucccagagcccacuuuuuuuucuuuuuuugaaauaaaauagccugucuuucagaucucaaaggcucuuuucagagccaccaaaaaaaaaaaaaaaaaaaaaaaaaaaaaaaaaaaaaaaaaaaaaaaaaaaaaaaaaaaaaaaaaaaaaaaaaaaaaaaaaaaaaaaaaaaaaaaaaaaaa

SEQ ID NO: 20555 - RNA, 1100 nt, Artificial Sequence
  SARS-CoV-2__MT810721.1__ORF3a protein mRNA gc
aggagagucccgcagucggcguccagcggcucugcuuguucgugugugugucguugcaggccuuauucaagcuuaccauguaccuguucaugcgcaucuucaccaucggcaccgugacgcucaagcagggggagaucaaggacgccacccccagcgacuucguccgggccaccgcgaccaucccgauccaggccucccugcccuucggcuggcugaucguggggguggcccuccuggccgucuuccagagcgccuccaagaucaucacgcugaagaagcgcuggcagcucgcgcugagcaagggcgugcacuucgugugcaaccugcuccugcuguucgucaccguguacucccaccuccugcugguggccgccgggcucgaggcccccuuccuguaccuguacgcgcucgucuacuuccugcagagcaucaacuucgugcggaucaucaugcgccuguggcucugcuggaagugccgguccaagaacccccugcuguacgacgccaacuacuuccucugcuggcacaccaacugcuacgacuacugcaucccguacaacagcgugaccuccagcaucgucaucacguccggcgacggcaccaccagccccaucuccgagcacgacuaccagaucgggggcuacaccgagaagugggagagcggggugaaggacugcgugguccugcacuccuacuucacgagcgacuacuaccagcuguacuccacccagcucagcaccgacaccggcguggagcacgugacguucuucaucuacaacaagaucgucgacgagcccgaggagcacgugcagauccacaccaucgacggguccagcggcguggucaaccccgugauggagccgaucuacgacgagcccaccaccacgaccagcgugccccugugaggacuagucccuguucccagagcccacuuuuuuuucuuuuuuugaaauaaaauagccugucuuucagaucucaaaggcucuuuucagagccaccaaaaaaaaaaaaaaaaaaaaaaaaaaaaaaaaaaaaaaaaaaaaaaaaaaaaaaaaaaaaaaaaaaaaaaaaaaaaaaaaaaaaaaaaaaaaaaaaaaaaa

SEQ ID NO: 20556 - RNA, 1100 nt, Artificial Sequence
  SARS-CoV-2__MT810727.1__ORF3a protein mRNA gc
aggagagucccgcagucggcguccagcggcucugcuuguucgugugugugucguugcaggccuuauucaagcuuaccauggaccuguucaugcgcaucuucaccaucggcaccgugacgcucaagcagggggagaucaaggacgccacccccagcgacuucguccgggccaccgcgaccaucccgauccaggccucccugcccuucggcuggcugaucguggggguggcccuccuggccgucuuccacagcgccuccaagaucaucacgcugaagaagcgcuggcagcucgcgcugagcaagggcgugcacuucgugugcaaccugcuccugcuguucgucaccguguacucccaccuccugcugguggccgccgggcucgaggcccccuuccuguaccuguacgcgcucgucuacuuccugcagagcaucaacuucgugcggaucaucaugcgccuguggcucugcuggaagugccgguccaagaacccccugcuguacgacgccaacuacuuccucugcuggcacaccaacugcuacgacuacugcaucccguacaacagcgugaccuccagcaucgucaucacguccggcgacggcaccaccagccccaucuccgagcacgacuaccagaucgggggcuacaccgagaagugggagagcggggugaaggacugcgugguccugcacuccuacuucacgagcgacuacuaccagcuguacuccacccagcucagcaccgacaccggcguggagcacgugacguucuucaucuacaacaagaucgucgacgagcccgaggagcacgugcagauccacaccaucgacggguccagcggcguggucaaccccgugauggagccgaucuacgacgagcccaccaccacgaccaucgugccccugugaggacuagucccuguucccagagcccacuuuuuuuucuuuuuuugaaauaaaauagccugucuuucagaucucaaaggcucuuuucagagccaccaaaaaaaaaaaaaaaaaaaaaaaaaaaaaaaaaaaaaaaaaaaaaaaaaaaaaaaaaaaaaaaaaaaaaaaaaaaaaaaaaaaaaaaaaaaaaaaaaaaaa

SEQ ID NO: 20557 - RNA, 1100 nt, Artificial Sequence
  SARS-CoV-2__MT810789.1__ORF3a protein mRNA gc
aggagagucccgcagucggcguccagcggcucugcuuguucgugugugugucguugcaggccuuauucaagcuuaccauggaccuguucaugcgcaucuucaccaucggcaccgugacgcucaagcagggggagaucaaggacgccacccccagcgacuucguccgggccaccgcgaccaucccgauccaggccucccugcccuucggcuggcugaucguggggguggcccuccuggccgucuuccagagcgccuccaagaucaucacgcugaagaagcgcuggcagcucgcgcugagcaagggcgugcacuucgugugcaaccugcuccugcuguucgucaccguguacucccaccuccugcugguggccgccgggcucgaggcccccuuccuguaccuguacguccucguguacuuccugcagagcaucaacuucgugcggaucaucaugcgccuguggcucugcuggaagugccgguccaagaacccccugcuguacgacgcgaacuacuuccucugcuggcacaccaacugcuacgacuacugcaucccguacaacagcgucaccuccagcaucgugaucacguccggcgacggcaccaccagccccaucuccgagcacgacuaccagaucgggggcuacaccgagaagugggagagcggggugaaggacugcgucgugcugcacuccuacuucacgagcgacuacuaccagcuguacuccacccagcucagcaccgacaccggcguggagcacgucacguucuucaucuacaacaagaucguggacgagcccgaggagcacgugcagauccacaccaucgacggguccagcggcgucgugaaccccgugauggagccgaucuacgacgagcccaccaccacgaccagcgucccccugugaggacuagucccuguucccagagcccacuuuuuuuucuuuuuuugaaauaaaauagccugucuuucagaucucaaaggcucuuuucagagccaccaaaaaaaaaaaaaaaaaaaaaaaaaaaaaaaaaaaaaaaaaaaaaaaaaaaaaaaaaaaaaaaaaaaaaaaaaaaaaaaaaaaaaaaaaaaaaaaaaaaaa

SEQ ID NO: 20558 - RNA, 1100 nt, Artificial Sequence
  SARS-CoV-2__MT810827.1__ORF3a protein mRNA gc
aggagagucccgcagucggcguccagcggcucugcuuguucgugugugugucguugcaggccuuauucaagcuuaccauggaccuguucaugcgcaucuucaccaucggcaccgugacgcucaagcagggggagaucaaggacgccacccccagcgacuucguccgggccaccgcgaccaucccgauccaggccucccugcccuucggcuggcugaucguggggguggcccuccuggccgucuuccacagcgccuccaagaucaucacgcugaagaagcgcuggcagcucgcgcugagcaagggcgugcacuucgugugcaaccugcuccugcuguucgucaccguguacucccaccuccugcugguggccgccgggcucgaggcccccuuccuguaccuguacgcgcucgucuacuuccugcagagcaucaacuucgugaagaucaucaugcggcuguggcucugcuggaagugccgcuccaagaacccccugcuguacgacgccaacuacuuccucugcuggcacaccaacugcuacgacuacugcaucccguacaacagcgugaccuccagcaucgucaucacguccggcgacggcaccaccagccccaucuccgagcacgacuaccagaucgggggcuacaccgagaagugggagagcggggugaaggacugcgugguccugcacuccuacuucacgagcgacuacuaccagcuguacuccacccagcucagcaccgacaccggcguggagcacgugacguucuucaucuacaacaagaucgucgacgagcccgaggagcacgugcagauccacaccaucgacggguccagcggcguggucaaccccgugauggagccgaucuacgacgagcccaccaccacgaccagcgugccccugugaggacuagucccuguucccagagcccacuuuuuuuucuuuuuuugaaauaaaauagccugucuuucagaucucaaaggcucuuuucagagccaccaaaaaaaaaaaaaaaaaaaaaaaaaaaaaaaaaaaaaaaaaaaaaaaaaaaaaaaaaaaaaaaaaaaaaaaaaaaaaaaaaaaaaaaaaaaaaaaaaaaaa

SEQ ID NO: 20559 - RNA, 1100 nt, Artificial Sequence
  SARS-CoV-2__MT810843.1__ORF3a protein mRNA gc
aggagagucccgcagucggcguccagcggcucugcuuguucgugugugugucguugcaggccuuauucaagcuuaccauggaccuguucaugcgcaucuucaccaucggcaccgugacgcucaagcagggggagaucaaggacgccacccccagcgacuucguccgggccaccgcgaccaucccgauccaggccucccugcccuucggcuggcugaucguggggguggcccuccuggccgucuuccagagcgccuccaagaucaucacgcugaagaagcgcuggcagcucgcgcugagcaagggcgugcacuucgugugcaaccugcuccugcuguucgucaccguguacucccaccuccugcugguggccgccgggcucgaggcccccuuccuguaccuguacgcgcucgucuacuuccugcagagcaucaacuucgugcggaucaucaugcgccuguggcucugcuggaagugccgguccaagaacccccugcuguacgacgccaacuacuuccucugcuggcacaccaacugcuacgacuacugcaucccguacaacagcgugaccucccugaucgucaucacgagcggcgacggcaccaccucccccaucagcgagcacgacuaccagaucgggggcuacaccgagaagugggaguccggggugaaggacugcgugguccugcacagcuacuucacguccgacuacuaccagcucuacagcacccagcuguccaccgacaccggcguggagcacgugacguucuucaucuacaacaagaucgucgacgagcccgaggagcacgugcagauccacaccaucgacgggagcuccggcguggucaaccccgugauggagccgaucuacgacgagcccaccaccacgaccagcgugccccugugaggacuagucccuguucccagagcccacuuuuuuuucuuuuuuugaaauaaaauagccugucuuucagaucucaaaggcucuuuucagagccaccaaaaaaaaaaaaaaaaaaaaaaaaaaaaaaaaaaaaaaaaaaaaaaaaaaaaaaaaaaaaaaaaaaaaaaaaaaaaaaaaaaaaaaaaaaaaaaaaaaaaa

SEQ ID NO: 20560 - RNA, 1100 nt, Artificial Sequence
  SARS-CoV-2__MT810882.1__ORF3a protein mRNA gc
aggagagucccgcagucggcguccagcggcucugcuuguucgugugugugucguugcaggccuuauucaagcuuaccauggaccuguucaugcgcaucuucaccaucggcaccgugacgcucaagcagggggagaucaaggacgccacccccagcgacuucguccgggccaccgcgaccaucccgauccaggccucccugcccuucggcuggcugaucguggggguggcccuccuggccgucuuccacagcgccuccaagaucaucacgcugaagaagcgcuggcagcucgcgcugagcaagggcgugcaguucgugugcaaccugcuccugcuguucgucaccguguacucccaccuccugcugguggccgccgggcucgaggcccccuuccuguaccuguacgcgcucgucuacuuccugcagagcaucaacuucgugcggaucaucaugcgccuguggcucugcuggaagugccgguccaagaacccccugcuguacgacgccaacuacuuccucugcuggcacaccaacugcuacgacuacugcaucccguacaacagcgugaccuccagcaucgucaucacguccggcgacggcaccaccagccccaucuccgagcacgacuaccagaucgggggcuacaccgagaagugggagagcggggugaaggacugcgugguccugcacuccuacuucacgagcgacuacuaccagcuguacuccacccagcucagcaccgacaccggcguggagcacgugacguucuucaucuacaacaagaucgucgacgagcccgaggagcacgugcagauccacaccaucgacggguccagcggcguggucaaccccgugauggagccgaucuacgacgagcccaccaccacgaccagcgugccccugugaggacuagucccuguucccagagcccacuuuuuuuucuuuuuuugaaauaaaauagccugucuuucagaucucaaaggcucuuuucagagccaccaaaaaaaaaaaaaaaaaaaaaaaaaaaaaaaaaaaaaaaaaaaaaaaaaaaaaaaaaaaaaaaaaaaaaaaaaaaaaaaaaaaaaaaaaaaaaaaaaaaaa

SEQ ID NO: 20561 - RNA, 1100 nt, Artificial Sequence
  SARS-CoV-2__MT810900.1__ORF3a protein mRNA gc
aggagagucccgcagucggcguccagcggcucugcuuguucgugugugugucguugcaggccuuauucaagcuuaccauggaccuguucaugcgcaucuucaccaucggcaccgugacgcucaagcagggggagaucaaggacgccacccccagcgacuucguccgggccaccgcgaccaucccgauccaggccucccugcccuucggcuggcugaucguggggguggcccuccuggccgucuuccacagcgccuccaagaucaucacgcugaagaagcgcuggcagcucgcgcugagcaagggcgugcacuucgugugcaaccugcuccugcuguucgucaccguguacucccaccuccugcugguggccgccgggcucgaggcccccuuccuguaccuguacgcgcucgucuacuuccugcagagcaucaacuucgugcggaucaucaugcgccuguggcucugcuggaagugccgguccaagaacccccugcuguacgacgccaacuacuuccucugcuggcacaccaacugcuacgacuacugcaucccguacaacagcgugaccuccagcaucgucaucacguccggcgacggcaccaccagccccaucuccgagcacgacuaccagaucgggggcuacaccgagaagugggagagcgggcugaaggacugcguggugcugcacuccuacuucacgagcgacuacuaccagcucuacuccacccagcugagcaccgacaccggcgucgagcacgugacguucuucaucuacaacaagaucguggacgagcccgaggagcacguccagauccacaccaucgacggguccagcggcguggugaaccccgucauggagccgaucuacgacgagcccaccaccacgaccagcgugccccugugaggacuagucccuguucccagagcccacuuuuuuuucuuuuuuugaaauaaaauagccugucuuucagaucucaaaggcucuuuucagagccaccaaaaaaaaaaaaaaaaaaaaaaaaaaaaaaaaaaaaaaaaaaaaaaaaaaaaaaaaaaaaaaaaaaaaaaaaaaaaaaaaaaaaaaaaaaaaaaaaaaaaa

SEQ ID NO: 20562 - RNA, 1100 nt, Artificial Sequence
  SARS-CoV-2__MT810942.1__ORF3a protein mRNA gc
aggagagucccgcagucggcguccagcggcucugcuuguucgugugugugucguugcaggccuuauucaagcuuaccauggaccuguucaugcgcaucuucaccaucggcaccgugacgcucaagcagggggagaucaaggacgccacccccagcgacuucguccgggccaccgcgaccaucccgauccaggccucccugcccuucggcuggcugaucguggggguggcccuccuggccggcuuccagagcgccuccaagaucaucacgcugaagaagcgcuggcagcucgcgcugagcaaggggguccacuucgugugcaaccugcuccugcuguucgugaccgucuacucccaccuccugcugguggccgccggccucgaggcccccuuccuguaccuguacgcgcucguguacuuccugcagagcaucaacuucguccggaucaucaugcgccuguggcucugcuggaagugccgguccaagaacccccugcuguacgacgccaacuacuuccucugcuggcacaccaacugcuacgacuacugcaucccguacaacagcgugaccuccagcaucgugaucacguccggcgacgggaccaccagccccaucuccgagcacgacuaccagaucggcggguacaccgagaagugggagagcggcgucaaggacugcguggugcugcacuccuacuucacgagcgacuacuaccagcuguacuccacccagcucagcaccgacaccggggucgagcacgugacguucuucaucuacaacaagaucguggacgagcccgaggagcacguccagauccacaccaucgacggcuccagcggcguggugaaccccgucauggagccgaucuacgacgagcccaccaccacgaccagcgugccccugugaggacuagucccuguucccagagcccacuuuuuuuucuuuuuuugaaauaaaauagccugucuuucagaucucaaaggcucuuuucagagccaccaaaaaaaaaaaaaaaaaaaaaaaaaaaaaaaaaaaaaaaaaaaaaaaaaaaaaaaaaaaaaaaaaaaaaaaaaaaaaaaaaaaaaaaaaaaaaaaaaaaaa
